United States Patent Application Publication US 2014/0004565 A1 - sequence listing, part 4

SEQ ID NO: 3636 - DNA, 1637 bp, Cricetulus griseus
gtttttgctgggcaactgaaaaggctgttgtcaagatggagtttccaactcagtaatccaaggaccagaccctgagttcataaagcatgatctccttctgtccagtctgtggcaaaagtgtccaggtatcattcaacttctgcccgtactgtggcaaggccctacctgtagaggagcatgcaggaacccagactggcaaaacacctcttgtgtcatcctttcgaggctcaaggaaagagctgaacttcagttctaaaacctctcccaagacagtgaaatggtcacacactgtcacttctctccaaaccacctccctctctgactgtgacagttctgagtctgaaaataccttgagttctcctgagagagccacaggcacctggagcagaccccccacccccagaggcagcccacagtcctccaggctaagtcctcagacgctgaagcggagccgggtgaccacctcactccaggctttgcccacagggacagagctaacagacaagaaagggcaacactggacactgggggccctccaggcccgggatgaccaaggcattctctatgaagctgagcccacttctgtcctcccctgtgaagcaagaactcggaagcatagattctcactcaaactggactctaaggatgggcgccttttcaatgagcagaacttctttcagagggcagccaagcctgcacaagtgagcaagtggaagaagcagtgcatggtcccgctcctggccatccccgcctgcgtcggctttggcattcaccaggacaagtacagattcctggtattccccagtctggggaggagccttcagtcagccctggatgataacccaaagcacatagtatcagagagatgtgttctgcaggtggcctgcaggctgctggatgctctgcagttcctccatgacaatgagtatgttcatgggaatctgacagctgagaatgtctttgtgaatccagaagatctaagccaggtgaccctggtgggatatggcttcaccttccgctactgtcccggtggcaaacatgtgacctacaaagaaggcagcagaagcccacacgagggagacctggagttcattagtgtggacacgcacaagggatgcgggccctcccgccgcagtgacctccagaccttgggctactgtatgctcaagtggctttatgggtccctgccatggacaagctgccttcccaacactgaggagatcactaggcagaagcagatgtatcagcacaaccctgacctctttgtgggactgtgtcgccgctggagcaaggcctcagagaccctgcaggagtacctgaaggtggtgatggccctcaattacgaggagaagcctccttatgccatgctgaggaacaatctagaagccctgctgaaggatcttcgggtgtcaccctatgaccccctggacctccagatggtgccttaggtggaatccagaacgtctgacttgcagcttgaaatagaacatgaagtggtgtggctggaggctttctgtttgaactcatacactcctaaaagagtcccatgagtgtgtgcttccactgctccttaggacataagaatcagcaataaacttgtttattcaaaaaaaaaaaaaaaaaaaaaaaaaaaaaaa

SEQ ID NO: 3637 - DNA, 1637 bp, Cricetulus griseus
caaaggctcagcaggagttggtgaagcaactttccattcttcctcgtgacaactacagtctcctgagctacatttgcagatttttgcatgaaatccagctgaactgtgccgtcaacaagatgagcgtggacaacctggccactgtgattggagtgaacctcatcaggtcaaaggtggaggacccagctgtgatcatgagagggactcctcagatccaaagagtgatgaccatgatgatcagagaccacgaagtcctcttccccaagtctaaggatgcgccactgtcaccccctgtccagaaaaatgatgctaagaaggctccagtgccccggagctctgtaggatgggatgccacagaagacccaccactctccaggacagacagcttcaataacacggcaagtagtcctgatgccaccagtcctacaggaccacaaccaagtgaccagcatcaggaggacagtgggaaagcccccagggaaaacccaggagactggaaggtgcaatctcggaaaaggactcaaacgctccctaaccggaagtgtttcctgacgtcagcattccaaggcaccagtagcagcaaactggaaatctttaaaaacgagttctggtcttcatcttcagaggctaagacaggggaagggcacaggagaactgtgtctcaagacttgcgccacctttccaatgaccagcggacttctacctatgataacgtccctgccccactagggcccccagggagtccagcaggtgtactctctcctcctgcctgtgactccaagagagacgttcttggcagcagggactctgaaatggaatctggaagcaagagctctggagaggatgaccttgactctttgcagaggatggtccagcatctacaaaaggagatagaaacccagaagcacatgtatgaggaacagattaaaaacctggagaaggagaactatgatgtctgggctaaggtggtgaggctcaatgaagagctggagacagagaagaagaagttcgcagccctggaaatcagccttcgaaatgtggagcgctcccgggaggacgttgagaggaggaacaaggtattggaagaagaagtcaaggagtttgtgaagtcaatgaagaagccagagacaaagaccgaggcttgaggttctgggatgtgtggcagggacggtcaactccatttcagttctccatgctcctgatgactgggaagcagagtcacctcctaagatggaccagatatctgaggggagcgctacagtgctcagcaaacaaacagaagatggtgtgtgggagcacagcagggcacttgactgtgggaagagcgaactgggatcttccagtgtatgaccaggtccaaaggagacatttaaggtgtgtggcatctcaggacccaggccagagctaggccaaggcctcaggtctttgttttctatgtggctaacctgcctggtcagatgactggttagctctgagacatgcgcagaacatgacgcttaactctcaagtacgaactcaatgaggactctctggggaggctgggctgttggaaccagaatcataacaatgaggtgtatttatgaaaacaaaattggggagaaatttatgttcaaataaaacaaaaaggaaaacaaaaa

SEQ ID NO: 3638 - DNA, 1636 bp, Cricetulus griseus
cagcggggtcctgttccactccaaccccgcctttgcagccggcggcagagcacaagcccgggcccggggcgcgtgccgaagatgccgccgaggggcgagtccggcaccgcgaggaaggcgtgcccggggaccccggggctgtagtggaggacaacttagccaggatccgtgaaaaccacgagcgggctctcagggaagccaaggagaccctgcagaagctgcccgaagaaattcaaagagacattctgctggagaaggaaaaggtggcccaggaccatatgcgtgacaaggagctgtttgggggcctgcccaaggtggacttcctacctcccatcggggtagagaaccgagagccagctgatgccaccatccgcgagaagagagcaaagatcaaagagatgatgaaccatgcttggaataattataaacgctaatgcctggggcttaaatgaactgaagcctataatcaaaagaaggaccattcaagcagtttatttggcaacatcaaaaggagtcgcagagtggaaaggaggcctcctggaacacaaaatgggccacctgacctgctttgcagggggtatgtttgcccttggggcagatggagctcccgaagccctggcccaacactaccttgaacttggagctgaaatcgcacgcacctgtcatgaatcttacaatcgcaccttcatgaagctgggaccagaagctttccgatttgatggcggtgtggaagccattgccacgaggcaaaatgaaaagtactacatcttacggcctgaagtcatcgagacttacatgtacatgtggcgactgactcatgaccccaagtacagaacctgggcctgggaagccgtagaggccctagaaaaccactgccgagtgaacggaggctactcgggcctacgggatgtttactttgctagtgagagttatgacgatgtccagcaaagtttcttcctggcagagacactaaagtatttgtacttgatattttctgatgatgaccttcttccactagaacactgggtcttcaatactgaggcacaccctttccccatactccgagacgagaaaaaggaaattgaagtcaaagagaaatgaaagacactttctactttactctgcttcgtccctcactgcataccttaattcctttcctcatcatcagacacatgatgaacttttgttgatagataaaagcctatgaatatacctaattcaagttcatgttaatctggtttgtctatccaccagagaaagatctcataactgtgacagcctcttagcaggtctatcgttatttgatagaatgtcttctaaagtactccactcacattgcaattctgatgagaacgtcatcccagaagagtcagcccccttgacctcatttcattgcagtgtgttttcgttttttgattgttcgtgtttccgcacttttgaatttcttcactacttctactttaaatgccctgtgtcatctctgtatcacatactgcttaatttcttccattccccactcgcccagcaaggtgagcacttgagttctgcagagcgcccctgttactcaattacatttttgaaagggaaacgatagttaacttttaacctgccaggtcttgtctttttaactgaatcc

SEQ ID NO: 3639 - DNA, 1636 bp, Cricetulus griseus
cggccgtgcttgatgggtctggccggtcttctgacatgaagccccctggacctagaggttggtgcctgctgtgacacgcccaccatgtggccacttcttcatgtcctctggcttgctctggcctgtggctctgttcacaccaccctgtcaaagtcagatgccaaaaaagctgcctcaaagttgctgctggaaaagactcagttttcagataaacctgtccaagatcggggtctggtggtgacggacgtcaaagctgaggatgtggtccttgaacatcgtagctactgttcagctagggctcgggagagaaactttgctggagaggtcctaggctacgtcactccatggaacagccacggctatgatgttgccaaggtctttgggagcaagttcacacagatctcaccagtctggctgcagctgaagagacgtggtcgtgagatgttcgaaatcacaggcctccatgatgtggaccaagggtggatgcgagctgtcaaaaagcatgccaaaagcctgcgcatagtgcctcggcttctctttgaagactggacttacgatgatttccggaatgtcttagacagtgaggatgaaatagaagaactcagcaagactgtgatacaggtggcaaagaaccagcattttgacggttttgtggtggaagtctggagccagttgctgagccagaaacatgtaggcctcatccacatgcttactcacttggctgaggcgctgcaccaggccaggctgctagccattctggtcatcccacctgctgtcacccctgggactgaccagctgggaatgttcacacacaaggagtttgaacaactggcccctgtactagatggcttcagcctcatgacatatgactactccacatcacagcatcctggccctaatgctccattgtcatggattagagcctgtgtccaggtcctagaccccaagtcacagtggcgaagcaagatcctcctgggactgaacttctatggcatggattatgcagcctccaaggatgcccgtgaaattgtcattgggcccaggtatatacagacgctgaaggaccacaggccccgagtggtgtgggacagccaggctgcggagcacttcttggagtacaagaagaatcgcggagggaggcatgttgtcttctaccctactctgaagtctctgcaggtgcggctggagctagccagggagctgggcgtcggggtctccatctgggagctgggccaaggcctggattacttctatgacctgctgtaggctggacagcaacgcccaagtgactatggacttttctaagccattggagtgactggtgaaatataggcctcttttctgttttctggtgagacatctgctatggtcactccttcattccaagttccttcatcccgctcttctccacccctagttaagaagaccctgccttgatgtctctgctcacacgctttattaagatgcacccgggaccacgacaccatcatggaatgtgaatcatgggacctggtctggcctggagcaccaggaccatcgtgggccttgagcagactgggcctgcctccaacctggcatccatgcaggggttggggaccctatcctgtgtgaatacgtggaagatatatatggatat

SEQ ID NO: 3640 - DNA, 1636 bp, Cricetulus griseus
agctggcgagctgctttggcggaggcggcgccgagtagcgcgcggaggaaggaggtcggttcggcgacgccggcggaaacctgagtccgggcgggaggcccgacggcgggaggcgacatgtcggttgcggggctgaagaagcagttctacaaggcgagccagctggtcagcgagaaggttggcggggccgaggggaccaagctagatgatgacttcaaagagatggaaaagaaggtggatgtcaccagcaaggccgtggcagaagtgctggtcagaaccattgagtacctgcagcccaacccagcctcaagggccaagctgacaatgctgaacactgtatccaagatccggggccaagtgaagaatcctggctaccctcagtcagaggggctgctgggcgagtgcatggtccgccatggcaaggaactgggtggagagtccaattttggtgatgccctgttggatgcaggtgagtccatgaagcgcctggctgaggtgaaggactctctagacatcgaagttaaacagaatttcatcgatccactgcagaatctgtgtgacaaggacctgaaggagatccagcaccacctgaagaagctggagggccgccgcctggactttgactacaagaagaagcgacagggcaagatccccgatgaggagctacgccaggccctggagaagtttgaggagtccaaggaggtggcggagaccagcatgcacaaccttctggagactgatattgagcaggtaagccagctctcggccctggtagatgcccagctggactaccaccggcaagcagtgcagatcctggaggagctggcagacaagctgaagcgtcgggtgcgggaagcctcctcacgccctaagcgggagttcaagccccggccacgggagcccttcgaccttggagagctggagcagcccaatgggggattcccctgtgccccagcacccaagatcacagcttcctcatcattcagatcaggggacaagcctgccaggacgcccagcaggagtatgccacccctggaccagccaagctgcaaggcactatatgactttgagcctgagaatgatggcgagctgggcttccgcgagggcgacctcatcactctcaccaaccagatcgatgagaactggtacgaggggatgctgcacggccaatcgggcttcttcccactcagctatgtgcaggtgctagtgcccctgcctcagtgaccgcgcctgcacactggctgcctgcacgttgcggcagcagcctaacgccaaggtgctctagaaacactaacgttcctccaggaggaccctccgccccacactcccagccctgggtcctccatcctaagacttgggaaggcccaccctgaggtcctgtcaccttcctggtggtgtcagctcccacctgtttgaaaccctcccagcccgttgctggcgatgggccctggctcctcctccaggctccccaaaagcaagcaggtccttggggtccccagcctgcaagctgaggctggccagtaccccagtctggcacacggaggaggcctccagcctgggctcagtcacattcctctctacagcagtcccacaacctatggctcgtccctggcatgtggggccacaccccacaccc

SEQ ID NO: 3641 - DNA, 1635 bp, Cricetulus griseus
gcccggccgtgtggagcgccgggagccaatccgggcctcctaggcgaagatggtggactacagcgtttgggatcacatcgaggtgtcggacgatgaggacgagacgcaccccaacatcgacacggccagcctcttccgctggcggcaccaggcccgagtggagcgcatggagcagtttcagaaggagaaggacgaactggaccggggctgccgtgaatgcaagcgaaaggtagccgaatgccaacgcaagctgagggagctggaagtggctgaaggcggtggccaggtggagcttgagcggctgcgagctgaggcacagcagctgcgcaaggaggagcgaagctgggagcagaagctggaggacatgcgcaagaaggagaagagcatgccctggaacgtggacaccctcagcaaggacggcttcagcaagagcatagtcaatatcaagcctgagaaggcagaggaagactcagaggaggcaagagagcagaaacacaagaccttcgttgaaaagtacgagaaacagatcaagcatttcggcatgctccaccgctgggatgacagccagaagtacctgtcagacaatgtccacctggtgtgcgaggagaccgccaactacctggttatctggtgcattgacctggaagtggaggagaaatgtgcactgatggagcaggtagctcaccagaccatggtgatgcagttcattctggagctggccaagagtctgaaggtcgatccccgtgcctgcttcaggcagttcttcaccaagatcaagaccgccgaccaacagtacatggagggcttcaaatacgaactggaggcctttaaggagcgtgtgcggggccgtgccaagctgcgcatagagaaggccatgaaggagtacgaggaggaggagcgcaagaagaggctgggccctggtggcctggaccccgtggaggtctatgagtccctgcctgaggaactgcagaagtgctttgatgtgaaggacgtgcaaatgctgcaagatgccatcagcaagatggatcccactgatgccaagtttcacatgcagcgttgcatcgattctgggctctgggtccccaactccaagtctggtgaggccaaggagggggaggaggcgggccccggggacccattgctggaagccgtccccaaagcgggcaacgagaaagacgtcagtgcgtgacccttctccagaaaaggaaacctagacaccatgttcctagctcctgactccttcacttctgctgccctcacgtcccagcccatggcttgccccgtgtcccctctcttccagcctgtccctagcactcagactttctgcttcgggttgaggggctctgctgtctgcagcccctggcccccaatcagcattatgccaaagtcctgggggtctggggaggggcagcagttgccaggttggtccactgggttggggatacacatgttcccaaatgggcagggcctgtccctatgggtctgtgatcactgtttttcttctgtctagctttctgtcctgcaactggcaacaatgtctaataaacagttccaggtgctggaagacaatgactcaatgctgtttgaggcagagagtgaacctaggtgagggagaaccagagtcccgacagccat

SEQ ID NO: 3642 - DNA, 1635 bp, Cricetulus griseus
cggacggaggcgagatggcggccactgagggggtcggggaatctgcgccaggcggcgaggccggacaggcagagcagccgccgcccccgcctcccccgccgccagtgcagcagccgcaggaagaagagatggcggccgaggccggggaagcggcggcgtcccctatggacgacgggtttctgagcctggactctcccacctatgtcttgtacagggacagggcagaatgggctgatatagacccggtaccacagaatgatggccctaatccagtggtgcagatcatctacagtgaaaagtttagagatgtttatgattacttccgagctgttctgcagcgtgatgagagaagcgaacgagcctttaagctcacccgggatgctattgagttaaacgcagccaactatacagtgtggcattttcggagggttctcttaaggtcacttcaaaaggatctgcaagaggaaatgaactacatcactgcaataattgaggaacagcccaaaaactatcaagtttggcaccataggagagtattagtggaatggcttaaagatccctctcaagagcttgagttcattgctgatattcttaatcaggatgcaaagaattatcatgcctggcagcatcgacagtgggtcattcaggaatttcgactatgggataatgagctacagtatgtagaccagcttctcaaagaggatgtgagaaataactctgtctggaaccaaagacactttgtcatttccaataccactggctacagtgatcgtgccgtgctggagagagaagtccagtatactctggaaatgatcaaattagtaccacataatgaaagtgcatggaactacttgaaagggattttgcaggatcgtggtctttccagataccctaacctattaaatcaactgctcgatttacaaccaagtcacagttccccctacctaattgcctttcttgtggatatctatgaagacatgctagaaaaccaatgtgacaacaaggaggacattcttaataaagcattagagttatgtgagatcctagctaaagaaaaggacactataagaaaggaatattggagatatattggaagatcccttcaaagtaaacacagcagagaaagtgacataccaacgagtgtatagcagtgagagcgtctggacgaagtggatgccgctttctttctaagggcctctaacgcaggagtataaaactagagtgaccatcccttgcctgtgcgctaaagttgttgcccaggtgctgtttttaacaagaactaagtacgatactcctgtgtgctgatgctgttcagactagctctaagaaatgagttcttctaaagcaaggtcattggaggggagggtgaaggacttcccataaaggaactgctgcttttgtagtcttaccaacatttaatccagtcccgtagaatctactcttctggaaaggtgtatgtgcaaggctttgtgctggtagtgacattgatttgcagtaacttaaatcttggtgcattaaacagggactgcaactgttgaatagagctgctgtgccacactcacggtatcttgctatcactgtaaccaactaatgccaaaagaaaggttttataataaaatcacatgtatctataaa

SEQ ID NO: 3643 - DNA, 1635 bp, Cricetulus griseus
tagtctgtcaagtgagtcccatgccagggcccgtgggtgcaggccctgtccctcattgcctgcctgcctcccgcctgctcccgcgggtcacctctgtccaccttcctgacaacgctcattattacaccattgggcccggcatgttcccgtcatctcagatccctagctggaaggactgggcaaagccaggaccctacgaccagccactggtgaacaccctccagcgccgcaaagagaaacgtgaggcggactccaatgggggaggacccgccaccacgggaggtcctcctgcagctgccgaagaggtgcagagacccaggagcatgaccatgtcggctgccaccaggcctggtgaggagatggaggcctgtgaggaactggcgctcgccctgtcacggggcctccagctggacatgcagaggagtagccgagactcactgcagtgctccagcggctacagcactcagaccaccaccccgtgttccatttaagagtagccttgtaggttggatttccagtagcttcatggttaacgcatccgaataagccatactagattgcagtgtttgtttccgtagggtttttaaggacttcttttccacacagcactcacatcccgcccacgcatgccgctgccacaggtagacatagtcccgtcactttccagtctctcacactcacttccactgaatccaatacatccaaaggggtaaggcaattcagaaaatgtgaaaacattaaaaatgatagcagggaattcttagatatagaaaatgccttttacttacttaactgtgcccagcaggctgggtacactaaaaagcccagatattttgaaagaaagaaaaaaactcaaatagatttatcaagggtaaccaacttggagtctagcgatttgccattgtgcttacggatcagggggctttgtttttcttctgttcattaaataaggacagttgattgacttctaaacaccggagcgaggaggattgatttactgtcactaggagtctgatctctattcagacaattgttttttcttgttttaaagatggtatttgttctttttttttttttaaagttggaagttaaatttgttacaatgcccatccctaatgtcaacagagatatttgtagatttctactttaagacgtaaccgcattggacgtgagagcaccgttcctgtagccactgtttatatattagtgtgtaacactgctgtgattgctcaaaggactttttatgttatggctttaaagcaaaggcatgattattagaaacgacgcaagctcttctctttgaaaaacaagctccttttacagactatacgcaaacagtagtgcctgtggtggagcccaccaagctcgacgacgactcaaagttagctgatgcattccttggaaaggaatggatgtaactgtacgctgatacagcttttcactttagtttttaaaccttagtataatctcaataaaagttaatataaactgttgccaaattcaatgtagaaagaatgtgacaaacgccttgggtagctctgtttgtgttttttgcatattgtaaaagcagtgtcacagctgaaaacgatcacttccttaaaggtcactgcctgtggtttagttgctagtttgtat

SEQ ID NO: 3644 - DNA, 1635 bp, Cricetulus griseus
gtgaacacaccatgcagcgcctctggagtcggactgctgtcagtttcctcggagctgtgcgacaggctcggtgcctgtcatgtcatcatgtgcagcagtggtgtgcaccggtgcaccctgagtgtgacactggagcaggccatcattctagccagaagccatgggctgcctcctcgatacattatgcaggccaccgatgtgatgagaaagcagggtgcaagagttcagaacacagctaagaacttgggggttagagaccggactcctcaatcagctccgaggctgtacaagctgtgtgagccaccacccccggctggagaagaataagcattcccaagagccagccaggcagaagcttccaaatgctgaccaagttgccattctccactgaagataaagagatgcatatttaagatgtaaacccttccccctggtgtaaataactgatgtttggtttgaatatttatgttggaactagcagttcattcaaacagttcttttttttttttttctcattaaacttgtattttaatgggtctcaaaattctgtgacagatttttggtcaagttgtttccattaaaaaggaactgattttgaaaactaataacttaaaaactgccacacacacaacacacacacacacacacacacacacacacacacacacacacaaaaatgttccacaaaacattctcctttcctcctgaaggttttccacctccccaaagagcaccagtctgggaatcaagcctttaatacagggacctctgggagacatgccagggtccaagctgaattattatccagtcaatcttaaatctatgtgactggtctaccattgagaaatagctcagtggacataactgctaaatttttaaatgatagttactagaaatactggtaataccagaaatgacaaagattgggttattaatttttacatacaaacaataattactattatccactcatatagtcaacaaatgttttattattagtaagtaccaatcagagttgaatgtattggatgtatttaattaaaaaaatctcacagggtccctatagtcctatatatacaagagtcacttgtatcttttacttaaaagtatattactcataggtaaatctattctaataccatgtgtgtattatatactatacagtcaagaacactaagttgttgaaatatttagaaaacatacatttaaatttaaatgtctaatgcctcaagcaaatttattagtttcagaggaatatatatttttgtaactgcaaatatatgagcagaccatagcttttgcttagaaatatttttgtaagcactcatttacacagtattcattttttaatagtaaaatatcaaactggttctctaaaagtaacttgttttgaatatatttaatattatgtaacatccaaaattcattgataagtttcatctaaatgttctattatccttattttcctttgtaaaatacccatgtaacatagttttgatcattccatattttgtgtatggttaaatttgttaaagttcattatgtattttatatctatttatttgctcccataaaagattggaataataatgtatgataaatgtcaaataataaagtgaattatagtatagaaaa

SEQ ID NO: 3645 - DNA, 1635 bp, Cricetulus griseus
atgtcatctgatgaggacaaattctcacttcatgttgctcacaatgactctgatcatgacagctctgtctccacagaccttcaggaagagtatgaagagctgctccgctatgctattgtgaatccaaatgttgagtccagtgcttcacagccgtctcatccgaaggagaagtggcaccagacagacttcctacactagcgtcacccaggaagccctctcacccagtcatggatttttcagttcactatattttaggtgactcttcctcaccagcctctgcttctactcgtacagatgtccatgaaatattggttggtgatcatcttgtttctgatgaaaatcttcagaaggtggagagtgtacttgacatctggagttcaggtcttaagacaaacattatatctgaattaagtaagtggagacttaattttattgactggcaccgaatagagatgaaaaaggagaaggaaaaacatgtggcacttgtaaatcagctgtcgaaccagatcgctgacttgaaggagctgcaaaaagcctttgagatctccctcgggagaaaggatgaggtgatttccagcttgtctcaagccatcagcaagcaaaaggaaaggatagagttaatgaaagctttcttgcactggcgaattggccatgtcaaatcaagacaagatgtctatgaaggtaaactggcagaccagtacttccagagaactttgctgaagaaagtctggaagggctggcgttccgtggtacagaggcagtggaaagaagtggtagaacgggcatgccaagcgagggctgaagaagtctgtgtgcatatctccaatgattatgaagccaaacttgctgtgttatctggagctttggaaaatgcaaaagctgagattcaaagaatgcaacaggaaaaagagcacttcgaagactccatgaagaaagcgttcatgaggggggtgtgcgcattaaacctggaagccatgaccatatttcagaacaaaaatgatgccgggatagacttcactaataataaaaaggaggacggtggccctggtggtctgggacgagagctttctgctcatttggatacttcttcatctacaatgccatcagcaagcaacaggaatagccagcgccactgccattccctccaccgcttccatgacctctgctggagccacatccgcctcttcagttcatgttcctgtctctgtttttggtgcaggatatatcgctgctactgctccagaagaaatgtacataccaagagttgtgacttcagcccagcagaaagccgggaagacgattacagctcggatcacgggtcggtgtgattttccttccaaaactaaaatcaacagtagtttggccatcatgggagtttctccccccatgagctcggtggtcgtggagaagcatcatccagtcacagtgcaaaccattcctcaggcagctgctgccaagtacccacggaccatccatcccgaaggcagcatcccaccttctagatctctcggagccaggccaacccatacccagtctctctcaagctttcagtccataaaagtggttgactagagtgaccatgttcatacttaggtcttctcagttctctcagaggacctgactgggagcaggaag

SEQ ID NO: 3646 - DNA, 1635 bp, Cricetulus griseus
  modified_base (1553)..(1553): a, c, t, g, unknown or other
ggcggaaggacctggctgccaagtttgagggcatgagtgtggacctctttggagagtgttaccacaacagtgaggaacgagctgcccgcctgcttcttcgacgatgcccctgtggggagaggccacctgccttcagctggccatgcaggctgatgctcgttcattctttgcccaggatggggtacagtccctgctgacacagaagtggtgggggacatggacagcaccacgcccatctgggccctgcttctcgccttcttctgccctcctctcatctacaccaacctcatcaccttcaggaagtcagaggaggagtccacacagaagaaccctgacttcgacatggatagtagacatcaatggagcaggtcctattgggccttccggagccttcagcaaaggtggccctggaaaggcgacggcggccagtacgtgcccgctgctttggtggctgcgccaagcgctggtcgcacttctggggctccccagtgaccgccttcctgggcaacgtgatcagttacctgctattcttgctgctgtttgcgcgtgtgttgctggtggatttccagcccggaacacccggtgtctttgagctgctgctgtacttctgggtcttcacgctgctgtgcgaagagctgcgccagggcctgggcggtggctggggtagcctggccagcgggggacctgggcccggcaaagttcctctgcgccaccggctgcacctctacctctccgacagctggaaccagtgcgacctgctggcactcacctgcttcctgctaggcgtccgctgcaggctgacccctgggctgtatgacttgggacatacagtcctctgcctcgacttcatgatcttcacactgcggctgctgcatatcttcacagtgaacaaacagctagggcccaagattgtcatcgtgagcaagatgatgaaggatgtattcttcttcctcttctttctctgcgtatggcttgtggcttatggggtggccacagagggggactccgtggacgggccccgggaaccgaaacctaccgagtactcaatctgctcatcgccactgttcagctacactttcagcaaagtacaagacaacagcgacctctactggaaggcacaacgctacagcctcatccgggaattccactctcggcctgcgctggccccgccccttactttatcatctctcatgtgcgcctcctcatcaggtggctgcacaggtgtcgtagggctcacttgcccgcctccccagccttcgagcacttccgtgtctatctctctaaggaagctgagcgcaagctgctcacttgggagtctgtgcacaaagagaacttcttattggcacaagctcgtgacaagcgagacagtgactccgagcgtctgaaacgcacgtctcagaaggtggacactgcactgaagcagttgggacagattagagagtatgagcgacgtctgaaggggctggagagagaggtccaacactgtactcaagtcctcagttgggtggccgaggcccttagcagctctgccttgctgcctccaggggggtccnccccctcaaagcccacctgggtccaaagctgaatgttcctggtggatttctaggtatttgcatccatggagagttcattcct

SEQ ID NO: 3647 - DNA, 1634 bp, Cricetulus griseus
aggaggaggcagcggctgcgccggacctcgctgcccgggttcccgactcggaagcggctcgagcatcacctgccccgaccccctcaggccacccagctgccgccgcttcgtccggagctccgggcgacgagctgtacgcggcgctggaggactaccaccccgcggagctgtaccgcgcgctcgcccgtgtccgggggcacccctgccccgccgaaagggctcaggattccgttggaagaatctcagtcagagtcccgagcagcagcggaaggtgctgactttggagaagacggacaaccagaccttcggctttgagatccagacttatggccttcaccaccgagaggagcagcgtgtagagatggtgaccttcgtctgccgagttcatgagtccagccctgcccagctggctgggctcacaccaggggacaccatcgccagtgtcaatggtctcaatgtggaaggcatccggcaccgggagattgttgatatcatcaaggcatctggcaacgttctcagactggaaactctgtatgggacatccattcggaaagcagaactggaggcgcgcctgcagtaccttaagcaaaccctgtatgagaagtggggagaatacagatcactaatggttcaggagcagcggctcgttcatggcctagtggtgaaggacccaagcatctatgacacactggagtccgtgcgctcctgcctctacggcgctggcctgctccctggctccctgccctttgggcctctgctcgctgcgcctgggggtccccgcgggagcgtgcggcgggccaagggggacactgacgacgccgtgtaccacacgtgcttcttcgggggtgccgagccgcaggctctgccgcccccgccccccccgcgcgcacgccaggcccgggctccgcccaggccccggcttcagtgctgtgtcccgcaccccgcgccacgctcagccgcagtgccagtgtgcggtgcgcgggcccgggagggggtggcggcgggggcgcgccgggcgcgctctggactgaggcccgcgaacaggccctgtgtggcgccggcctacgcaagaccaagtaccgcagcttccgccggcggctgctcaagtttatccccggactcaaccgctccctggaggaagaggagagccagctgtaggggcgcgggtgggcacgcgagaggtatttatttatttattcatcataactgccagtgcaaaaagtgggggcagtagtgctggtccaaggaccccaggagcccaaagctgcgggagagggtccttgctagctctggccggtctggtcagttcatggcttgtctctgctgaagaaaaaaaaaagttgctttctttcctcccctacactacaacaggatctctgcacggggagaatagacactgggagttgggagagaggtatgggggaccaaagagggctgtgccagcctgcagtctgggtcagttgtgccttgtgggggccctgtcccaagaagccctctcctcagctttacttgttccccaacccttcacccggggaaaggagatccatgatgggtcattccctgccctacacatacagatgaacagacagacagacagacagacagacagacagacagacagacacacacacaca

SEQ ID NO: 3648 - DNA, 1634 bp, Cricetulus griseus
tcttcgacgccagcgggagcaagagattgcactaaggcgacagcgagaagaggaggaaaggcaacagcaggaagaagctcttagaagattggaggagaggcggagagaggaagaagaaaggcggaagcaggaagaactgctacgaaagcaggaagaggaagctgccaaatgggcccgggaagaggaggaagcacagcgtcggctggaggagaaccggctgcgcatggaagaggaggcagccagacttcggcacgaggaagaggaacggaaacggaaggagctggagctgcagcggcagaaggagctgatacgccagaggcagcagcagcaagaggccctccgaaggctgcagcagcaacagcagcagcagcagcttgcacagatgaagcttcctcttcttcaacttgggtcaacagtctaatacaacaacatgtcacgtccctttttttttcctagcccctcgtgtccaattattttagatcactgttggtgagcacctcagactgtacctaagtggaccagaccctttgtcttggaggtggcagttggaattgctccccagcagggctgatattggcagcacacattcactgtgcgttgatatcatctgctgtctcctgaaagtgtgttggaatctgccaatagcaggttactttctcttgtcacttttttgttctgttttgttctttcttcccacccctctgccctgccccagtacaggcagagggtcttaactggtgcagtcatgaagagagttaatggttattagacattggccagcaacaaatgctcccctggatggtgacttcactattgccagagccaggcagaactgtgtctggagattgcatggccattgctaactttgggattgcatcagaggccctgaggggtgtgggttgtagactggcttgtttgatgttgcacacccctcacttgttctttctgaagaaaggaattcatgttttctttcattaggtagtgactttcaaagcaagctgagttctaccctgacatactccaaccttactggacaaaggaaaccctatggcctgggacagggacttctaattttcctttcatataaaaactgatcccccccataaatatttttacttcaaaggactaggaccagtttgttttgggcccttctgtgaaaatttgtctcgtttaagaggcatctttaccatatgtatgaatttgtgtaatttcaactcggatagggataaacttttgcttccgataaaagctgggaatttcatctgttcctcagagcaccatgtgtgtgttttgccatggccctgaaaggttttgtgtaaagattctgggatggcaagttgtttgccttttctgaaaagaacgtacaaaacctgaccatctttaagaccttcatgtgtggagaccactatacaggaggatgcagtggggtgaaggcatgggcaggaacaggagcatcagtgcctggagaaggctggaagttgctctgagagcagtttgggtttggagggatttattatttggtttctattttttatttattttggatcaccactctccctatcccttcttgcctcgatccctcctaaacgtgtacaataactatacagagactgctacaaacttgtaaatagttt

SEQ ID NO: 3649 - DNA, 1634 bp, Cricetulus griseus
ctgccggggttgatactacaaagtgtgattgatctggtggctctggaaatcattctgaccactgcttcagccaccataggagtggcaagatcccatctgccaggtgaagggcagaccactgacttttgacctgtacctgctggtccttctgacttatagaggcccagcatgggtgaattcaatgagaagaaggcaacatgtggcacagtctgcctcaagtacctgctgttcacctacaactgctgcttctggctggccggcttggccgtcatggcagtgggcatttggacattggtactcaagagtgactacattagtctgctggcttcaaacacctatctagccacagcctacatcttagtggtggctggtggcgttgtcatggtgaccggagtcctgggctgctgtgccactttcaaggagcgacggaacctgttacgcttgtacttcatcctgctcctcatcatcttcctcctggagatcattgctggcatcctggcctatgtctactaccagcagctgaacacagagctcaaggagaatctcaaggacaccatgaccaagaaataccaccagtcaggccacaagggtgtgactaatgctgtagataagctacagcaagagttccactgttgtggcagcaacaactctcaagactggagagacagtgaatggatccgctctggtgaggcagaaaaccgtgtggttcctgacagctgctgtaagactgtggtacctggctgtggtaggcgggaccatgcctccaacatctataaagtggagggtggctgtatcagtaagctggagaccttcattcaggagcacctgcgggtcattggggctgtgggcatcggcatcgcctgtgtacaggtcttcggcatgatcttcacctgctgcttatacagaagcctcaagttggaacactactgaccatggtgccaggccaggctgccagccttgcactactgtccacatggtgccaggccaggctgccagccttgcactatgtcccaccccactacgaagtactactgagttagactgctgactgccagagaggtagctgtcctcatgccatccttcaagtgcctttcactggcataccaaagtaccaaggcttgaggcaatgtacttgccccaggataagaatgccagtgttgggctaggcctacctggtagaattgggtttagattatttgacaaaagtgcctcttgcccacaggctactttccttgggtagctgtgatttgcattaagtgttgggggagaacatgggtttaccacttgcatggtgggtagaagcaggtgggaaaggccattctgggtggtctaggtacctttcatgcctgctgctgggaacactcagatgtgcttgctccaaagcaatggggcaacccgaggggaactccaaccccactcactgtatatgccgtcctttccatccaggcttctcttgctcctaacatcctcagccctggctctcccccacttctgataacactgtgcaaatgccccatgttcctatatactgtctccttttggaacatctctgaacggggtatggctgtttccatccactgttgtaaccctgatgcccacacatgctcctgctttgtaacaggtgctcaataaat

SEQ ID NO: 3650 - DNA, 1634 bp, Cricetulus griseus
tcgtgtcccagacgcacagaccaccgcgtggagccggcggacagctgcggcacggagaaggcgttcgagccggcaccggccgagtgatagctactttacagtgttcaggagaaaaggaagtaagtttggctgttaaaagtgcaaagactgcctttaaagtctggagtaagaagtctggcatggagcgctgccaagtccttctagaggctgctcggatgataaaggaacagaaggatgcaattgccaccatggagtcaatcaacaatggaaagtccatatttgaggcccgcctggatgttgacacttcctggcaatgcctggaatactatgcaggactggctgcatccatggcaggagagcatgtccaactcccaggagggtcctttggttataccagaagagagccacttggggtatgtgtggggataggagcatggaattaccccttccagattgcctgttggaagtctgctcctgctttggcatgtggtaatgccatgatctttaagccttctcccttcacacctgtgtctgctttgctcctggctgagatctacaccaaagctggcatgcctcatgggctcttcaatgtggtgcaaggtggggctgctacaggccagtttctgtgtcagcatcctgatgtggccaaagtctccttcactggaagtgtgcctactggcatgaagatcatggagatggcagctaaaggaatcaaacccgtcactttggaacttggaggcaaatctcctcttatcatcttctcagactgtgacctggagaacgctgtgaagggggcattgttggctaacttcctctcccaaggccaggtttgctgtaatggcaccagagtgtttgtgcaaaaggaaattattgataaatttacagaagaagttgtgaagcagactgaaaagataaaaattggagacccccttctggaagatacaaggatggggccactcatcaatggcccacatctggaacgggtctttgggtttataaagtcagcaaaggagcagggtgctaccgtgctttatggtggagatcagtatgttccgaaggatcctaaattaaaatttggatattatatgaccccttgcattttaactaattgcagagataacatgacctgtgtgaaagaagagatctttggaccagttatgtccattttatcatttgagactgaagccgaggttctgaagcgggccaatgattccacttttggactagcagctggggtctttaccagggacatccagagggctcacagggtggcagctgagcttcaggcaggaacctgctacattaacaactacaatgtcagtccggtggagttgccctttggtggatataagaagtcaggatttggcagagagaatggccaagtgaccattgagtactactcacagctaaagacggtgtatgtggagatgggtgacgtggagtcaccttttgaaagccagtgaatcctgttcatgtgaccaggctgtggaatgaactggctgcctcgacgcaatagctgcttagcaaaaccaaattcaggttgtcactcacgcaggatgagagaatgggtcagtattgtcttccatcttgcaggccccttcccagtcgaaaatgtgcacaagtgccttttcaga

SEQ ID NO: 3651 - DNA, 1633 bp, Cricetulus griseus
ccgcagggtcagttcctgatcccccagcagcatggcatcctgggcggagccctctgagcccgctgccgggccgtctgctggggtcccaccactggaggactttgaggtgcttgatagggtagaagatggagaggaagaggaggacctgagtgggctgccaccactagaggacatgggacagctgacggtggaggaggcagggcagccaggagcccttgctcgggagttcctggcagctacagaacctgagcctgctccagccccagcccctgaagagtggctggacatcctggggaacggattgctgcgaaagaagacactggtccctggcccaccaggctctacccgcccactcaagggccaggtggtgactgtgcacctgcagatgtccctggaaaatggcacccgagtacaggaagagcccgaactggccttcacgctgggagactgcgatgttatccaggccctggacctcagtgtcccgctcatggatgtgggcgagacagccatggtcaccgctgactccaagtactgctacggttcccaaggcagcaggagcccatacatccctccccatgcagccctgtgcctggaagtcaccctgaagacagcagaggatggacccgacctggagatgctgagtgggcaggagcgtgtggctctggccaaccgcaagcgggagtgtggcaatgctcactaccagcgtgctgacttcgtgctggctgccaactcctatgacctggccatcaaggccatcacctccagtgccaaagtggacatgacctgtgaggaagaggagcagctgctacaactgaaggtcaagtgtctgaacaaccttgcagcgtcgcagctaaagctggaccactaccgcgcagcactacgttcctgtagccaggtgctggagcaccagcctgacaacatcaaggcactgttccgcaagggcaaggtgctggctcagcaaggtgaatacagtgaggccattcccatcctgagggctgccctgaagctggaaccttccaacaagacgatccatgcggagctctccaagctggtaaagaaacgagccgcacagcgaagcacagagaccgccctgtaccgaaagatgctgggcaaccccagccggctgcccgccaaatgtcctggcaaggggacctggtccatcccatggaagtggctgtttggggcgactgctgtggctctggggggcgtggctctctctgtggtcattgctgccaggaactgactgccccctgcacacctggatcctgacctgtgctccccaactcccccaggctccctgtccactgccctccctggctgagctgcctcctctgggttggggagtcaacgattgagggtcatacacctccaacaagcaggaaggactgaggccctgaaggggggcatggggtgcagcccagagggaggggccctgttcctctagacccaattgtctctgtcccatttcttccctctggggtcaggcctcgcctcagtttttccctctcagtaggcctgggggcagcccttactactagtcctgcccatttgccccctgtccaggctcccctacagcgaatgaaaataaagcctcaccccgcaccaaaaaaaaaaaaaaaaaaaaaaaaaaaaa

SEQ ID NO: 3652 - DNA, 1633 bp, Cricetulus griseus
catgtggagagatccagagctccctttgcccgatgggaagtcaatcttcctacaaagtgtcccgtgcctgcatgtcgagggaagtcgtttactcctttgcgaagctctcctctcacagttacagtggactggcagttgatcaaaatacaggagctgatgtctgatgcacagagagaagcaggacggatccctcgaacaatagaatgtgaacttgttcatgatcttgtagatagttgtgtgccaggagatacagtgactattactggaattgtcaaagtctccaatactgaagaaggttctcggaataagaaaacaggattcccattcgaggagacccacacatcctgattgttggagatccaggcttgggaaagagtcagatgctgcaggcagcatgtaatgtggcacctcgtggtgtgtatgtctgtggaaataccacaaccagctctgggctgactgtaactctttcaaaagacagttcctctggtagtattttgctttggaagctggtgccctggtacttggtgaccaaggcatttgtggaatagatgaatttgataaaatggggaaccaacatcaagccttgttagaagccatggaacagcagagtattagccttgctaaagctggcgtggtttgcagcctccctgcaagaacttccattattgctgctgcaaatcctgttggaggacactacaataaagccaaaacagtttctgagaatttaaagatggggagtgccctactgtccagattcgatttggtctttatcttgttagatacgccgaatgagcagcatgaccacttactttctgaacatgtgattgcaataagagctgggaagcagagagctgttagcagtgccacagtagctcgtgcgctcagtcaagattcaaatacttctgtacttgaagtggtttctgagaaaccattatcagaaagattgaaggtggctcctggagagacgacagatccgattccacatcagctgttgaggaagtacgttggttatgcacggcagtatgtccacccaaagctatccacagaagctgctcaggctctgcaggacttctatctggagctccgcaagcagagccagcgcatgagcagctcacccatcaccacccggcagctggaatctttgatccgtctgacagaggcacgagcaaggttagaattgagagaggaagcaactaaagaagatgctgaagatataattgaaattatgaaacatagcatgctaggaacttactcagatgaatttgggaatctggattttgagcgatcccagcacggctctggaatgagcaataggtcaacagcaaaaagatttatttctgctctcaacagcattgctgaaagaacttataataatatttttcaatttcatcaacttcgtcagattgccaaagaactaaacattcaggttgccgactttgaaaacttcattggatcactgaatgaccagggttacctcttaaaaaaaggcccaaagatttaccaacttcagactatgtaacagacttaccacattagatccacctgtggcttattaatagctcaaaaccatcttaattaccaaagctgaaataagttctgaaagatgacatacaactcttataacagaaaaaag

SEQ ID NO: 3653 - DNA, 1633 bp, Cricetulus griseus
  modified_base (317)..(317): a, c, t, g, unknown or other
  modified_base (344)..(344): a, c, t, g, unknown or other
caggatgctgtgcgcatgctcaacaccctgcagaccaatgccagctacctggagcaggtaaagcgccaacggagtgaccctcaggcgcagctggaagccatggaggtgtacttggcacggagtgggctgcaggtggaggacttgaatcagttaaacattatccatgtcactgggaccaaaggaaagggctccacctgcgccttcactgaacgcatcctgaggagttatggcctgaagacaggcttctttagctctccccacctggtgcaggtgcgtgaacggattcgcatcaatgggaaacccatcagtcccgagcntttaccaagcacttctggcgcctcatnaccagctggaggagttcaaggatgacagccacgttgccatgcctgcttacttccgcttcctgacactcatggccttccatgtcttcctccaagaaaaggtggacctggcagtggtggaagtgggcattggtggggcttatgattgcaccaacatcatcagaaagccagtagtgtgtggagtgtcctctcttggcatggaccacaccagcctgctcggagacacggtggagaaaatagcatggcagaaagggggcatcttcaagcctggtgtccctgccttcactgtgctacagccagaaggtcccctggccgtgctgagggatcgagcccagcagacctcatgtcctctgtacctgtgtccaccattagaagccctggaggatggtgggctgccgctgaccctgggcctggagggagagcaccagcggtccaatgcagccttagccttgcaactggcccattgttggctggagcagcaggaccaccaggacatccgggagctgaaggtgtccaggccgagcatgcggtggcagctgcctctggcacctgtgttccatcccacttcccacatgagacatgggcttcgggacacagaatggcctggccggacacaggtattgcggcggggacctctcacctggtacctggatggcgcacacaccaccagcagtgtgcaggcctgtgtgcgctggtattgccagtcattgcagcgcagcaaacaccccagtggtgggcctgaagtatacgtcttgctcttcaactccacgggtgacagggactctgctgccctgctgaagttgctgcagccctgccagtttgactacgctgtcttttgccccaacctgacggaggtgtcatccacagaaaatgcagaccagcagaacttcacagtgactctggaccaggtgctgctccgctgcctccaacaccagcaacactggagctgcctgagtgagaaacaagccagccctgacttcctgagcagccccagcccagagcctggcaggccaggttccctgcagccggcactgcgcccgcctcactctacgggcactaactcccttgtctttagctgtatctcccacgccttgcagtggatcagccaaggccgggatcccatctttcaggccccaagccctccaaggagcctcctcagccaccccacggccagtagtggggcaagcattctccgggaggctggtgccatccatgtactggttactggaagcctgcacctggtgggtggagtcctaaagctgctagagccctccctgtcccagtagccaagg

SEQ ID NO: 3654 - DNA, 1632 bp, Cricetulus griseus
gaggcagcaaaggcttctaagccagaccatatttacatggatgccatgggatttgggatgggcaattgctgtcttcaggtgacattccaagcctgcagcatatctgaagccagatacctttatgatcagctggccactatctgcccaattgttatggctttgagtgctgcgtctccgttttaccgaggctacgtgtcagacattgattgtcgctggggagtgatttctgcatctgtagatgatagaacacgggaggagagaggactggagcctctgaagaacaatcgctttaggattagtaaatctcggtatgattcaatagatagctacttatctaagtgtggtgagaaatacaatgacatcgacctgaccatcgataacgaaatctatgagcagctcttgcgggaaggcattgatcatcttttggcacagcacgttgcacatctcttcattagagacccactcaccctttttgaagagaaaatacacctggatgatgccaacgagtctgaccattttgagaatattcagtccacaaactggcagacaatgagatttaagcctcctcctccaaactcagatattggatggagagtagagttcagacccatggaggtgcagctgacagactttgagaactctgcctatgtggtatttgtggttctgctcaccagggtgatcctctcctacaaacttgatttcctcattccactctccaaggttgatgaaaacatgaaaatggcacagaaacgagatgctgtcttgcaggggatgttttatttcaggaaagacatttgcaaaggtggcaatgcggtggtggatgggtgtagcaaggcccagaccagctatgagccagcagcagaggagtacaccctcatgagcatagacaccatcatcaatgggaaggaaggggtgttccctgggctcatccccattctgaactcctatctggaaaacatggaagtagatgtggacaccagatgcagtattctgaactacctaaagctaattaagaagagagcttctggagaactaatgacggttgccagatggatgagagagtttattgcaaaccaccctgactacaagcaagacagtataataactgatgagataaattatagcctcgtttcgaaatgtaaccaaattgcaaatgaattatgtgaatgtccagagttacttggatcaggatttagaaaagcaaagtatagtggaggtaaaagcgactcttccaactagacatctttcagaaagaggtgcgtcactgttcagtgagtgacagatgctgcactgactcctggccctctcggatgctgtgaacaccaacatggcctgcagtgttcctgtaccagtggccagcaagtgactagaagcttccttcagtaggtaaatctgagtttgtacatgtatatactaaagtatttttatgattaacaatgtattttaataacattatatctaaagtcatagtaaactggcttgtacatttttgaattcttactctggagcaactagcatctaggcagttttgtaaatgtaattgtacaataatacctgcattccagagttttaaatgtttactgtaaatcttcttttaatactacctgggacctgattcactgaaatttactt

SEQ ID NO: 3655 - DNA, 1632 bp, Cricetulus griseus
gttggaaaagaacagaaaacaaaatacgtttggtagttgtctcagaagaggaaaagaagaaagtcctaagggagtgccatgaaaacggcactggtgtccatcatggcatatccagaactctcactctggtggagtccagttactactggacatctgtgaccaatgatgtcaaacagtatatgcctgtcagcattgccaagtagcaaagaatacactgctgggggcacctcagcagcacctgctcacggtgggaagcccgtggagtgtagtgaccgccgatctgatgggaccttttcatacaagcgacaggagtcatgttgactgatttgttcacaaaatgggttatgattttgcctttatgtgatgtttcagcgtcagaaatttctaaagctattatcaatatatttttcttatatggacctcctcagaaaatagtaatggaccaaaagagatgaattcattgaacagataaatacagaactgtatagattgtttggtacaaaacagatcataatttctcatgcttccggaagtgtcagtccgcctgaaagtacatctagcacaatcaaagcctttctctccaaacactgcgccgaccaccccaacacctgggatgagcatctgccagcgctttcctttgccttcaatgtgactccctcagagccgactaaaaacacaccgtatttccaaatgttcaaccgcaatccttatgtggtggagtgtcctcatgacttgggtggggaaaatacaagcctgtttgccagagttgtagctgccgttagagaggccgatgcagtgttagagaacaagacaccatcagctggccagatggagaacaacaatttggaagagccaaacaagaccaagactgttaagaagaaaccaaagcagctaaatccatttcatttaaaagtgggtcatgaagttttaagacaaagaaaaaactggtggaaagatggccgtttccagtctgaatgggttgggccttgcgtcatagactacataacagaaagcggatgtgctgtcctgagagatcatactggggccagactgaaaagacctatcaaaatgtctcacctcaggccttatgtgagagagtccaccgagcaagacagtctttatctcttgcaaggttcggtagtagcagatcacgactacattggatttcctgaaatcccagttggagcataccaggcgaatattctggtggaagatgcaactattggtgtagctgatgatgaattattggcaacaggcaaggatcatgaactcttggaatatagaaattccaaaatctccgtcttggtagaggatcagagttctcttgagaaacagactttcagtctcctggattcttcaaatcaagtccttgaatatttaagttagtaaataccaaaaattaatttcaaatgcctgcttagaatgtatatatacctagattgtaagcactttattattaaaatatgttgtcgagaagaaatatcttagcacaatattattaattaaattctgaaggcttattttaaacctatgtcaagttgtgacacatttgaaaacaaactaatatacataacagaagtatacaatgcagagaattcaggtatctctcagagaatagacaatatccagttg

SEQ ID NO: 3656 - DNA, 1632 bp, Cricetulus griseus
ctcggaggcacgcgtccgtgctcctcgttggccatggcggactacctgattagcggaggcacatcttacgtgcccgacgacgggctcacagcgcagcagctcttcaactgcggggatggcctcacctacaacgattttctcattcttcctgggtatatcgacttcactgccgaccaagtggatttgacctctgctctaactaagaagatcaccctgaagaccccactggtttcctcacctatggacactgtcacagaggctggaatggccattgcaatggcgcttacaggaggtattggcttcatccaccacaactgtacacctgaattccaggccaatgaagttcggaaagtaaagaaatatgaacagggattcataactgatcctgtagtccttagccccaaggatcgtgtgagggatgtttttgaagccaaagccaggcatggcttctgtggtatccccatcacagatacaggccggatggggagtcgactggtgggcatcatttcttcaagggatattgattttctcaaggaggaagagcatgaccgtttcttggaggagatcatgacaaagagggaagatttggtggtggcccctgcaggcatcactctgaaggaggcaaatgaaattctgcagcgcagtaaaaagggaaagttgcccattgtgaatgaaaatgatgagctggtagccatcattgctcggacagacctgaagaagaatcgtgattacccattggcttccaaagatgccaaaaagcagctactatgtggggcagccattggtactcatgaggatgacaagtataggctggacttactggctcttgctggtgtggatgtagtggttttggactcttcccagggaaactccattttccaaatcaatatgatcaaatacatgaaagagaaataccccaatctccaagtcattggaggcaatgtagtcactgctgctcaagccaagaacctcatagacgcaggtgtggatgctctgcgagttggcatggggtgtggttccatctgcattactcaggaagtgttggcctgtggtcggccccaagcaacagcagtgtacaaggtttctgagtatgctcggcgctttggtgttcctgttattgctgatggaggaatccaaaatgtgggtcatattgccaaagctttggctcttggagcttctacagtcatgatgggctccctcttggctgccaccaccgaagcccctggtgagtacttcttctcagatgggatccggctaaaaaagtaccgtggtatgggttctcttgatgccatggacaagcatctcagcagccagaaccgatatttcagtgaagctgacaaaatcaaagtggcccaaggagtttcaggagctgtgcaggacaaagggtctatccacaagttcgtcccttatttgattgctggcatccagcattcctgtcaggacattggtgccaagagtttaacccaagtcagagccatgatgtactctggggaactcaagtttgagaagagaacatcctcagctcaggtggaaggtggtgtccacagccttcattcgtatgagaagcggcttttctgaaaagagatccagtatatgccttgaatttttcaataaaagttttaaaaaaaaaaa

SEQ ID NO: 3657 - DNA, 1631 bp, Cricetulus griseus
cttcgtggacaacctgtacggctaccccgagggcaaggacgcgctgcgcgagaccatcaagttcatgtacacggactgggccgaccgcgagaacgcggagacgcggcgcaagacgctggtggcgctgttcaccgaccaccagtgggtggcgcccgccgtggccaccgccgacctccacgcgcagtacgggtcgcccacctacttctacgccttctaccaccactgccagagcgacgccaagccgccctgggccgacgccgcgcacggcgacgaggtgccctacgtgttcggcgtccccatgctcggccccaccgacctcttcagctgcaacttctccaagaacgacgtcactccctcggagcccctggaagtgatatgttcacatatacagtgacccttgaccaccagacaatacagggtggtatctgggggagcagctaagaaatcacaggccctctggaccccactccccctccacccctgaaaagcatgtttctcccccacggcacaagtcaggtgatgcacgttctccctggaggccctcgcctcccacagacaacacaggtgtcctgctagaggaaagggaggagatctgtgcatcccagtactgcctggaaacttaccttcccgtggtccaggacacatttcatgaatggaaacatgtttgtgcatgtggctgtgtgtttgccaggcagaggggcctgctctccctagcacttacctgcattcccccacacctcaggcccagcacacacatagcaggtgggaacagacttcaagttgacagaagccactgggggagtacaaacttggagggagacgctgaggtgggaacatgtggggcatggcacatgtcacacaagaggctgtgcatgtttgacctaagctctcatggggcctgaggacagccttccctcagtccatgagatcattgctcatctgtgccaaactgggtagggggattgggagactcaaaatgtgccaaggatcccctaagtcctagtccagggaagggaaatgccagggacaggtggcagctaaggggcagacaccagcaggaagattttgaaagaaatgggggaggcaactgcccagaagtctttggatttggacctctggggaaaagaacgacatcaggaaaggtcttaaggggcactggtggaggtgtgactgaaccctcatgtattgtgtggctttctgtgggatgttagtgccaaacttgtataggggtggggtgctgacttctactgacacccagatccagaatccttggtcttgagttccctgtcctttctcccccttccacccatggaaatgtagttcctttctggccctttcccctgcctggtctagcaattcttggaacagccatgccttccaaatgctatcaacctgggccctgagccctgtaagcagatgccccagagctggggtgtgaggcgggggctgggggaccccatgatacagccacggactccaatgcccagcccctttccaaacaattccatgttcccaccccaaccctttgcggctctgtacacatttttaaacctggcaaaagatgaagagaatattgtaaatataaaagtttaactagttaaaaaaaaaaaaaaaaaaaaaaaaaaaaaaaa

SEQ ID NO: 3658 - DNA, 1631 bp, Cricetulus griseus
gcggaagatctcaaggctttcgtaaagaagacttactgagtatattcattgcttgcaacctgccactggacgctggagaatgcttcttatagtggtgtctgtatgtacagctactggtgcctggaactggctaatagatcctgagacacaaaaggtgtccttcttcacgtcattatggaatcatccatttttcacaattagctgtataactctaataggcttgttctttgctggcatacacaaaagagtagtcgcaccatcaattatagctgctcgatgtcgaacggtactagcagaatataatatgtcttgtgatgatacaggaaagctaattttgaaacctagacctcacgttcaatgacaatctgcactgttgttagggaacctaaaccagtcttcttcaaataagtcatacagcaaacgccatagaggattccttttggagttgggtatgtgacggtttagcaacaagtgacaagaagcgtgcaatatttgcccagattatctcgatgatgatgactgagctctcagtgcttcagtacctgtgattacctgtgttcagtattagtgtcactttaatacttcaactcctgcaaagaattttgcagatgaagtatgtgtgtatgttactaagttaaacttagaaaccaaacctcattcagtttttataatgtatttttgcaaactactgtaaatagcaaatcaatgccaatgttaaaccaagagaaaaatgtttggactttgttctcctgcaccagtatttcaggaaccatctgcttggcatctccacagctccttaaaactggctactatgtgtgcctttcattctcagcgcctctttccattgtgctgcaggaaaagcatcagactctacttagactgagaaaatctcttttccattatgttgaagatttatacatgtttcgataattttttgttaagcccaatactggattctggcaactattgttatatttttcataaattgttttcatttaacactaaattacttttttaaaaaagaattttaaaaaacaccccaaagtcttctgattgtacaagttaaattatgtattgtctgggaatttgacagtccttattttaggtgactggattttatgctgtggtagacatgttagactagtactgtcctgaagtagctgatgggcccagtccatcaccagtaacaggaaccacaccacaaaccagagcctgcctgctggagagtgttgatggcatactgtgtatgcgcaacagccacgtgtaccacagtagccctgaaaatgaacaatgggattgctgtaaatacttaaagtactagaggtgccttttacctgtttattagaagattttgaaaaagttaaattatttcatgagcaatttttaaatttcatctaatatgaaactaaattcgaataataggacaaaaacattgaataaagctgccattaactaacgtgttcatcttgactttcctgtgtataaaattgcattctttgaattgcagcaataaaaccctctgcttccaagaactctataagagggtattctgtatgttctgcattgttttattttctgtaaattttgtaggtaaatatgtgcataaaaataaatactttatatataactag

SEQ ID NO: 3659 - DNA, 1631 bp, Cricetulus griseus
cttttctggctcagctttggaagctcagggaatgtacctcctaccacccagccaaagtgcactgacttccagaatgccagcttcctccgaggcaccaacctcagagtccagtttctcttctttaccccttcggaccctagctgtgggcagctggtagaagagagcagtgacatccaaaactctgagttcaacgtcagtctgggaactaaactaattattcatggattcagggctttaggaacaaagccttcttggattgacaagtttattagagctctcttgcgggcaacagatgccaatgtgattgcagtggactgggtttacggctctacaggcaactacctctttgctgtggagaatgtggtcaagttgagcctggagatctcccgattcctcagcaaacttttggagctgggtgtgtctgaatcctcaatccacatcattggtgttagtctgggggctcatgttggaggcatggtgggacatttctacaaaggccagttgggacggatcacaggtctagatcctgccggaccagagtacaccagagccagcctggaggaacgcttggatgctggcgatgccctctttgtggaagccatccacacagacactgactatttgggtatccggattcctgtgggacatgtggactactttgtcaatggaggtcaagaccagcctggatgtcccacgttttttcacgcaggttacagttacctgatctgtgatcacatgagggctgtgcatctgtacatcagtgctctggagaacacctgcccactgatggcctttccctgtgccagctacaaggctttcctggctggagattgtctggattgctttaacccattcctgctctcctgtccaaggattggactggtagaacaaggtggtgtcaagattaagccactccccaaggaagtgagagtgtatctcctgactacagccagggccccgtactgtgtgcatcacagcctcgtggagttttatttgaaggagaagagaaaaaaggataccagcatcgaggtcacctttcttagcaacaatattacttcctcagtcacgatcaccatacctaaacagcaacttgaagggcgaggagtcattggccaccctaacccaccgtgccagataaacctagtgaagctcaagttccaagttcctagccgggtttggaaaaaagacaggactaccattattgggactttctgtactgcccctctgccggtcaatgacagcaagaagacagtctgcatacctgagccagtgagtctgcaagcaagcatgcctgtttttcaggacctgaaaatagcctgtgcatagcccaagcctacgcaggaggcagtggcctggatttttctgagggcagtgtggcaagagatacgttcatgggcactttagtccactccattcctactaaggggaaggtcaaattcttggtggttttccccacaagtagtgactgttgaggggacagatgactcattttacagaacttgatctccattaccaacttacaaagttttacatagatacatttcagcttccctgtttctaaacaactgccattgtctcatatccttaagtatttatacttaggatttaatggaaaacatatgcagaaaaat

SEQ ID NO: 3660 - DNA, 1631 bp, Cricetulus griseus
tgcagttggccatgaacggcagggcccggaaagaggccatccaggccacagcgagggagctcctcaagttcgtgaaccggagtccctctcctttccacgttgtggctgagtgtcgcagccgcctcctccaggctggcttccgtgaactcaaggaaacagaaggctgggatattgtaccagaaaacaagtacttcctaaccagaaactcctcctccatcattgcttttgctgtggggggccaatatgttcctggcaatggcttcagcctcattggggcccacacggacagtccctgccttcgggtgaaacgcaaatctcgacgaagccaggcgggctaccaccaggttggtgtagagacctatggtggtgggatctggagctcgtggtttgaccgggacctgaccttggctggacgagtcattatcaagtgccctacctcaggtcggctggagcagaggcttgtacatgtggatcggcccattctgcgcatcccacacttggccatccacctgcagagaagtatcaatgagaactttgggcccaacacagagatgcacctagtgcctattcttgccacagcagttcaggaagaactggagaaagggactcctgaaccagggcctatcaatgctgctgacgagcggcatcactcagtcctcatgtccctgctctgtacccagctggggctgggtcctgagaacatcttggagatggagctctgcctggcagacacccagcttgcagtcctgggtggagcctatgaagagttcatctttgctcctcgcctggacaatctgcacagctgcttctgtgccctgcaggctttgattgattcctgtgcagccccttcctccctggccagggagccacatgtgcgcatggtcacattctacgacaatgaagaggtggggtcagaaagtgctcaaggagcacagtctcttctgacagagctggtactacggcgaatctcagccacacctcagcacctgactgccttcgaggaagccatacccaagtccttcatgatcagtgcagacatggcccatgctgtgcacccaaactatgtggacaagcatgaagaaaaccaccgacccttgttccataagggtcctgtgatcaaggtgaacagcaaacagcgctacgcctctaatgcagtgtcagaggctctgattcgagaggtggccagccaagttggggtgcccctgcaggacctcatggtccggaatgactccccctgtggcaccaccattggacctatcttggcttctcgactggggcttcgggtgctggacttaggtagcccccagctggccatgcactctattcgggagacagcctgtactactggagttctccagaccctgacccttttcaagggcttctttgagctgttcccctctgtaagccgcaacctcgcagtggactgaggcttcttgatgaggctcgttgtgttcaccctgtgactgaaggggaggatttcagcttgtgatgctgggttattaaagtggattttcccttacaaaaaaaaaaaaaaaaaaaaaaaaaaaaaaaaaaaaaaaaaaaaaaaaaaaaaaaaaaaaaaaaaaaaaaaaaaaaaaaaaaaaaaaaaaaaaaaaaaaaaaaaaaaaaaa

SEQ ID NO: 3661 - DNA, 1631 bp, Cricetulus griseus
tcgtgctcgcatctctctgctgcagcctccggagccacgttccatcccttcagcctgagaccagccaaaagaaaaaaaaaaaaaaaacccaattatcttttcttgctcggtacctaccttgaagccagcacaaatttattacagtaaaccgtagccatgagggaaatcgtgcacatccaggccggccaatgtggcaaccagatcggtgctaagttctgggaggtgatcagcgatgaacacggcatcgaccccaccggcacctaccatggagacagcgacctgcagctggaccgaatctctgtgtactacaatgaagccacaggtggcaagtatgtccctcgggccatattggtggatctagaacccgggaccatggactccgttcgatcaggtccttttggccagatcttcagaccagacaactttgttttcggtcagtctggggcaggcaacaactgggctaagggtcactacacggagggagctgagctggttgactctgtcctggacgtggtgcggaaggaggcagagagctgtgactgcctgcagggcttccagctgacccactcgctgggtggaggtaccggttctggtatgggcaccctgctcatcagcaagatccgagaagaatatcccgaccgaatcatgaataccttcagtgtggtaccctcacccaaagtgtctgacaccgtggtggagccctacaatgccaccctgtctgtccatcagctggtggagaacaccgacgagacctactgcatcgacaacgaggccctgtacgacatctgcttccgcactctcaagctcaccacgccgacctatggggacctcaaccacctcgtctcggccaccatgagcggggtcaccacctgcctccgcttcccaggccagctcaatgccgacctccgcaagttggcggtcaacatggtccccttcccacgtctccacttcttcatgcctggctttgcccctctcaccagccgtgggagccagcagtatcgggccctcactgtgcctgaactcacccagcaggtcttcgatgccaagaatatgatggcagcctgtgacccccgccacggccgatacctcaccgtggctgccgtcttccgtgggcggatgtccatgaaggaggtggacgagcagatgctgaacgtgcagaacaagaacagcagctactttgtagagtggatccccaacaacgtcaagaccgccgtctgcgacatcccaccacgcggcctcaagatggccgtcaccttcattggcaacagcacggccatccaggagctcttcaagcgcatctccgagcagttcacggccatgttccgccggaaggccttcctgcactggtacaccggcgagggcatggacgagatggagttcactgaagccgagagcaacatgaacgacctcgtctccgagtaccagcagtaccaggatgccaccgcggaagaggaagaggatttcggggaggaggcagaagaagaggcctaagccagagagagagaccctgcgtcgtctccctcaggctacttagttccctcagctttcttcagctgcccgtttttctccagtttctttctgctgcctctgtcctgtttttattttttaaaggcgtgtgccactctacaccc

SEQ ID NO: 3662 - DNA, 1630 bp, Cricetulus griseus
tgaagatggcagctgctgaggagccaaagcccaaaaagctgaaggtggaagcgccacaagcgctgagtgaaaatgtgttgtttggaatggggaatcctcttcttgacatctctgctgtagtagacaaagatttccttgataagtattcgctgaaaccaaatgaccagatcttggctgaagaaaagcacaaggaattgtttgatgaacttgtaagaaaattcaaagttgaatatcatgctggtggctctacccagaattcaattaaagtggctcagtggatgatccagaagccacacaaagcagcgaccttctttggatgcattgggatagataaatttggggagattctgaagagtaaagctgctgaggcccacgtggatgcccattactatgagcagaatgagcagccaactggaacctgcgctgcatgcatcactggtgacaacaggtctcttgttgctaaccttgctgctgccaactgttacaaaaggaaaagcatcttgatttggagaataactgggtgctggtagagaaggccagagtatactacatagccggcttttttcttactgtctccccagagtcagtattgaaagttgctcgctatgctgctgagaacaacaggatcttcactttgaacttgtctgcaccgtttattagccagttcttcaaggaatccttgatggaagtcatgccttatgttgacatcctctttggaaatgagacggaagctgccacttttgctcgagagcaaggctttgagactaaagacattaaagagatagccaaaaaggcacaggctcttgcaaaggtgaactcgaagaggccgaggaccgtggtcttcacacaagggagagacgacactgtagtggctacagaaaatgaagtcatggcttttgctgtcttggatcaaaaccagaaagaaatcattgacaccaatggagctggagatgcatttgttggagggtttctctctcaactggtctataacaagcctctgactgaatgcatccgagccggccactatgcagcaagtgtcattattaggcgaactggctgtacctttcctgagaagccagacttccactgatggaagaaagaaaactcaagctgggaggtgcaggctgcagtgacctcgtcctaagtgttcctgccataagaaagaataattgtactgctatttttgccaaccatgattctcattaatttagagggctcagtattgctcctagaacctttagtctttgaaatctggggggaaaatgtttatttccataatttgttagtgcctcttaaatgtcaaaaaggaatatagcatttcagtagaaacttttatttcattttccattgtttgtaaattcatctgtatttagtaaattaattggtttttttacatttctgctttaaatacaggtgcaatttaatataatagactttttaaagaaattaatgctaacatcattcttgagctttttatataaatatatttaatttggaggtatgtatatgcacacatgtcatatatatatatatgataaccggataactagataaggtacagaaatgtttatcacaccaaattattccacataagctcttcattgtgctttcagacatatgatggacttgg

SEQ ID NO: 3663 - DNA, 1630 bp, Cricetulus griseus
  modified_base (1627)..(1627): a, c, t, g, unknown or other
gaatggccagcaatcctggaagtgatgcagctttgggtactcagatatcaatgcatttgggaagtccccgagtaaagaaattgtcactaactgagcaggaggtattttatatgaattgtagagccgcctatttaactatcttcaaaagcagcttggaaaacattatttctaaaggatcaactttacctagctcttcagcatgcaggaagaatccatcacaaagaccattaataagtaattggactcctcaaactgccaactgaattttgatgatttttgcatccttttaagcaaggaagaacctacttcaaagttcaaaacatctgtttccttcacaattaccatgagtgctaatagtaaccaagactcaaagttaacagagccaaacctaaaggactggcagtgtgcacaatcaaaaggctgtttctttttagaagaagatggtgaagtcattagtcatcagtacaagatgcatatacctcaaagatctgtgctttatctaacaatcaagccattaaatctgagtcaaattgaaggaaaatgttccccctggttatcagttgatacggccttatatattcttaaagaaaatgaggaccaagcagagccacagctcatgtgttttaccgaactacaaaatagagaagtgtttggatggactggtgaactaggaccaggaatttattggttaattccttccacaactggctgtaggctaagaaaagaaataaaaccagtaacagaagaagcccaacttgtgtacagagatgaaacaggggaattatttcttacgagtgagtttaggtcaactttatcagagatatttgaagtaattgacttagatggaaatggtctcattagtcttgaagagtacaatttttttgaattgagaacaagtggtgagaagtgtgatgaggatgcttgggctgtctgcagagaaaactttgacacaaagaagaatgagctaacaaacagggatttatggacttgcatctgatggaagccaatgatcgagaaggagaccctcttgactctgcagctgacagaggcatgcccatttatcatcaatatctatgcagaaaaatgcaagccaaaaattaaagctgtccatatggaggcatgcagtgggcaacttgagagggccatttgcaagtctgtccttgatagaagtgatgctaaagtcatggatggttatgaaaatataattgtacatacttgcaattatgacacctggataacatcaatcattgaaaataagtcggatgacaaagtgattattcatatcaacaatgaactaagtaaaaactgtgtcaacaacagaggactcaacatctttgcagtagaagtggcaccaagatctacaatggtttgtcaacatgtaatgcccctgaatgaacaacaagaatggatatattattgtgtctattcccttatatcttaaataattctacttggaactatcaaactaagaagtattttagatcgaatctgttatttattaactaagtgctgttccatgtaactggtatacttaataatctgtttcatttctatgcattttatattttgtccatgttatatattttattattaaaatacaaatagtgtataaaaaaaaaaaaaaaanaaa

SEQ ID NO: 3664 - DNA, 1630 bp, Cricetulus griseus
gagtcacccaagaggcttctgtccagaaaagatgccagtgttaggagcagaatccctcctgtacctgaggccggatggagtctgtatattgtgaaataaccattgcaccagttcagctatacaaagaaatggtagactatagtaacacttataagactgtgaaaacccagagctgtatccacttgctcagtgaggctcatctgctactgagagctgccctgctggatagcagtcagctggagccttcggagaaacagagctcttagaagcttttaaggaagctgtgcgcaccgttggagactgttacagcaggcagaattaagtgaagaattagcagcaaaaggtggcgtcagatatttcatgtggctgagccgaagcaactgcctcatgtcctctgtagtccttctatgaagaatatccatccttcaactgccttgcattatttaaagaagctggatacttgtgaattttcaccagccttagtgaccttgaccaaggcagcagtggccttaaaaatgggagatcttgacatgtacagaaatgaaatgaagagccattcagagatgaagctggtgtatggcttcattctggaacctggctgttaattcaacagtggaaaggacagattgttcctactgaacttgcaattcacttgaaggaactcagcctggattgcttgtagcttcagtcctgggcttacagtttaaggtggctgtgtggaaaggatgaagacacagtacctcagctttggttagacttctgggaagctcagcttgtagcttgtctcccaaatgtgtgcttcaggaactcttctttaagcttacatctcagtacatctggaggttatctaaaaggcagtgtcctgacaccataccattgagaacagcggaggattttgataaatgcctgctagtcattatggcttagtctacccatgggttcatgtcttaatatcgtctgattccttagctgataaaaattacacagaagaccttttgaaattacagtctctcatatgtggcccttcatttgatgtagcttccattattccatttctggagccactcccagaagatactgttgctggcctcagcgctcatgttctatgtcatacaagattacaagagtatgaacaatgcatagacacgctgctcgagagatgcccggaggcagtcattgcatatgctaatcaggaactgaaggaagaacactggattctgtggtggaaaaagctgctgcctgaactttgtcagaaagtcaagtgtggtggagagaaacaacaactttaatctgtcatcttaaaagaagaccttgtcagttattgctgtgggactggacctgaaggatttcttgaatgttctcccagaagatggtgctgcagcctttttcctgccctaccttcttttttgcagccggaagaaaccactgacttgaagttatactttgtaacatataagcgactgtactttaaatgctcagtcctagataaaatgatcccaaagggtttcatattaatgggtattgaagctgctttatggtgcttgcttcccttaccatgtaatggtagctgttcgcttaatctacaagctgaacccacttatttgtctagaatgtgaaaaacctcaagata

SEQ ID NO: 3665 - DNA, 1630 bp, Cricetulus griseus
acctggtgagcgatctggtgctggcccgcctgggaatggctcgggacccggtgctggagcagcgcagcgggtggccgtcgcggtggctgcgggcgttgctgctgctgcagctgctgcggtggaggtacgcccggggcgagctccctttcagcagcagtcggcacccgggctttgcggacctcctgtcggagcagcagctgctggaggtgcaggacttgaccctgtcactgctgcagggcggaggtttggggccactgtcgctgctacccccggacctgccggatctggagcccgagtgccgggagatgctgatggacttcgccaatagcagcgccgagctgaccgggtgtctggtgcgcagcgctcggcccgtgcgcctctgccagacctgctacccgcttttccaacaggtcgccagcaagatggacaacattagccgaaacgtcgggaattcctcagagagcccgaactgtgccagaagtctcctgatggcagacagaatgcaaatagttgtgatggtctcagagtttttcaacaccacatggcaggaggcgaactgtgcgaattgcttaacaaacaatagtgaagatttgtcaaataacacagagtatttcctcagcctatttaacaagaccttggcctgctttgagcataaccttcaggggcacacatacagtcttctcccaccaaaaaaattactctgaagtatgcaaaaaactgtaatgatgcatacaaaaacctgagcgccctgtatactgaaatgcagaaaaagaacgggcttgagaataaggctgagccgggaacgcacctgtgcattgacgtggaagacgcaatgaacattactcgaaagctttggagtcggaccttcaactgttctgtcacctgtagcgacacggtgtctgtggtcgctgtttctgtgttcatcctcttttttgcccgttgtcttctaccttagcagctttcttcattcggagcaaaagaaacgcaaactcattctacctaaacgtctcaagtcaagtaccagttttgccaacattcaagaaaattccacctgaaacctgcaaaatggggactccacctcccatcaactgagtgagtggttagcccaccagggggtcaggaagaagatgaacccagatctgacaaatgaccttcttatgggatgccagggctgtggatgtgtaattcattcaaatggcagtcttcaaatttccttttcctgttcacgaatttttaaagatttctgtatttttaatttttagacatagcagtgttccatattttaaagtatgtgtgttaaagtaacaagtgaggactttgttttgacttttataaatagtattttacatcttatttttgcctttatttcataagtaatttaaaaatcactggactgctttattagcttcaggatacaatggattcattttatgccatggatttgcattgtgaatctcattaaattatttggcaacttgtaacttattctttaaatgaaacgtagcacaggtgtgtcacactgtatttaaattgtggtttctaatgaaaatgtcatcttggaatatttggagaggttggggagagatgaaagaggaacacaggagcttaaagttcagggagtggacaggga

SEQ ID NO: 3666 - DNA, 1630 bp, Cricetulus griseus
gcaggtctggggcggcggctgaggcttcggatgggcgtcatcccttcctcctcggtgtcgccagcctggcgttcggcggagaaacgcggccgagaaatgaaagggaaaatgaaataacaaagaagcagttatgaggcagaatcttactgaactatggagacaccaggtgactgtcccggaaatgagtcacaggtcatcccagtgctggaggaagaccctgtggattatggctgtgagatgcagctcctgcaggacggggcacagctgcagctccagctgcagccagaggagttcgtggccattgcagactatactgccaccgatgagacccagctcagttttctgagggagaaaaattgtcatcctgagacaaaccacggctgactggtggtggggtgagcgtgccggctgctgtgggtacatccctgccaaccacctcgggaagcaggtggaggagtatgacccggaggacacctggcaagatgaggagtactttgacagctatggaactctgaaacttcacctggaaatgttggctgaccagcctcgcacaacgaaataccacaatgtcatcctgcagaacaaggagtccctgaaggacaaggtcatcctggacgtgggctgtggcactggcatcatcagcctcttctgtgcgcaccatgcacgacccaaggcagtctatgctgtggaagctagtgagatggcacagcacacaggccagctggtcctgcagaacggctttgctgacacaatcactgtgttccagcagaaggtggaagacgtggtgctgcccgagaaggtggatgtgctggtgtccgagtggatggggacctgcctgttgtttgagttcatgatcgagtccatcctttatgcccgggatacatggttaaaggaggatggtgtcatctggccaaccacagccgcactacacttggtgccctgcagtgctgagaaagactaccacagcaaggtgctcttctgggacaacgcctatgagttcgacctcagtgcactcaagtctttggcaatcaaggagtttttttcgaagccaaagtctaatcatatcttgaagccagaagactgtctctctgaaccgtgtaccatattgcagttggacatgagaactgtacagatctccgacctggagaccatgcggggtgagctgcgatttgacattcaaaaggctggtaccctgcatggcttcacagcttggttcagtgtgcacttccagagcctagaggagggccagccccagcaggtgctcagcacaggcccgctgcaccccaccacacactggaagcagaccttgtttatgatggacgacccagtcccagtccacacaggagacgtggtcacaggttccgtcgttttacaaagaaatccggtgtggagaaggcacatgtctgtctctctgagctggtctgtctcatctacgctcgatcctacatctcaaagagctggagagaaagtctttccaatctggaggtgacagttaagcactgcttgggagtcatggccatggtttgcatcttgtggaagaagaggcacctggccaccagctgtgacatccataagcacctgtcccatgctgttccctttccacctagcaggcgacatcggcccctcacag

SEQ ID NO: 3667 - DNA, 1630 bp, Cricetulus griseus
gttttcttacctagatgtcactttttaaatgcctctggggcttcccttcactcccaccaagttatatatctccattttctgtaccgctgggctttgttgctcagcatggctctgaaggagaattctcattggaggaacccagtcttctcccatcactgccctgctgtgactccaaagaagggagcttcttgttgacggtaccctgtggagtgaggctgtgtttcacactccacatggtgctcagtgggtgccagccctcagcaggctctgtgattgctgccctgaaggacaatgctccctccttccttcctggtcctgcctgctgctctctgagcattgctcctgctcagacatggagtcctagccacagctaggctcttcagtccccatctgttggcaatgtcttgtggagcacttttgctgaggaaaaggtcattggtaaagagggaggaagggaaagtagtacatggttggaaaacagcccaacgtctaactaagtggaaactgcacaattctgtcttcattgtaaagatcctgtgcattaaggtgatggaaacttatttggaagtagtctcttgagctgacaaaagggcacagtggaatcctcttgtgttttgacttccttctgtagccactaactgccaaatctatggaatctatgtggaaaagacaagcttccttccttctctctccttattaagggatttttgttttttcttttatgctctagagcacaaggctaaaagtggcagctgagatctttggaacccagctctgcttcccgtgtgctgtcctggttccctgccctcatctcctgtttttgtcatttagatttcttgcctgctaagcccatgtggaactcactgtctgtggcagaaggacacccaagctggttctggaagtttgtgtctgccttctgccagatgcttcctgtcctttcttccttcctcctcagtgctatttctctttgtgtgcagtgctgtaccactcccatagcactgattttatggccagataaagctatgacttggtccaaagttcatcattcccctctttctagatgtgatacctcgtcttgtctagacgcatttgcataaccagaattcaagaagtcagcaagagaatctactaggtagaatccctgtcaaagccgtagcttgcttttaaatattttctctcccagtagcttgacacctgcctggagggtggctgcgattcagtctggttgtatagagctgacctgggccacctcctgtcacctccaggctcaacaacacagcaggtggtaagggtgcaggctggcacaaggatttattttcgggtaggtgcatagttcattctgcacctacatactctcctccagaaataagcagttacctattcagtgttacacatttccttcttgctttttattaaaacacaggagcagctggggaagggagatgaggggttttatttctgacaggttttagaaaaagaaatattgtgtacatgtgtttggaactgttgaattgccaggtttctgtacaagtgttttgtaattaaacttttagattttctttaagaaattgatatgcttgcttgacatttgtctcaatttaaaacttttctatgttagaaaaaaaaaaaa

SEQ ID NO: 3668 - DNA, 1629 bp, Cricetulus griseus
  modified_base (175)..(175): a, c, t, g, unknown or other
gtgtgtgtgtatacacgtacgtgtgtgcgtgcgtgcgtgcgtgcgtgtgtgtgtgtgtgtgtgtgtgtgtatatgtgtaggagcagtcctgtccggaccacacaatcaaagacatcatggtgctcctttgctggtttctattacatctgctttcagaagtcagcagcctccatanagggctactactatcatcggagttcagaatggtatcagtccctcaacctgacccatgttcctgaacacagtgcacccatctatgagttccggtgacagaggttcagagcagcggccaaataaaactgaacttggcaacaaagagctttgccaagaaaattatgtacctgccagaaccaggagaggtgtgttcctgtttcttcatgagcagacttcatcagaaagcatgaatgttaacctacaggacccaaggcacctcttaccctccttcctccctgcggcattgtggtcaccatctgtttctgagcaaccttaaatgcactttccttcctgcacagctaacttctgcatcacagaaatgccatctgtcctcagcctgcctctagccgagtggaaggtcagctcctgggtcacctcagccttggtgctcagtggtccccacccaggccctactccttccccagttgcttgtttggtagcccaaggaaaggcagagcccagtaacttgtgccccagagctctgtgtgaggaattggctgggcccagcatctgccaccaatgaaatgaggtgggggccctggtgggcttcatcagatttgattccagtttggatgttttgtggggccttttttttttttttttttcttagccttttctgtccctgaaggacctctgggacttgtctccatctgtagctcttccccaagctgtgttggtggtttacatgcctctggtaccgtgtgcaatatctttgactgacacttgtatctaacattgagaagtaagtgcagactgcacatttcctactgttctccaacaagccagccccaagcagggactagaggtctggctggtcttaccctccactcagaaggctccagtgctgtagcctgctatggccagccttggccctccatgccctgctttacccttctacccacccatccctaaagattgtctagcatttcagctgcagtccaaaagtaagtagacaatgcctaatattaagtaggaagccagacagggtgctggctgttagcagtgttgaaatcagactccagaggaacaaaagggtttgtttctcaatgtctttttgctttcagaagcagggaatttatattctctttaaggccttgaatggattttttttcctcataaaatagtcactgataagctaatttttaagaagaaatgccattaagtatgttacattgtggtttaaaattactaacaagttctgggaaagaaaaatacttgattttgaatcttaaatgttttttaaaaattaaatttgaatgggcgcaaagtatgaatattttgtttctttatggaagacctgtggaaagggtttgaagatttgcaatgggagaagtattttacagagctatcaatgtctaaataatttttaaaaaaataataaaggtatttaagcagagaaaaaaaaaaaaaaaaaaa

SEQ ID NO: 3669 - DNA, 1629 bp, Cricetulus griseus
gctgcgcggagcgagtggacagcgcggcggtttgtctttccgagcggagccgggagctcccgcctgcttcgccgccgccatgagtcgcagctacaacgatgagctgcagttcttggacaagatcaacaaaaactgctggagaatcaagaagggcttcgtgcccaacatgcaggttgaaggagtattttatgtgaatgatgctctggaaaaattaatgtttgaggaattaaggaatgcctgtcgaggtggtggtgttggtggcttcctgccagccatgaagcagattggcaatgtggcagccctgcccgggattgttcatcggtctattgggcttcctgatgtccactcgggctatggatttgccatagggaacatggctgcctttgatatgaatgaccctgaagcagtggtatccccaggtggtgtcggatttgacattaactgtggtgtccgcttgctaagaaccaatttagatgagagcgatgtgcagcctgtgaaggaacaacttgcccaggctatgtttgaccacattcctgttggggtgggatccaaaggtgtcatcccaatgaatgccaaagacttggaggaggcattggagatgggtgtggactggtctctgagagaagggtatgcctgggctgaagacaaggagcactgtgaggagtatggaaggatgctgcaagctgaccccaataaggtctcacccagggcaaaaaaaaggggccttcctcagttggggaccctgggagcaggcaaccactatgcagaaatccaggttgtagatgagattttcaatgaatatgctgctaagaaaatgggcatcgaccataaggggcaggtgtgtgtgatgatccacagtggaagcagaggcttgggccaccaagtagccacagatgcactggtagctatggaaaaagccatgaagagagacaagattatagtcaatgaccgacagttggcttgtgctcggatcgcgtccccagaggggcaagactatttgaagggaatggctgcagctgggaactatgcctgggttaatcgctcttctatgaccttcttaacccgtcaggcttttgctaaagtctttaacacaacccctgacgacctggacctgcatgtgatttatgatgtttctcacaatatcgccaaagtggagcagcacgtggtagatggcaaggagagaacgctgctggtgcacaggaagggatccacccgcgctttccctcctcaccacccactcattgctgttgattaccagctcactggacaaccagtgcttattggtggcaccatgggaacctgtagttatgttctgactggcactgaacaaggcatgacggagaccttcggaacaacctgtcatggagcgggtcgtgcgttgtcccgagcaaaatctcgccgtaatttagatttccaagatgtcttagacaaactggcagatatgggaattgcaatccgtgttgcctcacccaagctggttatggaagaggctccagagtcctataagaatgtgaccgacgttgtgaacacctgccatgatgctggaatcagcaagaaggccattaaactgagaccaattgctgttattaaagggtagagccaagagcagcagaacctctgaagtgccca

SEQ ID NO: 3670 - DNA, 1628 bp, Cricetulus griseus
gcagcggtggcatcgagaggagcaggtgatgccatggaagatcaatggctcaaaagtcacctgtcggggactgttggtaatattttaaggtcatatattaaaatttaccaaggagaagatctgcctcaccccaaaatccactgcttcaggccactgctgaagccaacaatttggcagctgcagcctctgccaaagatatttattacagcaacatggaggaggtttgtggaggagagaaaccttatttgtctccagatattttagaagagaaagcaccaagaattcaaacaggtcgctctggatcactttaagaagaccaaaaagatgggtgggaaggatttcagcttccgttaccagcaagagctggaggaggaaataaaggaactgtttgagaacttctgcaagcacaatggcagcaagaatgtcttcagtaccttccgaacccctgcagttctgttcacaggcatagcagcattgtacatagcttcaggcttcactggcttcattgggcttgaggttgtagcccagctgttcaactgtatggttggactgctgttaatagcactccttacctgggggtacatcaggtattctggtcagtatcgtgagctgggtggagctattgactatggtgcagcatatgtattagagcaggcttcttctcatattggcaattctactcagactgcagtgagggataccatcgttgggagaccacctacagataaaaaagctcaataacatcttaatggcaagatcaacaagagcccagtcagtccaggatttctgctaatgccatcatgagtccagttccagaggaatggcagatctgagactgccctggaagtgctgagacggggcactgtaataaatgaactgacctctcctatggtttccaattccacttgtcttggaagcagttctttttgttgctgttatagacccaaggctatttaagtctttgatgtgccacatagtgccttttaagaccagtccatgcctctgcagccatgaatgctgaggaatggaggacaacctcatgaaatgcagttttggatcaaagtattccatgtcccatgtggcctgttgttgtgggttagttgttttcctcaggggctgtactgtagctcaatcttggatgctggctctcatctaccttttcgtgctttagactaatctgtggggtatgttgaaagaaaatcagattctgctttgtatctagagattgctgcagcggttttgcaatggggctctgagatcatcttttaaagacatcaataggtgattggcgggcaggggtggggatgaatgagttagaatgaactgatcacagaatgggagtacccagacaggaagtgcacttgagcattttgagcagctttgcctgaggtctactgccaggtctgctcacttcgaaatttgctatgtttagaatcatcagggtgccttaatttagaagattgtccaagctttttaaagctgtcatagtgccttctcttatatacctgcccttacacacggacaggtaattaggatttttttttaaataaatgttgatagtatctcctctcatactctcaaaaagccaaactaggcactgtgatttgaatccttaaatttttgttgtt

SEQ ID NO: 3671 - DNA, 1628 bp, Cricetulus griseus
tatcgtgctgcaattagttcattgaaaactcagtcgctcgcggagcggtcagacggagactgctctcggcatttttccctcctgcctaaggatctcctgcggagagctgcaacaatgcccaaaagaaaggctgcaggtgatgccagtcaggagccaaagagaagatctgcccgactgtctgctatgcctgtgccctttacaccagaggtgaagcctaaaagaacgccaactccaaggaaactgaagaccacaaatgttgcagtggaagaaaacaaagatgttggtgccgtaacaattcctgaaaccaagccagaggatgttaaagaagagtgcaatgtggaaaatgctgaaaatggagaagccaaaattattgaggcacccatccccaaaatggaaactgaggaaataaagatgaatgaagacgctgaagaagatggaggagaaaagaaagaagcagtggcagcagaaggaaaagatgatgagctagaagaaaatgtccaaaatatagagaaagatgaagatggaaaagaggatgaagataaaggtgaggaggtaaaagatggaaatagggaagaaatcctcgaagagaaggcagattcagcagaaagtgaggatgtgaaagaggaaaaagatgatgaagaaaaaggagacgatgaaaaagaagatggcaaagaggaaggggatgggaagaaggaagaagagaaagatgacaaggaagagaaagctgaagtggaagaagaagtagaagaacagaaagaggaaaaagaagaggaagatggaaaacgcaaagaagaggaaaataaggaagatggaaaggaaggccagagtgaggaagatgggaaggaaggaagatggaaaggaaggccagagtgaggaagatgggaaggagaaagatgatgggaaagaagaagatagaaaggaggaagaaggaaaaggaaaagaggttgcagggggaggcaatgatgaaaacaaggtggaggctgaaaaagaagctgaaaacaaagatttcaaacaagatggagaaaaggaggagtctctgagtggtgtctaaaactgccctatgtgatgtcataatttggtaacaagtaccttcctgttgtaatgttaatagagataaatatttttatcagatattttataaacagtgcttttctttagcatcattcaatcttggaacatcatcatacaggttattagttgcaaaacacctaacatgacacctttatacatgttgtgattatagtagtgcaaaatataaaatgtatacttgcaactttgtgaatttcactgtgtgtaagttatatattaaatttttgagtttcaattttattcttatacgtgataattttcaaagtaggagaattccaaaagaaagagtttggtacaactttgatgtagttctcaaggttgcttttataaagaaggtcaactattttcaggtaatgttaagagttagaattgccattaccaaatataactgtatcagtagcttggaaagaatataaaaatcttaatttcggttttgaagaaatttaaatgtttatttcaggagggcagttttgatcatatgtgtatgcacaaagttttgctggatttatcataataaaacagttccacaaaggtaaaaa

SEQ ID NO: 3672 - DNA, 1628 bp, Cricetulus griseus
cccgagctccgagctctttgcttcctcggctgccaggggaccggacagccgcgcagcctccgctgctccgggccgtgggagccctgcagagcatgtcggaggatagcgatatggagaaagccatcaaggaaacctccattttagaagaatacagtatcaactggactcagaagctgggcgcagggattagtggtccagttagagtctgtgtgaagaaatctactcaagaacggtttgcactgaaaatcctgctcgatcgtccaaaagctagaaatgaggtgcgtctgcacgtgatgtgtgccacacaccccaatatagttcagattattgaagtgtttgctaacagtgtacagttccctcacgagtccagtcccagggctcgactcttaattgtaatggagatgatggaagggggcgagctatttcacaggatcagccagcaccggcactttacagagaagcaagccagccaagtaacaaagcagatagccctggctctacagcactgtcacctgctaaacattgcgcacagagacctcaagcctgaaaatctgcttttcaaggataactctttggatgcccctgtgaaattatgtgactttggatttgctaaagttgaccaaggtgatttgatgacaccccagtttaccccttattatgtagcacctcaggtactggaagcacagagaaggcaccagaaggagaagtctggcattatacctacctcgccaacgccctacacttacaacaagagctgtgacctgtggtccctaggggtgatcatctatgtgatgctgtgtggatatcctcctttttactccaaacaccacagtcggactatcccaaaggatatgcggagaaagatcatgacaggaagtttcgagtttccagaagaagagtggagtcagatctcagagatggccaaagacgttgtgaggaagctcctaaaggtgaaaccggaggaaagactcactgtggagggagtattggaccatccctggctcaactccacggaggccctagataacgtgctgccctctgctcagctgatgatggataaggcagtggttgcagggatccagcaggctcatgccgagcagctggccaacatgaggatccaggacctcaaagttagcctcaaaccccttcactccgtgaacaaccccatcctgagaaagaggaagttacttggcaccaagccaaaggatggtatttatatacacgaccatgagaatggagctgaggattcaaatgttgccttggaaaagcttcgagatgtcattgcccagtgtatcctcccccaggctggtaaaggagagaatgaagatgagaggctggatgaagtgatgcaggaagcctggaagtacaaccgggagtgcaaactcctgagggatgcactgcagggcttcagctggaacggtcgtggattcacagataaagtagaccgactgaagctggcagaggttgtaaagcaagtgatcgaagagcagactgttccccatgagccccagtagtaaaagcttcaaactgtttttaacaattggaaaaattattccttaatagtaaaaagtaatttttatgtaaattaataaatcataatttcatttcctaaaaaaaaaaaaaaaaaa

SEQ ID NO: 3673 - DNA, 1628 bp, Cricetulus griseus
ggccacaccgtgcacaatgaactcctctcgggcacccgggatggggcgtgtgggagggcacgggctgatggcattgctgatggccactctcattcttccaggaaccttggctaagagcattgggaccctctcagacccatgtaaggaccccaccaggatcacctccctcaacgacccttgtctcattggaaagaccggctccagcagcatcagcagccatgggggatccagcagcttccagcagcatcagcagccatgggggatccagcagctcccaggggaggatcttcaaaatccctgatatttaaaccaggaacagggtcttcccagatctcctattcctctgggtctggctccttccactcaggaagcagcggatttcagtcaggaagcagcggctctcagtcaggaaacagtggatttcagtcaggaagcagcggctctcagtcaggaaacagtggatttcagtcaggaagcagcaactcccagtcaggaagcagcggctctcagacaggaagcagcagctcccagtcgggaagcagcagctcccagtcgggaagcagcagttccagatgggtaagcagcagttctcagtctggaagctcaggaagcagccgggagggaccaggaaatggctccgctctaccaaccgatgacaaccctgtagctccaacgtgcccgactctccctgcagtgggggtcccgtcatcacacactcggggccctacatctctaactcccacaccgtatcgggtgggcagaggccggtagtggtggtggtggagcaacatggctctggtggccctggagggtttcaaggcatgccctgtagcaacggtggcccctcgggcaagccctgtcctcccatcacctctgtccagaaaccctacggcgggtacgaggtggtgggtggctctgccaacagttacctagccccaggcatgacctacagtgggggtaaaatctaccccgtgggctacttcaccaaggacaaccctgtcaagggctctccaggggcgccctcttttgcagccgggcccccggtctctgagggcaagtacttctccagcaatcccattatccccagctacagctcctccagttccaacgcctacccatcctcaggcgtcgtgttccagcccgtgggtaacggcggagtccagccctgtggcgtcggttctagggggccttgctctggctcgagaattcagatcacttccagcagtaccagtacctccttccagccctgcgcgggctaaccaggggccctgctcgccaccaggccccggctccatcggtggcggaagctcctccctctccactggcaaaattgtcctccagccctgcggcagcaagtctatctccgccggctacccctgcctttccgcttcctcctccgcgctgaacggaggtctgaacggctctccgcagcgtgtcaccaccgtgattgctaagccctgtggcctcaacagccccgggaggatgccctgccgttccatccgggacattctggctcaagtgaagcctctgggcccccagttagcagaccctcaagtctttctgccgccgggacagccactccctcgggatcctggacagggctcaataaacttggtgaactttgtgca

SEQ ID NO: 3674 - DNA, 1628 bp, Cricetulus griseus
tgccgagtcaaatactgcaatagccttcccgacatcccatttgaccctaagttcatcacctacccctttgaccagaacaggtttgttcagtacaaagcaacttccttggagaaacagcacaaacatgaccttctgactgagcccagacctgggggtcaccattgatctcatcaaccccgacacctaccgcattgatcccaatgttctcctggatccagctgatgagaagcttttggaagaggaaattcaggctcccaccagctctaagagatcccagcagcatgcgaaggtggtgccatggatgcggaagacagagtatatctccactgagttcaacagatacggtatttccaatgagaagcctgaggtcaagattggggtttctgtgaagcagcagttcacagaggaagaaatatacaaagacagggacagccagatcacggctattgagaagacttttgaagatgcccagaaatcgatctcccagcattacagcaagccccgagtgacaccagtggaggtcatgcctgtcttcccagatttcaagatgtggatcaacccttgtgctcaggtcatttttgactcagacccggcccctaaggacacgagtggagcagctgcactagagatgatgtctcaggccatgatcaggggcatgatggatgaggaagggaaccagtttgtggcttattttctgcctgtggaagagacactaaagaaacgaaaacgggaccaggaggaagagatggactatgcaccagatgatgtgtatgactacaagatcgctcgggaatacaattggaatgtgaagaacaaagccagtaagggctatgaggagaactatttcttcatcttccgagagggcgatggggtttactacaatgagctggagaccagggtccgtcttagtaagcgtcgggccaaggctggggttcagtcaggcaccaatgccctgcttgtggtcaaacaccgggacatgaatgagaaggaattaggaagccagttggaaaaccacgaaccagaggaggaggaggaggaggagatggaggctgaagagaaggaagctgggggctcagatgaggagcaggagaaaggcagcagcagtgagaaggaaggcagcgaggacgagcgctctggcagcgagagcgaccgggaggagggtgacagggaggagggaagcgacaagagtggcagcggcgaggatgagagcagcgaggacgaagctcgtgctgcccgcgacaaggaagagattttcggcagcgacgctgattcagaggacgatgccgactctgatgaggaggacagagggcaggcccgtgggggcagtgacaatgactcggacagtggcagtgatgggggcggccagcggagccgcagccagagccggagccgaagtgccagccctttccaaagtggcagcgagcactcagctcaggaggatggcagtgaagctgcagcttctgattccagtgaggctgagagtgacagtgactgagccgcgaggcctcctgaggccagcgcacacaccgttagggcagggaagcacttttctagctgtctgttttgtgagccccttgttcgtccccacccctcgaatctttgctgttaataaagtcaacttctcttga

SEQ ID NO: 3675 - DNA, 1628 bp, Cricetulus griseus
gccagaggagaaaacagccgaaggagagaaaacgccaaaatctcggcttagttcgttttcttggctgtcgaaagctaatttgtttatgaaaatgcccctgcgcgtgtaaccggaacaactggaggcgatggatccgacccctgctcgtacttatttatgtagtttccatcctgatctcggttcccctgtgtatttgggaacttcagaaactgaaggttggaatacacactaaagcatggtttattgctggtatctttctgctgctgacgatacctgtgtccctctgggggattctgcaacatttggtgcattacacacaacccgaacttcaaaaacctattataaggattctttggatggtcccaatatacagtttggatagttggttggctttgaaatatcccaaaattgccatatacgtggatacctggagggagtgttatgaagcgtacgtcatttataactttatgatattccttaacaactacctaaccatccgattcccaaacgtgatgttacacctggaagctaaagaccagcaacagcatctccctccactatgctgctgtccaccgtgggctatgggagaaatgctgctctttcgatgcaaactaggagtattgcagtacactgtggtcagaccaattaccactgttacagcattgatatgtgagattgttggtgtctacgatgaagggaactttagtttctccaacgcttggacttacttggttataataaataatttgtcacaactgtttgccatgtactgtctcctgctgttttacaaagtgctaaaggaagaactcagccctatacaacctgttggcaaatttctttgtgtcaaactcgtagtctttgtctcgttctggcaagcagtacttatagctttgttggttaaggttggcgttatttcagaaaagcgtacgtgggaatggcaaagtgcggaagctgtggccacaggcttgcaggatttcatcatctgcatcgaaatgttctttgcggcgatagcccatcattactccttttcctataaaccctacgtgcaagaggcagaggaaggctcatgctttgactctttccttgctatgtgggatgtgtcggatatcagagatgatatttctgaacaagtaagacgagttgggagaacaatgcgaggttatccaaaaaaaaatgttttcctgaagacccggagcacactgaacacacaagcctgctttcctcatcgtcacaagatgcagtttctgcaggttcaaagccgtcctcccccctgggccagtatcagggctttggacacacgattactccacagaatgtggctgctgcatccaaactatgtgaagacatcatgattgatctcccagaagagcacacatataatactaatatacacatgttagtatatatatttgtatgttttatatatcacaaataacatttaaatttcctaggctttggctttcttaaactgctatggcatcataaattcaaacagtaagtaacaacttcagctaaacactcttgtatttctcaagaggatggacatttgaaaaaaaaaaatcagtgcttcttaccactgcatgaatgtaatgctctggactgaaaatgaaaatgtacatataaattca

SEQ ID NO: 3676 - DNA, 1627 bp, Cricetulus griseus
ccctgtcaaccgggctactgtgaaggcccttatcagccatctgtactgtgtacagtgccaaatgaacacacacaacttggctattgtgtttgggcccacactcttccagacagatgggcaggactacaaggccggcaaggtggtggaagacctcatcaaccactatgtggtggtgttcagtgtggacgaggaggagctgaggaagcagagggaggaagttactgccattgtgaagatgcgagtggctggcactgccagtgggacccagcatgctggtgacttcatctgcactgtgtacctggaggagaagaaggtggagactgaacagcatgtcaagatcccagcatccatgacagcagaggagcttgccctggagatcctagaccgccgcaatgtgagcatcagggaaaaggactactggacttgctttgaggtcaacgagaaggaggaggcagagcgcccattgcactacgcggagaaggtgctgcccattgtacatgggctgggcatagacagccacctggtggtcaagaagtaccagtccatggagtccatgttgttgtatttggccagccgtgtgggtgacaccaagcatggcatgatgaagttccgtgaagaccgaagcctcctgggtctgggtctgccctcgggtggcttccacgatcgctacttcattctcaacagcagctgcctacggctctacaaggaggttcggagtcaccggcctgagaaggagtggcctgtcaagagcctcaaagtctacctgggtgtaaagaagaaactgcggccacctacttgctggggcttcacagtggtgcatgagacagagaagcatgagaagcagcagtggtacctctgctgtgacactcagatggaactccgggagtggtttgccaccttcctgtctgtacagcatgacggcctggtgtggccctcagaaccctctcgagtgtcccgggcagtgcctgaggtccggatgggcagtgtgtcgctgatccctcttcgtggcagtgaaaatgaaatgcgccggagtgtggcagccttcactgccgaccccctttctctcctccgtcatgtctgagcataggagtcgttctggctctgggacactgtcactgccaccaggaagccttcctgttcggacaccctcgtgctctgcatgcttggtgtgaaccagcgggacacacggggaagccgtacccacagcccacatcctgactgcagcacaggctccttggctgggcaggaatgggctgacaatgggattttcccgggaggggcccttccctgctctccagtcatgcaatgctcctgacctggcttgcttacccagggtccctctccttgagtttgtggtgttggagagatgggcagaaatcaggagctctgcaagagaggtcttggggccccgctgggagggagcccacccccttcctataggctccagagtggcagaaagctgctactctgaaagaactcctggggagtctggaagggagctcatgggaagctctataagcaaaaagctaggacttggggaggtcagcccacttctggtgtatgctgcagggaggcccaggctgtggctgtttgctacccctcccccactttggatactttttgataa

SEQ ID NO: 3677 - DNA, 1627 bp, Cricetulus griseus
acgtggcacagccgaacacttaacgccgcgccggagccaccgcaccagtcgccgagcaggtcccgctcccgctacgtcgtgtcccgtggcctcgccgacacgccggccagagagacaggtcttcagccttttctcttccgcccagctgttcgtgagccggaacagagaaggcccgaggacgcaccagaccccctcttctgaccgtcccaagtgccaccaccgctatgggcctcaccatctcctctctcttctctcgcctcttcggcaaaaagcagatgcgcattttgatggttggattggatgctgctggcaagacgacaattctgtataaactgaaattaggggagatagtcaccaccattcctaccattggttttaatgtggaaacagtagagtacaagaacatttgtttcaccgtatgggatgtcggtggtcaagataaaattaggcctctctggaggcattacttccagaatacccagggtcttatttttgtggtagatagcaatgatcgtgaaagaattcaggaaggagcagctgtgctgcagaaaatgcttctggaagatgagctgcaagacgcagtgctgctgctttttgcaaacaaacaggatttgccaaatgctatggccatcagtgagatgacagataagttaggtcttcagtctctccgtaacagaacatggtatgttcaagccacttgtgctacccaaggaactggtctgtatgagggactcgattggctgtcaaatgaactttcaaaacgctaaatgaactgggatatctaaccaaggacatgtttgatagaattggtctagacttgttacaacaaaattagtttgcatcttggttattaaaggatatctgagacaggtttgggcagaatattacagcatttaaaacttaatttgttgccaattattgtttaccaagcacaacgttgctatttagcaatatgcttgggtgtaagagaaattctccgtgggaaaaaaaagtatccactgttatacttcccttaagcctaaaagcctggacatttagcttttgtgacacctttaaacaaatctgttttgagtgttttttgagcccacaccaataatgttataaagttattcccttgatactttattgatacctttatcattcctagaacagtctgctgatttaaaaatgtagcattccatttgtatttatttctaccccttgccaaaaaagatttttctaatactgcttggaccagccaggggaacactattcaattttcttgtactgaggattcaccaccaccaccccctcacattattgaccccaggcttccaccagccaaacttacctcgtcaatgtggtttggatttgatagctaattctgtgctggttgcaaagagttcacattgaaataacttttaatactcagcagattgtcttcctttatattgttaccttttttatgttgcatgttgcttttggaatcagcctgactctttgcccagtatatgatagttctgctgatattttactgtttattgatgaacatatcttcattaagaattttttgaaaattcattaaattcagcaaataagttttcttcgtaacccatttgaaattattcctaataaaatgattctaaaa

SEQ ID NO: 3678 - DNA, 1627 bp, Cricetulus griseus
atacaaaacatccatgtgttcctatgtgcccgagtccagagagcgataccaacaggtagagggttactacccagtggctcctcatccagctcagatcagaccttcataccccagggagcctccttatagtcggcttcctcctccccagccccatcctagtctggatgagttacatcgtagacggaaggaaataatggcccaactcgaggaaagaaaggttatctctccacctccttttgcgccttcaccaacattgcctcctgcattccatcaagaggaatttttggatgaagaattcaaggtagctagggaagtacaaagcaaattgattatagccagtattcaccttggtcatgtgataccatcggctcctacattggaaccaaagatgcaaaacccaaagatgtggcagcagggagtgtggaaatgatgaatgtagacaagtaaaggaatgagagaccagagattggatcttcagagaagagcagtggaaactagtgatgatgacctcatcccatttggagaccgaccaacagtatctcggtttggtgccatctctagaacatccaaaacactgtatcagggtgctggtccaatgcagaacaccctggcaggtcaaccactgccccctccactgcctccaaaatggcctggaatgatctcaagtgagcagctaagcttggaactacatcaggtggaaagagaaattggcaagagaacccgggaattgagtatagagaaccagtgttctatggacacgaaaagcaaattgggtacaaggtaagcaagcagaaaatgggcagccagaaccacaaaacaaagtcccagctgaagaccttacattgacattcagtgatgtaccgaatggatcagctttgacacaagagaatctcagcctcctatcaaacaagacaagctctttgaacctgtcagaagaccctgaaggaggaggagataacagtgattcccagagaccaggagttacttccagttctgctccctagtatatgggtgccctgcttctaccttctgaaatgggattcatttgctcatttttattttgtattgaagactcacttcctggtgactcttcatttggttttgtgttttgtctttaacactaagtaggcagatcacaagtctttggctcccatgttagttgtgcactcagagtcatcttagaactggaaactgtcgggtggtcccactctaatgagggcacgaaaggtcaagaaatggaagcaaacaacactgggtggatcatggtctggggtttttttgtttgttttggtcttcctttttcaaattgtctatttctataatttattagtgtagcctgtctctctggccaatgctgaggttttatttggaggcattaacttctgcaagttctttttgaataggaaaaaaagaaccttgcttgaaatggaacattcccttgtttaatatttccattaaaaacaaaacaaaacagccttcaaaacaaatgaggtggaagaaaagaagtaggagtatgtttagggctactgagttctggatctgaatgagtacatatcccactggttgcatatttttgagaagattaaggcctttctcaattttgtatttgtgtgcatgttgtttatat

SEQ ID NO: 3679 - DNA, 1627 bp, Cricetulus griseus
taaacctttctgtgcagttctaccagaaattcagaagcccgaaaggaaaattcagtttagagagaaagtattatggactgctataacactcttcattttcttagtgtgctgtcagattccgctgtttgggatcatgtcatcggattctgcagatcccttctactggatgagagttattcttgcatccaacagaggaacattgatggaattgggcatttccccaattgtaacatctggtttgattatgcagttgttagctggagccaaaatcattgaagttggcgatacacccaaagatagagctctgttcaatggagcccagaaactatttggatgatcattaccattggcaagccattgtgtatgtcatgacttgagggtgcggtcatagctctatttcatttgttggccaccaggacagacaaagtccgagccttgagggaggccttctatcggcagaacctccccaatcttatgaacctcattgccacagttttcgtgtttgctgttgtcatatattttcaggggtttcgtgttgacttgcccattaagtcggcccggtatcgaggacagtacagtagctatcccatcaagctcttctacacatcgaatattcccataattctccagtctgccctagtttcaaacttgtatgtcatttcccagatgctgtctgttcgatttagtggcaacttcttagtaaacttactaggacagtgggccgatgtcagtgggggaggacctgctcgttcctaccctgtcggaggtctttgttactatctgtctcctcctgagtccatgggtgccatatttgaggatcctgtccatgtagttgtatatatcatcttcatgttgggatcatgtgcattcttttctaagacatggatagaagtgtctggttcctcagccaaagacgtggctaagcagcttaaagagcagcagatggtgatgagaggccacagagatacctccatggtccatgagcttaacaggtacatccctacagcagctgcctttgggggtttgtgcattggtgccctgtcagtgttagcagacttccttggggccattggctctggcactgggattctgcttgcagtcactattatttatcagtattttgaaatatttgttaaggaacaggctgaagttggagggatgggtgctttgtttttctaaatgttcatatatttctttgcgtgtgtgaaagggaaaatattttgacatactgtttctgtcaaataatgctggttcccctttctccccccagtttgttgttttcagtgctaattgtcccatttctaaaatgggcgctgagctaagtctgtgtgcagcagtagtaccagctgccttaaaactgaagtttacattatttgttgacactgtccatctagtgttgcccatgatgctgggaagcagtgtatctgcctagctgttggtcagacagcaagatagtgacatggattagctttgcacacaacattcagaacactgaatattcccttgtttaaaaaataaacgtagtgcaaattgccactatccagtatttttgagcttccctaatgagttatggagcatttatatctaatgtatattttagataatttttatacttttttaactcatc

SEQ ID NO: 3680 - DNA, 1627 bp, Cricetulus griseus
cttcagggcaaagtcctgaggttggtagccctacgagtcttgctcgctctgtctctgcttcagtctgcgccatcaagcccagtgaccccaatagcattgaacctatagctatggaggctatgaaggcttcggctgaattgcagacgaactctaaggaaacagagcctcctgctctgcaggctcttcctcatctcgcttccccagcaggccaggatccagctatgcctttgcgtctttcatctgaagaagcatttgttacagataatccagagaaatctgtggaaagaagagcccagggcctcagagtttatctccacacaagacaggacactagtttatctctcacaactactgggatgcatgggctacaggggtttgtagaagaaaagagttggcatccagaaaatccgaaccccagtcaagtgaatggccttcagcaacacagagaagccctagtccatctcatctcacatcccataatccctccatggagacggaaacagtgcagtgtaacccctcttgtgaaaccatggaacattccatctccactcgggatttgcagcccccagaagataatgttgaaatgtctgcgatggatagcaaagataacatcagttcctcttcccctttaagtgatcatggtcagccctctgtggaggcacccgaagaattttgttcatctgtcacagtggccttgaaagaactgcatgatcttttggtcattagctgtaagccagcttcggaaaatgcatctgaagatgtttcctgccagtcagagatggaagctgagagccaaacaggtattttggaccatttaggaagaagggtccaaagtgagcatctgaccattagtgaccagtacccacaagtctcctgtcaccaggccacctctgaatcagaaaagatagatgtccccaggccaagggagtcggtcaggaagagctgctctgtcgccataacctcagctaaaccagctgatcagtcgcattgcacctcagatgtagaaatttcacccacatttgtagcaggtgaggagggtacccacagtcagccttctgagcacatgcagaatccaggcacagccagcctggagaccagtgatgtctgccctggagctgcgccaccctcccatggatcggatccgcctgccacacagtccttgtcttctccctctgctcttccacctttcgtctttcctgccgcagatgttaaccggatacttggtgctggcttcactctgcaggaagccctcggggctttgcatcgagttggtgggaatgcagaccttgcacttcttgttttgctagcaaagaacattgtagtccctacgtaattgtgggaaagtgggccagaccctatcctattccattccctttgtgaagtcctctccacacagatacactcaccacacacacacacacaatatatagaaaaactgcaagcaagcaaaatggagacacagatttttttttccagccaaagtaatttatgatcttttgtctgatgaatttgtctatttgttaaaatttgggccttttaaaatgtattggcagtatgtgcatacaaaagctttttattctcattaagatgatgtactctggaataaaatggatggttttgtgtatag

SEQ ID NO: 3681 - DNA, 1627 bp, Cricetulus griseus
gaaagtgtaccaagcggagatggatgagcttccgtctgcttttgcggatggctccaagaatggtggggataaacatggggccaacagtctgaagatcacagagaaagtgtcaggccagcatgtggagatccaggccaagtacatcggcaccactatcgtggtacgccaggtgggccgctacctgacctttgccgtcagaatgcccgaggaagtggtcaacgctgtggaggaccgtgatagccaaggcctctacctctgcctgcggggctgccccctcaaccagcagatcgacttccaggctttccgtgccaacgccgaaagccctcgtaggccggcagctgtcagcccctctcctgtggtccctgagacattcccgtatgagaccgctgtggccaagtgcaaggagaagctgcctgtagaagacctgtactaccaggcctgtgtcttcgacctcctcacaactggtgatgtgaacttcacactggctgcctactatgccttggaggatggcaagatgctccactccaacaaggacaagctgcacctgtttgaaaggactcgggaactgccaggtgctgtggccacactgttacacaagcacactcgcacacactaagcccatggggacaccccaagccaccatgtcagtggggctgaagcatctacacagttctttccctaggcagggcctccttagcaatacgacatccctagagagccctcgctcagcatctttaacagatggatggaaccgtgtggccaataggctgtgccctcctggtacctttccaccccgtgctacacagagactgccctgtacatcccagctaccgtggatatgagtttgaggtgccattcccaggcacctgcctgcagagccccacagttggagggaagatgtgttttggcctgaggtcttagaagtgccactcatgggctcggatccccatctctggctccaccctctgcccttcctccattgcacttaagaaatctaagtgcttggttctgaatgtttcaacagagaattgatcctccggttcctgctatctctccccccacacccccaccccctggggcctcagggcatgagcagcagatccagtggatagggccagctggcctgccctgtcctctgctctcctcacctgcctcctagacttccctaactgctggtcagcggctccacttcccaccccagccctcttgcctggatttcttggtggggagcccagagctattcccatctctgctgctgttccagaggtccccaagggaccagcatggtggtccccagggacctctcatacactggccaggaggctgcagaacctgcctctccctcccagaggtcctgacccctgccaaaaccacatgggtagctgggaggggtcagcccagccccctcctcctccctgctggtttttagctatccctatgttggaagtaaaaagttgaagcactttattttggttgtgtttgatcacagttctgcttggaagtggggaccctcactgtgtccacctgtctgcgacctgtgtggagtgtcactgcgtgtacatactgtaaattatttattaatggctaaatgcaagtaaagtttgttttgttttgttattttactttt

SEQ ID NO: 3682 - DNA, 1627 bp, Cricetulus griseus
gaagatcgaatcccagagttggagcagctggagcgcgtcggacttttcagtcgctcggaaattaaggctatcatcaagaaggcttctgacctagaatacaaaatacagcggagaacccttctcaaggaagactttatcaattatgtccaatatgaaattaatcttttggagctgatccagagaagaagagcaagaattaaatattcatttaagaaggatgagattgaatattctattgtacatcgggtacaaggtgtctttggtcgagcttctagcaaagtggaaagaggatgttcaactttggctgtcctatatagtctttgtaagaaatggggtaccaaagctcatcttagcaggatattctctgccatgcttgccattcattcaaacaaaccagctttgtggattatggcagccaagtggaaatggaagatcgattgtcttcagaaagtgccagacagttatttcttcgcaaagatctacaaaaagaaatttatgatgaccttcaagctctgcacaccgatgacccactcacttgggattatgtggcaaggcgagaagggaggaaaggtgctgtgcagtgtacgaagaggcagtgaagactcttcctacagaggccatgtggaaatgttatatcaacttttgcttggaaaggttttctaagaagaccagtagtgtatccctcagagggcagaggctggaaagaaccatgcttgcattcaagaaggcccatgaactgaaactcctttctgaagcccagtataagcagtggattgacttgttgctgcgccaggacctctttaaggaagctttgcaggtggcagaagatgggacagaattgttcaaggactctgcaacaatgtggcagatgaagttgcaggtgctcattgggtcaaagagccctgatgtagctatgcgttttgaagaagcctttgcacacctcaagccccaggtttgtctgcccttgtggatttcttgggcagagtggagtgaaagtgctaaaagccaggaggacactgaagcaatctttaagaaagctattttagctgtcacaggtgccagttcaataactctgaaggagaaatacctggattgggcttatcggagtggtggctacaaaaaggccagaacagtgtttaaaagtttacaggaaagccgtccattttcagttggttttttcaggaagatgatacagtttgaaaaggagcaggaaccctgcaagatggcaaacctgagggaatattatgagagggcgctgagagagtttgggtctacagattctgatctttggatggattacatcaaagaagaattgagccaccccttcggtagacctgagaactgtggacagatctattggagagccatgaaaatgttacagggacagtcagcggagctgtttgtagctaaacatgccatgcaccaggctggccactagcgaagagtaccaccagtttggtgaaattgtattgcaagcttctgggacagttcgtaatacgagtttgtataagagtttttgagaagtagcagacgggttagctgattgattgtgtaacatactttaatttggcattactctttggttccagaaaagagaactcctgctgcctgttaaatctaaaataca

SEQ ID NO: 3683 - DNA, 1627 bp, Cricetulus griseus
aagaacatcactttggatcctctggaatgacattgcatgaacgctttactaaatacctaaaaagaggaaatgaacaagaagcagctaaaaataagaaaagcccagagatacacaggaggatagacatttccccagtacattcagaaaacatggtttgactcacgaggaaatgaaaagtccccgggaacctggctacaaggctgaaaggcaaatacaaagatgatcctgttgatctccgccttgatattgagcgtcgtaaaaaacataaggagagagatcttaagcgaggtaaatcaagagagtcggtggattcccgagactctagccactcgagagaaaggtcaactgagaaaacagagaaaactcacaaaggatcaaagaaacaaaagaagcaccgaagagcaagagaccggtctaggtcctcctcttcttcctcccagtcgtctcactcctacaaagctgaggagtaccccgaggaagcagaggaaagggaggagagtaccacgggttttgacaaatccagactggggaccaaagacttcgtgggtccaaatgaaagaggcggcagagctcggggaacctttcaatttcgagcaagagggagaggttggggcagaggaaactattctggcaacaataacaacaacagcaacaatgattttcaaaagagaaaccgggaagaggaatgggatccagagtacacacccaaaagcaagaagtattacttgcatgatgaccgggaaggcgaaggcagtgacaagtggatgagccgtggccgtggccgaggagccttcccccgaggtcggggccgtttcatgttccggaaatccagtaccagtcccaaatgggcccacgacaaattcagtggagaggaaggagaaattgaagatgatgagagtgggacagagaacagagaagagaaggacagtttacagcccacagctgaataagggccactgttgatggagcccttgcccaggggagaaaggcactgggagaggctggtggaaacagggagcctcaagaagatcctgcaaatcccaccccacaacccaccagctacacagaatttttcttttttcctttttaatggatatgtagtaatattagcagaaagatttaatttgggaactttgattcttgaaagaaaacaaagcatgtgaataaacattgaagtgttcgcctcagtttgggaccaaactgcttggatctttgtagaaacttgttttgtatgtcacggaggagtttaaggcctttctgaccacctgtgtccccttcctgcacagccatgtgtcacgtggagttgctcccagcctccccatgcaccctgcgcttgtctgatttctcccgggctgggcttcccatcttccaccagcagctccagtatcctaaactttgtagctctgctggtcctcagcagaaggagtggaaactggagggcagtttctggtctgttttctaagagacttctgaattctattatctttacaaatagaagatgagaaaataatttttcaatattttttattgatctttttataaaatgaaaagaaactcctatgatcgattaaggatggcggttatggctgggtggtttgtggggttgtgtgtttttggttttttactt

SEQ ID NO: 3684 - DNA, 1627 bp, Cricetulus griseus
ggtgagagactccaagtcctcctactgtgttcattgttctgttaaacttagctgactcccttgggcgtcagggttgtcctagtggggtcgcggcctgcgcacccgtcactgagccgacctcggtcctcgactttgtgcggctgtgtggagatggtgaagctgttcattggaaatctgccccgggaggccacagagcaagagatccgctcactcttcgagcagtacgggaaggtgctagaatgtgacatcattaagaactatggctttgtgcacatagaggacaagacggccgctgaggatgccatacgcaacctgcaccactacaagctgcacggagtgaacatcaatgtggaagccagcaaaaataagagcaaagcttcaaccaagttacatgtgggcaacatcagccccacttgtaccaaccaagagcttcgggccaagtttgaggagtatggcccagtcatcgaatgtgacatcgtgaaagattatgcctttgtacacatggagcgggcagaggatgccgtggaggccatcaggggccttgacaacacagagtttcaaggcaaacgaatgcacgtgcagttgtccaccagccggcttaggactgcgcccgggatgggagaccagagcggctgctatcggtgcgggaaagaggggcactggtccaaagagtgcccggtagaccgttcgggccgcgtggctgacttgactgagcagtataatgagcagtatggagcagtgcgcacgccttacaccatgagttatggggattcgttgtattacaacaacacgtacggagcgctcgatgcctactacaagcgctgccgtgctgcccggtcctatgaggcagtggcagctgcagctgcgtctgcatataactatgcagagcagactctgtcccagctgccacaagtccagaacacagccatggccagtcacctcacctccacctctctcgatccctacaatagacatctgttgccgccttcaggagctgctgctgctgcagcagcagctgctgcttgtactgcagcttctacttcatattacgggcgggatcggagccccctgcgtcgtgctgcaggcccagtccccactgttggagagggctacggttacgggcatgacagtgagttgtcccaagcttcagcagccatgcggaattccctgtacgacatggcccggtatgagcgggagcagtatgcggatcgggcgcggtactcagccttttaaagtttgaggtgggatgtgtgtgggctgaaattccaagctgcggttgtgcatgagaatacacccttcgtggtaccccatctccgggacgttctcggctctgtgcgttcagtccctcaggaaccatggaccttaatttactttgttaagttgagactttgttttttctattctctttgctgctcagttttctgttctcctgtttattcttctgtagcttcttcccattcatgctctgttctcccagcatgccgcctctgcagaaactggtggtggctgtgctctctcttccctgcctcctgactatagtgcgtattggatttggggatgaccttactgagaatcactgctcctaatgggggtgtgtttaaagtatgatgataagaaaaaaaaaaaa

SEQ ID NO: 3685 - DNA, 1627 bp, Cricetulus griseus
gcttgctgggcttcagggcaccgcctctgagtagggcgggcaaggagagagccgaggcggagctgatggctgcgctgaaggcggggcggggtgcaggctggagccttcgggcttggcgggctttggggggcatcttctgggggaagggccccctttttacccctgaccttcaggctctgctgacgttaggaagtcccgaccctctctcccggcccgggtgcctgtgggggtccttgcatcacgggcatgtctgacgtctgggaccccagatctctgggcacggctggccgtggggactgcaggctccagtgcccaggaggcccgcaggagccccggcccccgtcggcgcgaatggctggcggtggcggtgggcgcagggggagcaatgttgctgctgttgtggggctgggggcggggtcctcccgcggtgctggccgctgtccccgctccgccgcccagctctccccggagccagtacaatttcatcgcagatgtggtggagaagacagccccagccgtggtctatatcgaaatcctggatcggcaccctttctcaggccgcgaagtccccatctcaaacggctcaggattcgtagtggcttcagatgggctcatcgttaccaacgcccacgtggtggctgaccggcgccgagtgcgagtgcggctgcctagtggagacacatacgaggccgtggttacagctgtggatcctgtagcggacattgccacgttgaggattcagaccaaggagcctcttcccacactgcccctcggccgctctgctgatgtccggcaaggggagtttgttgttgccatgggaagtccctttgcactgcagaacacgatcacatctggtattgtcagctctgctcagcgtccagccagggacctcggactccctcaaaacaacgtggaatacattcagaccgatgcagctattgattttggaaattctggaggccccctagttaacctggatggggaggtgattggagtgaacaccatgaaggtgacagctggaatctcctttgccatcccttctgatcgccttagggagtttctgcaccgcggggagaagaaaaattcctggtttggaatcagtgggtcccagcgccgctacattggagtgatgatgctgactctgactcccagcatccttgttgaactacagctccgagaaccaagcttccctgatgttcagcatggtgtcctcatccataaagttatcctgggctcccctgcacacagggctggtcttcggcctggtgatgtgattttggccattggagagaaaatggtacaaaatgctgaagatgtttatgaggctgttcgaacccaatcacagctggcagtgcggatccggcggggatcagaaacactgaccttatatgtgacccctgaggtcaccgaatgactggactagcaagagtgtgaaccctctgctctgatttcctcctcgccttcctagcctaggttctgagtgcacctgggtggaggagtcaatggacctgtagagggcaggtccctctaaccaccagcaccaaccctgggctctgaagaacacattttatataaaataaaattatacctagacaaaaaaaaaaaaaaaaaaaaaaaaaagaaaaaa

SEQ ID NO: 3686 - DNA, 1626 bp, Cricetulus griseus
tgcagcctgacctggaggataggacagcatctggctcaggctgcccacaatggccctcctgacacacctgctggtctgcatctttggcatgggctcctgggtggctatcaacgggctctgggtggagctgcccctgctggtgactgagttgcccgagggctggtacctgccctcctacctcactgtggtcatccagctggccaacataggccccccttctagtgaccctgttgcatcgcttccaacctggctgcctgtctgaggtaccggtgatcttccttatcctgtgcataggcacggctgcctgcgtcctcttggccttattgtggaacacgacttcctggatacagggcggacaccatagtgtggccttcatcgtcctcaccttcttcctggccctggtggactgcacctcctctgtcaccttcttgccgtttatgagccagctgcctacgtactatcttaccacctttctttataggggaggggctcagtggcctcgtgcccgcactggtggctcttgcccaaggctcaggtatcaccacctgtatcaatgccacagagacgccaggcaccaccttgaggcacctcggagagtcgctacctggccccaccgcttctcaccacttctcttcttcctcctgctatccttcctgatgggctgctgtctggtcgcctttttcatcctgcagcggcagccctgggacggcaaggctccatagaggaccttctccactcccaggtcaccctgcactccatcaggccacgagacgcagaggacgccagctcactgggtgcccctgtaaccagcccaggcaaggggtcagtggaagtcagtgtagcctcactccgcccagcccagctgaccttcatctactccgtggtggcctttgtcaacgcactcaccaacggtgtgctgccttcggtgcaaacctactcctgtctgccttatgggcctgttgcctaccacctgtctgcaaccctcagctccgtggccagccctcttgcctgtttcctccccatcttcctgcctaacaggtcgctgttgttcctggggttgctcacagtgttgggaaccagctttggggcctacaatatggccatggctgccatgagcccctgccccatcctgcagggtcactggggtggagaagtcctcatcgtgctttcctgggtgctgtttgcagcctgtctcagctatgtcaaggtgatgctgggtgtgatcttgcgtgaccggagccgcagtgccctcttgtggtgtggggcagcggtgcagctgggctcgctgattggcgccctgctcatgttcccactggttaacgtgctgcggctcttctcatctgcggactactgcagcctggactgttctgtctagcctcacttggccaccacaagacaccctgagctttttacccaaaagccctcctccccacctggagttgcaaagcacagccctcccccagcactgtgccctgtattaggagccccagttgcagactttgttctttgacttctgagagatctggtttgtagcattcagctggaggcagcccaaggacattaggggagaggctgggagattaagctgcctgttgcctgctgtgggaacctggggaagtctcttga

SEQ ID NO: 3687 - DNA, 1626 bp, Cricetulus griseus
gccgtcgtcgccttcctcctcctcctccccacggtgcggacagcggggcggcctaggctgtcggccctcgagccgagacgtcttctctcttgcttagttctggggagctcctggccgacatgagcgatgtagaggagaacaacttcgagggcagagagtctcgctctcagtcaaaatctccaacgggaactcctgctcgagtaaaatcagagagcaggtcaggatctcgtagtccatcaagggtttccaaacattctgaatcccattctcgatcaagatcaaaatccaggtcaaggtcaaggaggcattctcatagacgctacactcggtccaggtctcattctcataggagacgatctcgaagtagatcctatacaccagagtatcgtcgacgaagaagtcggagtcactctccaatgtctaatcgcagaagacatacaggcagcagggcaaatccagatcccaatacttgcctgggagtgtttggcctcagtttgtacacaacagagagagatcttcgtgaagtgttttctcgatatggaccattgagtggtgtgaatgtggtttatgatcagcgaactgggaggtcacgtggatttgcttttgtgtattttgagaggatagatgactctaaggaggctatggaaagggcgaatgggatggagctggatggtagaagaattcgtgtggattattctatcaccaagagagcacacacgcctacaccaggcatttacatgggcagaccaacacatagtggtggtggcggtggaggaggaggcggcggaggaggaggaggaggcggcggtggcagacgacgagattcttactatgatagaggatatgaccgaggctatgacagatacgaagactatgattatcggtacagaagaaggtcgccttctccgtattacagtcgctacaggtcaaggtcaagatctcgttcctacagcccaagacgctattgataatgaagcagttatggctaaggactttccttttcctctttttgattctggatttatgagcttccgatgcttcctagtcctcaaaacaaaacacaaaaaaaaacccttggtttatttcatctatagtgtggccagttgtgttactgttttccatcctttgttatactcttaaaggtgtaattgtcatttaagtcgtccaacatctgagaaaaaaggagacccgctgttatgctttgtggttctttgccttttacaggggactaactccctactaggaggaagaaatggccgtcttttgaaagcttttgtgatggtagtgtagtagactgaagaatgtaactttgaccctaaaaattaagtcaccttttaggaattaaagcttgtagattcctataaaacatgttatgtttgaagttacgtgttaaaccttataaacttaaagtgtgatttttgtgttaaatttacagaaacttaagtattcccttaatcactgaaggacaacctttatttattacctagaacaactgtataacttgctgttagaaattttggtattgggttattggttttgtgggttattgtatagtatagaatcctaaaatacatgtggggaagagtaatttcaaataaaagttaatttgaaaaggaaaaaaaaaaa

SEQ ID NO: 3688 - DNA, 1626 bp, Cricetulus griseus
ctgagtctgctgtttatcatcctgctgcgattcctggcaggcattatggtctgggtgatgattgtcatggtggtcctggtacttggctatggcatatttcactgttatatggagtactcaagactgaggggacaggcgggctctgatgtttccttggtggaccttggcttccagacggacctccgagtgtacctgcatttgcggcagacctggatggccttcatgatcattttaagcatcctagaagtggttatcatcttgttactcatctttcttcgcaaaagaatactgatcgccatagccctcatcaaagaagccagcagggctgtgggacatgtcatgtgctccatgctcctacccctggtgacgttcttcctcttgtgtctctgcgaatgagagccgccagtgtcccaatggccgatgccagtttgcattctacggtggcgagtctacctaccaccgtgccctgctgggtctgcagatcttcaatgtattcatgttcttctggctggccaactttgtgctggcactgggccaggtgaccttggccggagcctttgcctcctattactgggctatgcacaagcctgacgacatgcctgccttccccctcttctctgcttttagccgagcgctgaggtaccacacgggctccttggccttcggctcacttatcctggccatcgtgcagatcatccgagtggtgctggagtacctggaccagcgtctgaaagctgcacagaacaagtttgccaagttcctcatggtctgtctcaagtgttgcttctggtgcctagagaagtttattaaattcctgaataggaatgcctacatcatgattgccatctatggcaccaacttctgtacctcagccaggaatgccttctttctgcttatgaggaacattatcagggtggccgtcctggacaaagtcaccgacttcctcttcctgttgggcaaacttctgattgtgggtagtgtgggcattctggccttcttcttcttcacacatcggatcagaatcgtgcaagatacagccctgcctctcaattactactgggttccaatactgacagtgatcattggctcctatatgatcgcacatggcttcttcagcgtctacggcatgtgtgtggacacattgttcctctgtttcttggaggatctggaaagaaatgacggttcagctgagaggccttacttcatgtcttccactctcaagaaactcttgaataaaaccaacaagaaggcagcagagtcctaaagacatctgcccctggcctctcaggagctgcgatccggtgcttgctaagtgtttgggtcagagtccccagctcattgaactgcctaaagtcacatcactgcctctctgctaccctccttgagttcccatttccagggacccagaggatttggggcattgcttcctatgcccaagggcacttgagagctttcagtggcgccctggaagatgggacagaatgggtccctccagtcctcactggcatagatggtgccaatatggtgaagtaacttgtcttcaagggtgggagatggcccaaggatgtctgcagcaagtttctttgtacttctgtgccccttccagccaagagggaaagactggat

SEQ ID NO: 3689 - DNA, 1626 bp, Cricetulus griseus
cccggcgttctgcacgcttcaaaagcgcacgacggtcgcagcgatctcctcttcctcacatctgagcctcttgatcctaccgtgttgccaaaatgtcgctttctaacaagctgactttggacaagctggacgtgaaggggaagcgggtcgtgatgagggtggacttcaatgttcctatgaagaacaatcagataacaaataaccaaaggatcaaggctgctgtcccaagcatcaaattctgcttggacaatggagccaagtcagttgtccttatgagccacttgggccggcctgatggtgttcccatgcctgacaagtactccttagagccagttgctgcagaactcaaatctctgctgggcaaggatgttctgttcttgaaggactgtgtgggcccagaagtagagaatgcctgtgccaacccagcagctggcactgtcatcctgctggagaacctccgctttcatgtagaggaagaagggaagggaaaagatgcttctggcaacaagattaaagctgagccagccaaaatcgatgctttcagagcctcactatccaaacttggggatgtctatgtcaatgatgcttttggaactgcacaccgagcccacagctccatggtgggtgtgaatctgccacagaaggctggtggatttttgatgaagaaggagctgaactactttgccaaagctttggagagtcctgaacgccccttcctggctatcttgggaggagctaaagttgcagacaagatccagctgatcaataatatgctggacaaagtcaatgagatgatcattggtggtggaatggctttcaccttccttaaggtgctcaacaacatggagattggaacttctctgtatgatgaagaaggggccaagattgtcaaagatctcatggccaaagccgagaaaaatggtgtgaagattaccttgcctgttgactttgtcactgctgacaaatttgatgagaatgccaagactggccaagctactgtggcctctggtatacctgctggctggatgggcttggactgtggtactgagagcagcaagaaatatgctgaggctgtggctcgagctaagcagattgtttggaatggacctgttggggtttttgaatgggaagcttttgcaaggggaaccaagtccctcatggatgaggtggtaaaagccacttctaggggttgcatcactatcataggtggtggagacactgccacttgctgtgccaaatggaatacagaggataaagtcagccatgtcagcactgggggtggtgccagtctagagctcctggaaggtaaagtccttcctggggtggatgctctcagcaatgtttagtattttcctgccttttggttcctgtgcacagccagcctctaagtcaacttagtgtgttttccacatctccatttggtgtcagctagtggcggagatgcagcaccaggaacccttaaacagttgcacagcatctgaggctcgtctttactgcatcgggatttgtctacattcttcaagatcccattttaatcccttagtggctaagtgcattctagagtgcatctatttatattctgcctgtaaaagaaagtgagctataaaagcttagttctctctttga

SEQ ID NO: 3690 - DNA, 1625 bp, Cricetulus griseus
gccgggagctggcggtagagcaaacatgaatgttggagttgcccacagtgaggtaaaccccaatactcgtgtaatgaacagccgtggtatgtggctgacatatgctttgggagtttggcttaacttcatattgtattgctcagcatccccttcttcagtgtttctgtttgcttggaccttaacgaacataatacataatctgggtatgtatgtgtttttgcatgcagtgaaaggaacgccttttgaaactcctgatcagggtagagcaaggctcctaacccactgggaacagctcgactatggagtacagtttacatcttctcggaagtttttcacaatttctccaataattctatactttctggcaagtttctatacgaagtatgacccaactcacttcatcctaaacacagcttctcttctgagtgtacttattcccaaaatgccacagctccatggtgttcggatctttggaattaataagtattgaaatgtttctacaactgaacaaaattcttagagctactacgtttccagtagggaaagagtagttagtgaactgcactgcttcagtgataatgtgaaataagaggtatttacattggagggccaagtactggtccttcataggctgtcttgaagtgcagaactccactaagggatgcctctgtctaatgtgcttggtatatttctgagagaggctctacacacaggttgggcaggcccagcttagaagttatggcagtacaatgagggtacagtaactaaatccaaagaaatgagggatttgtaagaaactaggaccagcctatagtgaatgggcattatgttagggaaggaaaactccaatcattcatttatagtcagtttaaacagacttctataaagcagaatcatcttgtatacaagtttttattactgtacacattccctttatatgacatacaccttgataaatgaggtcatgtttgctttattatattacaaagtttgtgaaggttcaccttcatgactcactctgatagaagacaggcaggtatcttacagtcaaggctctgagtcagcattctcattttggaacaaagtgggttttactgcttttccagaagcaaagctgctaaaccaattaagagaataacttatttcaagtagtttaggttctgaaggaaaagatagccttatctgctcttagttttctgctcttgatccccacagtctgcctattcatgtgtcctttaaatgtgtgagtcttagtatagacaacctcaaatggtacctatagccacagcaacaactatattgaattcttgtgacatggggaagctgcctataattgcaagcattaattgtatgaaattactactgtgagaaatatatttctaaaatgttataagataaagctgaaaaactcagtaacctaagattgaaaacagttgtagaccaacttattaatcaatttttagcaataaacagacttaggggtggtgatcattgtttcatatttcaaaagtactgagtttaaaaatcagttgaatgatgatgcctttgtatgtttgtcttgtcttgtgtctttttaaataactggtaattgatgctttaataaaaagtttttctcttggtagtaa

SEQ ID NO: 3691 - DNA, 1625 bp, Cricetulus griseus
gggcggggtgtcgttccctttcgctgatgcaagagcctagcgcgggcctgggagagctgtcggtaggagcttcgccgagtccggggtctgaagctgaccggtctgacgtcccacccttgccgaacccactagaaccgcagccatgtccggggacgagatgatttttgatcctactatgagcaaaaagaaaaagaagaagaagaagccttttatgttagatgaagaaggtgatgcccagacagaagaaacccagccctcagaaacaaaagaagtggagccagaaccaactgaagacaaagatgtggaagctgatgaagaagacagtaggaaaaaggatgcatctgatgacttggatgacttgaacttctttaatcaaaagaaaaagaagaaaaaaacaaaaaagatatttgacattgatgaagctgaagaaggtgtaaaggatcttaagattgaaagtgatgctccagagccagctgagccagaggatgacctggatattatgcttggcaataaaaagaagaaaaagaagaatgtcaaattcccagatgaagatgaaatactagaaaaagacgaagctttagaagatgaagacagcaaaaaagacgatggcatttcattcagtaaccagactgggcctgcttgggcaggctcagaaagagactatacatatgaggagttgctgaaccgagtgttcaacatcatgagagaaaagaatccggatatggttgctggagagaagaggaaatttgttatgaaacctccacaggttgtccgagtaggaaccaagaaaacttcttttgtcaattttacagatatctgtaaactattacatcgtcaacccaaacatctcctcgcatttttattggcagaattgggtacaagtggttctatagatggtaataaccagcttgtaatcaaaggaagattccaacagaaacaaatagaaaatgtcttgagaagatatatcaaggaatacgtcacttgtcacacatgccgatcaccggacacaatcctacagaaggacacccgactctatttcttacagtgtgaaacttgtcattctcgatgctctgttgccagcatcaaaactggcttccaggctgtcacgggcaagcgagcacagctccgtgccaaagctaactaatttgctaatcaccattgatttttccaaaatgtgtggtggagatttggctggacaggttaccatcagagtggacgtaccactgagttgaaacacaagatagaaaagctgccaagttctttggcaagtgattgatctgaaacccttgcaagatgccgacactcaagctgttgacatactcattgcccactttaacaactgtcaaacgtgatggggtaaggaggtgctttttaaaatcgttcatagacttctgtaaagtgcaagataaattaaagttattataactgattctttcaatttgatctgtccttcagttttttttttctataataaaaatgctcgttgaatttagcaaaatacaaaacaaccaacttggttcctggactttggcaagttctccctgtcctcagaaactggcaaatactggaactgggcagccattttccctttcaacttctcttgagttacatggctagagcagata

SEQ ID NO: 3692 - DNA, 1625 bp, Cricetulus griseus
gtggctgctgctgccatggtggctggcggccgggtgcatcatgtctagactgggggccctgggcggctcccgcgccgggttgggactgttacttggtactgccgccggccttggatttctgtgcgtactgtacagtcggcgatggaaaagggcccggcgccatggccgaagccacagtctgcccgattccctggaccgtgcgcaggcttcagagcgcggaggccaggttatgcagttgcgggccatcccaggtgaagctggagatgctgcagtgctgcccggcctcccacaggaaggacaggagaaggtgctcgaccgcctggactttgtgctgaccagtcttatggcactgcggcgggaggtagaggagcttcggagcggcctgcaaggcctggctggggagattgttggggaagtccgatctcatatagaagagaaccagagagtggctcggcggcgccgcttcccgttttccagggagaggagtgactccactggttccagctctatctacttcaccgcctcctcaggggctgcattcacagatgcggagagtgaaggaggttatacaacagccaatgcggaatctgactatgagcgggactctgacaaggagagtgggactctctggaccttgacgtggaggtagcttcaagtcctagccctctggtgccttggagactggtggctcctcagacctcgaggacatgctgctgctcctgcagcaggcagatgagctgcaccagggcagcgagcacaacaagcggaaaggcttccagctgctgctcaacaataagctggcgtatggaaaccgacaagactttctgtggcgtctggcccgggcctacagtgacatgtctgagcttactgaggaggagagtgagaagaagtcatatgccctaaatggaaaagaagaagcagaggctgctctggagaagggagatgagagtgctgaaagtcaccagtggtatgcagtgctttgtggtcagctggctgagcatgagggcatctccaggcgtatccagagtggctttagcttcaaggaacatgtggacaaagccattgcacttgagccagaagatcctaggagtcactttcttcttggcaggtggtgctaccaggtctctcacttaagctggttggaaaaaaaaacagctacagctttgtttgaaagccctcttagtgccactgtgcaggatgcgctccagagcttcctaaaggttgaagaactacagccaggattttcaaaagctggacgagtatatatttctaagtgctatagagagttaggaaaaaactctgaagctagaaagtggatgaagttggctcaggagctgccagatgtcactaatgaggattcagctttacaaaaagaattggaagaattggaagtaattttaggaaaataatcacttcaatgacttgggggctactatttaaatggagaaaagaaaatcaagttgctttttttttaacccctgtgaccccactgagttcaggaaaccaagcaagacttgcagtttaggcttctgctttcttcctcttaagtgaattcctgaaaatcaagacagtatagccagccatagggttaactgtggaggcagcacaaaaggtcaagagctgag

SEQ ID NO: 3693 - DNA, 1624 bp, Cricetulus griseus
caacgctgcggaagtgcaggcggaggagcgcgcgcgatggcgcgagcggcccagtgcttgtgaaactgaacacagaagtatggatatgggaaaccaacacccttctattagtaggcttcaggagatccaaagagaagtcaagagtatagagcctcaagtggttggcttcagcggcctggcggatgacaagaattacaagagactggagaggattctgacgaaacaactttttgaaatagactctgtagacacagaaggaaaaggagacattcagcaagctaggaagagggcagcgcaggagacagaaggccttctcaaagagttggagcagaatgcaaaccacccacaccggattgaaatccagaacatctttaaggaggcacaggcccttgtgaaagaaaagatcgtgcccttttacagtggaggcaactgtgtgactgacgaatttgaggaaggcatccaggacatcattctgaggctgacgcatgttaaaacaggagggaagatctctttgcggaaagcaaggtaccacaccctaaccaagatctgtgccgtgcaagagatcattgaagactgcatgaagaagcagccttccctgccgctctctgaggatgtgcacccttcagttgccaagatcaatttggtgatgtgtgaggtgaacaaggccaggggcactttgatcgcacttctgatgggcgtggacagtactgagacttgcaggcacctatcgtgcgtgctgtcagggttgatggctgatctagatgctttagacgtgtgtgggcgtacggagatcagaaattaccggagggaggtggtggaggacatcaacaaactactgaaatacctagatttagaagaggaagctgacagtacacatgcatttgacctggggcagaaccattccattctgaaaatagaaaaggtgctcaagaggatgcgagagataaaaaatgaacttctccaggctcagagccctcccgaactgtacctgagctccaagacagaacttcagggcttgatcggacagctagatgaagtcagtgttgagaagaacccctgcatccgggaagccaggagaagagccgtgattgaagtgcagaccctgatcacgtacctggacctcaaggaggccctggagaagaggaagctcttccctagtgaggagaaccccccacacaaggctgtgtgggatgtccttggaaacctgtcagagattcagggtgaagtcctctcgtttggtggaaaccgaactgataagaactatatccgtctggaggagctgctgaccaaacagttgctgaccctggacgctgttgacccccagggagaagagaagtgtaagtctgctaggaagcaggctgtgaagctggcccagaacatcctcagctaccttgatctgaagtccgacgagtgggagtactgatggaccaggagctgctcctgctggttcacactttatctgcttttagagagctttcagctcatggagcctaaatgtaatttctatgtgcatattcaatctcagtatttatgatttaatcaaattatatgcagtatttctgctgcttttgatgttgcaaaacgaatatcattatagcacattaacttttcaaaaaaaaaaaaa

SEQ ID NO: 3694 - DNA, 1623 bp, Cricetulus griseus
tatagctcccacttttataagatttggctcctttgaaatttttaagtcccccgatgagcacacagggcgtgcaggccctagtatgggacgaaatgatatccgagtgcagatgcttgactatgtcatcagctctttctaccctgaaatccaggctgcccacacctgcgacagtgacaacatacagaggaatgctgcctttttccgagaggtgacacgacgaacagcacggatggtggctgaatggcagtgtgttggcttttgccatggtgtgctcaacacggacaacatgagcatcgtggggctcactattgactatggaccctttggcttcctggacagatatgaccctgaccatgtatgcaatgcctcagacagtgctgggcgctacacatacagcaaacagccccaggtatgcaagtggaatctgcagaagctggcggaagcactggagccagagctgccacttgcgctgggtgaggccatcctagcagaggagtttgacaccgaattccaaaggcactatctacaaaagatgcgtaagaagctgggccttattcgagtggagcaggaaggagacggggcacttgtggccaagcttctggagaccatgcatctgactggtgctgacttcacaaacaccttctatatgctgagctccttcccagctgaaccatcggactcagcagagttcctaaccaagctgacctcccagtgtgcctctctggaagagcttcggcttgccttccgaccccagatggatccccggcagctctctatgatgctgatgcttgcacagtcgaacccacagctctttgcactcattggcactcaagcaaatgtcacaaaggagctagagcgtgtagaacaacagtcacggctggaacagctgagccccactgaactacagagcaggaacatagaccactgggaaacctggctacaggagtacagagcccgtctggacaaggagaaggaggatgttggagacactgctgcctggcaggcagaacgtgtgcgcatcatgcacaccaacaaccccaagtacgtcctaaggaactacattgcacagaatgccattgaagctgctgaaaatggagactttgccgaggtgcgacgtgtcctgaagctgctggagtctccttattacagtgaaggggcagccactgaggccacaggccctgaagcagcagcaaggaccactgatgagcagtgttcctacagcagcagaccacccctctgggctgcagagctcagtgtaacatgatcctcataaaggccttggtgtcctccacacccagggtccccaaggcttccccagtgctgctgaattgctgagaccattgggatccctaccctcatggtctgtgcatgatggcagagatctccagtcaaaacatgacccatctctgtctgattctgctttagcagtactgccctggcctagcactcaacatgcccccagcacacagtgcttcaagccagtgtaggaatgcagtctcatgcttataagtgatgcaaacagggctaaataagccttgtagcctgttggtgcatcttgccccaaagggctgggcctgacacctgctaaatcccaggcctctaaataaagccacttttccaggt

SEQ ID NO: 3695 - DNA, 1623 bp, Cricetulus griseus
accagcctgaaccactcggtacctggtgttaactggagccctgtttacaaggcggagtcgggtcttgctgacttctcttcacttgaggtcatatttttcccccgtcgggaaataaactgactttggactgcttcagtttctgccatcttccatgactgcttctcttcctgccttccatggcagtgtcctcaggagatgggcaagaagattggagcagctttctcacaggtctgcaatttggtttttctccaagtacatcatgacaccttcgtcctcctgaactggagaggggaagaaatgaaaggcatcccatatccaccatttccccaatccctagccctaccctggacatcatgagctgttattttgtcttggaaggaggggttctgggctctgggctggatagcagagaagagggaatgcgccctttgtttgcttctctcctgcttgtccttttccaggacataatggaactgtcagaatgctaacttggggcccctgccacagacagggcccttgcccagaagcagccgtatccctaatcccatttcatctcggttctgtatgggcttttcccatgcatggaagggaggcagctcagggaccaccactgtggaaccttttgagacacctctctgattcagaaacacacttctacctctttactgttaactcctacagatgtagccagcagcttaggcacttctgtcagtggtgtcttttgctggcttctccactagggtttcaggacagactacctaggaactgcctcagtctcccaccagttccttccctgccttctcagtctcttcattctaaggaattttcctgttactcactgtgaactttgctggttatctgcctttgcttttttggaccacaaaccaccctgcagttacttaaacctttccccaaccaccacccaaaagagcctttatggccagttgtttaaaaggataagaatgatttatcctgtacttggtgcccaaactcatttatgtaccccttatgaggccaagagggccagaggggcatctgcccaggacaggagctgtggcatgtggcacagaccagtcagggaccagaaaagaatgatgtcccttttccttgccatgtactctagcctgtcagcagtgtactgactgcacaggggacaaacacccctcagcctgcacagcagcttgtcagaggtgaggcctgtcctggggccagggactagcatgcccaggggtcggctcagaggatcctagcaccatcttaaacaggtgagaggcagggaagggtgcaccagtgcatctctgcccgactttacatggtgttttgtaatgcaaatctggggaagcaggtgtgattgctttttgtcatagatatacaggatcaattattttgtctttttaacaaggatatttatgtaataagaaactttgccttaggcaggtgttggccagaaaagtccagatttctctgggacctcaccctggcctctcctggagctctgaacctgctgtggaaggaagtggctgtgactttgaccactggagaatggggtctggtgtggaaagggtgctcactgtgtgatctcggactgtgtggagttgttcctgtcaacttgcttcaggtgtt

SEQ ID NO: 3696 - DNA, 1623 bp, Cricetulus griseus
gagtaaagaagtagcagctgcaccaatctctgttcctgtattatctggaaaatgaatttgcccaagccagcagctatgcagatttagctgtgaactcagatagatacaacccatcagctctcactaataaagggaacacggtttttgcaaatggtgattatgagaaggcggctgaattttataaagaggccctaagaaacgattcttcttgtactgaagcactgtataacattggcctcacttataagaagctaaaccgtctggatgaagcgttggactccttcctgaaactgcatgcaatccttcggaacagtgctcaagttctttgccagatagcaaatgtatacgagttaatggaagatcccaaccaagctattgagtggctgatgcagttgatcagtcgttgttccaactgattcccaggctctgtcaaaacttggagagttgtatgatagtgaggagacaagtcccaggctttccagtattactatgagtcatacaggtatttcccttctaatattgaggtcattgagtggctgggagcttattatattgacacccaattctgtgagaaagctattcagtactttgaaagagcgtctcttatacaacccactcaagtgaaatggcagctgatggtagctagctgttttagaagaagtggtaactaccaaaaggcattagatacttacaaagagattcacaggaaatttccagagaatgttgaatgtttgcgtttcttggttcgtctctgcacagatattggtttaaaagaagttcaagaatatgccacaaaactcaagaggttggaaaaaatgaaagaaatgagggaacagcgcataaaatcgggcagagacagcggcggaggctctcgcagcaagcgagaggggagcgctggcagtgatagtggccagagcaatagtgccagtagtaaaagtgaacgactgagtgccaagctcagagctttgcctgggacagatgaaccttatgaaagtagcagtaacaaagaaatagatgcctcctatgtggatcccctgggccctcaaatagaaagaccaaaaacagcagccaaaaagagaatcgacgaggatgattttgctgatgaagagttaggagacgacttgcttccagaataatacaaactctaatatgctctgtgtgtgtgtgtatgttgttccccaggcaccgtccatccaccacttttatttgtgacagggtccctgtctggcctggaacatgccatgtaggtgatggatggccagcaacccccagggatctgcctgcctccacttcctcttccccagtgctgagattataagcatgtgccaccacacccagctttctttaaaggggctctggggtttgaactcaggtcctccagcttgcaaggcaagcactttcccaactgtactctccctggcccaataagtcatttaccaaagcaaagaaatcgtcttataagataatgctcatgttaaacctgggatcagatgtccaaactgtaattttgttacactgttgaaactttaaatagtgtattctgttctctgaggctgggtttattgctgtcatttttattgaaaataaaaaccaatgaagctaactaaaaaaaaaaaaaaaaaa

SEQ ID NO: 3697 - DNA, 1623 bp, Cricetulus griseus
cctgagcaggcccagctgccccctgccctggaggacaacctattccttccaccccagggtggcggcaagccacccagcttggcccagactgcagagattttccaggcactacagcaggagtgtatgcggcagctacaggtccccagtggccagctgaccccctccccaaccccaggaggtgatgacaagccccaagtgccaccccgggtacctatcccccctcggcccacacgtccacgtgtggagctatctccggctccctcaggtgaggaagaggcaagccggtggcctggacctgcctcccctccccgagtgcctccccgggaacccctgtcccctcaaggttccaggaccccaagccccctggtgccacctggcagctcaccattaccacaccggctctctagctcacctgggaagaccatgcccaccacccaaagctttgcctcagaccctaagtatgccactccacaagtgatccaggctcccggcccgagggctggcccctgtatcctgcccatcgtccgcgatggcaggaaggtcagcagcactcattactacctactgccggagcgccctgcttacctggagcgctatcagcgcttccttcgggaggcccagagccctgaagagccagcctccctgcctgtgcccctgctgctgcccccacccagcaccccagcccctgctgcccccactgccactgttcgacctatgcctcaggctgccccagacccaaaggccaacttctccaccaataacagcaacccaggggctcggccaccagccctgagggccactgctcggctgccaccgaggggctgcccgggggatgggcaagaggcggcacggccagcagacaaggtccagatggtggagcagctctttgggctgggtcttcggccgcgggtggagtgccacaaagtgctggagatgttcgactgggacctggagcaagctggctgccacctgctgggttcctgtggccctgcccaccacaaacgctgacagttgttgcagagcaagggtctgccctaaaggaaccacttgaacctgcctgtgggacaggttgggagatgcccagtctcaggccgcctgctgcaaccagtggacagtgagactgaggcagcgggaggctggagccccaccttgctcacctcactcactcacccacccggcgctgttctgcacaccttggttcagccctcagtgccccagccaagaggtgggaaggagccttgtgacggcaagatgggaagctgcctggcaggccctgtgtgtgacctgcttctggctccagatcaaagctgggctagtggctagagtgtgccccaggctttgccctaggggactgaggaagccaggcttgacttgggcaagaaggatgtgttggccacgcagaagggtaggccagcatccagcaggccctcctctgggctgggcccttttccagggagcccctgtaggcatttggaatgttggacagaatgtgacctgtggcttcactgtgaacttgtgtgtttggctgctctcggggatcttatacctggaaacagccccaagtggctcagaagcagagaaatggcagcaggttcttctggcagggcccagggcccagggccc

SEQ ID NO: 3698 - DNA, 1623 bp, Cricetulus griseus
acaggtggctgtggcttcctgggggagcatattgttcgaatgctgctggaacgggagcccaggctccgggagctgcgtgtctttgacctgcacctgagtccctggctagaggagctgcaaacagggcctgtgcaggtgactgccatccaaggggatgtgactcaagcccaccaggtgacagctgccgtggcgggatctcacgtggtcatccacacagctgggctggtggatgtgtttgggaaggccagtccaaagaccatccaccaagtgaacgtgcagggcacacagaatgtgattgaggcttgtatacggactggaactcagttcctgatctacacaagcagcatggaagttgtggggcctaatgtcaagggccaccccttctacaggggcaatgaagacaccccatatgaggcagtccacaggcacccctatccttgcagcaaagcgcttgctgagcagctggtcctggaggccaatgggaggaaggtcaacggagggctacccctagtgacatgtgcccttcgacccacgggcatctatggtgaaggtcatcagatcatgagagacttctacaaccagggcctacgttttgggggtcggctgtttcgggccatcccagcttctgtggagcacggtcgggtgtatgttggcaatgtggcttggatgcacgtgctggtggcccgagagctggagcagcgggcggcactcatggggggccaggtgtacttctgctatgacaaatcaccttataagagctatgaggacttcaacatggagtttctgggtccctgtggacttcgactgataggcacccacccactgctgccctactggctgctggtgctgctggctaccctcaatgccctgctgcagtggctgctccgcccactggtgctgtacacacccctgctgaatccctacactctggccatggccaacaccacctttactgtcagtaccaacaaggcacagcgccattttggctacaagcccctcttctcatgggaagagagcaaggcccgcactattctctgggtgcagaccttggagggttcagcccggtgatggcagggccagggactggaggccactgtggtacatactcaggtcctgagccttcagagcctggagggagagacatggctgcctggaccctgccattttacctacacagatctgagcctggctggtattccagcctccaagttctaggacagggtttgggaacaggcctgtctttggtcccaactcacgcatgccagctggtcggcaaaattgattcctaaatggtctcatgaccccttcacatctccagtttctcaagcaggaaggggaaaagatcccagagaactcatgctggttggcttactctagatgccatcttcagacctggcttctgctacatctggctctccttaaggggttataattccatgactttcttaagtgtatctcttttagatatttatgttttaatttgctttaaagaaagctgaagaaatcagtgattttccatgtcttgcctctccaaattcagttcctgtgatattgttagcttttggccaagaatgtcaaccatgctgtatctggccaagtctggattaaaatccgtttccaagt

SEQ ID NO: 3699 - DNA, 1623 bp, Cricetulus griseus
ttggactagaaaacaatcactgcgtctgcttacaaaaggagaatcagctgcctttagccccaatggatgatacacctgtcgttcagatagcagccgagatcctaagagcagaaggtgaggttcaggaggtagtcttgaattcctcaagcacttcagcttctacaagttttctggacaatgtgccggtggcacctcctgttgggccagtgctggagccttctcatcagggaccagagcctatcatggatggtgacctcgcccctcctgttgggccagtgctggagcctgctcatcagggaccagagcctatcatggatggtgacctcgcccctcctgttgggccagtgctggagcctgctcatcagggaccagagcctatcatggatggtgacctcccctcctattgggccagtgctggagccgttctcatcccctcctgttgggccagtgctggagcctgctcatcagggaccagagcctatcatggatggtgacctcgcccctcctgttgggccagtgctggagcctgctcatcagggaccagagcctatgatggatggtgacctcgcccctcttagtgagccagtgctggagcctgctcatcagggaccaggtcctatattagatctagagaaagagaatttcagagacccagcagaagttctaggtacttgtgctgaagtggattatctggaacagtttggaacttcctcgtttaaggagtcagcctggaggaagcagtctttgtatttgaaatttgatcccctcctgaaagagagtccactgcggccaatgccagtggttccggtgacaaatagtatacaggatgcggatgaggctggcttgggaaacccaatggaagccaagcttgtggacttagatttcttgggaactctggatgatcctgtgtcaggcccacccttgtgtgtccttgagccaagaggtctccttcctgctgagcctattgtagatatactacagtacggccagaaagacctggacgcattggtaaatgcaacaaaacaggagaacttggagctgagaagcaagtatgaggacctcaacacgaagtacttggagatggggaagatagtggatgggtttgagaagatcgcgtacaaatcaatggaggaggctgagaaacagaaggaactaaggaactcgcagaagacaaaatcaaaaaggtcctaaaagagagagaccaacttactgcagacctgaactccatggaaaagtccttctctgaccttttcaagaggtttgagaagcaaaaagaagtgattgaaggctatcgaaagaatgaagattcactgaagaaatgtgttgaggaatacatagtgaagattgaaaaggaaggccagaggtaccaggcactgaaggcccatgccgaagaaaagctcaagctagcaaatgaggagattgcccaagtacgtagcaaggctcaagcagaggcgctagctttgcaggcaagcctgaggaaggcacaaatgcaaatccattcactggagaagactgtggaacacaagactaaagaaattgatgagctgacccggatctgtgatgacctcatctctaaggtggagaagatctgactgcagccagccatcaccaaccctctgtctg

SEQ ID NO: 3700 - DNA, 1623 bp, Cricetulus griseus
gttgtaggaataataaaaaggaattggagacctattatttgtggcatgcttttccaaatctggtattaaagagtcaagaagacatctctttacacctgctgataagagaattccacgaattcggatagaaaccagacaggcttctacattagaaggacggagaattattgttgctgttgatggttggcctagaaattcgagatatccaaatggacacttcgttaaaaatttaggtgatgttggagagaaagagacagaaacagaagttttgttgcttgagcatgatgttcctcatcagccattttcccaggctgttcttagcttcctgccaaagatgccgtggagtattactgagaacgacatgaaaaaccatgaagacaaaggacttctcttacgtatgctgaagcacagatgagaattgattcagcagccatgaatgatgatattaccactagtctccgtggactaaataaactaggccaaaaattactaaaaaagggaaggattgaaaagggggctttgactctgtcttctccagaagttcgattccacatggacagtgaaactcatgatccaatagatctgcagaccaaggagctgagagaaacaaattccatggtggaagaatttatgttacttgcaaatatttctgttgcaaaaaaattcatgaagaattttctgaacatgctctgcttcgaaaacatccagctccacctccctccaactacgaaattcttgttaaggcagccaagtccaagaatttggaaattaagacggatacagccaagtctttggctgactctttggaccaggctggctattggggctgatagtacttatccagagttgacagataaacacaagctttcagatatatgtaaaaccttaatttccggcataaaatggcgcagtatgctcagcgcgcatcagtagcttttcatacccagttgtttttcaaaagcaaaggaatagtaagtgaagaagcctatattctctttgtaagaaagaatgcaattgtggtgttaattccaaagtatggcttagaaggtacagttttttttgaagaaaaagataaaccaaagccacagcttacttatgatgatgagataccttcactcagaatagaaggcacagtattccatgtgtttgacaaggttaaagtgaaaatcacattagattcatcaaaccttcaacatcagaaaatccgcatggcccttgtagaaccacagatacccggaataaatattcctcctgaagtatcagacatggatctcaatgggtcagggaggaagaagagaaaacttgacaagtagctacatgcaacaggaaactacaaagactacaacaacaaaattgaaagcatacttacaagctcgtgtgcatgatagttacttttaagtacatttcaataattttaagaaatttgcatttttattgagctgctgcctgcatctatcttatacactgtgcttctgcaacaacaaaaattatgcagaaaaattcatttgaatatccatcacttcaatggtgacagaatagcaacttcagggatctgtgatgatcatttaaatggagtacaatctgctcattgaagagcagattaatttttatataagtacttta

SEQ ID NO: 3701 - DNA, 1623 bp, Cricetulus griseus
cctttaattccagcacttgggaggcagaggcaggcagatctttgtgagtttgaggacagtctggtatacaaagagagttccagaacaaccagggcaacacacagaaaccttgtctcaaaaaacagaaacaaaaaaacaagacaaaaaacccacacattatatttaatgtacaagaaaaagaaacctttaggtctgcatgtaactataatcattctactttgtctttcatatacttaaatgagtttcaaagtattatatttaaaaacattactattactcatttatttagaatgtgttttttagtctctctgagtaattgttattatattgcattattacttaactgcattttcaggtttatatctaccaaaggatacaaattgagtgatagaatgcaaaactggtctaaaaatagtctcctggctgtcaagacccaaataccgttggttaggcttgctctcagttcatgcaaactgactgcacgtaaataccattgttttaggcctttatcaggagacaagacagcaaacctcaggtgccctgttaaacagttgcctagatgtcagtatattcagttggggaaaactgctgcccttcccccactgcataattgttccgtaaaaggtaaattgctaattttatactgcgtgattctattcttcataaaataggtttcactattctatattaaaactgtttgtcagaaaatgatctactattccagtaagttgttttacttttttcttaaaaggatattttaacatgctgtatttattattgttataacaaaaaaggagtcgatacagataaaatttcattttccacaggtatcactttgcctaactaatctttagtatggggtgattttgatactatctttggagttttgcactggatattaaaaaaatatattggcacaatatattgaaaaattaagtagtatttgatttaatttttaatatctgggaacatttttttaaaatcagtgtttaaatcagactaataattctttgtatttttaattactttttaaaaagaaacatctgtcaatgtggtatttattcattccaaactgctgtttgtgtgaatttacatatgtgttttcatgaaataagaatactgagtttctttgaggtaaaatctggatccatttaatttgaggttaagggcacttcatccagtgtaagaatgaccacagtgtgagtttagacagtgaacttctttttgcttttctccctttacctccaagtagacaaatctgtgctttcacttgtagtgtttaagtttttgagaattagtgctgtagcaagtcagttctatgatttaatcaggccattctgattctttgattcacaatttgctttttccacagacaattatgaagcaaataattaacacttaactgataataagcacgttgtcctctgctgtaaagtctgaatagatactgtgtatgttttaatcagtgtccatgaacttgagctactcgtgtgcaattatgtgtatgggaatggagtagtgttcatgatttgtatctgcatcatcatacggatgtatatttattaataaagtcatcactttaaaaccaaaaaaaaaaaaaaaaaaaaaaaaaaaaaaaaaaaa

SEQ ID NO: 3702 - DNA, 1623 bp, Cricetulus griseus
  modified_base (1615)..(1615): a, c, t, g, unknown or other
ggatgcggtgatgggcgggatgggcgcgcggagattggcgggatgcggcgcggcgcgtgatgctccttagcctggacacagtggcgtggacagaacaagccaggaacgctgccatgttctcagagcaggcagcacagagggcccacactctgctctccccaccatcagccagcaatgccacctttgcccgggtacctgtggcaacttataccaactcctcacagccttttcgactgggagagcgcagctttagcagacagtatgctcatatttatgccacccgcctcatccagatgagacccttcctggagagccgggcccagcagcactggggcagtggagtcggagtgaagaagttgtgtgagctgcagcctggggaacagtgctgtgtggtgggcacactattcaaagccatgccactccagccctccatcctgcgggagatcagcgaggagcacaacctgatcccccagcctcctcggagcaaatacatccacccggatgatgagctggtcttagaagatgaattgcagcgtatcaaactgaaaggcaccatcgatgtgtcgaaattggtcacaggaaccgtcttggcagtgtttggctccgtgagagacgatggcaggtttcaggttgaggaccactgctttgctgatttggctccacagaagcctgtacccccacttgacacagacaggtttgtgttgctggtatccgggctgggcctgggcggaggtggcggtgagagcctcctgggcacccagctgctggtggatgtggtgacaggacagcttggggacgaaggagaacagtgtagtgctgcccatgtctctcgagtcatccttgcaggcaacctcctcagccacaatacccagagcagagattctatcaacaaggccaagtacctcaccaagaaaacccaggcagccagcgtggaagcagtcaaaatgctggatgagatcctgctgcaattgagtgcctcagtacctgtggatgtgatgccaggtgaatttgatccaaccaactatacactcccacagcagccactgcacccctgcatgttcccactggccactgcctattccacactgcagctggtcaccaacccgtaccaagccaccatcgatggagtaagattcctggggacgtctggacagaacgtgagtgacatcttccggtacagcagcatggaagaccacttagagatcctagagtggaccctgcgggtccgtcacatcagccccacggctccagacaccctagggtgttaccccttctacaaaaccgacccgttcatctttccggagtgcccccatgtctacttctgtggcaacacccccagctttggctccaaaatcatccgaggtcctgaggaccaggtggtactgttggtggccgttcctgactttagttccacacagactgcctgcctggtgaacctgcgcagcctggcctgccagcctatcagcttttcaggctttggagcagaacatgacgacctgggagacctggggctgggtccctgatgacaggcagctgggccattcacctttgccatgtgagcccctgtaaataaaacatgaattttttataggtctgaaaaaaaaaaaaaaaaaanaaaaaaaa

SEQ ID NO: 3703 - DNA, 1622 bp, Cricetulus griseus
cagacgtgcctggccgcccggccgagcagagtgagaccgcgtgtgaggaccgcaatgcagggtccttggacagactactcccaccagtgggaactgggcgctcaccccggaagcgcaccaccagccagtgcaagtcagagccacccctgcttcgcacaagcaaacgtaccatctacacagccgggcggccaccatggtacaatgaacatggcacgcagtccaaggaggcctttgccattggcttgggagggtgggcagtgcatctgggaaggaccactgtggccaggatgatcattgaagctctagatgtgccctgggtggtcctgctgtccatggactccttctataaggttctgacacagcagcagcaggaacaggctgcctgcaacaatttcaactttgaccaccccgatgcctttgattttgatctcatcatttctaccctcaagaaactaaagcagggcaggagcgtccaaatacccatctatgactttactactcatagccggaaaaaagactggaaaacactgtatggtgcaaatgtcatcatctttgagggtatcatggcctttgctgacaagacactgctggagctcctagacatgaagatctttgtagacacagactctgatatccgactggtacggcggctacgccgggacatcagtgagcgaggccgggacattgagggtgtcattaagcagtacaacaagtttgtcaagcctgcttttgagcagtatatccagcccaccatgcgcctggcagatattgtggtacccagagggagtgggaacacagtagccattgacctgattgtacaacatgttcacagccagctggaagagcgtgaactcagcgtcagggctgcgctggcctcagctcaccagtgccatccccttccccagacactgagtgtcctcaagagtaccccacaggtacgaggcatgcacaccatcatcagggacaaggagactagccgagatgaattcattttctactccaaaagattgatgaggctgcttattgaacatgcactgtccttcctacccttccaggactgcactgtacagaccccacaggggcaggactacgtgggaaagtgctacgctggaaagcaaataaccggagtgtccattctgcgtgcaggggaaaccatggagcctgcgctgcgtgctgtgtgcaaggatgtgcgcattggcactatcctcatccagaccaaccagctcacaggggagcctgagctccactacctgagacttcccaaggatattagtgatgaccatgtgatcctgatggactgcacagtatccacaggtgctgcagccatgatggctgtacgtgtactcctggaccatgatgtgcctgaggacaagatcttcttgctatccctactcatggcagagatgggtgtgcactctgtggcctatgcattcccacgtgtgagaatcatcaccacagctgtagacaagcgtgtcaatgaccttttccgtatcatcccaggcattgggaattttggtgatcgctactttgggacagatgcagtccctgatggcagtgatgaggaagagacagcctctatgggttagttcccagcctgagctactcttatttctatcctgcct

SEQ ID NO: 3704 - DNA, 1622 bp, Cricetulus griseus
gaggttgcgcggccgggcccagctgcggggcggaggtggaggcgaggcctgaggctgcggggagcggcggggccgggagcgggcgccggagccgagccaagccgagccgagccaagccgcagcaggcgccggaggccggcgcggcgagcagcaaccatgtcggtgttagggaagctgttcgggactggagggggtaaggggagcaagggcggcccgaccccccaggaggccatccagcggcttcgggacacggaggagatgctaagtaagaagcaggagttcctggagaagaagatcgaacaggagctgacggctgccaagaagcatggcaccaaaaacaagcgcgcggccctgcaggctttgaaacggaagaagcgatatgagaagcagctggcgcagatcgacggcaccctgtcaaccatcgagttccagcgggaggccctggagaacgccaacaccaacacagaggtgctcaagaacatgggctacgctgccaaggccatgaaggctgcccacgacaacatggacattgataaagtggatgagttaatgcaggacattgctgaccagcaagaacttgcagaggagatttccacagctatttccaaacctgtaggctttggggaagagtttgacgaggatgagctcttggcagagttggaggaactcgaacaggaggagctagacaagaatttgctggacatcagtgggcccgaaacagttccactaccaaatgtcccctctgtagccctaccatccaaacctgtcaagaagaaggaagaagaagacgacgacatgaaggaattggagaactgggccggatccatgtaactggtccagcataggctggggccagacagactctggtggcctgtgcgacgggcaggcgtgtgcgtgcgcagggcaggcaggacgcggtgcaggcagcctccatcgctcagctctcacccaaagcagtaggccgcatcactgctcactctcgcatagcatggtctgtgcccaggggcgggcgggcggggggaggggtgggcgggagggaggtgcctgctgtttataatgttgaatttctgtaaaataaactgtatttgcaaatccaacattgagcttctggactacgctaactccactgctgaatcctccatggaaagggtcggccgcttgcagttgaaacgatccggaaatgtagccccagctgacttgtcgcacatctctgtaagacgtgtatggtactggcagaaaagtcgttttttaaaagccatagataggcttttcctcgtccttagctgtaatagcacatctgattttggtttcctcaagagctgtgtttctgtctgtcacctgtgtactgccccccaccctgtgtttaccaccctggcccttgtcactcctgctcccctggtctttggagttgtgccacggatctgaaatggatgtattctcttgagaacaaataagattgttagaattaaatcccagctatccagttttctaacatagctctaaggtcctcattgctgtttgtgatgactgatagataactcactgagaacatgtgcatacatttatattcagatgaaattatggtttgcactgtctattaaatatctcgatttaattttcaa

SEQ ID NO: 3705 - DNA, 1622 bp, Cricetulus griseus
  modified_base (1507)..(1507): a, c, t, g, unknown or other
cgcacggccgcgagccccgaaagcgtcggccactccgggcgccgcggagaggatctgcgcggtcctgtccccgccctcccggtgccggtcgggtccgcgcccccggtcctcggactgggcgccgtggcgttgccccggagcccgccacccgcggggcgcgcaccgccttgacccgggcggccccgcggcggcaggcagacgcccgcaggtccatggtgggctcggagcgcgatgagccgcccgtcctccaccgcccccagcgctaacaaaccttgcagcaagcagccgccgccgcctcagaccccgcacgctccgtcccccgctgcgcccccggccgccgccaccatcctcggctgcgggccccggctcgtccgcggtgcccgccgcggcagcggtgatctcaggccccggagccggcggcggggccggcccggtgtccccgcagcaccacgagctaacctcgctcttcgagtgcccggtctgctttgactatgtcctgccccccattctgcagtgccaagccgggcacctggtgtgtaaccaatgccgccagaagttgagctgctgcccaacgtgcaggggcgccctaacgcccagcatcaggaacctggctatggagaaggtggcctcggcagttctgtttccctgtaagtatgctactacgggctgttccctgactctccaccatacagagaaaccagagcatgaagacatctgtgaataccgtccctattcctgcccctgtcctggtgcctcctgcaagtggcagggatccctggaagccgtgatgtcccatctcatgcatgcccacaagagtatcaccacccttcagggagaggacatagtctttttagctacagacattaacctgccaggggctgtagactgggtgatgatgcagtcctgttttggtcaccacttcatgctggtacttgagaagcaagagaagtatgaaggtcaccaacagtttttcgccattgtcctcctcattggcacccgcaagcaagctgagaactttgcctacagactggagttgaatggaaaccggcggagactgacctgggaagccacaccccggtccattcacgatggtgtggcttcagctatcatgaacagtgactgtcttgtttttgacacagccatagcacatctctttgcggataatgggaaccttggaatcaatgtaacaatttctacatgctgtcagtgagattccaggagtctttcataaacctgggaagttatttgggcataacgctctatgtttaataaagttgtttttaatagatgttttattcattatgtcttcccacgtcaagacccacaactgtcctgtgttttgtataaacagcagcttcctgtctggcactgatgaaacaaagttcactggactgtgataaatgggttggcctgttagtgattgggaggctgttctgtgatctcaaatcaaactctattctattgacttcctgaaccttggaagccctccttgacagtagatgatgtnaaagactagagcaatagttgggaaaactttacaaccagtctcacatgcttgctattttaaaagcatgtgtcagttgtgtgggttggggtttttttgttgttttgttcttgtcttt

SEQ ID NO: 3706 - DNA, 1622 bp, Cricetulus griseus
cagccttcctaggaaccaacggatgtctccgggtttcctatttgatgacacccactggacctgctttgggggtctgtaaatacaggagagccattggattattagcgatggaagaaaaagcatctaagagaacagcatctgtaccacagttcaccaattcccccacaatgatgatcatggtgggtttaccggctcgaggcaagacctacatctctacgaagctcacacgatatctcaactggataggaacaccaactaaagtgtttaatttaggccaatatcgacgagaggcagtgagctacaggaactatgaattctttctcccagacaacatggaagcccaacttatcaggaagcagtgtgctctggcagccctaaaggatgtccataaatatctcagccatgaggaaggtcacgttgcggtttttgatgccaccaacactaccagagaacgacgatcattgattctgcagtttgctaaagaacatggttacaaggtcttctttattgagtctatttgtaatgaccctgacatcattgccgaaaacatcaagcaagtgaaactcggcagtcctgattacatagactgtgaccaagaaaaggttttagaagactttcttaagagaattgagtgctatgagatcaactaccaacctttggatgaggaattggacagccacctgtcctacatcaagatcttcgacgtgggtacacgctacatggtaaatcgagtgcaggaccatgttcagagccgcacagcctactacctcatgaacattcatgtcacacctcgatccatctacctatgccgtcatggggagagtgaactcaacctcagaggccgcattggaggtgactctggcctctcatctcggggcaagcagtatgcctatgccctagccaacttcattcggtctcaaggcatcagctccctgaaggtgtggaccagccatatgaagaggaccattcagactgctgaggccctaggtgtcccttatgaacagtggaaagccctgaatgagattgatgcgggtgtctgtgaggaaatgacctatgaagaaatccaggaacactaccctgaggaatttgcactacgggaccaggataaatatcgttaccgctatcccaagggagagtcctatgaggatctagttcagcgtcttgagccagttataatggagctcgaacgacaagaaaatgtactggtgatatgtcaccaggctgtcatgcggtgcctcctggcatacttcctggataaaagttcagatgagctgccctatctcaagtgtcctttgcacacagtgctcaaactcacacctgtggcttatggctgcagagtggagcccatctacctgaatatagaggctgtgaacacacaccgggacaagcctgagaatgtggacatcacccgtgaagctgaggaagccctggacactgtccctgcccattactgaacactttacaagtgaccagattgcctctgtcctcgttgccttcctcctgtaggaactgctgcccttcttctccctaagcagactctggctgtagcctgagagtgttctacctccagtgaagaagtctgtagcagctcccaaacaagtctcaattcctagccaaaacta

SEQ ID NO: 3707 - DNA, 1621 bp, Cricetulus griseus
ggaatgaacgctttggtgagacgcggagtggcccgtgtgggcatcccctgtatttggagagggaaatgcttcagctccgggaatgagccggcagaaagcaaccgggtgacgccgatgctgcggcatcttatgtataaaataaagtctacaggccccatctctgtggccgagtacatgaaggaggttttgaccaacccagccaagggatattatgtgcatcatgatatgcttggagaaaaaggagacttcattacttcacccgaaataagtcaaatctttggggagctactggggatatggttcgttagtgaatggatgacctctgggaaaagcactgctttccagctggtggagctgggtccaggccggggtactctcgctggagatattttgagggtgttcagtcagcttgggtctgtgctaaaaacctgtgacatttcgatacacctagtagaggtgagccaaaaattaagtgagattcaagcattgacactgactgaggagaagctccctttggagagagatgctgaatccctggtatacatgaaaggggtcaccaagtctgggattccaatctcctggtaccgagatctgaaggatgttcctaaaggatacagcttttatctcgcacatgagttttttgatgctcttcccgtgcataaatttcagaaaacaccacaaggatggagagaagtgcttgttgatatcgacccacaagtttctgataagctgaggtttgtcttggcaccttgtgcaaccccagcagaagccttcatacaacatgatgaacgaagggaccatgtggaagtatgtcctgacgctgggattattatacaggaactttctgaacgaattgcattagctggaggcgctgccctgattgccgactacggccatgatggaacaaagacagacaccttcagaggcttttgtggacaccagcttcatgatgtcttaattgctcctggaacagctgacctgacagctgatgtggatttcagttacctgcgcagaatggcacaagggaaagtagcctctctgggtcctgtagagcaacggacatttttaaaaaacatgggcattgatgttcggctgaaggttctttagataaagcagatgagccatccttgaagcagcagttacttcgggggtatgatatgttaatgaaccctcagaagatgggagaaagattcaacttctttgctttgctaccacatcagagacttcatgatgcaagtcaagaaaggaatgcccgtcagtcaaaaatccccacatcatctgtagctgggtttgatgaacttgtttggcagtgatatttcaacttggactttttaattccttggtgtgctttaaaaatcaaaataaaagaaactcattttgtatactgaaggtaatgtcaatgttcaaactatctctttgcagttaataaaatactagccccttttatgctgggcactggcggtcacatgccattaatcccagtgctgggaggaagaagcaggcggatctctgagtttgaggccagcctggtctacagagagagttccaggacaggctccaaaacaatacagagaaaccctgtcttagaaaaaaacaaaacaaacaaacaaaagacaaccaa

SEQ ID NO: 3708 - DNA, 1621 bp, Cricetulus griseus
gccaaagcatcccttgtcaccaagcttccccaggaacccaaggcctagaaacatgacccgacagtgccctcccccagtcgcggagtctgggttcccgctgagtggctcggtgctggcggaggctgcagtggtgttcgcagtggtgttgagcatccacgctgcggtgtgggaccgatactcgtggtgcgctgtggccctcgctgtgcaggcgttctacgttcagtacaagtgggaccggctgctccagcaaggcaatgccgttttccagttccgaatgtccgcgaacagtggcttactgccagcctccatggtcatgcctttgcttgggctggtcatgaaggaacgctgccagactgcgggtaacccgtacttcgagcgctttggcgttgtggttgcagccaccggcatggcagtggctctcttctcctcggtgttggcattgggcatcactcgcccggtgcccaccaatacttgcgccatccgaggtgatcgaggtcctggaagtcctgctggtatttgtttatctcaacatgatcctgctgtacctgctgccccgactgcttcactcctggggaggcactgctggtattaggtggcattagcttcgtcctcaaccagctcatcaagcgctctctgactgaaagccaaggggacccagtggacttcttcctgttggtggtggtggtagggatggtgctcatgggtgtcttcttcagcaccctctttgtcttcatggactcgggcacatgggcctcttccatcttcttccacctcatgacctgtgtgctaggccttggtgtggttctgccctggctgcactggctcattcgtaggaaccccctgctctggcttcttcagttcctcttctacacagaaactcgaatttacctcctagcctattggtctttgctggccgccatggcctgcctggtggtgctgtaccagaatgccaagcggtcatcttctgagtccaagaaacacaaggctcctgccattacgagaaagtatttccacttcattgtggtagccacttacatcccaggtatcatctttgaccggccactactatatgtggctgccacggtatgcctggccgtcttcatcttcctggaatatgtgcgctatttccgaatcaagcccttgggtcatactcttcggagccttctgtccctcttcctggatgaacgagacagtggaccccttatcctaacacacatctacctgcttctgggcatgtctcttcccatttggctgattcccaggccctgtacacagaaggacagcctgggaggagcaagagctctggtcccctatgctggggtcctggcggtgggtgtgggtgatactgttgcctccatatttggcagcaccatgggggagatccgctggcctggaactaagaaaacattcgaggggactatgacatctatatttgcacagatcatctctgtagctctgatcttaatctttgacagtggagtagacctgaactacagttatgcttggattttgggatctatcagcactgtgtcgctcctggaagcatacactactcaaatagacaatctccttttgcctctctacctactgatattgctgatggcctagtagtagtagtagc

SEQ ID NO: 3709 - DNA, 1621 bp, Cricetulus griseus
aggatgagttcaaacggggagttctctccagaagagggcttgtattacagcaaggctgttgattactatttgaaagctctgaggtcattgggtaccagagacatgcatccagttgtttgggattctgtgaactgggaattgtccaccacatactttaccatggcaactttacagcaagattatgctccgttgtccagaaaagctcaggagcagattgagaaagaagtaagtgaagctatgatgaagtccctgaaacactgcgatgttgactctgcgactgctcggcagcccctctgtcagtaccgagctgcgaccatccatcacgaggctggcttccatgtaccacagctgtctgagaaaccaggttggtgatgagcacctgaggaagcagcaccgagtgctggcagatctccactacagcaaagctgcaaagctctttcagcttctcaaagatgctccctgtgaactgcttagagtgcagttagaaagggtggcctttgcagaatttcagatgaccagtcagaatagcaatgttggaaagttaaaacattatctggggcgcttgatatcatggtgaaaactgaccatgcattccagctcatccggaaggagcttgtggaggaatgtgaccagcctaagaataatgaagctacaccggctgctgattcttcacctaatcttaatcaagaagaagtgatcaaactccttagtatatttgagtctcgtctgtccttccttctccttcaatccatcaaactgctgtcatcatctaaaagaaaatgagcagtaacactgaagaagacacagtcctccaaaccaacaagcagatttactcccagcttttgagagcaactgccaacagaaactcaactctgctagaaagaattgatgtcatcatctgtttgctggagcagcttgcctctgggagcagcggctcaagtggcagtgctgtcgcctgacccagagctgtacctgaggactctatgtcagtgccttcccaacccggagctgttctgtccactcggtgctgagtcttattaaatatgaggaaatgccatttaaacaggtccacagtggagactcgtttcccacagcaggcagaggatgtggggtactttggcttcttcctttgaaggtgaaaaaccagaatggaaccaaacgctttccggtgtatttcctcgagaagtgcatggttcctcagcaatagcagacttcctatgatgtgattacacttacagatattcttgaagtgtgttaagccaccgggtggaagatgagagtattttggataaaatgttaactttggccaagaaaacttttatccaagtgactttacgggttcaaatggctagtagaaactctctgcacatcagcatttccttctattgcacaagaagtgtaccctttccaatctgtggtgtagatttttttgaagactgatactgtgcaggtctctattcagtgcatgttctcaaaggactcacttttctttgactttctgtgacattggtaaagaataggtactatcactttttcattttaaactcgaaactgtgaataaggtaagagaactattttgaataaataagctattaatttaaaataaaaaaaaaaaaaaaaa

SEQ ID NO: 3710 - DNA, 1621 bp, Cricetulus griseus
gatcttggcaagtctgccagggatgttttcaccaagggctacggctttggcttaataaaacttgatttgaaaacaaagtccgagaatggattggaatttaccagctcaggctccgccaacacagagactaccaaagtaaatggcagcctggaaaccaagtacagatggactgaatatgggctgacatttacagagaagtggaacacagacaacaccctgggtaccgagattaccgtggaagaccagctcacccgtggactgaagctgacctttgattcatccttctcgcctaacactgggaaaaaaaatgctaaaatcaagacagggtacaagagggagcatatcaacctgggctgtgatgtggactttgacattgctgggccctccatccggggtgctctggtgcttggctatgagggctggctggctggctaccagatgaattttgagacttcgaagtcccgagtgacccagagcaacttcgcagttgggtacaagacggacgagttccagcttcatactaatgtgaacgatgggacagagtttggtggctccatttaccaaaaggtgaacaagaagttggagactgctgtcaatcttgcctggacagcaggaaacagtaacactcgctttggaatagcagccaagtatcaggtcgatcctgatgcctgcttttcggccaaagtgaacaactctagcctgatcggtttagggtacactcagaccctaaagccaggtatcaaactgacgctgtcagctctgctggacggcaagaacgtcaatgcgggtggccacaagcttggtctaggactggaatttcaagcataaatgaatattgtacaatcgttaattttaaactattttgcagtatagctaccttcagaatttagtgtaccttttaatgttgtatgttggggatgcgagaattgataaataccacattagatgtccaggctaaggatgactcggctttaaggtgttttccatttcagaggcacagcagaaatccattcctaaaaggatccttttagctgtaggtgtgtgttggggaggagccactccagagacgtcaggctgcaagtggaagctgggaatgtgcgggtcctttgtaaatctgagttgagtccacagatgaaattgtgacttcctgagcatcgaatcttggtgtcccaatcctaactgctgagaagcatgtacacacctgtgtggaagggacttttaagacagatcaccatgccctgttcccatcctagccctgttcccatcctagcccatttagctatttcttttgtgccattttagggtggagagggtgggcatgatggagccagtcattcaggacttaatttttccttgtggtgtggttttcttttcttgccattacaccagagtatgaaacagcttccaggatctccagctttaagctgggcaggtgatttcagtcacaccatgacaacactagggatttaaagtgacctctgttatagcctcaccactctattttttagcagtttaatggatacattatagagtcttccattttgtgtggaattagctcctccccttcaaatgctgtaattaacatcacttaaaataaaacttgaataaaatattgaaacct

SEQ ID NO: 3711 - DNA, 1621 bp, Cricetulus griseus
gaattgcgatggagctggatggcgaggggcgcgcggtggtacggccactgctcactgacctctaccaggtaaccatggcgctgggctattggcgtgcaggccgggcatgcgaggcagcagagttcgagctcttcttccgccgctgtccgtttggaggctcctttgccctggccgccggactgcgggattgtatatgcttcctgcgatccttccgtctgcaggacgcagacgtgcagttcctggcttcagtgctacccccagacactgaccctgaattcttcgagcaccttcgggcccttgactgctctggggtgacggtgcgggccctgccagagggttccctcgccttccctggcgtgccattgctgcaggtgtccgggcctctcctcctggtacagctgctggagactcctctgctgtgtctggtcagttatgctagcctcgtagccaccaatgctgctcggcttcgcctgattgcaggaccggataagagactactagagatgggcttgcggcgagctcagggtccagatgggggcttcacagcctctatttacagctacctgggcgggttcaacagcagcagcaacacactttctggacaactgagaggcgtgccagtggcagggacgctggcccactcctttgtcacttccttttccggtagtgaggtgccccctgacccgatgttggctccagcttctagtgagggccccagagtggacttgatggccagtgtaaatttgtggctgaagcgtgtgtgcatccacctggggctgaaggtgcaagagccacatccaggggaacgggcagcatttgtagcctatgctctggcctttccccgggctttccagggcctgctagattcctacagtgtacgaaggagtggtcttcccaactttctggcagtagccctggcattgggggagctgggctacagggcagtgggcgtgaggctggacagcggtgatctgcttcaacaggctcaggagatccgagggatctttcgaactgttggtgcccagttccaggtgccctggctagaatctgttcccattgcagtcagcaacaacattgatgagaaggagctagcacgactggcccaaaagggcagtgaggtgaacatcattggcattggcaccagtgtggtcacctgtcccaaacagccttctatgggctgtgtctacaagctggtgtccgtgggaggccaacctcgaatgaaactgacagaggaccctgagaagcaaaccctgccaggcagcaaggctgccttccggtttctaggctctgatgggtctttcctactggacttactgcagttggcagaagagcccccacccaaggctgggcaggaactcagggtttggccccaaggagctcaggagccctgcactgtgaagccagcccaggtggagctattgctgagactctgcctgcaacagggccagctgtgtgagccacttccatctctggaggagtccagaacctttgcccagcagtctctgagccgcctcaaccctgctcataagcagctgcagagccctacagtgtatccggttgcgctgtcagagaagcttcgggcactggtagacaatctgagtgctggaggtcccttgtaaaa

SEQ ID NO: 3712 - DNA, 1621 bp, Cricetulus griseus
tccgggtagcatcgcaccgtacggcggtcgacgctttagggacagccccgggcctggggacaatgaggtcgtcgtgcgtcctactggccgcggcaagaaaagcgcaagctcttctccaaaggtgaaggtgactgacactgactttgatggtgtggaagtccgagtgtttgaaggctctccaaaacccgatgagcaacttcgacgaagtgtggtctatatccacggaggaggctgggccttggcaagtgcaaaaatcagctactatgacgagctgtgcacatcaatggccgaggagctgaacgccgtcatcgtttccatcgaatacaggctagttccacaggtccactttcccgagcaaatttacgatgtcatccgtgccacaagatacttcttgcagccagaagtcttagacaagtacaaggtagaccctggcagagttgctgtttctggagacagtgctggtgggaatttggcagctgcccttggacaacagtttacttacgttgccagcctgaaaaataagctcaaactgcaggctttaatctacccagtcctccaggctttggatttcaacacaccctcttaccagcagaacgtgaacactccaatcctgccacgccacgtcatggtgaagtactgggtggattacttcaaaggcaactatgacttcgtacaggccatgattgtgaacaatcacacttcccttgatgtggagaaggccgcagccctcagggcccgtctcaactggacatccctgttgccctcatccatcaaaaagaactacaagcctgtcatgcagaccacaggtgatgccaggatcacccaggagatccctcaactgctggatgcagcttcttccccgctcatcgcagacgaggaagtgttgcaggaccttccgaaaacctacatcctcacctgtgagcatgatgtcctgcgggatgatgggatcatgtatgccaagcgcctggagagtgcaggtgtgaacgtgaccttggaccactttgaggatggcttccatggttgtatgattttcacaagctggccgaccaacttctctgtgggaatccggactaggaatagttacatcaaatggctggatcaaaacctgtgatggagtaaactcctcagacatgcaaagctcttgacctcttctgtttgctttgaaaaaatttattttgtgcataaaatttttaaacttgttgtgtgtagttaccctcaggctatgtagataaggtgtataaaaagcacaaatgaatatcctaattagacttgggtcccattctcaagatattttgttacatatatgcaaatatcccaaagtctagaaaagttaaaactctgaaacagtcttgtctccagcttttcagatgagagatacccaacctataatttaaagacacacatgctcatctctgcccatgatgaccaggagagccctcacgggaatccctgtgtgtgacaggcagacgccagcactgcctacctctaagaaagaggaatattaatgtatttacagagttccttaaaatggtattttcttctcaaactatataagccaaattctgcagaaatcacacaatgaatgtccacagatgtctgaagagctctcaaggatgaaggg

SEQ ID NO: 3713 - DNA, 1621 bp, Cricetulus griseus
gggcggtggcggctgcagcaaggctcagggttctcagctgcggcctccgcaccacgacccgcagtttttgtagccagccggtcgcagtaaacgatcgcatcgacaacaagcgccgtgccgcgctgctgggcggaggccagcgccgcatcgacgcgcagcacaagcgaggaaagctaacagccagggagcggatcagtctcctgctagaccctggcagcttcgtggagagtgacatgtttgtggagcacagatgcgccgacttcggaatggctgctgataagaataagtttcctggagatagtgtggtcactggacggggccgaatcaatggaagattggtttacgtcttcagtcaggattttacagtttttggaggcagcctgtcaggagcacatgcccaaaagatctgcaaaatcatggaccaggccataagagtgggggctccagtgattggactgaatgactctgggggcgcccggatccaggagggagtggagtccttggctggctacgcagacatcttcctgaggaatgtcacagcatccggagtcatccctcagatttcaatgatcatgggcccatgtgctggtggggctgtctactctcctgccctaacagacttcacattcatggtcaaggacacatcctacctgtttatcactggccctgaggttgtgaagtctgttaccaatgaagatgtcactcaggagcagctgggtggtgccaagacccacaccactgtgtcaggtgtggcccacagagctttcgagaatgatgtggatgccctgtgtaacctgcgcgagttcttcaactacctgcccctcagcagccaggacccagctccagtccgagagtgccatgaccccagtgaccgcctggttcctgagctggacacaatcgtccctttggagtcaagcaaagcctatgacatgctgaacatcatacactcagtgattgatgagagagagttttttgagatcatgcccaattacgcaaagaacatcattgttggctttgcaagaatgaatgggaggagcgttggaattgtcggcaaccagcccaaggtagcctcagggtgcttggacattaattcatctgtgaagggggctcgttttgtcaggttctgcgatgctttcaacatcccactcatcacttttgttgatgtccctggattcctgcctggcacagcacaggaatatggcggcattatccggcatggtgccaagctgctctatgcgtttgctgaggcaactgtgcccaaaatcacagtcatcaccaggaaggcctatggaggtgcctatgatgtcatgagctccaaacaccttcttggtgacaccaactatgcctggcccacagccgagattgcagtcatgggcgcaaagggtgctgtggagatcatcttcaaagggcaccaagatgtggaagctgcccaggcggagtatgtggagaagttcgccaaccctttccctgcagccgtgagagggtttgtggatgacatcatccagccatcctctacacgtgctcggatatgttctgacctggaagtcttggccagcaagaaggtccatcgtccttggaggaaacacgcaaatatcccattgtgatgagagcagagagatag

SEQ ID NO: 3714 - DNA, 1620 bp, Cricetulus griseus
  modified_base (1117)..(1117): a, c, t, g, unknown or other
cctgaaagctttgtcctgccaagaagtcactgaggagtgaggtcttggatgctaagctgcctgctggatgtcttgaggatgtacaggtggcacgagtctcgtcctttgaagacaagatgctcacgagttattccatgtcatcacctcatcactggaagatgaacgagaccgccagcctcgagtcactcatttgtttgatgttcattccctggagcagcagtcagaagtgactcccagacatgtgacctgccacacgagagggtctcctcaccccacgtccaatcactggaagtctcaacaccctttccatggaagactcactagtaatatggtttgcaagcactgtgagcaccagagtccttgttcgatttgatacctttgacagcctttcccttagtattccagctgccacttgggggcacccgctgaccctggaccactgccttcatcatttcatctcatctgagtcggtgcgagacgttgtgtgtgacaactgtacaaagatcgaagcaaaaggagcgttgactggggagaaggtggaacaccagaggaccactttcgttaaacaattgaagctggggaagctgcctcagtgcctctgtatccatctccagcggctcagctggtccagccatggcacgcccttgaagcggcatgagcacgtgcagtttaacgagttcctgatgatggacttctataagtaccgcctcctgggacacaagcccagtcagcatggccccaaagccagtgagaacctagagtctgccctggaactacaggacacacaatcggcccaaaagccaggtctgagccagccaggggcccttccgattgatggcagttgtcgtccaccatggagacatgcactctggacactttgtcaacttatagacggtcaccgccttcggctaagaaccctctctcaaccagcaaccagtggctgtggatttccgatgacactgtccgaaaggccagcctgcaggaggtcctgtcttctagtgcttacctgctgttctatgagcgagttctgtccagggtgcagcagcaggggcgggagtacgagggctggaggagtgacaggcctagcccagagcctgggcccatggtgaggtccacngtccgggataaagaaggcatgccacgcgtacacgtgcaagccaacccctctagagcccctcagccttctgtgtattctgagagcaggctccacgtgggagccagtcctacgcagcgctgccagggtgtaccagaaggtgtcctcatgtgaggatagtatccattgtgacacaggtcattaaaagaaacagactccaggagccaccctttctatactgtaatatgctaggtgttctcagagggcattgcctttgtctgatcctctgacatttcagcatagatatttattttttaataaggaggcccataaatattattgacaagaattagtgaaattattaaaggcaacaattcagaagaaaaagtgcctttcccttccagttgttctgagattaggcatgacccaagagtcacaggcatgatgttgggatagccctcgtccatcccagttccttggaggtcaaaaggaggcaggaggatcactgcaagtcagaggtcagcctg

SEQ ID NO: 3715 - DNA, 1620 bp, Cricetulus griseus
agcgcgctagcggtcggcggcgctgctggcgggagaggctgcaacgccgatgtctgaggagcgatgccgagagaaatcatcaccctacagttgggccagtgcggcaatcagattgggttcgagttctggaaacagctgtgtgctgagcatggcatcagccccgagggcatcgtagaagagttcgccaccgagggcactgaccgcaaggacgtctttttctaccaggcagacgatgagcattacatccctcgggctgtgctgctggacctggagccccgggtgatccattctatcctcaactcctcctatgccaagctctacaacccagagaacatctacctgtctgagcatggaggaggagctggcaacaactgggccagtggattctcccagggagaaaaaatccatgaagacatttttgacatcatagatcgggaggcagatggcagtgacagtctagagggctttgtgctgtgtcactccattgctggggggacaggctctggcttgggctcctacctcttggaacgtctgaatgacaggtaccccaagaaactagtgcagacatactccgtgtttcccaaccaggatgagatgagtgatgtggtggtccagccctacaactccctccttacactaaagaggttgacccagaatgcagactgtgtagtggtgctggacaacacggccctgaacctgatcgccacagaccgcctgcatatccagaacccatccttctcccagatcaaccagctggtgtccaccatcatgtcagccagcaccaccaccctgcgctaccctggctacatgaacaatgacctcatcggcctcatcgcctccctcattcccacccctcggctccacttcctcatgactggctatacccctctcaccacggaccagtcagtggccagtgtgaggaagacaaccgtcttggatgtcatgaggcgactgctacagcccaagaacgtgatggtgtccacaggccgggaccgtcagaccaaccactgctacatcgccatcctcaacatcatccagggggaggtggaccccacccaggtccacaagagtctgcagaggatccgggaaaggaagctggccaacttcatcccctggggcccagccagcatccaggtggccctgtcaaggaagtccccctacctgccctcagcccaccgtgtcagtgggctcatgatggccaaccacaccagcatctcctcgctctttgaacggacctgtcgccagtttgacaagcttcggaaacgggaggctttcatggagcagttccggaaggaggacatcttcaaggacaattttgatgagatggacacctctagggagatagtgcagcagctgattgatgagtaccatgcagccacacggccagattacatctcctggggcacccaggagcagtgaacgagtccccaggacacagaccctcatctgccttactggttggcccaggccctgcctagctgactgcccctcagagcacagatcagggacctcagaaatcactcacaaacacatatacatgcgctgtccgttggcttgggcatggggtttacttcttctctgagagtatttatctttaataaagcactggatgtaaatcaa

SEQ ID NO: 3716 - DNA, 1620 bp, Cricetulus griseus
gtcgctctcacgctcggaggagatgcaccggctcacggaaaatgtctataagaccatcatggagcagttcaaccccagcttccgcaacttcatcgccatggggaagaactacgagaaagccctggcaggtgtcaccttcgctgccaaaggctatttcgatgctctggtaaagatgggggagctggccagcgagagccagggctctaaggaacttggggacgtcctcttccagatggccgaagtccaccggcagatccagaaccaactggaagagatgctaaagtcttttcacaatgagctgctcacacagctggaacagaaggtagagctggactccaggtatctgagtgctgcactgaagaaataccaggcagagcagaggagcaaaggagatgctctggacaagtgtcaggctgagctgaagaagctccgtaagaagagccaagggagcaagaaccctcagaagtactcggacaaggagctgcagtacattgatgccatcagcaacaagcagggtgagctggagaactacgtatctgatggctacaagacagcactcaccgaggagcggaggaggttctgcttcctggtggaaaagcagtgtgctgtggccaagaactctgctgcttaccactccaagggcaaggagctgctagcccagaagctgcccgtgtggcagcaagcctgtgctgaccccaacaagattccagaccgcgctgtccagctgatgcagcagatagccagcagcaacggctccatccttcctagtaccctgtcagcctccaagtccaacctggtcatctcagaccccattcctggagccaaacccttgccagtgccacctgagctggcaccatttgtggggtctcaaagcaagctgagcgactcgtactccaacacacttcccgtgcgcaagagcgtgaccccgaagaacagctatgccaccactgagaacaagacactgccacgttcaagctccatggcagctggcctagaacgtaacggccgcatgcgggtcaaagccattttctcccacgcggctggtgacaacagcactctgctgagcttcaaggagggcgacctcatcaccctgctagtgcctgaggcccgtgacggctggcactatggcgagagtgagaaaaccaaaatgcggggctggtttcctttctcctacactcgggtcctggacagtgacggaagtgacaggttgcacatgagcctgcagcagggcaagagcagcagcacgggcaaccttctggacaaggacgacctggccgtcccccctcctgactacggcacgtcctcccgggccttccccacccagacggccgggactttcaagcagagaccctacagtgtggccgttcctgccttctctcagggtctggatgactacggggcacggtctgtgagcagtggcagtggcacgctggtgtccacagtgtgaggacgctgaccccaggcagctgctctgaagagctcttccccccgtctccatcggtttccctcctcagctctcgttggtttgttcccggggttgttttttctctcccacctgctcctgcctttcaagttggtgatcccagactctgaagtcccccagggtccatggtgctgctc

SEQ ID NO: 3717 - DNA, 1620 bp, Cricetulus griseus
ccaaagttagcaacctctcggagcctgtggtactcaccttccagcaccagccacaaccaaatgtgactctacagtgtgtgttctgggttgacgatccaacatcaagcagccctgggagctggagcagtgcaggctgtgagactgtccgcagagacacgcagacatcctgcctgtgcagccatctgacctactttgcagtcttgatggtgtcatccatggaggtagaggccgtacacaagcactacctcacactcctgtcctacgtgggctgtgtcatctctgctctggcttgtgtcttcaccattgctgcctacctttgctccaggaggaagtcacgtgactacaccattaaagtgcacatgaacctgctgctggctgtcttcctgctggatgtgagtttcctgctcagtgagcctgtggcactggcgggctctgaagcagcctgccgcaccagtgccatcttcctgcacttctccctgcttgcctgtctctcctggatgggcctcgagggctacaatctctaccgcctggtggtagaggtcttcggcacctacgtccctggctacctgctcaagctgagcatcgtgggctggggttttcctgtcttcctggtcactctggtggcactggtcgacgtgaataattatggccccatcatcctggctgtgcgccgaactccagaccgtgtcatctacccctctatgtgctggatccgggactctctggttagctatgtcactaacctgggcctcttcagtctggtgttcctgttcaacatggccatgctggccaccatggtggtgcaaatcctgcgacttcgcccacacaatcaaaagtggccccatgtgctgacactgctgggcctcagcctggtccttggccttccctgggccttggttttcttttcctttgcttctggtaccttccaacttgtcatcctctacctcttcagcatcataacttccttccaaggcttcctcatcttcctgtggtactggttcatgcggttccaggcccgaggtggcccctctcctctgaagagcaactcggacagcgtcaagctccccatcagctccggcggcagcacttcttccagtcgcatctaggccaccgccacacctcctcatgggaggacacatgcatggcgtctgctcacattgtctgtggcttggtgctgtgcccagccttggttggttagtggctttctagagaaggccctggtccttggagggataggactgttgctctgataggtagatacctagctggccttggggactactccacttccagatctagtctccgaagcacactgccatgctggctgtggggctcccctagccctccacctgcagcttggggtcctaggccagtgctaacccaacattctgaagaccaagacagcggctgggaatccaggaggacttcttgcaggaggtagcatttcatcttgacctcagccttcaagttggggaggacgctctttttaaataccaatttgtttgtcttttgatattaaagttctttgtagagagtttgaaaactgtaggagattgctgagaagaaaaataaaaatcagttgttatctgatgccatggacaaaaaaaaaaaaaaaaaaaa

SEQ ID NO: 3718 - DNA, 1620 bp, Cricetulus griseus
agaaaaacttttcgagactcactgaaagagttggaggaactgatgcaaaatagtacagtgtgtgctgagcaaatggaagaacaaatacatctgtcagctcctctttggtgtgtgctggtgtccctaaacctttccgggcctcagctggagaaagtggtgattgacagaagcctggtggggaagctcatctcagacactatcagtgatgctcttcttacttaccatgtgtgcacagtggagtgctccattagtgtggacaaggagcccatggctgacagctgtgtctatgaatgtgtccggaacaaactccattgcatgtcagttactaggataccactaagatcgaaggccatcagctgttgcaggaatcctactgaagacaaactgattgtgggctgtgaagattcttcagtaattctctatgaagctcatcgtggagtgactctcttggcccaagctgaacttctgccttcattaataagctgcagcaaccaagggggaactgcaaatttttgacattgctctatcccctattaacatccagctcttggctgaagatcgcttacccagtaagactttgcaattcaataaattctttgatgtttcaagcaatcttgtacaaatgcagtggatagctcctcctgttgtttcccagaagcctgaaagaggagaaatctatgatctcctcttcctcaggttcaacagaggacctgtgggtgtgctgttgtttaaacttggtgtcctcactcgaggacagctgggcctggtagaactcatcttccagtacatccactgtgatgaggtgaatgaagcaataaacaccctgagcagcatgaactgggacaccctgggccagcagtgctttgtcagcatgagcgccatcgtgaaccatctccttagacaaaggctcactccagagagagaagcacagcttgaggcaagccttggaactttctatgctccagcaagaccacttctggataccactgttttggaatacagagaccagatcagcaagtatgccaggagatttttccaccacttgctcaggtaccggagatttgaaaaagcctttctcttagctgttgacattggtgctcgtgacctgtttatggatattcattaccttgccctggatatgggtgaactggccctggctgaagtggcaagaagaagagcatgtgacattgatgtcgaatctgtatcctctggaatcgaactcctgggccccttggacaaaagagacacactaaatgaagcttttgctggaccagcacctgaaggagaaaacacatttccagatcttcttccttccactggatccaagcacagacatgttattcagcagaaaataccaaatggacccttctaacagacaggcaattgacagaaggaatgaggcactgactcttcagtgaccaccatctcagatgcagaaggaggactgaaagaagtactgcaggggacaggacattggagatgttggttctctcagaatggttcattttggcttggtgtaaattattagaaactccaaaaagaaacctgcccttttcatatcttttatatggccctgattcaatacaaatctccacgtgtggatttaatagaaggaaagat

SEQ ID NO: 3719 - DNA, 1619 bp, Cricetulus griseus
agttcagattgataatgctgacatcagattcaccatccacggaagaggaagtgtcccgggttcctcagcctgtgacaccaccaccttcgctgtcagatccacttaaagaactctttcggcaacaggaagtagtaagaatgaaactacgtttgcagcatagtatcgaaaagggaaaagcttattgtatccaatgaacaagaagttctgcgagttcattacagagctgcgagaacactggcaaatcaaacgctgccattcagtgcttgcactgtcctactggacgcagaagtgtacaatgtgcccttggactcacagtctgatgacagtaagacttctgtgagagatcgatttaatgcaagacagttcatgtcctggttacaagatgtggatgataaatttgacaaactaaagacctgtcttttaatgaggcagcaacacgaagctgcagctttaaatgccgttcagagactagaatggcagctaaaactccaggaactggatcctgccacctacaagtccatcagtatttatgagatccaggagttttacgtccctcttgttgatgtcaatgatgactttgaattgactcctatatagcagttggtatttgtgttggcatcatcttaaactaacaatacaagcgttaaactgtggaatactgccttttaagaaaaaccctgacaatagcctttacagttgttagtgaagttaactaaagttgcttgtgtagtgaacactgtcattttataaaaataaaaaaaatattttggatcttaggtccaagtacagtttctaacagaaaactattatttatattgatcaaaggtaactattacattagaacaaactgagtagaactttaaaaagttgagaaaatctgttaacagcgctggaagttgttagcactcaagtaacaagataaccaaccacaagtactcagagctcttgcgggttttattaaaagtacatgagtaaactcaaggatttaattcctaccaaatagtttctaatgtggaagaaaaccttgacacagagttcttcagtttatcttatctgtaaattaattgtacagttttcttttttgaaagttttaatattgtcttcctttttaataacttattttatacatattgtacatcttgtaattaagggtctatgtatacaagggaaccgccctcaaacgtgtacagagatgactgtaaaacttggttctgttggaggtcgtactgcttgccttcttgtgaatatgtgtaaatacgtttaataaattttattggtcatgttaaatcattgtaaactttcttacattgcttaaatttagtcttttaagcttaatagccttttgcacttttaaaataaaaattgaatgctcaaaatcaaaataagatacttcgtagtcaaaaagtaacagtcttaggaatgttccagtccctgaaatgttcatgaagtttttattaatatatggtatattttccttgtatcgagatgcaaaatgtgtagtttgcaaaatttcataactgaaataagatttggtatgctttttatagtaaactaaggagcaatatccgtagaacaatatgtcttatgacacgatacagattggatgttcaggaaagctg

SEQ ID NO: 3720 - DNA, 1619 bp, Cricetulus griseus
ccgtcaacacatgagcaccatgatcaaggcatttgaagagcttctgcaggccagtgatgtggacaattgtgtggccgagggcttcagggagcagctaacacagtgtgctgaactgcttgaacaactggaaaagctgtttctccatggaaaattagccggagtggaaccatgtccccagagtgaactgctagagaggttaaggactgaggaaggcaacttaacctaccaacatctcctgcctgaatctcctgagccttctgccgctcacgcactgtcagatgatgaagtgtctgttaagtccttcctgtccggagaccagaaaccagacagcgagactgaaaagtgcccagagatgtcgagccattttcctcaagacttactaatggaacacatacaggaaattcgaactttgagaaactgtttggaagaatctattaagacaaatgagaagctccggaaacagttggagcggcaggggtctgaaactgaccaagtttccacaaatgtttctgcttatggctcagagctacatagctctctgacgtcagagatacatttcctgaggaagcagaatcaggccctcagtatgatgctcgagaaagggtccagagataaacagaaagagaatgaaaaattacttgagtctctgtccaggaaggctgcaagtcttgagcaccttcagttagagtacaccagtgtaaaagaagaaaatgaaaggttgcagaaagacatcagtgagaaggagagacagaaccagcagctgacccaggaggtctgcagcagccaccaagaactgagcagggtacaggaagaaatgaaagtcgaggcagcaactgctctcacagaatgataagctcctccagtccctccgatggcaacagatgtcctgaggccagtgataattcatttgatctgtttgactctactcaggcaatggcacctaagtcagcttctgagactcctctgctctccggaactgacgttgactccctctcctgtgacagtagcacttatgccaccagtcccacttgcatgccctgtgtggttgctggccaccatatgtgggccagcaagagtggcccccatatgctgggcctgattgaggactatgatgccctccataagcagattagccggggtcagagactgcttgcgaagatggacattcaaactcaagaggctctgagccccacaactcaaaagctggactcacagggttcacacgctgtgcctctgagcaagtttctctccagcatcaatgcagccaagcagattctggaagaatcctcaaggttgttgaagctcttctggagggtctcagtccccacagacggccagtgttcccttcactgtgagcagattggagaaatgaaggcagagatcaccaaactacacaaaaagttgtttgaacaagaaaagaagctgcagaacactgcaaaacttctgcagcagaaaaagcatcaggagaaagtcatctgtgatcagttggtcatcacccaccaagtccttcggaaggccagacgaaacctggagcgaaggactagggctgcccatccaggaacatccagtcccagccgactgggttcatgagaagagctttcagctaataaagcttgtgg

SEQ ID NO: 3721 - DNA, 1619 bp, Cricetulus griseus
  modified_base (1598)..(1598): a, c, t, g, unknown or other
tgatgaagaggaagaagcgaagcaggtcttgcagaaattgcaggaattggtatggagaagaccgtgcagcagatggaggaagtactgggttctggtccagggtgaggcacaggctctaatgctgaaggggaaggcactgaatgtgactcctgagtatagcccagaggctgaggtgcttctgtcaaaggctgtgaagctggagcctgagctggtggaagcctggaaccagctgggtgaggtgtactggaagaaaggggacgttgctgctgcccacacctgcttctcaggagctctcacccactgcaaaaacaaagtctccctgcaaaacttgtcaatggtgcttcgccagctgcagaccgactccggagatgagcattctcgccatgtcatggacagtgtccgacaggctaagttggccgtgcagatggatgtccttgatggccgctcctggtatatcctggggaatgcatatctttctctatatttcaatactggccagaaccctaagatctcccagcaagccctcagtgcctatgctcaagcagagaaggtcgacaggaaagcgtccagcaatcccgaccttcatctgaacagggcgacgttacataaatatgaagagagttatggggaggccctagagggtttctctcaggcagccgcactggaccctgcatggccagagccccggcaacgagaacaacaactcctggaattcctcactaggctaaccagccttctggagagcaaggggaagacaaaacccaaaaaactccagagtatgctgggaagcttgcgtccagcccatctgggcccctgtggtgatgggcgctatcagtcagcctctgggcagaaggtgaccttggagcgcaagccactgagcacactgcagcctggtgtgaacagtggtactgtggtcctgggaaaggtggtgttcagcctgacctcagaggagaaagtccccttcacatttggcttggtagattccgatggtccttgctatgcagtgatggtgtacaatgtagtgcagagctggggcgtgctcattggggactctgtcgctattcctgagcccaactttaggcatcaccacattcggcacaagggaaaggactattccttctccagtgttcgggtggaaacgcctctcctgctggtggtgaatggaaagccacagaactctagcagccaagccactgccaccgtggcttcgagaccgcagtgtgaatgaccttgtagggggagtggaggcccagagataagctcacctgggtgtcgtgaatggagacttgtcttcctctgccctgtaacatagttcgagcctcctttcttttcctgtggtattccagcccccttcaaagccgtcactacccctgttcatctcccctgcctcttcaatgacttaaaggaagaacaaagcactaatggaactgttgggaccctgttatgggagacttttccccatcttgagatgttttgacagttcccaagatccccgttcttgccttcttcctgagtctaatatgtatgtatatatctgtttactatttattgctgagggggcttaacttttctaatggcttcatttttgagtttttttntttttttaatttttaagttta

SEQ ID NO: 3722 - DNA, 1619 bp, Cricetulus griseus
gagctgttcgtgttgaatgcagcgcagtgctccatgcccctccatgtcgccccgctccttgctgctgctggtctgcacgcttcacccatgtcggccgaccgggtggtcgcctttatggaccacataaggatcttccaagagcaagtggagaagctcaaggcgctgcacgtcgattccgctgagtacagctgcctcaaggccatagtcctgttcacctcagatgcctgtggtctgtctgatgtagcccatgtggaaagcttgcaggaaaagtcccagtgtgctttggaagagtacgttagaagccagtaccccaaccagccaacgcggttcggaaagcttttgcttcgcctcccttccctccgcacggtctcctcctcagtcatagagcaattgtttttcgtccgtttggtaggtaaaacccccatcgaaaccctcatccgggatatgttactgtccggcagcagttttaactggccgtatatggcaattcaataaataaataaatcaaaataagaagggggagtgaaacagagaaagaaaaggacaaaagactggttttgtttgcttaatttccttctgttgagaaaggatgttacaagtttgctaaaaagaagagaggggaagaatttaatggactgtgaatttcaaaaaaagagtgagagagactcgtcaaaggaactttacagaatgcattaagaaaagattgtattcagtatcttagagtttacagtttgtgtttttaaaaaaaactgaaggttttttttttttaagttgcaacatttctgtatactgtaaaagttataataactgaactgtttggtcgagtctttgtgtgttatattccaaggaaaattgaaagtattcagaaattaaaatattatttgatatctgaaacctgcttggctgtcccccactcactgtctttccatcaagctgagccccctgtgagtcctctctgagccagcggggggccccatttgtttactcccctcaatcagtttgttcaaaggtagactagtgtatttgcctgtttaatttgggtgtgtgtgggggggagccgaagttaatggtttatctatggtttaggaagcgccacactgatatagtaaagccacccccattcacctaatcctccttttaattaaaaatggattttccaggaaaaaaaaagaggcccttatatttgtcacacttaagtgcctgcttagggaaggtattgtgaaaagtattagaaatggagagagagagagggagtaggagaggagagggagagagacacacagagatgctgatctgggaagtctactatttggtccagtcccttattctcttttcctggtttggaaaaagctctgtgctaggagcctacaatttgttcttgtttagactttccaagctgccctccctgacattacttttccatgttgtggtttaatcttaaaatgagggagggggcagatgaaagaggtataagaaaagggatcattttgcaaagtgctttaaacttggatgctcagttctggttcatatatgcagacctgaaaactctgcctgatttaggcagagctctccatctgaccctcaccttctctctgtagatacatataaatataaagtat

SEQ ID NO: 3723 - DNA, 1619 bp, Cricetulus griseus
catctccaccaacatcaaagaacgcctcgacttttcctgtgccctctttgggccagatgggggcctggtctccaatgctccccacatttcctgtgcacctgggcgccatgcaggagactgttcagttccagattcagcacttaggagctgacctccatcctggtgacgtgctgctcagcaaccatcccagtgcagggggcagccatcttccagacctgactgttatcacaccggtgtttttggccaggccagacacggcccgtgttctatgtggccagccgagggcaccatgcagacattggaggtatcacaccaggctctatgcctcctcactctaccacactgcaacaggagggtgccgtttttctgtccttcaaactggttcagggaggcgtcttccaggaagaagcggtgacagaggccctgcgggcaccgggcaagatctctggctgtagtggaaccaggaacctgcatgacaacctgtcggatcttcgtgcccaggtggcagccaaccagaagggtatccagctggtgggagagctgatcgggcagtatggcttggacgtggtgcaggcctatatgggctatattcaggcaaacgctgaactagcagttcgagacatgcttcgagcttttggaacctcccggcaggcccggggcctgcccctggaggtgtctgcagaggatcatatggatgacggctctcccatccgtctgcgtgttcagatcaacctgagtcagggcagtgcagtatttgacttcagtggttctgggtctgaggtgtttggcaatctcaacgccccgcgggccataactctgtctgctctcatctattgcttgcgttctctagtgggccgtgacatcccacttaaccagggttgccttgctcctgtgcgtgtagtaattcccaaaggctccatcttggacccatccccagaggcagcagtggtgggcggcaacgtgctcacatctcagcgagtagtggacgtcattctgaaggcttttggggcctgttctgcctcccagggctgtatgaacaatgtgaccctgggcaatgcccgtatgggatactatgagacagtggctggtggtacgggcgctggacctggttggcatgggcgcagtggtgtacacagtcacatgactaacacacgcatcacggacccggagattctggagagccggtacccagttatcctgcgtcgctttgaattgagacaaggctctgggggccgaggccgcttccggggaggtgatggtatagtccgagagctggtctttcgggaagaggcgctgctgtccgtgctcaccgagcgtcgggccttccagccttacggcctctacgggggagagcctggcgccagaggcttaaacctcctcatcagaaaggatgggcgaaccgtgaatttgggtgggaagacctctgtgaccgtgtatcccggggacatcttctgcctttacacccctggcggtggggctatggagacccggaggacccagcgccaccaccaggctctcccccgctatttgcagccttcccagagcgcggcagtgtatatgagtaccgccgcgcccaggaagctgtgtgagtgccccacaataaagaccttggagtcgca

SEQ ID NO: 3724 - DNA, 1618 bp, Cricetulus griseus
ttaatattgcctgcatttgaggctaaacaagacaggagaaacaattgcagcactcacagatgtgaccaaattgaaccatgtggaatcgagtggtcagatcacaattttgacagacaaaacaggagttgtgcaggccgccaggctgctgctctcctcagtgacaaaagtgttgctgctggcagaccgagtagtcatcaagcagatagtgacatcaagaaacaaggttcttgcaaccatggagagactagagaaagtaaacaagcttttcaggagtttgttcagatattcagccagtttggaaatgaaatggtggagtttgcacatctaacgggagacagacaaaatgatttgaaagatgaaaagaaaaaggccagcatggccgtggcgagggccgtgcttgaaaagggcaccatgatgctcctcacggcttcaaagacatgtctcaggcatcccagctgtgactcagcccacaaaaacaaagaaggagtgtttgaccggatgagagtggccctggataaggtcattgagatagtcactgagagcaaaccaaatggagaaactgacaggtcatctgtcagcgtgtttactgggattaaagaattgaagttgaacattgaagccctttgggagaatctctactttgagtccaaggagaacctttatctggcacggaaccccttgaaataacctgcatacatgcagaagagacatttcaggtgactggcccacagatcatttctgctgctgagacattgacgctgcatccatctagcaaaatcgctaaggaaaacctggacgtgttttgtgaggcttgggaatctcagattagtgacatggcaacgctgctacgagagatcagtgatgtgtttaaaggaagacgaggagagaagtacgaccatctttcacttccaaggcccatgaagaataatgcaaacctgaaatctttaaagcccgacaaaccggattcagaggagcaggccaagatagcaaagctggggctgaagctggctttgctcacctccgatactgactgtgaacttgagaagtgggaggatcaagagaacgagatcgctcgacacggacggaacatgtccaggatggcctattcgctgtatttatttactagaggagaggggccactgaaaacgtcgcacgacttaattcactttctagagggttttgctgcagagggattaaaacttacttcaaatgtacagtcattttcaaaacagctaaaagacttatgcttctcctggaaataaacaagctaattcctctatgccaccagctccagacaataactaagacgtctttgcagaataaagtgttcctcaaggttgacaagtgtattacaaagataagatccatgatggctctcgtggtccagctcctgtcactttgctataagttactgaagaaggtggaaagtaacaggtgggtctcagtgacgaaaaaagatatcatggatggtaaaacctgagcagcctgcagttcatctctggaatatcatgtggcacagctgaccttttaaaaaagcaattgatcctttgttctttcagaaattcatctgttttctaaagagaatgctgaatctcttcttttttcccctcagattaga

SEQ ID NO: 3725 - DNA, 1618 bp, Cricetulus griseus
agaaagacctgttgggagccagtgggctcatgctgctgcttcctcccaaagtgaagactgaggacatagcagaggaggatctgtactggctgtcggctttattgcagctcaagcagctccttcaggccaagcctttccagcccgcacttccactggtggttctcgtgcccagctccaaaggagactccatggggaaggaagtggaggacggtctgatgttacaggatttggtttcagctaagctgatttccgattacattgttgtggagattcccgattctgttaatgatttacaaggcacaaatgaaggtttctggagcggtccaatggctggtctcccgatgccctcaaaccctagacctttgctgccagacccttattcagtatgttgaggatgggatcagccgtgagttcagtggtcggtttttccctgacagaagagagaggcggctgggtggcctggcctctcaagagcctggcgccattattgagctgtttaatagcgtgctgcagttcctggcctctgtggtgtcctctgagcagctgtgcgacatctcctggcctgtcatggagtttgctgaggcagggggcagccagctgcttcctcatctgcactggaactcaccagagcatctagcttggctgaagcaagctgtgcttgggttccagcttccccagatggatcttccgcctgcaggggctccctggctccccgtgtgttccatggtcattcagtatacctcccagattcccagctcctgccagacacagcctgtcctccagtcccaggtggagaacctgctgtgcagaacataccaaaagtggaagagcaagaacctctctccaggccaggagtcagggccttcggttgctgagattccgtgggatgacatcatcaccttatgcatcaatcacaagctgagtgactggacaccacccaggctccccatcacagcagaggcactgagtgaagatggtcagatatgtgtatatttttacaaaaattgtttaaggaaatacgatgtccccttgtcatgggaacaggccagaaagcagacacagagggagctgcagctgagtcacagacgttcggggacaaagtcttttcatccttctacgagcagttttcctactccactgcttcatgtgcaccacaaaaggaagaaaaatgaggagagtggccgagaggggagtctccgtacagaggacctgatgcgcggagcttctgcagaagagctcctggcacagtgtctgtccagcagtctgctggaggagaaggaagagaacaaaaggtttgaagatcagcttcagcagtggttatctcaagactcccaggccttcacagagtcaactcgccttcctctctaccttcctcagacactcatatctttcccagacaccatccagactcagactgtggtgagagcatcgacaacgagacgtcctcagagtgcagaggcaggagagcagttgcagttctcggagatattggacacgtctctaactgaaagactgaagcacctggaaaggctgatccgaagttcaagggaagaagaagttgtctccgagctccatctttctgcactgctggacatggtggacatttgaacagtctgac

SEQ ID NO: 3726 - DNA, 1618 bp, Cricetulus griseus
gagatcattgaggtggtagagctggatccaggcccgccgacccggatgatctggcccagggagatggaagacgtggactttgaggaagaagaggaggaggaagagggcaatgacgagggctgggtcctggaaccccaggaatcggcagcatggagggtccggatgatagcgaggtcacctttgcattgcactcagcatctgtgttttgcgtgagcctggaccccaaaaccaacaccttggcagtgacagggggtgaagatgacaaagcctttgtgtggagactcagtgatggagagctgctcttcgagtgtgcaggccataaagactctgtgacatgtgctggttttagccatgactccaccctagtggccacaggggacatgagtggtcttttgaaagtgtggcaagttgatactaaggaagaagtctggtcttttgaagcaggagacctggagtggatggagtggcaccctcgggcacctgtcctattagcgggcacagctgacggcaacacttggatgtggaaggtaccgaatggtgactgtaagaccttccagggccccaattgccctgcaacctgtggccgtgtcctccctgatgggaagagagctgtggtaggatatgaagatggtaccatcaggatttgggacctcaagcagggaaaccccatccatgtactgaaaggaactgagggtcaccagggccctctgacctgtgttgccaccaaccaggatggcagcctgatcctcactggctctgtggattgccaggccaagctggtcagtgccaccacaggcaaggttgtgggtgtgttcagacctgagacagtcacctcccagcccagcctgggagaaggggaggagagtgagtcgaactctgtggagtccttgggcttctgcagtgtgatgcctctggctgctgttggctatctggatggaacactggctatctatgacctgtccacgcagacactccggcaccaatgccagcaccagtcgggcattgttcagctgctgtgggaggctggcactgctgtggtgtacacctgtagcctggatggcattgttcgtctctgggatgcccgaactggccgcctgcttactgactaccggggccacactgctgagatcctggattttgccctcagcaaagatgcctccctggtggtgacaacatcaggagaccacaaagcgaaagtattttgtgtccagagacctgaccgttaacggctgtggctctggcatagtgtctggtgttgagggggataaagggagacccctgccccccagcagaggtggcagggtgcagagggagaaggaggggagggcattggactgctttccaacccttcagctgacctgcccgctccttgtccttttcttccctggagacccgccttaccaggccctccctccctcccctgtccagccctggggccctttaggaggcccatgtttctttcactttgatttgctggtgtgagccatggggtgcgtctttgtatgttgggggtaggtctttgaggttcccgttctttcccttcccaactctctggggaaggaaaggaggaagagagactagttacagattttaaaaatgtaaataaaatatacttccc

SEQ ID NO: 3727 - DNA, 1618 bp, Cricetulus griseus
cccgggatccgctcgctcagggggttcccccgaaggaaaccgcgggactgggacgagaggggacctcagcctcgcgccccagcctgcgcctgccagcggaccggcctccccgctcccggtccttccaccatgcacttgctgggcttcttggctctggcgtgttccctactcgccgctgcgctgatcccgggtccccacgaggcgcccgccaccgccaccgccttcgagtccggactgggcttctcggaagcggagcccgacgggggcgaggtcaaggcttttgcaggcaaagacctggaggaacagttgcggtcagtgtccagtgtagatgagctcatgtccgtcctgtacccagactactggaaaatgtacaagtgccagctaaggaaaggtggctggcagcagcccactctcaacacaaggacaggggacaatgtaaaatttgctgctgcacattacaatacagaaatcctgaaaagtattgataatgagtggagaaagactcaatgcatgccacgtgaggtgtgtatagatgtggggaaggagtttggagcagccacaaacaccttctttaaacctccatgtgtgtccgtctacagatgtgggggctgttgcaacagcgaggggctgcaatgcatgaacaccagcacaggttacctcagcaagacgttgtttgaaattacagtgcctctctctcaaggccccaaaccagtcacaatcagttttgccaatcatacttcctgccgatgcatgtctaaactggacgtttacagacaagttcattcaattattagacgttctctgccagcaacattatcacagtgtcaagcagccaacaaaacttgtccagcaaactatgtgtggaataactacatgtgccgatgcctggctcaacaggattttatcttttattcaaaccctgaggatgactctaccaatggattccatgatgtctgtggacccaacaaggagctggatgaagacacctgtcagtgtgtctgcaaaggggggcttaggccatccagctgtggaccccacaaagaactagacagaaactcatgtcagtgtgtctgtaaaaacaaacttttccccagctcatgtggagccaacagagaatttgatgaaaacacttgccagtgtgtatgtaaaagaacctgtcctagaaaccgacccctgaatcctggaaaatgtgcctgtgaatgtacagaaaacacagagaagtgctttctaaaagggaagaaattccaccatcaaacatgcagttgttaccgacgaccatgtacaaatcgactgaggcattgtgatccgggactgtcatttagtgaagaagtgtgtcgctgtgtcccatcatattggaaaagaccacatatgaactaagatcatgcaaattttcatttcatcatcttactgtcttgaaaaactgttgccacattagaactgtttatacacagaaagtctctgtgggaccatggtaacagaggctcaagactgtgtttcatgaaccgtggggatagctgcaggaatggcctggcactcatgtaaaaaggcctcttcaaagactgcttttctaccagtgaccagacagccaaggttttcctcttgtgatttaaaaatagaa

SEQ ID NO: 3728 - DNA, 1617 bp, Cricetulus griseus
cctttgctggcttcatggcggcgccgtctgccttccggatgctgcggaggctcctgaagccgcccgcccggggctgcagctcgggggctccggtgacgcagccccgccccgcggagccctcaagacccgccagggaggggcagtccacgaggctccagttcctccaggagcatgcggctcccttctctgccttcctcaccgacagctttggccgccagcacagttacctgcggatctctctcacagagaagtggacttcgtggccttgacagaagcccttcccctggatgtgcgcttcattgagtacatgccgtttgatggcaacaagtggaacttcaggaagatggtcagctacaaggagatgctggacaccattcgacagcggtggccagggctggagaagctgcccgaggaggactccagcaccgccaaggcctttaagatcccgtggcttccagggccaggtcagtttcatcacctccatgtcagagcacttctgtgggacctgcaaccgcttgcgcatcacagccgacgggaacctcaaggtctgcctcttcgggaactctgaggtgtccctgcgggaccacctgcgctcaggggcctctgaggaggagcttttgagaatcattggggcagcagtgggtaggaagaagaggcagcatgcaggcatgttcaatattgcccagatgaagaaccggcccatgatcctcatcgggtcatttctgatgcttgaagattccccaccagctagttggagcactttcttctgggatcccctctgtgttcggaatcggagtgccagggagaatttctctgataagatggcaactttgtggaaaagactccatgttcccatggccctccctctgtctcggcagtgcctggggtctggctcccctcagagacactacagctactacccagactctgatactcactcaacgtgccttagcaaaggctcccaggatcctgctgtccccccaggaccagggccaacctcaactcagctaactcatgtggattcagaaggacgagcagctatggtagatgtgggcgggaagccagacacagagcgggtggctgtcgcctctgctgtggtccttcttggacctgtggccttcaagcttgtccagcagaaccagctgaagaagggagatgctctagcagtggcccagctggctggagtccaggcagccaagctaactagtcagctgatccccctgtgccaccaagtggtcctgagccacgtgcaggtacagctggagctggacagcacacgccatgctgtgttgatccaggcatcgtgccgggcccggggccccacctggtgtagaaatggaggccctgacctcggctgccatggctgcccttaccctgtatgacatgtgcaaggcagtcagtagggacatcgtggtggcagaggtgaagctgatcagcaagactgggggtcagagggggggacttccatcgggcttagggtgcctcactcactcactgcagtcatgtctcccaaggagatgcaatttgggccaaggaaaagacgtcacattcctctaaatctagtaagacacacacacacacacacacacacacacacacacacacacacacacacac

SEQ ID NO: 3729 - DNA, 1616 bp, Cricetulus griseus
gcaccatctgccctggtcagctccagccagtccctgttggagtggtgccaagaggtcacccagaggctaccgtggtgtctgcatcacccaaatttcaccacatcttggcgcaacggcctggccttctgtgctattttacatcgattctacccagacaagattgactatctctccctcgacccactcaacatcaaacagaacaacaaacaggcttttgatggcttcgctgccctgggcgtgtctcggttgctggagccagcggacatggtgcttctgtccgtacctgacaagctcatcgtcatgacgtacctgtgccagatccgagctttctgtaccgggcaggagctgcagctggtgcagctggagggcagtggtggccctggcacttaccgcgtgggcaacgcccagcctagcttgcccgacggcctggatgcaggcgacctggcacagaggctacgcgagcatggggctgaagcgcccacagagcccaaggaggctgtgaaccgcggggctggagcggtgcccaaagtggcctctagggactcgggcctgggctgtgcctccaaggatggggaggctgaggctgcccaggaggcagttcccccagaggctccctccgacggccccagagcccggtcgtccacgtcccctgtggcccccacagaggggctggtaaacggagtgggggtgccaggtggtgtgagtggtgtgagactgagacggtcctcggtcagtggggaggccggaccggtacctccaccccgcgcacatggctctttctcccacgtgcgtgacgctgatttgctaaagaagaggagatccaggctacggaatagcaactccttttctgtggacgacccggactctggagcagcagtaggagcaggagctgcaggagctggggctgtggaagggccaaaccctgactccagccttgactcaggcccacgcacagccccaggcccgcagcagccttctggtgggaaccctcctccagaggagccaccccccagtccaggggaagaggctggcctgcaacggttccaggacacaagtcagtacgtgtgcgcagagctccaggccctggaacaggagcagaggcagatagatgggcgggctgctgaggtggagaaacagctgaggagcctcatggaaacaggtgccaacaggctgcaggaggaggtgctgattgaggagtggttcaccctggtcaacaagaagaatgctctcatccggaggcaggaccagctgcagcttctcatcgaggagcaggacttggagcggaggtttgacttgctgagccgggagctgcgcgccatgttggctattgaggagtggcagaaaaccgtcgcgcagcagcaccgagagcaactcctgttggaggagctagtgtcactggtgaatcagagggatgagctggtccgggacctggaccaaaaggagcgaatcgctctagaagaagatgagcgcctggaacgcggcctggagcagcgacgtcgcaaggtgagccggcagctgagcaggcgagaacgctgcatgctgagctgagcctcctgcctggttctcgcccctttctctggtcacggatccctcctcgccagtccccgagcctgcac

SEQ ID NO: 3730 - DNA, 1616 bp, Cricetulus griseus
  modified_base (1612)..(1612): a, c, t, g, unknown or other
cccgcgccgtgccccgcaccgctccggtgccgggggccccctcggaggtcgcggccggccaccgcggcccctggtcgtgcgcgccgtgcgctcacgttccctggccctccggtccccgaggcccgcagcccccgccgggatccgggcccgctcggcccctcccatggaaggtgctcgagtctttggggccctagggcctattgggccctcttcacctgggctctctgttgggggacttgcagtgaatgagcaccggctcagcaacaagctgctcgcctggagtggcgtccttgagtggcaggagaagcgtagacccttctcggactcgacagccaagctgaagcgcaccctgccctgccaggcctacgtgaaccagggcgagaacctggagacggaccagtggccccagaagctgatcatgcagctcatcccacagcagttgctgaccacactgggccccctgttccgaaactctcagctggcccaattccactttaccaacagagactgtgactcgctcaagggcctctgccgcatcatgggcaacggcttcgcaggctgtatgctcttcccccacatttctccttgcgaggtgcgtgtgctcatgctcctgtactcatctaagaagaagatcttcatgggcctcatcccctacgaccagagtggctttgtcaatgccatacggcaggtcatcaccacccgcaaacaggctgtgggccctgggggcgtgcactctggacctgttcagattgtcaacaacaaattcttggcatggagtggtgtcatggagtggcaggagcccaggcctgagcccaatagccggtccaagcgatggctgccatcccacgtctacgtgaaccaaggggagatcctgaggacagaccagtggcctcggaagctcttcatgcagctcatcccacagcagttgctgaccaccctggtgccgctgtttcggaactcccgcttggtgcagtttcacttcactaaggacatggagactctcaagagcctgtgccgcatcatggacaatggcttcgcgggctgtgtgcacttctcctacaaggcctcctgtgaggtgcgtgtgctcatgcttctctactcctcggagaaaaagatcttcattggcctcatcccacatgaccagagcaactttgtcaacggtatccgtcgtgtcattgccaaccagcagcaggtcctacagagaagcctggagcaggagcagcagcagcgagggatgggtggctagtggactcccaggctgggcaggccacagtcccagacgaggcccagtggagactggtgagcagcatttaatttcccaggaagcagcagggtggccctggcattagggaaactactacacgaggcactgccttctgggacttgtatccctggcaaggtatgggtgccagggcccttaggaggggtagggtgcagtctcacgagtagaagccacccctcctactgcctcccaggtcagatgcttctgagcaggggctcctggggactgtgcctgcccagcaacttggaggacagcgtcctgaggtctccaaggatggtccttgcccctgtatgtttccctaataaagcctttaaacccaaaaaaaaaaanaaaa

SEQ ID NO: 3731 - DNA, 1616 bp, Cricetulus griseus
tgggtcaaggtttctcaggtgactatcatgaatattttggactacaagttgatgaagatgcacttatttacctcatgttggcaaatcatttggctcacacattgtatccagattctattacaatagcagaggatgtatcaggaatgccggctctttgttctcctactgcccagggaggaggtggttttgattatagactagcaatggcaattccagataaatggatccaattacttaaagaatttaaagatgaagactggaatatgggcaatatagtatacactctcacaaatcgacgctaccttgaaaaatgtattgcttatgcagagagccatgatcaggcactggttggcgataagacgctagcattttggttgatggatgctgagatgtacacgaacatgagtgttctggctcctttcactccagttattgatcgaggaatacagctccacaagatgattcggctcattactcatgggcttggtggagaaggatatctcaatttcatgggtaacgaatttgggcatcctgagtggttagacttcccaaggaaagggaataatgagagttaccattacgccaggaggcagtttaatttaactgatgacgaccttcttcgctataagttcctaaataactttgacagagatatgaatagattggaagaaagatgcagttggctttcagctccacaggcctatgtgagtgaaaaacatgaaggcaataagatcatcacctttgagagagcaggactcctctttattttcaacttccacccaagcaagagctatgctgactaccgagttgggactgcattgccagggaaattcaaaattgcactggattcagatgccgcggaatatggaggacaccagagactagaccacaacactgattactttgctgaggcttttgaacataatggccgtccctattctcttttggtgtacattccaagtcgagtggctctcatccttcagaacatggatctgccaaactgaggaaacctgaactcagcccacctcacacaaacgggtcggcctgcctgatttctgctgccacggtgtcgataatgcggaagctttgcaaaaacacgctgtctagccaaaacatcaagctgaaattcaactttggaatatgcaaagaagaatgtgtttaaaatactagcaaagtgtgtcgtgaagccttccaagaaattaggatttgcaaatgaagtataatgtataataatttttaaatgttattttactggcaaagtatttgatcattttatttcaaatttgaattattcatcatgcatgattatttttgtagtaataagacagtattttgtgacatggatgtttggtggccttattccagtgtctattggtctgaattatgaggtactgagtttgtttctcttttcttttttttcctaaactgtgtttagaaatcctgtattaatatgtagcagtaacctaaaaatgcaattcttataaaagataatatgaaattcttatctgtgccctcattttgcattaagctttatcttgtaatctgtcaatacactgttttagtaaatgccgatattcagtcttgctgatgacttgaaatggtaattgtagcatttc

SEQ ID NO: 3732 - DNA, 1616 bp, Cricetulus griseus
ctggcttctaggctacccagctactttgtacgacctgatctgggcccaattcatgaccaaagttggtatctggaccagatcctccgaaagagactctttgaggaatatggcgtacaaggctgggccattgtgcagttcctgggcgatgctgtcttcatacctgctggagccccgcaccaggttcacaatctatatagttgcataaaagtcgcagaggactttgtatcgccagagcatgtgaagcactgcttccgcctgactcaagaattcagacatctctccaacactcacacgaatcatgaggataaactacaggtgaagaacattatataccatgcagtgaaagatgccgtcggcactctcaaggcccaacgaatccgaaactggcaaggtcctaaagcattggaaacttgcagctctcctgtgatgcaggcctctcacaacacttaccagggaacggcagggctctctgcaagagcagaggcccttccccaagccagtgtggtcagtattacaaactctccagccactctttctatgctgcctcaacactgaaggttgacacaagaaagtcgcactgttcacacacacagtttcagacttgaagctgagggtgccacattcccattcagtggccttttgggaatccaggttgcttgaccatcgctgggctttcctgcacattctcctggtttgagaccatggaaaccaggagtgtgggcacaccttcattctctgttcctcttgtgcctagctgattggggttgtgtttggaggcggaggaaatcataactggtaaaaagatgatttcatgtgcctgggggaagcctggccgtgtttccgcacatgacttctgacctggcccatcccaggaggtggggatgcagccattccccatactctctgtgaacactggagtctttgggacccaggaaaagcccacagcttttcccaggagactccaggattaggaaacgtgtgtatttagtgaaaaataggtttgtagtgaaatagttactatttcatgaaagtagatatttttagaacttttgaaataacagttgttttcctggactatgaggaaaggcaagttgctctagtcttccttccaatgaaactctgaaaagatatgatttttagaaatcagctgtcccttatagcacaaaatcagccaaagcgtaatttaaaagaattggcattttattagaattcttttagtctctcccactccctctcagttttatcttgagggagcagttgtccaagaaagcaccgtgtcatgtctgagctgtggagctaccccttcgtgcacactgctgactccaggagccgtttgcaaaccaccagcgttcccttgggactccgcctgcctctccaaatggggtgggaagtttggtttccaatataagaagttgttttgttttttggagttttgtctgaaaatattttcagcaaaactttcctactcagtggcgtttttattaagaatttacttggaaatgatggaattcactggcccataggtacattgggaaatgtatctctttccaggtgtactgccctgcagccttgtttatatgttcactagtttacctttttttttttttttatttaaa

SEQ ID NO: 3733 - DNA, 1616 bp, Cricetulus griseus
cggcgagccacggggcggtcctggggcctcggtttggttcgtggagtccgagcggcagattcgctcggcactggagagggagctaattctgtggagtcaggaatcgtgggtgaagttcgccgctggtggagagagggagttgagaaaggctgcgctgggctcccgcaggggctcgggcgcactcccagtttcggtcttttcatgcaggaaatgaatctgctgccgacgccggagagtccagtgactcggcaggagaagatggcgaccgtgtgggatgaagccgagcaagatggcattggggaagaagtgctcaagatgtccacagaagagatcatccagcgcacacggctgctggacagtgagatcaagatcatgaagagtgaagtattgcgagtcacccatgaactccaagccatgaaagacaaaatcaaagagaacagtgaaaaaatcaaagtgaacaaaaccctgccataccttgtgtccaatgtcattgagttgctggacgttgatcccaatgaccaggaggaggatggtgccaatattgacctggactcacagaggaagggcaagtgtgctgtgatcaaaacttccacacgacaaacatacttcctaccagtgatcgggttggtggatgcagagaagctgaagccaggagacctggtgggtgtgaacaaagactcctatctgatcctggagaccctgcccacagaatatgactctcgggtgaaggccatggaggtggatgagcggcccacagagcaatacagtgacatcgggggcctggacaagcagatccaggagttggtagaggccattgtcctgcctatgaaccacaaagagaagtttgagaacttgggtatccagcccccaaaaggagtgctgatgtacgggccgcctggtacagggaagactctgcttgcccgagcctgtgccgcccagaccaaggctaccttcttgaagttggcaggccctcagctggtgcagatgtttattggagatggtgccaaactggtccgtgatgcttttgccctggccaaggagaaggctccatccatcatcttcattgatgaattggatgccattggtaccaagcgcttcgacagtgagaaagccggggaccgggaggtgcagaggaccatgctggagcttctgaaccagctggatggcttccagcccaacacccaagtaaaggtaatcgcagccactaacagagtggacatcctggaccctgccctgctccgctcagggcgcctggaccgcaagattgagttcccgatgcccaacgaggaggcccgggctagaatcatgcagatccactcacggaagatgaatgtcagtcctgacgtgaactatgaggagttggctcgttgcactgatgacttcaatggggcccagtgcaaggccgtgtgtgtggaggcgggtatgatcgcactgcgcaggggcgctacggagcttacccacgaagactacatggagggcatcttagaggtacaggctaagaagaaagccaaccttcagtactatgcctaggacctctagtctgcccgctggtctgtggactaaagctgataataaaaggtgttttctgttccccgaaacaaaaaaaaaaaaaaaaa

SEQ ID NO: 3734 - DNA, 1616 bp, Cricetulus griseus
cgccttgccagccctgaccctgtgtgaaaagaatcatgcagccttcgaggcagcctaccagattgtgctggatgctgcagctggtggccttggccatgcccatctgttcacagtggcacgatacatggagcatcgaggcctacctttgcgggcctacaagctggccacactagccttagcgcaactcagcattgccttcaaccaagacagccaccctgcggttaatgacgtgctatgggcctgctcactcagccactcattggggcggcacgagttgtcagccattgtccctctcatcatccgcagcatccactgcgcacctatgctctcagacatcctacgccgctggacactctcagcaccaggtctgggcccactgggtgcccgcagggctaccaagccacttgggactgacagggcaccactttgccagctcctggatgctgcagtagccgcctacatcaccaccagtcactcacgacttacccacatcagcccgcgtcactacggtgacttcattgagttcctgggcaaagcgcgagagaccttccttctggcaccagatgggcacctccagttcgcacagttcttagagaaccttaaacagacctacaaggggaagaagaagctgatgctcttggttcgggagcggtttggctgagggacagcaactagctgggagcatgggtatcccctggcctgccttcctgaagcaggaggtccgtggttacttgaggatcaagtcacggaatgtgggaggcaggaggtgacgccattctaagcgtgtgcctaggagtatgcagacaaatgggagatctgaggatctgaagccatactgctaactagaggcctgcagggggtgtgtgcctgggcaccccacaagcaagagacaagttctggctctcccagactcacacggttagctagagcttctaggacaagggctagaggcagaactttccagaattagttcttaaattcagtatagcagatcctccagagcccacctgggtgcctggggacttcacatcagggtagttaaatcccactgtgtttcttcccctctcctccagctcaggggtcctgtcccactgtcctgaactcccagcccaagctgccagcacaaatcaatgcctcacccccactgaaggatatcaagaggccttgagcctctgccacatacctcacccccaaacacgctgtccagccaggacctgtcttgttttgggcaccaaggtcacagggtaggctgggaacagctctctgctgcccgggaccccaccactagtaactggatacacaactcaggaaccaggctgcctccaacctgttgtgggaggcacaggcagacagccagggcccccaccctgtcttcctttggctctacacagccatttctgtttcctcacttcctttagtttacccatttctgcctctctcaagtcccagctgctgacagaggcgtccctttatcccaggccttggcccaggggaggaagaaaagggacagcctccaccccagatgaacctgtcttctctcctgtatattaaggaaaagttggcatcattttgtaactttttttcctatttattgaatcccatactgtattcctttt

SEQ ID NO: 3735 - DNA, 1616 bp, Cricetulus griseus
gcatttcctcagctgcctagatgacaaacagtggaagatgggtaaacgccgggcagagaaggatgagatggtgggtgccagctttcttctcaccttccaaatccccacagagcaccaggatctgcaggatgtagaggaccgtgtggatacattcaaggctttcagtaagaagatggatgacagtgttctgcagcttagcactgtagcatcagagctggtgcggaagcatgtggggagcttccgcaaggaattccagaactggaatgccttccaggccattagccatgccttccagatggatcctccctttagctctgaggccctcaacaatgccatttctcacaccggccggacctatgaaactgttggtgagatgttcgctgaacagcccaagaatgatctcttccaaatgcttgacacactgtctctctaccagggcctgctctccaacttccctgacattatccacctgcaaaaaggtgcttttgccaaagtgaaggaaagccagcgcatgagtgatgagggccgcatggctcaggaagaggcagacggcattcgcaggcgctgccgtgtggtaggcttcgccctgcaggctgagatgaaccacttccaccagcgccgtgagcttgacttcaagcatatgatgcaaagctacctgcgccagcagattctcttctaccagcaggtgggccagcaactggagaagacccttcgcatgtacgaccatctctgaccaactgtggccacatatgcaaggcctctcccatctgaagtcctggtacccctggagaagtcttccctcgctttagagatgggtgaatagagatagttctctgagccaaagcctgggctgctggtcagtccctagagagcaggcttctctggagcctatagtgcacgctcacctggccaccacatcctgtttattccctggactccactgactgctgtggccatggctgagacattgatgaccaagtttggaacatgcctgtcctggaagagccacctttcaagatggatatcagataatgcagtatggcagtgacacttaaggattcatggaaactccttgaaggagcacagaattctgctggtcaggggacactacacggagtaggtaacattccagaaatatcttgaagaattacaaggacctacaaaagacagtaaatggagtgaaagacatttttggggagagggccgttgtcccctcctcttccttacctttcccaaccaaatttggtgtcctcttcatgggttctgatctttatgacagaggggagggatcatccttgctccatggtccctggctttccctgccctacccatccttctgcaggagggactgccggccaactccctcctataggtcttggactcccctctactgtggttggggacaccccccccccccacggccagactcatggtctagttgtgccactaccgactatgtttactattctccaggaggtactgccccttaaccctcaggccaggatgtggccagcagcatgttgttgggaagtgaccttgtcccccttgccttcctgggaagccatggtctgctcctgggtcctgctgcttgacttcttttttcttgataaaccttt

SEQ ID NO: 3736 - DNA, 1616 bp, Cricetulus griseus
tgatccggcagcgagtaggccatgatgggcaccctgagtatcagatccgctggctcatcctcaggcgtggagatgatggggaaggggactctacccaagtggactgcaaggctgagcatatcctgctatggatgtctgatgatgagatctatgccaattgtcacaagatgctgggcaggatggccaagtcatcggaccttccagggtgctggatcagtacctagagtgcagggatgccgcccacaacccccagagccgtgcagcagccttctcctcacgggttcgccgcctcacccacttgctggtccacgtggagccccgtgaggcagcgcctccagtggtggccatctctcaagccaagggcagaaatagaagccatgactggagctccttggccacccgaggccttccaagcagcatcatgagaaacctgacccgttgctggcgagctgtggtagaggaacaggtgaacaactttctgacctcatcctggaaagatgacgcctttgtgccacgctattgtgagctcttctataagctgcagaagtcgagctctgagggaggagcaggaggaggagcaggaggagggagggggaggaggagctatattatgaagggacaatgccagaagtgtgtgtgcttgtgctgtctccacgctaactggcctgtcacctcggtctgccacatgctcagttctacggcacgcctgccctcatatctgaaggggactttaaaccactactccaacttctacaacaagagtcagacccatgccagagaggaagatccaaatcggcaacttcagtggacctggcaaggccgggctgagctgcagtttggggaccagaccctgcatgtgtccacagtgcagatgtggctgctgctacatttcaaccacctaaaggtggtgtctgttgagagcctgctggcgctctcagagctccctccagatgtgcttaatcacgcaattgggcctctcacctcatcaagaggccccttggaccttcaggagcagagagataaaccaggaggagtgctcaagattcgagatgacagtgaggaacccagaccaaggaggggcaatgtgtggctcatcccacctcagaggtacctgaaagctgaggatgaagagggccggaacttggagaagagaaggaaccttctaaactgccttgttgtccgaatcctcaagggtcatggggatgagggcttgcacattgaccagcttgtctgtctggtgctggaagcttgggagaaaggcccgtgtcctcccaggggtctggtcagtagccttggccggggagctgtgtgcaccagcactgatgtcctctcctgcatcctgcacctcctgggcaagggcacactgagacgccgtgatgaccggccacagaagctgtgctatgcagttcccataaccgtcatggagccccacactgagtccctgaaccctgggtcgacaggtcccaatccacccctgactttccacactctgcaaattcgctcccggggtgtcccttatgcttcctgcactgacacccagagcttctccacgttccggtaaccctggagatggggttcaggataggtgaggctgggactttctacagaaaattaaa

SEQ ID NO: 3737 - DNA, 1616 bp, Cricetulus griseus
gctgtcgccgccgccgctgctgctgctgccggatccccggccgccgttcgggcccccgccgccaccggggccccggatgccgtctgcactacagtcgtcccctgccggagagtgtgcccccagccctggacgccgcccccggccctggtctccactcctccgccacacctctcatgacagctcccgctcgaagatggctgcgaagggcgcgcacggctcccacctgaaggtggagagcgagatggagcgctgccgcgccgagggccactgggaccgcatgttcgagctggtccggcatctgcagacgctgggcatttccggcggcggcagtagcaaccggcgaagcagcccgagcggcaggttcatcgctctggacaccgttgcctgttttgagtagggcctcctgggtggtcttcaggtattcctgcaagagctggagaaggcctcaaacaacagtgcatcgaggcacctaaaaggcagcccctcagctgactacgaactcacttacttcttggaagctgccctccagagtgcatatgtgaagaacctgaagaaagggaacattgtgaaaggcatgagggaactccgggacattctaaggactgtggagaccaaagcaacgcagaacttcaaagtgatggctgccaagcacctggcaggggtcctgctgcactctctgagtgaggattgctactggagccccttgtccccaccccctgcctgagttcatgagcaaggaggagagttcctttgtcacccagaccttcggaaccacacctctacgaaggagacaacctctactggagcatctttcaggagtccctgaccatgtgcagggatgatgccaatgccctccacttgctagcgctgcttttctcggcccagaagcataaccagcacgccctggatgtcatcaatatggccatcgccgagtaccctgagaatttcaacctgatgttcaccaaggtgaaactggagcaggtgctgaagggtccagaggaagcccttgtgacctgcaggcaaatgctgagactgtggcagaccctctacaacttctctcagctgggtggcctaggggaaaagggatggtagctttgaaaggacctcacagtgaaagaaacagaatggcattcacctgaccctgccagatgctcatgacgcactggaacaaatctggctccaggctgctgagctgttcatggaacagagacacctcaaggaagcaggcttctgcatccaggaggcttctggcctcttccccacctctcactcggtgctctacatgcgaggccggctggctgaggtgaagggcaacttagaagaggctacgcagctgtacaaggaggcgctcaccgtgaacccagatggcgtgtgcatcatgcacagcttgggtctgatgctgagtcaattgggccacaagagcctggcccagaaggtgcttcgggatgctgtggagagacagagcacctgccatgaagcatggcagggcctgggaacagggtgctgcaggaccaaggccagaatgaggctgccgtcgactgctttctcactgccctggagctggaggccagcagccctgtgctccccttctccatcatccccagagagctgtgagc

SEQ ID NO: 3738 - DNA, 1615 bp, Cricetulus griseus
gcacagtcaatgagagtatttcgacatagctaccagcctctcaggttacttctgtgtccctaagcgaattctggacagtgaggtcagaagagcgtttgcccacttccatcagggccgtggaccgcgcctgtcctggcaccaccctggcggcagtgaccttctccgatgtggagacttctatgtagccagtgaccctaacaaagacgatgtcagagcagtggagtccatgctacaggcggggcactctgatgttgtcttggtagatgctatggatgacatgcctagtcttgctgacacccaacttgcccacttgaagctgagggccctttgcctgcctgattcatctgtagctgaagataagtggctctcagccttggaaggaacacgatggttggactatgtcaggtcttgtcttcgaaaggctagtgacatctcagtattagtgacatcgatttcaatggcctcctctcttcactcgtccagctgcttttggcccctgaagcccggacactgtttggtttccagtcaactagtgcaacgggagtgggtggcagctggacaccccttcctggaccaggcttggggagactggggccggtgaggaggccccagtgtttcctctcttccttgactgtgtctggcagctcctccagcagtttccagctgaatttgaattctctgagtttttccttcttgctctgcacgacagtatccgggttcctgacacccttactttcctgagaaacactccctgggaacgtgggaagaagagtgggcagttcaactcctatacacaagtttacacccctgagtacggccagtccttagctgggagctctgttaatctacagctgtctgtctgggactgggatttacgctacagcaaggaacagatatcacagttccttaatcctggctacaatccggagcatcgcccagattcctggctccctagacaacaggcaagcttcatggttcctgggcgccccagttctgtgtggctgttctctagaggggccctgacagccctgaatcggctctgtccttggcaagacagtccgtccttgctggcagtctcttctcactggctccctcgacctgctagatcctctgaaagcctagctgatcaggaatgggggctcccgtcacactggggagcttgccctttacctcctgggctactgctgcctggatatcttggacctcagatcaggttctggagacgatgctacctgaggggaaggcctgaggcccagatgggctcctcggctcttacaatctctggcctccaggatgaactctcttgtcttcaggaactattaagaaaactgacaccaagaatatctcctgaggatcactgcaagaagagagatccaaataccatcctctctcagatccgttgagactggtcaaaactgtgagatcagagacacttcatcagttccaacaagatgccccagagacttcattctcaacccctcacactgctttgaaatccagtttcttagtcttctgtgggaatgagggaaataagggagacaccctgtcctcccactgtatatttttgtagtggtatttctatttaaggacttcattaaagcacagtatttctaca

SEQ ID NO: 3739 - DNA, 1615 bp, Cricetulus griseus
  modified_base (306)..(306): a, c, t, g, unknown or other
  modified_base (361)..(361): a, c, t, g, unknown or other
agaaagttcatgagcaggggggcagcttcatccaaggaaactctcagtgaagatggaaatcccatagaccctgagctggggaaatcattgtttataaataaagcacttgtctcacaagacagtgatccccaagaaagggtacctagtatgtatgacactgtggagaaagatttaccacaggattttgatttaatgagaagcttccagatttacatgggaaaaaaaccttatgtctgcaatgaatgtgggaaggcttttagccaaagtctttatcttctggagcaccagaggattcacactgggganaaaccttacaagtgtgatgagtgtgggaaatgcttcagccatagatcttcccttntggctcaccagacgaacccacactggagagtggagagaaaccctatcagtgtaatcagtgtggaaaggccttcagccagtattcattcctaactgaacatgagcgaatccatactggagagaagctctataagtgtatggagtgtgggaaggcctatagttataggtcaaacctttgtagacacaaaaaagttcaccttaaagaaaggctctataaatggaaagaatacggaacaccttttatctatggatcatcccttactccatatcagaaatttctgagagaagacaagcccgagaattttaattcatccgtgtaatgcaagacagcaaccagaagagtaataactagagtataaatccaaatagatttcaacttttgttatgtgtacaacaaatagtcactactaagtcatggacagtttcagttctgataatctatggtagttacaggttcatttctatcctcatggctcaagaacactatttgttttgtaacctgttcaaatgttagtgctagtgatgtaatcatttatctttagagtttcctctagctttggtcttagttgtagagttgagacatacctccttttcttctgtctctgattatacctgcttctataatagctacttaaattctcaaagccaatggtggtattgctttggtatgcttcaatgtaaggctgcctttttattacacaacttctaattactttttttttcttcgtagtgctgacgacagaatccagggccttgtacatgcttaggaggtgctctactgctgagctatatctccagcccttaggatttaagtataaagttatagatgaatattatatattaaacaatctattcatcaccttaatattttaaatctcccctagtcctagtttcttctgtttacaaagaattgagagtaacaagttagattatacagcaatagagtttgagacatcggaaatgatcattgagctgtacttttcaaatagtcaatatgtttgaacaaaaagacgcctgagatagccacatgcaaagtgtgatcctttattgagaaatatagtcaggaaagaaactgtaaaagacatttgggggatatttacggaaatacaaagatgagaataggtattagataatgtggtatgcttgtgtttcttagaataagtaagatactgagtttctatttccctgtcatgtgcatgcgaaagttttatgttgacaagtcataatgtctacagcatattttaaattgaaactg

SEQ ID NO: 3740 - DNA, 1615 bp, Cricetulus griseus
gtggcaccacgcgggcagctaccctgttgcccaaggccaaaatccctcacccatcctccatccaatccggccgaccgagcttactcctggtaccagcaccagcgagcccacgatgacccagtggccctaaagtacaccttccatgaggtgataacagctggccctgatgcatcctcaaagctgcgtgccctccagaaccgttgcctggtccctggctggtatgccactcatattgaacgctggctcagtgccttccatgccaaccagatcctggttttggatggcaaactgcttcgaacagaacctgccaaagtgatggacacggtgcagaaattcctcggggtgaccagtaccgttgactaccacaaaaccttggcgtttgacccaaagaaaggattttggtgccaactgcttgaaggaggaaaaaccaagtgtctgggcaaaagcaagggacggaaatatccagagatggacttggattcccgagccttcctaaaggattactaccgggaccacaacatggaaaggaagaccaactctctccaggaagtctgggtttacaagcctagtggccctgggttgttttgggccacagggaaaaaagctgggctggggtgggaggcctggggccctgagctgccctccccctcacatggtgctaggttggggctgacttggagtgggatgcccacagggacccacagaattgtctccagtccctgcagacacaggttccctgattgttttctgcttgggttctgttcctgtccccttttaacaatgtgaagtgaccaaggttgggttgcctttccctgcttctggcatcctgggcttggaagggtcccaagacaggcacagagtaggtccagaaatggatggtggccttggtcaatgtcacagagttgttggaagcagtaccaagagctaaattcaggccactgcttctgagcccagtgctttcccagtaccacactgcctccgagcccaccttcggggccctcctgtgttccaggttcctgtctttccctcagtcacagctgtggtcattccaggacatggggacaaaccactctttcccagtcaggtgcctttgagccttccccttccgagacctgcacaccacctttcctgctgtgttctcttgcttctggcattcatccatcctggtggctgtcttcattctgagctagtctctccttgagttctccattgttgtggagagcgttggatgctcaggggaacctgcatgtgtggttttggtgtgtagagccatgtcacatcatgtttctcattggggtcttggagcttgtggatcaccctggagccccacagccatgtcagtgggcagagcaagttcagaactgtctcagccagtgttgggtggtgagtgccagccacctttatctggactgaaggaggttagcattcgccagtttgtcttcttttctctgtacgtgtatgtgtttttaaagtgagtttgcgggtacatgagactgttatcccttgtgttgccctgagaggtaagggccttctgccagaccagccagtgccacagctgagacagtagtcccaacccactaacagctgctgtcttgtctgtacccaaaggtctccc

SEQ ID NO: 3741 - DNA, 1615 bp, Cricetulus griseus
ggtggcccggtgttttgctgggcgtattaggacgtgccagggcggccaatgagccctgggatggtggcctgcggaccctccctgggcggtgctcctctgctctgaggtaccgcccttccgggcaaggtacccccgttggaccaccgaacctaggccacgccactgcacaagcagtgggtctccccgatttaaaaaagaggggggtggtttagtgggctccagaggaatgaggcgggtggacgcaattgagctatgctgtgaacaaggttataggactggtgattgcatcggcgaaagcagggcgttcccctattccctcacctgggtcaggtgtgcgcccgttgggcgggtcctgtcggggaggcgaggccggccaaggataacgccttcctcttcctgggctggtgagaggagctcgggcaccgggcggagcggcgggcatcatgaataaccctataccttctaatctgaaatcagaagcaaagaaggctgccaaaatattaagagaatttacagaaataacttccagaaatggacctgataagatcattcctgcccatgtgattgcaaaagcaaaaggacttgcagttttgtctgtcattaaagctggatttctggtgacagccaggggaggcagtgggattgtcctggcacgtcttccagatggaaaatggtctgcaccttcagccattgggatagctgggcttggtggaggatttgaaataggaattgaggtgtccgatttggtgataattctgaattatgacaaagcagtagaagcctttgcaaagggtggaaacctgacacttggagggaattttactgtagcagttgggccccttggcaggaacctggaaggaaacgtatccctgagaagctctgcagctgtcttcacttactgcaaatcccggggcctttttgctggcatttccctagaaggaagctgtttgattgaaagaaaagaaaccaataagaaattttactgtcaggacattcgagcatatgacattttatttggagatgttccacagcctgctcaagcagaagatctttatgaaatcctcaactcctttactgaaaagtatgaaaatgaaggacaacgcatcaatttgagaaaagtagcacgagagcagaggaaggctaaagaattacctccaaaaccatcatcaagaccacagcaatcccgagcacctgtccaactgaattctggctcccagagtaatggaaatggatataagctatatcctgaactttctagctatcatgagaaaaatggaagtttgaatcagccaatagaagtgacagcactgtactcttttgaagggcaacaaccaggggatttgaattttcaagccggagacagaatcacagttatatcaaagactgactcacattttgattggtgggaaggaaaacttcgaggtcaaactggcatttttccagccaactatgtaactatgaattaaagttcatgctattttgttatttgattcaaaactatctctacacagacaggattcatttatttacacaaacctgtttgaccacatctttgccctgcaaatgttttatccagttgtaaaagatttttctccaaatataaataaatggttaa

SEQ ID NO: 3742 - DNA, 1614 bp, Cricetulus griseus
  modified_base (1600)..(1600): a, c, t, g, unknown or other
gtcgcctttgccgggaacccggacccagcctcttcccccacccggtcaccggccccggctccaccgaggcctcggtcccccagccccgcctcgccgccgccatggcggaccctaaatacgccgacctccccggcattgccaggaacgagcccgatgtttatgaaaccagcgacctacctgaagatgatcaagcagagtttgatgcggaggagctgaccagcaccagtgtggaacacatcattgtcaaccccaatgccgcctatgacaagttcaaggacaagagagtggggacaaaaggtctcgatttctcagatcgaattgggaaaaccaagaggacaggatatgaatctggagactatgagatgcttggagaaggtgtgggcgtgaaggagacgccacagcagaagtatcagcgactcctgcatgaagtccaagagctgacaactgaagtggagaagatcaggacaactgtgaaggagtcagccatcgaggagaagctgacccctgtggtgctggccaaacagctggtagctctgaagcagcagctggtggcttcccacctggagaagttgctgggaccagatgctgccatcaacctcactgacccagacggagctttggctaagcgcttactgctgcagctggaagcaacaaagaacagcaaagggactttagggggaagggccacaggtgggacccctccagacagcagccttgtcacttacgaactacattctcggcctgagcaggacaagtttttgcaagctgccaaagttgcagaacttgaaaagcgcctgacagagctggaggccactgtccgctgtgaccaggatgctcagaatcccctttctgcaggtctacagggagcctgccttatggaaactgtagaactgttgcaggccaaggtgaacgccctggaccttgcagttctggaccaagtagaggctcggctgcagagtgtcctgggaaaggtgaatgagattgccaagcacaaagcttctgtggaggatgcagacacacagagcaaggtgcaccagctttatgaaaccacacagcgctggagtcccattgcctccgccctccccgagctggtacagagactagtcaccatcaagcagctgcatgagcaagctatgcagtttggtcagctcctgacacacttggacaccactcagcagatgatcgccagttccctgaaggacaacgccactctgctgacccaggtgcagacaactatgcgcgagaacttgaccacagttgaggggaactttgccagcattgacgagcgaatgaagcagctggggaagtgagcacttggggagctggagaacaaatggggtaacccttaccggagctcagtgagaagcttccacagggctgcccttcgagctcacagccccatcccactgcacaagggcaagggttcttgtggatgagggtgtgggcccagccacatgccagctcatgtccaataactgctttgcctggtgtgggggagggcctgggccccgtcctctagcacagcttctgtggttggctgttaatactgtacaactgtttctgaccattaaatgctgttgtactgtgtaaaaaaaaaaanaaaaaaaaaaaaaa

SEQ ID NO: 3743 - DNA, 1614 bp, Cricetulus griseus
gccaaggtcctgtggatgcaagggtcttcagcagtgcaaacagaccttggactaacctgcgttatgaagacacgctcctcctagaagaccagccaacaggtgagaacgagatggtgatcatgagacctggaaacaaatacgagtacaagtttggcttttgaacttcctcaagggcccctgggaacatctttcaaaggaaaatacggttgtgtcgactactgggtgaaggctttccttgatcgccccagccagccgactcaggaggcaaagaaaaactttgaagtgatggatctagtggatgtcaatacccctgatttaatggcaccggtatccgctaaaaaggagaagaaagtttcctgcatgttcatccctgatgggcgtgtgtccgtctctgctcgaattgaaaggaaaggattctgtgaaggtgatgacatctccatccatgccgacttcgagaacacatgttcccggattgtggtccccaaagcagctattgtggctcggcacacttaccttgccaatggccagaccaaagtgttaacgcagaagctatcctcagtcagaggcaatcacatcatctcggggacctgcgcctcgtggcgaggcaagagcctccgtgtgcagaagatcaggccatccatcctgggctgccacatcctgcgcgtggagtattccctgctgatctatgttagtgttcctggctccaagaaagtcatccttgaccttcccctggtgattggcagcaggtcaggtctgagcagcaggacttccagcatggccagccgaacgagctctgaaatgagctggatagatctaaacatcccagataccccagaagcccctccttgctatatggacatcattcctgaagaccaccgactagagagccccaccacgcctctgctagatgacatggacggtgctcaggacagccctatctttatgtatgcccccgagttccagttcatgcctccacccacctacactgaggtggatccctgcactgttaacaacaacaacaacaacaacaacgtgcagtgagcccgtgggagaagagatgcgtctatactcactcatttctttcccctctctgcttggacgccagtgtttcagagacttagtctgaaagtggagaacgggttcaccccagcctctgactccacatctgggtgatcaacaggcgggtccctggcttcaagtggcgcagacacagccagtgcccgccctgtggtgtaggagcgtttgctgggtggatagaagaacactctaaaaaattcagaccccgtccactttctctcagatcttggaaatgaagacattgtccgcagtttttgagtcggtgtgaatgaccttctggcatggtctttacaaggttttttttttagagcagtcgtggctgcacccaccaacagccataaaagccattttacagccagttgcactgtgttctcttacaaacttaatcaaatgggagaatctgttatttccgtgtgactccttggaattgattctaaggtgatgttcttagcactttagctcctgtcaattttgttttaatctcgattgcagatgtaaactctactactatgtgtcttaagggttaagcccaatgac

SEQ ID NO: 3744 - DNA, 1613 bp, Cricetulus griseus
aaagttttatcaagaggaagatgaagcatatcaggaattagttaccgtggcaaccatgtttctttcagtatttactgcagccattcagagatatgcgagaagtttcgacctcatgtaagcgtgatattttgaagtccctgaatgagaatgacctgggtcctaaaagggtgcttgccctacagaaggaagccagtgaatggaccagacagactgaagaagcagtggtctctattcaagatatcactgtgaattattttaaggaaacagtaacggcattaacaggaatgcagaaacaaatggagcaggatcggaagaggtttggcaaggctgcctgggccacagctacgcccaggctagaaaatctccagctcatgttagctcaggagactctgcagctcatgaaagccaaagagctgtgtctcaaccacaggtgcgctgaaatccagaggaaggttaaagatcttccagaccaaggaaagaatatagatgctgtagatgagctagaaatacagtattacgagattcagttggagttgtatgatgttaaactagagatcctgaaaagcgaagagatgatcctggtctcacggttggactctgttaagagacttataaaagagaaacaggaggaagttgtctattacgatgtgtgtgaaagcccggaggagctggagaacgtggctgatgacctggagctgcaccttgatcaggatgaagagctgagagcactcaggcagcagtaccggcagctggaggctcagcggggccgcatctgtgccagaagggcccacctcaggaacagaaaggatcactgccgagaaaaccatcagctcagactgcagcaggctcaacagagtgtgaaatattttcaccagcaccacaatattcagatgaaaagaaacaaaataaaagaagaaggaaacaaaagaaaaaagaatggttaaatcacgaacgtcaaaaaacacttgagcgactaagagcatatagggagaaggggcaagctccttggtctgcactgaaaacaacctgctcagaaaccatggtgccaaacctgtcaggtggacgctctcagaagaggtcctcaactgctcatcacaaagtagctcatcgtgcctcaagcaaaaccagaagtgttactcccttacctgaagctattaggaaaactcctgagtatcaagataccgataacagtatcccggtccaggtgtttgttcccaggctctatgaatgaagtgttggcctccctacggcagggcagggcctctctcaggaaagcagcagcacctacccttgtcccctcccagcacctcagtcaatgaacaagtcctggctgccatcaggcagggggtacagctgaagaaagtccacgtaggttggtcatgggagcagtactgtgtctaccctagaggcactgagctggaggtgcagcccgtggtatacgttagatagtgtgcttccatgtgtatgcacactggttcctcagacttaaaggcttgaatgtgaacataattttagcaataatcagaataaattgcatatattccaggattactttaaataaaacttattttgtgtatcagcactacagaagctcataataaacaatatttata

SEQ ID NO: 3745 - DNA, 1613 bp, Cricetulus griseus
  modified_base (26)..(26): a, c, t, g, unknown or other
  modified_base (87)..(87): a, c, t, g, unknown or other
agtaggtgatgtaaattacatgctcncaaagtggacttgccagcatcagcccatactttaaagactatgttcactggcaacttctgngaaagagaacagtgaggttgagtttcagtgcattgatgaagctgcactgcaggccattgtggagtatgcctatacgggaaccgttttcatttctcaggatacggttgaatctctcctgccagcagcaaacctactccagataaaacttgtcctgaaagaatgttgtgcatttcttgaaagccagcttgaccctggtaactgtattggaatttcccgttttgcagagacgtatggttgtcatgacctttatttggcagctactaaatacatatgccagaattttgaatctgtttgccagacagaagagttttttgagcttacgcacgctgatttggatgaaattgtctccaatgattgcttgaatgtagctactgacagagactagttttttatgccttagagtcttggatcaagtatgatgtacaagaacgccaagaaatacttagcacagctgctgaacagtgtacgattaccattgctgagtgttaagttcctcactcggcgtactttcctcagaatgactcttggattggtctggcgccctcaatattcctcgatatgaatttggaatctgtgttttaagaccaaaaagtctatgttataggtggtattgaaactagtgtgcgtcctggtgtcactgtcagaaaacatgaaaattcagtggagtgttggaatcctgatacaaatacgtggacttctctagagagaatgaacgagagccgaagtactcttggagtagtagtgcttgcaggagaactttatgctttaggtggatatgatggacagtcttacttgcaatctgtagagaaatatatccccaaaatcagacagtggcagcctgtggccccaatgaccaccacaagaagttgttttgctgcagctgttctggatggaatgatttatgccattggagggtatggccctgctcacatgaacagtgtggagcgttacgatccaagtaaggattcctgggagatggttgcatccatggctgataaaaggattcactttggtgtcggagttatgctaggttttattttgtggtaggtgggcataatggtgtctcccatttgtcaagcattgaaagatatgaccctcatcaaaaccaatggacagtgtgtagaccaatgaaagagcccaggacaggagttggtgctgcagtagttgacaactacctttatgtagtcggtggtcactcagggtcttcctatttgaacacagtacagaaatacgaccctatctcagatacatggctggactcagctggcatgatatactgtcgctgcaattttggattaactgcactatgagaagtgtgaagtcgtggaaatcgcacgtggtgggccaataggaaagaatgcccagtgtcctgaacctgaaagctagctgcattgcttttgtttaacttgaagtggcatgaagactcaaagtcttgttgggtactctgaactgacaaatagtttgaatcgctcttgattttacagtgaatcaataaattaaaaaaaagaaaagaaaaagaaaggaaa

SEQ ID NO: 3746 - DNA, 1613 bp, Cricetulus griseus
cttggggcgtggaggagagtgaagatttcccgtggtgccagaggtaccagggcttacgaggcctgggtgggtaccaggcagttcagcatcccaacagccacgatctctcttctgctctgagggagaataatcgggcggctcggatccagcacttgaaagcggtgccctctcttgtctgaggaatcaggacctggcccagcaagtccctggaaaacctgtctcctgtctcagtctttctggtacggatgggccgctgcccactgcagcgccatgaaggcaggatgacctcagccgaagcagtggctgtggctgggagtgcccgggagcatggccgccccaagtggcctcctgacaaccctgaggtccttgggcagcctgctcgagccagagtggttgtggcagccctggtgtggctgttggcaggagccagcatgtcaagcctcaacaagtggatcttcacagtgcacggctttggacggcccctgctactctcggcattacacatgttggcagctgccctggcttgctactggggggcccggcggcccatgccccgcatcatccaaggcagagtgctgctgctcagcctcacctttggtacctccatggcctgcggcaacgtgggcctgagcactgtacccttggatctagcacaactggccaccaccaccacaccactgttcacattgggcttgtctgcgctgctacttggacgaagacatcatcccctgcagtttgctgccatgggcctactctgcctgggagctgcatgcagcctagctggagagttccgggcacccccagttggctgtgtcttcttgctagtagccacctgtctccgaggcttcaagtccgttcaacagagtgctctgctgcaggaagagaggctggatgcggtgactctgttgtatgccacctctctgcccagcttctgcctgctggcaggtgctgctctggtgatggaggctggggtggccccaccactggctcccactgactcacgcctctgggcctgtgtcctgctcagctgctgcttatctgtggtctacaacctggctagctcctccttgctggcactcacatctgccctcaccgtccacgtactgggcaacctcacagttgtgggcaacctcatcctgtcccggctcctgtttggcacccacctcagcgatctcagctacgtgggcatcgcactcaccctttcaggaatgtttgtttaccacaactgtgagttcgtggcctcctgggctacccgtcgggggttgtggcacagggaccagcctggcaaagagacctggtggagtgcatgaaccatacctgaacagccctagcctgaatctgacaatggccatgaggaaactggaaaggtgctatgtctgccaggccggggaaaggaggtgccttctggaagggctgcctgggaggccagggaccttcagagagacccaccccgtccctgccagcctcacctgttacagcaaggcctgccactggatggcaggttcaagtctggtatgtgtgtttgtcaaatgaatcattatgattgatgtcaagtactatgatgagaattgctgggcaaactgttagaaaccctcaatgtgttaggatgaaga

SEQ ID NO: 3747 - DNA, 1613 bp, Cricetulus griseus
gtgttcgtaggtcagaccagacatcctgtcacgatgcctgaaataaataaccagccatctcgatgaacaacaggttcaacttctggcagagatgtgtattcttattgatgaaaatagacaataaaatacggggctgacaccaagaaaaattagtcacctgaatgaaaacattgacaaaggattattacatcgagcttttagtgtcttcttgtttaatactgaaaataagctcctgttacagcagagatcagatgctaaaattacctttccaggttgtttcaccaatagttgctgtagtcatccattaagtaatccaggagagcttgaagaaaatgatgccattggtgtaaaacgagctgcacagaggcgcttaaaagctgaattgggaatacccttagaagaggttgatccaaatgaaatgcattatctaacacgaatttactacaaggcccaatctgatggtatctggggtgaacatgaaattgattatattttgtttctgaagaagaacgtaaccttgaatccggatcccaatgagattaaaagctattgctatgtatcaaaggaagaactcaaagaacttgtgaagaaagcagccagtggtgaagttaaattaactccgtggtttaaaattattgtagacacttttctctttaaatggtgggataacttaaaccatttgagtcagtttgttgaccacgagaaaatacacagaatgtgatgtgaatgtgtgtatgaattgaagatttttctacctagttagaatgttttgttgttttcttttgaactgtgctcccttgtatgatacataggtattttacaaccagaattcgtttgagaaaaagctgcttcaaaacagcagtaatagattaaatggtcaaggctggggatacgctcagtggtaccatgattgccttgtaggcatgaggtcatgggttgttgattccctagtccttaaaataattatagcaataacagttaacaggctctctctctctctctctctctctctctctctccactgaacacagtgtaaatgctaacataaatgattattatactgtgctttgtggtaagtaaaagttcatattcagtacagatcaaatattaatatgcagttggtttgaacctttgggtgcttggcccacagatttgaaagggcagttctatatgctaatttttgtcatttttcgttgattttgtgctttaaccattctaagattgttttactacttaataactgttacttttagtggtaatggtaactggttaggattaaaggaacggactaccatacccagcaacaaccagaattttaatgaataggcatatattataaggagattttgatgttatagattaggcatatattgagattgtgtcttgattgatgaactttttaaaacttgctacaggtgtgtcaaatttgagatcttaagacagctttagacttaaatgctgtgtaatgaataattttttcttataaaaattttgtaaattttgttaatttcttgataactcaaaagtttatttatttatcttcgaagatacaactatgtagcaagtatttattgaaaattaaaaataaactattttaataacagaaaaaaaaa

SEQ ID NO: 3748 - DNA, 1612 bp, Cricetulus griseus
  modified_base (1609)..(1609): a, c, t, g, unknown or other
agaatcgagatccgagatgaaggcagaactttctccgcggccaggggcagccgggcgggagatgacccaagaagaaaagacttcagacttcggaaagaaaagaaacaagactagaaaaagaaacggaaggaggaaaaggggccagaccaagacgttggctctgctgtatcagcagctcagagtcaagtagacccaaccagagaactcccagcacctggtagagagttgggaggcactgctggggagaaaattccagctggccggagtaaggctgaacttcgcgctgaaaggagagccaagcaggaggcagagcgggccctgaaacaggcaaggaaaggggaacaaggagggccccctcctcaggcctgccccagcacagctggagaagccacctcaggcgtgaagcgactccctgagcaccttcaggtcgaaggccccacacttctgaggaggcttgttagaaaaccagagcgacaacaggttcctacacgaaaggattatggatccaaagtcagcctcttctcccacctaccccagtacagcagacaaaattccttgacccagtacatgagcatcccatcctctgtgatccacccagccatggtgcgacttggtctgcagtactcccagggcctcatcagtggctccaatgcccggtgtatcacactgcttcgagccttgcagcaggtgattcaggattacacaacacctcccaatgaagaactctccagggatcttgtaaataaactaaaaccctacatcagcttcttgacccagtgccgccccctgtctgcaagcatgtgcaacgccatcaagttccttaacaaggaaatcactggcatgagcacttccaagcgggaagaggaggcaaagtcagaacttagagaagccattgatcggtatgtacaagagaagattgtgcttgcagctcaggcaatttcacggtttgcctctaagaagatcagtgacggggacgtgatcctggtatatggatgttcatctttggtgtcacgaattctccaggaagcctgggtcgagggcaggcggttccgggtagtggtggtggacagccggccccgacttgagggaaggcgcatgctccgttctcttgtccatgctggggtccccacctcctacctgctgattcctgcagcctcctatgtgctcccagaggtttctaaggtgctattgggagctcatgcactcctggccaatggatctgtgatgtcacgggtagggacagcacagttggccctcgtagctcgagcgcataatgttccagtactggtctgctgtgaaacatacaagttctgtgaacgcgtacagactgatgcctttgtctctaacgagctggatgaccccgatgatctgcagtgcaagcggggagagcaggtagccctggctaactggcagaaccacccatcgctccggttgttgaacctggtctacgatgtgactcccctgagctggtggatctggtgatcacagaattgggcatgatcccttgtagttctgtgcctgttgtccttcgagtcaagagcagtgaccagtgagagggaagtggggccaataaaaacctctgctgccttaagaaaaaaaaaaaaaaaanaaa

SEQ ID NO: 3749 - DNA, 1612 bp, Cricetulus griseus
tttggagacagtaggtcttttccaggggatcccctgggccacgactacttcccagggttggaacagtccccagggaacagagcggcaccctcatcctttcccttctgtcccccggagtagaggccagcagagcaggggacacgggagacctcgagggagttttcacaggtccccagatggctggctgcctctgacaagagattccagccccctctggagcctttttgctcccagtagccctgttccaaaatgttctggggaaatgagcagctgagagcctgcagccaggagccttgcccctcctgagcagccagaccccagggccctgcaatgtgcagcctttgacactctgagtgttcggcatcctgtggcaaaggtgtttggcaccccattttcctctgcatttcccgtgagtcaggagaggagttggatgaacagaactgtgccatgggtgccagacccccagcttcccctgaaccctgccatgggccccccgtgtcccccatactgggaggctggtgagtggacttcctgcagccagtcctgcggccctggcacccagcaccgccagctgctctgcagacaagaatttggagacggtggctcctctgtgcccccagagcgttgtggacatctcccccggcccaatgtcactcagccttgtcagctgcacctctgtggccactgggagattagctccccctggagccagtgctctgtgcgctgtggtcggggtcagaggagcaggcaagttcggtgcgttggaagcaatggtgacgaagtgagcaagcaggagtgtgcttcgggccccccccaccgcccagcagagaggcctgtgacatgggaccctgtaccacagcctggttctacagtgactggagttccaagtgctcagctgagtgcgggacaggaatccagagacgctctgtggtctgccttaggagtggggagaccctccaggaggaccaggaagcaggagcaggaagcactgagcatggctgccctctcagaagccgccctcctgacatgcgcgcctgcagcttagggccctgtgagaggacatggcgctggtacacagggccctggagtgagtgttcctcagagtgtgggtctggcacacagcacagagacatcatctgtgtgtccaaactgggagctgagttcaatgtgacgtctcccagcaactgttcccacctccccaggccccctgccctgcagccatgtcaggggcaggcctgtgaggaccgatggttttctactccctggagtccgtgttctcgctcctgccagggaggcatgcagacgagggacgtccagtgcctgagtgccaatcagactctcagcacccgatgtcctcctcgcctgcgaccttccaggaagcggtcctgtaacagccaaccctgcaaccagcgccctgatgaccaatgcaaggacagctctccacactgccccctggtggtacaggcccggctctgcgtctacccctactacacagctacctgctgccgctcatgtgcccacgtcctggaccggtcccagctggagcctgcctgaaatgggtccaagagatcctttcttcatgggtttcttatgccaccactggccacccgct

SEQ ID NO: 3750 - DNA, 1612 bp, Cricetulus griseus
gggtgtgggggtggatgcgtgtgtgtgtgtgtgtgaaaagagcaatgagcttggccctcctgtaccaccgtgcctcagaggactggtgggagggccgtcacaacggtgtagatggactcatccctcatcagtacatagttgtacaggacatggacgatgccttctccgacagcctgagccaaaaggctgacagtgaggccagcagtgggccactgctcgatgacaaggcctcctccaagaatgacctccagtcccccacagagcacatctctgattacggctttggggggtggatgggccgagtgcgactacggtctgacggagcggccatccccaggcgccgaagcgggggcgacacacacagcccaccccggggcttgggtcccagcatagacacaccaccccgtgctgctgcctgccccagcagtccccacaaaatcccctcagccggggacggattgagagccctgagaagaggaggatggcgacattcgggagcgctggcatcttactctcctcctcctcctcctcctcctcctcctcctctctctctctctctctctctctctctctctctctctctctctctcacacacacacacacacacacacacacacacacacacacacacactggcggaagccctcatttccaagtgtctgctatctctgctatgcacccaggagataagatgtctcctttgtatcccagggctatccccagatttttaagtccatttacctcccaggcaaaatgcaacattggctgcctgaatactggataaaagcaaaattgagtttacaaatctattacctgacacacctaatgccagttatgctgtgcagattcgtctctgggttgacttatttcatttttccttgctgcttctccccaaaatgtcccaagagcagagcctcagctgttttccttaagcatctattttccccccatccggcaagtggctgatgagttcacactttagggaagcgcacgcacagatggcagacgagtccccaactcctccaacccccaacctgagcttcgatgcagaacaaatggaaaaacactgtccacccccatccccgacacacacttcatctggtcccctgcatgtctcagccacccccaggccccaactcagtcccaagagacacagggtaaatggagccgtccattggctactggctggaaccagcagttcagagatctgccttataaacacttaaaacatttgtggtacacaaggtggggagctggtgggagagaaacctgtacatggggctcccttcgttggcatctcctggagtgccttgttgggtgcattcctttcttattcaggagtcatggatgcaggaggacatctcgtgaccctggtacctggtcatcgttgagtggccagtgcacatacatttgaaacaattgatggaaaaccctgaggactcacacaatggcctccctcttaagcctctctatttccaaattctcatcttccagatggctccacactagagcgaaggcctcattctcttgagaaacccagaaaggggtggagggggctggtgcttctagctgtggtaatgagtcctgctgggctggaagggaaaggagtga

SEQ ID NO: 3751 - DNA, 1612 bp, Cricetulus griseus
gagcaggatggatctcgatgtagttaacatgtttgtgattgccggtggaaccctggccattccaatcctggcattcgttgcttcttttctcctgtggccttcagcactgataaggatctattattgggtactggcggaggacgctgggtatgcaagtccgctatgcacaccacgaggactatcagttctgttactccttccggggcaggccaggacacaaaccatccatcctcatgctccatggtttctcagcacacaaggacatgtggctcagcgtggtcaagttccttccaaagaacctgcatttggtctgcgtggacatgcctggtcatgaaggtaccacccgctcctccctggatgacctgtccatagatgggcaagttaagagggtacaccagtttgtagaatgccttaagctgaacaaaaagccctttcaccttataggcacctccatgggtggccacgtggctggagtatacgccgcttactacccatctgatatctgcagcctgtgtctggtgtgccctgctggcctgcagtattcaactgacaatcagtttgtgcaacggctcaaagagctgcaggattccgctgccattcagaaaatccccttgatcccatcgaccccggaagagatgagtgagatgctccagctctgctcctatgtccgattcaaggtgccccagcagatccttcaaggcctcgttgatgttcgcatccctcataacagtttctaccggagattgtttttggaaattgtcagtgagaaatccagatactctctccatcagaacatggacaagatcaaggtcccaacacagatcatttgggggaaacaagaccaggtgcttgatgtgtctggggcagatattttggccaagtctattgctaactgccaggtagagcttctggaaaattgtggccactcagtggtgatggagagaccaagaaagacagccaagctcattgtcgactttttagcttctgtgcataacacagacaacaacaagaagctgaactgaggcccttgctacagcctgcattgttcacacagcatctgcttccatccccaaaacttgacaaagtcactactctcaggaatcctgccctaaatgccattggagtaccagtgtccctgaggaagccagtctcctatactagtattcttggttccacagagcatcaggggccacaaggaaatctccaagatcttttttcaaaataggaacctaaatgcaactagaaattaaaaaaaaaataaaaaaaaatacctagccatgaagcctactagaagtcttcaggttcatgtcactgataagccaatgctaaacagccaccttggaccgtgatcatcaaagatattttctttaagacattcctcacacgttaaacttgagctattttttgttgcttcagatgtatcctttgcatggtcaatggcttcttctgtagaagctttagtcatttgttgaacttcttatttagattcttaattctaagttttacatagaggcccaggtgtgaatgcagcggatccaagatcaaggcttgcctgaggtacagagtgagttcaaggacagcctaagctactgactgagacaaaaaaaaagtt

SEQ ID NO: 3752 - DNA, 1612 bp, Cricetulus griseus
  modified_base (1069)..(1069): a, c, t, g, unknown or other
ggcccttcgaggactctcatccttaagcatccacttgggcatggaatccttcattgtggtcaccgagtgtgagtcaggccagggtgtggacctcagcctggcccaggaccagcctctggaggctgatgaccaggaactgcctcttgatgcctcagaatctgaggcacagcctctactttctggtcgcaagatgtccctgcaggagcgatcccagggtgggccagcatctggcagcagcctggacatgaatggacgctgcgtctgcccatccctgtcctactcgccatccagctccccacagtccctccccccgggtgccctcggcggcccacagtggagtcgcaccatgtctccatcacaggtttgcaggactgtgtgcagctgaatcagtatacgctgaaggatgaaattggaaagggctcctatggtgtggtcaagctggcctacaacgaaaatgacaacacttactacgcgatgaaagtgctgtccaaaaagaagctgatccgacaggctggttttccacgtcgccccccaccaagagggactcgcccagctccagggggctgcatccagcccaggggccccatcgagcaggtgtaccaggaaattgccatcctcaagaagctggaccaccccaatgtggtgaagctggtggaggtcctggatgaccccaatgaggaccatttgatatggtgtttgaatttgggtcaaccaagggcctgtgatggaagtgcccaccctgaagccactatctgaagaccaggcccgattctacttccaggatctgatcaaaggcattgagtatttacactaccagaagatcatccaccgggacatcaaaccttccaacctcctggtgggagaagatgggcacattaagatagccgactttggtgtgagcaatgagttcaagggcagcgatgccttgctctctaacactgtgggcacacctgccttcatggcacctgagtcgctctcagagacccgcaagatcttctctgggaaggccttggatgtttgggccatgggtgtgacactgtactgctttgtctttggccagtgccctttnatggatgagcgaatcatgtgtttgcgtgaccgaagaggaggtcgagaactcagtcaaacacattcccagcctggcgactgtgattctagtgaagaccatgattcggaaacgctcttttgggaacccgtttgagggcagccggcgggaggaacgttccttgtcagcacccgggaacctgcttatgaaacaaggcagcgaagacagcctccggggccccgagccagcccccgtgggggaggaggaagtgctcttgtgaaaggtggtcccttcgtggaaagttggggagctccggcccccggctccccaccactcatgcctccactgcagcctgaggaggcgatggagccggaataactgcctggaccacccgacctcgcatgcctggctgtgtggccctgcacggggctgctgcaccctgccctgcgtttccatagcagcatgtcctacggaaaccaagcacgtgtgtggagccttgatggtcatctctggttatctggggttttgtttgttgtttttggtgttgttgtgtatgtggtttttctt

SEQ ID NO: 3753 - DNA, 1611 bp, Cricetulus griseus
ggtttccctgcctcgacaacctgaggactctgcacctgctgctgaaaccatgtctagcaatgggacagatgctcctgctgaagcccaggctgctgtggaagaacctgtcccacagcccagcgtggtggaccgcatggccagcctgcctctcatcagctccacgtgtgagatggtgagcgcagcatacacctccaccaaggaccgatacccccatgtgaggaccgtgtgtgatgtggctgagaaaggcgtcaagaccctcactgcggctgcggtcagtggggcacagcccatcttgtccaagctggagccccagattgcttcggccagcgagtacgcgcaccgagggctggacagattgcaggagagcctgcccatcctccaacagccgactgagaaggttctagcagacactaaggaactggtgtcatctacagtatctggagccaaagaaatagtatccagctcagtgaccagtgcaaaggacacagtggccacccgggtaaccggggcagtggatgtgactcggggggctgtgcagagcaccatggacatgacaaagtcagcagtgaccagcggtgtccagtcggtcctgggctcccgagtgggacaaatggtgattggtggagtggactcaatgctggtaaaatcagaggcctgggcggacaaccgcctgcccctgacggatgcagagctggccctgattgccacatccccagagggctcagacctggcctcactgcagcagcagagacaagaaaggaactacttcgtccggctgggctcgctgtcagaacggctgcgcaaccacgcctatgaacattcactgggcaagctgcgcagcgctaggcagaatgcccatgaggcactgcagcagctcacgcatgcactcagcctgatggaatcggtgaaacagggcatggaccagaggctgggggaggggcaggagaagctacaccacatgtggctcagctggaaccagaagaagccccaagatgcagaaaaggatgcagctaaaccagagcaggtggaggcccgggcactcagcatgttgagggacatcacccagcagctgcaaagcacgtgtgtggccctgggggccagcatccagggcctgcctggccacatcagggagcaggcccagcaggcccgcagccaggttgaggatcttcaggccaccttctctggcatccattccttccaggacctcacagcaggtgttcttgcccagactcgagagcgcatagccagagcccgggaggccctcgaccacactgtggagtacgtggcccagaacactccagtcacatggctggtgggcccctttgctcctggaatcactgagaaacccctggaagaggagaagcagggataggggtcagggcccgcagctggctccagtcagcttttcccaaaagtcctgttgcacaccaagtcctcacctaccctgagtctgaagaagtatttaacctcttcccatcagtcttttaaagacaaaaaagaatgatatattcctaaaaaaaaaaaaaaaaaaaagaacttgctttgtagaccaggctggccttgaacttacagagttccacctgcctctgcctcctgagtgctgggatcaaa

SEQ ID NO: 3754 - DNA, 1611 bp, Cricetulus griseus
ctcgctctgcaaagctcctggctcggcgcgagcctgggcaccggccgccctgactgtccccacgctggccggagcagccacggcgccactatgcagacaagaggatcaaggtggagaagccagtggtggagatggacggcgatgagatgactcgcatcatctggcagttcatcaaggagaagctcatcctgcctcacgtggatgtccagctcaagtattttgacctcgggcttccaaatcgtgaccagaccaatgaccaggtcaccattgactctgctctggccacccagaaatacagagtggctgtcaagtgtgccacaatcacccctgatgaggctcgtgtggaagagttcaagctgaagaaaatgtggaagagccctaatggaaccatccggaacatccttgggggaaccgtcttcagagagcccatcatctgcaaaaacatcccccgccttgtccctggctggaccaaacccatcaccattgggaggcacgcccatggcgaccagtacaaggccacagactttgtggtagatcgagctggcacgttcaagatggtcttcaccccaaaggatggcagcagtgccaaggagtgggaggtgtacaacttccctgccggcggcgtgggcatggggatgtacaacaccgacgagtccatttcgggctttgcgcacagctgtttccagtactctatccagaagaagtggccgctctacttgagcaccaagaacaccattctgaaggcctatgacgggcgtttcaaggacatcttccaggagatctttgacaagcactataagactgactttgacaagaataagatctggtacgagcatcggctcattgatgacatggtggcccaggtgctcaagtcttcaggtggctttgtgtgggcctgcaagaactatgacggagatgtacagtccgacatcctggctcaaggctttggctcccttggcctgatgacgtctgtgctggtctgccctgatgggaagacaattgaggctgaggctgctcacgggacagtcacccgtcattaccgagagcaccagaagggccgacccaccagtaccaaccctattgccagcatctttgcttggacacgggggctagagcatcgagggaagctggatgggaaccaggacctcatcaggttttcacagactctggagaaggtgtgtgtagagactgtggagagtggagctatgaccaaggacctggctggatgcatccacggcctcagcaatgtgaagctgaatgaacacttcctgaacaccacggacttcctggacaccattaagagcaacctggaccgagctctgggcaagcagtaggggtggacactgcccagctgcagtgggcactccatacatggtagagggtgagcctcacagcccctccctctctggtggcctttctaggggacaggggttttttttttttattgatggagatgtttttaaatgtgtttttccctcacggtggacactaggcaggagcagtgttcgttacctcagccagtcagtgtattttgcatactgtaatttatactgctctgaatcacatggtgccatatttagctaactaaaaagctcttcgacaaaaaaaaaa

SEQ ID NO: 3755 - DNA, 1611 bp, Cricetulus griseus
gcggcggcggcgggtggacggcgacgcgtgaggcgcgtgatatcccgcgtcttgggagcagtgtcctggccccaagccactccccgccgccgccatgtcgggccgttcggtccgggccgagacccgtagccgggccaaagatgacatcaagaaggtgatggcggccatcgagaaagtgcggaaatgggagaagaaatgggtgactgtgggtgacacatccctgaggatattcaaatgggtgcctgtgacagatagcaaggagaaagaaaaatccaaatcgaacaattcagcaacccgggaaaccaatggctttccctctgatgcctcagccaattcctctctccttcttgaattccaggatgagaacagcaaccagagctccatgtctgatgtctatcaactcaaggtggacagcagcaccaactcaagccccagcccccagcagagcgagtctctgagccctgcacacacttcagacttccgcactgatgactcccagccacccacactgggccaggagatccttgaggagccatcactgcctgcatctgaagttgcagatgagcctcccaccctcacgaaggaagagccggtcccactagagacacagaccactgaggaagaggaggactccggtgccccacccttgaagcgattctgtgtggaccaacctgaagtgccgcagaccacgttggaaagctagcaccatcctggcccctcgcctcctggcccctgcctctatttattgcattctggcctagccgagctctgatgctggggtccaggcaagcactagggtccagagcctttgtgtgggagccctctgggctagaaggctgatggagggcgtggggtcgtcgcatcatcttcctgtccctgacacttgtgcctgcttgctcttgagcagaggaacactcacatcctttctgcaccccaagtaggccagagcatcaaggttcatttgccacctccagaaccactgcacggagctgctggcgctgccacgaggagaaaggtgtggaaggcaccctagagaagagtgcctaggattacttgaacttgaatggagactgtacagtcatggacttagccacagggcctgggccctgcaggctgctgctggaagagggactgatcggtagagatgtggagagcagtggggagatgctttcccaggagggaaggctgtctgtacctgtgggcaggccacccatgggggattgcatcctgtccctgaggcaggcctgcctctggtagatgccccagttgctcccagccctgtgcctgccagaaccttccacttcccccactcacccactcaccacgcacacacatgcagcttccggttttcactgtccattgcattccagcatccctgcctccaactgcagaaaccccagccaggattggaggttctgaccacagtacctgccttcagctcagactttctagaaagttcccttttctttgaaatctgcatgtttaattgaactttatgattttatttttgtctgaaaaaagagtttaagaaaaaatggaaatgggcaacagcaagtgaagacctattttagcactgaatagagtatttttaaaattaaactttgaagtatg

SEQ ID NO: 3756 - DNA, 1611 bp, Cricetulus griseus
gctgtttcagactttcatctctctgttaaaatgactgttctgtaagtcaggtgaattatcatcggcattaatgtcaagtacacactactgagggagaattcattctctgtttaccactaattatgttcaccgcatgtttcttcctttgtgggtctaagactcttccatactttgtgctaaaatggatggaactcacagaaatcagaaatgtgtgagtgaaatcaagaagatgacttttcaaataataaacctaacagccaaagtctaactcatgtttaggatttaaactggtttggatatgataaagctcaaagacgaaccctgtttgttacactttaatcaagtgctgatgtggctttggggagtctgctcatttagtagctagaggcctatcagtatttctattgtaaacctctattttcaggggtgtcagtgtgcccttagagtatgctgggctacagcaaataaatgagggcctagactcagtctttggaaataattttttcaacttaatttaagtgataaaattgcatagagcaatgtacagttttagtaagatttaacacctttgaccttttctaaatcaggaataatctatgaatattgaggttcatggatgaaatattcattggcacatcttgtaaacttttggccacatatcaagtgtatactaagtggccaaatgatagaaaactgctccctacacccaagcaataaaagcatgtctgtcagttttaggtggtgtagactaatacctagctgccacagactcaatgccatatttattacagggttacagaaaactatgtatatatgtatatatatattatatatggctttgctttccctgcaagttcattaaatgtagaatattgtctttttgaagatactgtggccgagtgctccttgccatctgttaaatgacttcccgttgtctgtgtgtgttcatgtgcgccagcaatgggctttctccacagcccggagactgtctcagcgtcgcagccgtcacaatgaaaacattatcaatcagtacccaacaacagctgtttttgacaagtttctgtctgacgcctgatgctttacaactgtcaataaggctctttctttgtctagcaggtcggcgtgcgctgtcttactgctcctcttggcatcctgtccctgtaaccctagaatttgctgtgtttgggaaatccatgtgggggaggggagaggggctgggaggggctgtgtgtcttgttcttacttttgtgtaaggtgccacaggtgtcttagttcgcatattcaaacatataggaaaacagtctgttatgtatttcttcagttagcatcttgttatatttatggaagtgacccatttttgtaccttcttagctgaagcagttgcctttttttatactggcaattaatttatataagactttgtatctaccgtagtttacagtattggttgctgggtaactgccatattaccctgtctttctattgagatataatctatacttaaaagttgacaggttcatgtggacatttgctaggcaagaagaactttgcctggtctgtgatttatatgatttccactatcttgcaatgaaaataaatgcttagtaagaa

SEQ ID NO: 3757 - DNA, 1611 bp, Cricetulus griseus
  modified_base (213)..(213): a, c, t, g, unknown or other
  modified_base (333)..(333): a, c, t, g, unknown or other
  modified_base (353)..(353): a, c, t, g, unknown or other
tggaggcccaagtctgaagtcagcgggacacagatcggctcctactttggggcctccctctgctctgtggacatggatggagatggcagcactgacctggtcctggtcggggccccccattactatgggcagacccgaggagggcaggtatcagtgtgccccatgcccagtgggagaatcaggtggcagtgtgaggccactctgcatggggancagggccatccttgggggccgcttttggggcggccctgacagtgctaggtgacgtgaatgggggacaggtgtggacggatgtggctattggtgcacctggagaggacgagaacaggggtnctgtgtatatattcatgganccttttgagaagagctgtaagcaagaactccagtgtgaaggggacctgggcatcagctttaacttctcaggcctgcaaatcttggtggtgggaagctccctggagctcactgtgacagtaactgtgtggaatgagggcgaggacagctacggaactttagtcaaattctactacccagcagggctatcttatcgacgggtaacggaaatacagcaacctcgccaacacccactacgcttggcatgtgaggccgaacccactgacaaggagagcctgaggagcagcagctgtagcatcaatcaccccatcttccgagaaggttcgaagagcaccttcacaatcacatttgatgtctcttacaaggccttcctgggagataggttgcttatgagagccaatgcaagcagtgagaacaataagcctggaaccaacaagactgccttccagctgggactcccagtgaaatacactgtgtatacagtgatcctcaggcaggaggaatccacgaagcatttcaacttttcatcttccgatggggagacgaggagagaggctgagcatcgctatcgtgtgaataacttgagtcagtggaagctggccgtcagggttaacttctgggcccccatcctattgaatggcgtgactgtgtgggaggtgctgtgctggactgctccattgccgactgtctgcacttccgctgtgacatcccttccttggacatccaggacgagcttgacttcattctgaagggcaacctcagcttcagctgggccagtcagacattgcagaaaaaggtggtggtcatgagtgtggctgagattacattcaacacctctgtgtattcccagctgccgggacaggaggcatttctgagagctcaggtagaaacagtgctagaagaatatgaagtctatgagcccatctccctcatagtgggcagctcggtgggaggcctgctggtgctggctctcatcacagctgctctgtacaagcttggcttcttcaaacgtcggtacaaagaaatgttggatgacaagcctgcggctcctgctacagccagtgaggccagtttcagcggcgagaatccatacatgcttccatcctaggaatctgctctcctacatatatccaccaggaggaattggtcttgtttctgcctatgaattgactggcatgggaacaagctctctcaggctcaggactagcctgggcaactttccaggttcgatgccatactttctgagctgggagtattttt

SEQ ID NO: 3758 - DNA, 1611 bp, Cricetulus griseus
cagaaagtggacctgccccttccaggagtatgtggagcagctgctgcacccccaggaccccacatccctaggcaatgacaccctctacttttttggagacaacaactttactgagtgggcaccactattccagcattattctccacctccgtttcgtctactgggaaccacccctgcttacagctttggaattgcaggagctggatctggggtacccttccactggcatgggcctggtttctcagaggtgatttatggtcggaagcgctggttcctctaccctcctgagaagacaccagagttccaccccaacaagaccacattggcctggcttcaggaaatatacccatccctagccccatcagctcggcccttggaatgtaccatccaggctggtgaagcgctgtacttccctgaccggtggtggcatgccacactcaatctggacactagtgtcttcatttctaccttccttggctagccaaacaggcaactggcaagcccactgcaccagcacatgccaatgtagtgctcacagactttattacaggacagtggcagcagcagcaacctcagcccacccttacccgctttccagcccagaagggggacaggggaggctcatggcccagcaagggatgccgagaaggggagcagttcagaacccatcagcaaggactgatgggggcaggcccagggacacaaactatatacagggactggagcttctgtttccagaccctcctgggccagagtgccaggcaggatatggggccttagtagtcctctacccagccattctcagagatgaatgcatcaatgacttccttcatggccaagttggggatgagctgttcctgggtcagagggctccgggtcacggggtcaaagtggcccacacgctgcaacaacagagtcagagtgttcaaccgcctgagtatcaggtgctcctcaatgtccttgcgatcataagtgataccactgggtgtgatgcagggctcccgcatcagctcaaagctgatcttgccacacaagtagtcagggatatctcgcttctacagcacaatggagaaaatgtctggaacgggaagcatcaccacaccagcacctgcccacgggcttcaaggaacacccacctttcttttctcgtccacctgagagaagagctcatccatgtctgccatgtatttatcctgtagagttgagtgccatgtgtgggcaactcatatctcctccacacagacacacacaccttatgtccactagggcactcatgtcatgcatgggccaacagatccaccataggctggggcactttccatgccacacacaaaaacacacacacaatgacccacatgtggactaggggcaccctcacgtgcttggcctcaatgcaggcctgctgggcccggatgtggccatcatcctcatcaccctcgtggttccgctgacactcttccagttccctgagggttaaccagaagctagtcagtgatggtcctgaccagaaaagaccagagcccttccccacttcaggcctctttcctcctgggcttcccatgtgccagtgttgtctttcaatataaacacttgtgctaggtgactcagtgt

SEQ ID NO: 3759 - DNA, 1610 bp, Cricetulus griseus
ggagtccaactcagctcccctgtggccatagacaggcctgggcctcagccctcctgcagaaatgctaggcccccagatgtgggcctccatgaggcaggggttgagcaggggcttgtctaggaatgcgaaggggaagaagatagacattgccggtatctacccacccataaccaccccgttcaccgccaccgcagaggtagactacgggaaactggaagagaacctgaataaactcagcgccttccccttccgaggcttcgtgatccagggctctactggagagtttccattcctgaccagcatcgagcgcctggaggtggtgagccgcgcacgccaggccatacccaaggacaagctcctgatagccggctctggctgcgagtccactcaagccacagtagagatgaccgtcagcatggctcaggtcggtgctgatgctgtcatggtggtgactccttgttactatcgtggccgcatgagcagtgctgccctcattcaccactacaccaaggtcgctgatctttctccaatcccagtggtgttgtacaatgtcccggccaacacagggctagacctgcctgtggacgcagtggttacgttgtctcagcacccgaatatcattggcataaaggacagtggtggcgatgtgacaaggattgggctaatggttcacaagactagcaagcaggatttccaggtgttggctgggtcagttggcttcctcctggccagctatgctgtgggagctgttgggggcatatgcggcctggccaatgtcttaggggcccaggtgtgccagctggagagactgtgcctcacggggcagtgggaagctgcccagacactgcagcaccgcctcatcgagcccaacactgcggtgacccggcgctttggaatcccagggctgaagaaaaccatggactggtttggctactatggaggcccctgtcgtgcccccttacaggagctgagccccactgaggaggaggccctgcgcttggatttcagcaacaatggctggctctgatggcaagcaggagacacctcgtctgagccttttgggacttctgttcccacagcctgtagaggagccaggcattaggaattagggcttgtcttagtcactgttctattgttgtgaagagacaccatgaccctggtgactcttataaaggaaagtatttaattgaggcgggcttacagtttcagaggtttagtccattatcgtcatggtgggaagcatggtggcgtgcaggcagacatggtgctggatccagagttctacatctagatccacaggcaggaggaagagaaagccattgggactggcttgggcttttgaaaacctcaaagcctacctccaatgacacacttccttcaataaggccatacatcctaattctttcaaatagtgccattccctaaccatttaaatgtaggagcctatgggggccattcttactcaagccatcacattccactccctggctccccataggtttatagccatattataatccaaaatgcatttagtccaatttcaaaagttcccatagtccatcacaatctcaagactgcttaaaagtccaaagttcaaaatctcttctgag

SEQ ID NO: 3760 - DNA, 1610 bp, Cricetulus griseus
ccgcggtggaagccgcgtctcgaggctccgccgccagccggggctcgggctggggcccgggcccccggggatggccctccggccctcacagggcgacggctccgcgggccgctggaactgtggcttgggaaaggcagactttaatgccaaaaggaaaaagaaggtggcggaaatacaccaggccctgaacagtgatcccaccgacgtggctgcccttcgacgaatggcgatcagtgagggagggctcctgactgatgagatcaggtgccaggtgtggcccaagctcctcaatgtcaacacctgtgagccaccgcctgtgtcaaggaaggatcttcgacagttgagcaaggattaccagcaagtactgctggatgtcaggcggtctcttcggcgcttccctcctggcatgccagatgagcagagagaagggcttcaggaagaactaatcgacattatcctcctcatcttggatcgcaaccctcagctccactactaccagggctaccatgacatcgtggtcacctttctgctggtggtgggcgagaggctggcaacatccttggtagaaaaattatctacccatcacctcagggatttcatggatcccacaatggacaataccaagcacattctaaattatctgatgcccatcattgaccaagtgaacccagaactccatgacttcatgcagagtgctgaggtggggaccatctttgccctcagctggcttatcacctggtttgggcacgtcctgtcagacttcaggcacgttgtgcggttatacgacttcttcctggcctgccacccactcatgcccatttactttgcagctgtgattgtgctgtaccgggagcaggaagtcctggactgtgactgtgacatggcctctgtccaccacctgttgtctcagatccctcaggacctgccctatgagacgctcatcagcagagcaggagacctctttgttcagttccccccttctgaacttgcaagggaggcagctgcacagcaagaggctgaaagaacggcagcctctactttcaaagactttgagctggcatcagcccagcagaggccagatatggtgctgcggcagcggtttcggggacttctgcggcctgagactcgaacaaaagatgtcctgaccaaaccaaggaccaaccgctttgtgaaactggcagtgatggggctaacggtggcacttggagcagcagcactagcagtggtgaagagtgccctggagtgggcccctaagttccagctgcagctgttcccctgaactcagccccaggagccacttccgtacccagtgcaccaagctctccccattcccagaaaggcactagagggtgggattgctgtcattaaagggttcctgtcaggggtgttctgttctgccacccttggcagcttgtcttttggctttgtggctaatggcaacactgcctgacactgggtttagtggacctgagtgctctgtgctcctcaactgctgcaagtggctgtggtgcccctggctacccaattcactgcctagaagaaagttgggcccgaagatgccctccttaccgcaccacgtgtcctgcatctcctagacaaagcaggcagga

SEQ ID NO: 3761 - DNA, 1609 bp, Cricetulus griseus
cacaaagagaatctactgattacagtatgccttgcaaaaaaaggaaaatagaagtaggctgggaagtgataaaagatcatcttcagaagtcacagaatgattttgatcttgtgccttggctacagattacaacccaattaatatcaaagtatccctccagtttacctaactgtgatctgtctccattactattgatactgtaccagcttctacctcaacaacgtcgcggagaacgcacaccatatgtgttacgatgccttatggaagttgccttatgtcaaggcaagaaatcaaacctagaaagcctcaaagtcagacttagcgaaactgtggattaaaatttggtctattgcctttcgtggtattagttctgaacatacacaaactgaaaactttggttacttgggccattattcaaggcagtttaattgaatttgacaataatccataccatcagaagggagagatgtaagatggtgaaggacatggaggctctctgtgatgcctacattatattggcaaacttggatgcctcccagtggaggagtcagagaaaaggtatcaatatcccaacaaatcagccaatcactaaactgaagaatttagaagatgtagttgttcccactatggaaattaaggttgatcccacaggagaatatagaaaaatctggtgactataaaatcatttaaaacagaatttcgcttggcaggaggtttaaatttaccaaaaataatagattgtgtgggttctgatggcaaggaaaggagacagcttgtcaagggccgtgatgacctgaggcaagatgctgtcatgcaacaggttttccagatgtgcaatacactactgcagagaaacactgagactagaaagaggaaactcactatctgcacatacaaggtggttcccctctctcagagaagcggtgttcttgaatggtgcacaggaaccatccctattggtgaatatcttgtcaacaatgaagaaggtgctcataaaagatacaggccaaatgatttcagtgcctttcagttgaccaaaagaaatgatggaagtgcaaagatctttgaagtagaaaatatagacaccttcatggttccatttagactcagcagagatattgtggatggcatgggcatcactggtgtggaaggtgcttcagaagatgctgtgagaaaaccatggaagttatgcgcagttctcaggaaactctgctaaccattgtagaggtccttttgtatgatccactctttgactggactatgaatcctttaaaagctttgtatttgcagcagaggccagaagatgagacagatctccattctacccccaatgcggaagatcaggaatgcaaacgaagtcttagtgatattgatcagagtttcaacaaagtagctgaacgtgtcttgatgcggttgcaagagaaattgaaaggcgtggaagaaggcactgtgctcagtgtgggtggacaggtgaacttgcttatccagcaggccatggatcccaaaaatctcagccgacttttcccaggatggaaagcttgggtgtgaccttcaacacgtgtgtgtgtgtgtgtgtgtgtgtgtgtgtgtgtgtgtgtgtgtgtgtgtg

SEQ ID NO: 3762 - DNA, 1609 bp, Cricetulus griseus
aaaccgttttgggtcttgtagaaccaagcaaactgggacgcaccttgacccatgagcatttaacaatgacctttgtacaaattttactacccacctcctccatgccacgaaactacctccaaggaaactatcatgctgaaaaatttaattttggattcagaaaaatccttattcccatcaggagaaccttcagttgaatcaggagacagaagccgtaaaggaagaactgttatatttcaaggctaagggtggaggagccttggtggagaacaccaccactggactcagcagggacgtgcaaacactgaagtggctagcagagcaaactggagtccacatcatagctggagctgggttttatgttgatgcaactcactcagcagcaaccagggccatgtcagtggagcagcttacagatgtccttattaatgaaattctccatggagctgatggaaccagtatcaagtgtggagtcattggagaaattggctgctcctggcctttgactgacagtgagagaaaggtacttcaggctacagctcatgcccaggctcagcttggctgtcctgtcatcatccatcctggaaggagcccagttgcaccgtttcagatcatccgtatattgcaagaagcaggtgcagacatctctaaaacagttatgtcccaccttgacaggtctatacttaataagaaggagctgctggagtttgcacaacttggctgctacttggaatatgatctctttggcacggagctccttaattaccagttcagccctgatatcgatatgcctgatgataacaaaagaattagaagggtccgtttcctggtggatgagggctatgaagatcggattctcatggcacatgacatacacacgaaacaccgactgatgaagtatggaggccatggctactcgcatattctcaccaacattgttcctaagatgctcctcagaggaataactgagagggcagttgataagatcctaatagaaaaccctagacaatggctaacttttaaataggacgactgtttatgaacacagacctagaggttaaatttgtagagaatattccatgatttccaatctgagatgttaatccaagctacacaggaccaatgactgatcacttccctcctgtgagaaacctgataactatcacagggaaatctctggtgggggctactgggtttaagtgagtcctattgtcttaccttaataaaacaaatacaaaagagtgtgtttccaaacaataatttagagatatatctcccgagtcattttgaatcttttttcccctgactctatcatctacactacttgagaaaaattatagtgtttctagttaagttgcccccttctggagcaatctaatgtttcttgtaatattgatgatcctactaattatcctgctgttctttaattaatgcttaatgaataatatggcattttcaaatcacttttgcaacaagggaagttaaattttgagtacttttttttccaaaggagactgctataaaattaccaattcacaacaataaaaatattttggaaggttaactgtgctttgcactatctatgtaaacttataataaatcatttttt

SEQ ID NO: 3763 - DNA, 1609 bp, Cricetulus griseus
ggaggcacgtcacttcctgtttctttaggggaacgtggctttccccgcagtacctcgcctgccatctgcgttcgtgctgcggcggccggagctggagtcggagcccgagcgcagcctcgccatggattcggccctcagagacccgcacaacggcagcacccagacccccagcccggcccacggcacgacgcggccaccctccacgccccagggcatcgcgctggcctacggcagcctcctgctcatggcgctgctgcccatcttcttcggcgccctgcgctcagtgcgctgcgcccgcggcaagagctcttcggacatgccagaaaccatcaccagccgagacgccgcccgtttccccatcatcgccagctgcactctcttgggactctacctctttttcaaaatattctcccaggagtacatcaacctcttgctgtccatgtatttcttcgtgctggggatcctggccctgtcccacaccatcagccccttcatgaataagttttttccagccaacttcccaaatcgccagtatcagctgctcttcacacagggctctggggaaaacaaggaagagatcatcaactatgagtttgacactaaggacctggtgtgcctgggcctaagcagcgtcgttggtgtctggtacctgctgaggaagcactggattgccaacaacctgtttggcctggccttctcccttaatggggtagagctcctgcacctgaacaacgtgagcactggctgcatcctgcttggcggactcttcatctatgacatcttctgggtattcggcaccaacgtgatggtgactgtggccaagtcttttgaggcaccaattaaattggtgttcccccaggatctgctggagaagggccttgaagcggacaactttgccatgctgggacttggagacatcgtcattccagggatcttcattgccttgctgcttcgttttgacatcagcttgaagaagaacacccacacctacttctacaccagcttcgctgcctacatcttcggcctgggcctcaccatcttcatcatgcacatcttcaagcatgcccagccggctctcctgtacctggtccctgcctgcatcggatttcctgtcctggtggccctggtcaagggcgaagtggcggagatgttcagttatgaggagtcaaaccctaaagatccagcaactgggactgaatccaaagaggagacaacagaggtgtcagcatcgaagagactagagaagaaggagaaatgaatcctcgctacctgacccttgagggccagatcagacaggcggaggattacctgtaggtgacacagacagaagacacctacaggaggcgaaggtggctccaggatggggagcgggcttctgctgcctgtttccctctctcccttctctggcttcctctgttgctcctcctcccctgcaggcaaaggaaaccctctgcttcttctttccccaggagccaggtgggaaccgaatgtggtttttagatttttgtattgtggactgactttgctcacattaaaaactcatcccatggctggcgggccactgttctcctagggaggtctcagcacttaaaaaattaaaaaaaaaaaa

SEQ ID NO: 3764 - DNA, 1609 bp, Cricetulus griseus
  modified_base (296)..(296): a, c, t, g, unknown or other
gtacagtaccgaatgcaccaggccatcacgcgctgggcctcggaggccatgtaccatggacagcttaccgcccatccttctgtggcaggacacctcctgaaggacctcccaggtgtggctgacacagaggagacaagtggtttcccccctggctacttatagacacgggctggctgtggactgttggagctggatgaggcattgctgtcatcgcaccctacaaccttcaggtggacctgctcagacagagcctctccagcaagcaccctgagctcgagattaagtctgttgatggnttccaaggccgagagaaggaggcagtgatcctgacctttgtcaggtccaacaggaaaggtgaagttggttttcttggctgaggacaggcggatcaatgttgctgtcacccgtgctcggcgccacgtggcagtcatctgtgactcccgtactgtcaacaaccatacctttttgaagaccctggtggattatttcacagagcatggggaggtacgcacagcctttgagtacctggatgacatcgtccctgagaactacacccatgagggctcccagggccatagccgtgcccccaagctcaggggccctgtcacctccatcaagaagcctgccaatgagcaggagaatggccaagaggccagagcagctgctggacagggccgcaggaagccgaagccccctgtctctcaggtccactcccagcccagctccagtgcaagcggctctgatagaactggagcgacagaccacacagagcactttagggccatgatcgaagagtttgtggccagcaaggcgtcacagttggagtttcccacgtccctgagctcccacgacaggctgcgagtccaccagatagctgaggagtgtgggctgaggcatgacagcaccggggaggggaaggcccggcgcattacagtgaggagaaagagccctgcaggttctggcggtgtagccccacagcctccttcaccccccagccctgcacagcctgagcctgagccactgtcagaacagccccttgggcagccacatggccccacacaactggatctgaaggcactgcacctggagaggctgcagagacagcagggcggccaagcccaacctgccaaggcgcaaccaggtgtgggtttgcgaccacagaaagctcaacagaagaaaagaaaaagaaacgaaaggtccagccccggctctgccctgcgaggaggacttcgatgccctggtgtcagctgtgattaaggctgacaacacctgtagctttgccaagtgctcggccagcaccaccaccctgggccagttctgcatgcactgtagtcgccgctactgcctcagccatcacctgcccgagatccacggctgtggtgaaaaggctcgagcccacgcccggcagaggatcagtcgggaaggagtactctatgcgggcagtgggaccaggggataggggctctggacccggccaagagggcccagctgcagaggaagctggacaagaaggctgggcgagctcagcagccaaaggacaagcaagaggaaggagaaggagagggggacatgaggccacgtcctcatgcagggctgagtggggcagagg

SEQ ID NO: 3765 - DNA, 1608 bp, Cricetulus griseus
gctgaagggtccctcgttgagctgccgtggtctccgccgccccatggcggcgatcggtgtgcacctgggctgcacatcggcctgtgtggctgtctacaaggatggccgggccgatgtggttgcaaatgatgcaggggatagagtaaagcagacccttggcagaagccctgccgatccacacgctcagaaatacatctcagaaagtaaatgttcagtcattgagaaaaatgggaaattacgttatgaaatagatactggagaagaaacaaaacttgttaatccagaagatgttgccagactgatattcagtaaaatgaaagaaacagcacgttctgtcctgggctcagatgcaaacgatgtagttattaccgtcccatttgattttggagaaaagcaaaaatctgctctgggagaagcagctggagccgctggatttaatgtgttgcgactaatacacgagccgtctgcagctcttcttgcttatgggattggacaagactgccctaccgggaagagcaatgttttggtatttaagcttggaggaacatccttatccctcagtgtcatggaagtcaacagtgggatgtatcgggttctttcaacaagcagcagtgatgacatagggggtgcacatttcacagaaaccttagcccagtatctggcttcggagttccagaggttgttcaaacatgatgtgagaagaaatgcccgagccatgatgaaattgatgaacagtgctgaagtggccaaacattctttgtcaaccttaggaagtgccaattgtttcgtagattcattgtatgaaggccaagattttgattgcaacgtgtccagagcaaggtttgagcttctttgctctccacttttcaacaaatgtatagaagcagtccgagaactcctacgtcagagtggattcacagcggatgatattaacaaggttgtactgtgtggtgggtcttcaagaatcccaaggctgcagcagctgattaaagatctcttcccagctgtggagcttctcaactccatccccccagatgaggtcatccctattggtgcagccatagaagccgggattcttgttgggaaagagagtgcttcagtggatgactctctcatgatagagtgttcagccaaggatattttagttaaggggtcgatgaatcaggtgccaacagattcacagtactgtttccatccgggactcctctgccagcccgaagacaacacaccctacaagcccctggcagtatatcttccgtttgccttgaactctatgagtctgaggggaagaactctgctaaagaggagaccaagtttgcacaggttgtacttcaggatttagataaaaaagaaacggattacgtgatatattagctgttcttactatgaaaagggatggatctttacaagtgacatgcacagaccaagagactggaaaatgtgaggccatcactgttgaggttgcatcataactgtttcagataaaccaagagttttttagaactataatatcaacaccatttggttttgtgtataagtgatgtttataataaaacactttttcaatgaatggtataagctatgtttctattaaagtacaatttatta

SEQ ID NO: 3766 - DNA, 1608 bp, Cricetulus griseus
ctagtgcctctccggccttcgcctcactctttcccccgggactgcacgccatctacggagagtgccgccgcctttaccccgaccagccgaacccgctccaggtcaccgctatcgtcaagtactggttgggtggtccagacccattggattatgttagcatgtacaggaatatggggagtccttctgccaacatccccgagcactggcactacatcagctttggcctgagcgacctctatggtgacagcagagtccatgagtttacaggaacagacggaccgagtggttttggctttgaattgacatttcgtctgaagagagaaacaggggagtctgccccaccaacatggccagcggagctgatgcagggcctggctcgatatgtcttccagtcagagaacaccttctgtagcggggaccatgtgtcttggcacagccctttggataacagtgagtcaagaattcagcacatgctgctgacggaagacccacagatgcagcctgtgcagaccccttttggggtagttaccttcctgcagatcgtcggtgtctgcactgaggagctacactcggcccagcagtggaatgggcagggcatcctggaactgctgagaacagtgccggtccctggctgataactgacatgcggaggggagaaaccatatttgagatcgatccacacctgcaacaggagagagttgacaaaggcatcgagacagatggttctaacctgagcggtgtcagtgccaagtgtgcctgggatgacctcagccgacctcccgaggacgatgaggatagccggagcatctgcatcggcacacagccccggaggctctctggcaaagacacagagcagatccgggagaccctgagacgagggctcgagatcaacagcaaacctgtccttccaccaatcaaccctcagcgacagaatggcctcacccatgatcggcccccgagccgcaaagacagcttggaaagtgacagctccacagccattatcccccacgagctgatccgcactcggcaactcgagagcgtacatctgaaatttaaccaggagtcaggagccctcattcctctctgtctcaggggcagactcctgcatggccggcacttcacctacaagagtatcacaggtgacatggccatcacatttgtgtccacgggagtggaaggcgcctttgccacggaggaacatccctatgcagctcatggaccctggttacaaattctgttgacggaagagtttgtagagaaaatgttggaagacttggaagagctgacttctccagaggtaattcaaacttcccaaagagtacagctggcctgaaaagaagctcaaagtctccatcctccctgatgtggcattcgacagtccgctgcactagcctgggctgggccctgcaggggccaagaggggctcaacggctcccagtgacttcagtgtgacagctgtgtaaaagagactcccatgaataaaaggacaagtgtgaggatgactgcaaagtgctgtgcccaccacaggtcccacctcacctccggctcaggggcctcacgcccagctgtcaaacccatgaccaggcccctgtcctacacgccggtgag

SEQ ID NO: 3767 - DNA, 1608 bp, Cricetulus griseus
  modified_base (434)..(434): a, c, t, g, unknown or other
  modified_base (580)..(580): a, c, t, g, unknown or other
  modified_base (1571)..(1571): a, c, t, g, unknown or other
gaagacaagcttgctatcagaaaggatccccactccagtagaaggctctgactcagtttcctcagtgagccaggagtctcccaacattgtggcttgggaagacaatttgctggatgatttactcaactttgctgccactcccaaaggattactgcttcttcagagaacaggtgccatcaatgaatgtgtgacgtttatgttcaaccagtatgcaaagaaactccagataagcaggcaaaagaagtttggctatgaagttttggttgtacaggtggcgtccacagcagcaggggcagtagctctacaacattcaggcttcattagtgcacttataactgagctatgggccaatcttgaatgtggaagagatgatgtgaggttcacccatcccagagcaactccagtggatcctattgaccgagctgtgacctggntgctcttctcttattggaggctcagtatcaagtatccaacatgttactacatgctcaggaagaaaatacctttgagacctctgagaaccacagggactttataattgatggcttatcagtggagagaaatcatgttcttgtaaggnttaatctcattggcccatatccttggccaatgttttcatcatatccattgccacactgctatctgtcagaagttccacaaagtgctgacataaaacacgacagtgatatcggagagatgttatcatgcttcaaaatgtctgataaacaaaccgagtggatagaaaactgccgaagacagttttgtaaaacaatgaagtccaagcctgattcagtcagtggaggcgctttaggagaactacttgaaaaatttgtgcttcatctcaccgaaaatccctctgaatgctacttccctttagtggaatacacagctactgatgcaaatgtgaagaatgaaagtctctcatctgtgcagcagcttggcattaaaatgactgtcaggtatggcaaatttctcaacttgttaaacgatgctgcagaaaatgatctcgccttggtcttaaagcactgtgaaagattcctgaaacaacagcagtcaccagtaacttcttctcttctgtgcctgcaaggggactacacaggccacgactggtttgtgtcttctctgttcctcataatgctagggatagagagaagacattccactttctccagggcatccatcccatatatttttgctagcacacactacattgagatgctactgaaggctgaggtgccacttgtgttttcagctttccacatgtctggttttgctccatcacagatttgcctacagtggataactcagtgcttttggaattacttagattggatagaaatatgccactatatcgctacttgtgttgtccttggtcctgactatcaggtgtatatctgtatagctgttctcaaacatctgcagcaagacattctccagcacacccagactcaagatctgcaagtctttctcaaagagaagcactgtgtgggtttcgagtgagccactactttgaatacatggaggctttggagcaaaactaccgaccaatgctgctataaataaaatatgantaatataaaaaaaaaaaaaaaaaaaaaaaaaaaaaaa

SEQ ID NO: 3768 - DNA, 1607 bp, Cricetulus griseus
  modified_base (1041)..(1041): a, c, t, g, unknown or other
aggagggaagatggcggacgaggagaagctgccgccgggctgggagaagcgcatgagtcgtagctcaggccgtgtatactacttcaatcacatcaccaacgccagccagtgggagcggcccagtggtggcagcagtgttggaggcagtagcaagaatggccagggggagcctgccagggtgcgctgctcgcacctactggtgaagcacagccagtctcggaggccctcttcctggcggcaggaaaagatcaccaggagcaaggaagaggccctggagctgatcaatggctacatccagaagattaagtcaggagaagaagactttgaatctctggcctcacagttcagcgattgcagctctgccaaagccaggggagacctgggtgccttcagcagaggtcagatgcagaaaccgtttgaggatgcatcgtttgctctacggacaggggagatgagtgggccagtgttcacagattcgggcatccatatcatcctgcgcacagaatgaggacaggcaactggccggcctactcaggctgccaagcagtccatggacgccccttcctgctactgtcacacagtatttattattcctaaaatggctgggaggggctctgagcttccttttccctgtttgcccccagttggggctgccctagccaggctccttctgaaggaattaacttcagaagggcagtgggggtgtggaggccctcaggcttagtgggtcagaggtgacctgacccctccccctaggtcccagaggcaggcaggagggccttgtttcttgttagttttatgctccattcctctgttcagttgcaaaaagcagacactccacacctggcgatgcagcaactcagcctcagggtgtggtgcagcgccccatgcgccttccattaaatctggaaccactggctggtggtactgtatctcattaccttcctgatggggtgtggggttcctgtctcaggggcacacacagagactgcttattggtgagaacatattgcatccagcatctgccacccacttctggcnggttttcctgggttcagtcaccagacctagcaccctccagatgccgtttccatggcaacagaggcccctttgactagaggagaggggggctttgtcagctcccaggaaaacaggaatcctgatagagggatctgggcaatggctgttgctttaagtggctggggggagaaggaaggggctctccccccttgactagggggcctgtgtctcctaagatgcccctgagcctaaccctctgtgtggggttagccctttggaccccagccaaccccttccattgtctatacagtggtgaaaacccaagactgaacattgctgttagataaatgtgccccgggagccaactcagtgtccacaacatgtattattaactacctgtggtttccctcacctgctccaagttcccacccaggcctgctactgggaactggctgtaaatcctgggcctttaggatggcaacaatgtagtatccctccaccccaagttgcttaactcagcagagtttctctgtgtagctctggctgtcctggaactcgctctgtagaccaagatggcctcaaactca

SEQ ID NO: 3769 - DNA, 1607 bp, Cricetulus griseus
tgcgacgccgccgcggccgccctcccgcgcccgcccgctcccgcggccccgctcgcctcgcgccggcagttcgggcctactcctcccctcccccgccagccgcccaggacttgaccacgtaacgagcccaactcccgaacgccgcccgccgctcgccatggacgccggtgtgactgaaagcggactcaacgtgactctcaccattcggctgctgatgcacggaaaggaagtaggcagcatcatcgggaagaaaggggagtcggtgaagaggatccgcgaggagagcggcgcgcggatcaacatctcggaggggaactgcccggagagaatcatcacgctgactgggcccaccaatgccatctttaaggccttcgccatgatcatcgacaagctggaggaagatatcaacagctccatgaccaacagcacggcggccagcaggcccccggtcaccctccggctggtggtgcccgccacccagtgcggctctctgatcggcaagggcggctgcaagatcaaggagatccgcgagagcacgggggcccaggtccaggtggcgggggatatgctgcccaactcgaccgagcgggccatcactatcgccggcgtgccgcagtcggtgaccgagtgtgtcaagcagatctgcctggtcatgctggagacgctctcccagtctccgcaagggagagtcatgaccatcccgtaccagcccatgccggccagctcgccggtcatctgcgcgggcggccaagatcgctgcagcgacgcggcgggctacccccacgccacccacgacctggagggaccacctctagacgcctactcgattcaaggacaacacaccatttctccgctcgatctggccaagctgaaccaggtggcaagacaacagtctcactttgccatgatgcacggcgggacgggattcgccggaattgactccagctctccagaggtgaaaggctattgggcaagtttggatgcatctactcaaaccacccatgaactcaccattccaaataacttaatcggctgtataatcgggcgccaaggcgccaacatcaatgagatccgccagatgtccggggcccagatcaaaattgccaacccagtggaaggctcttctggaaggcaggtcactatcaccggctcggctgccagtatcagcctggcccagtatctcatcaatgccaggctttcctctgagaagggcatggggtgcagctagaacagtgtaggttcgctcgtaacccccttctgctgttttcccatgatccaactgtgtaatttctggtcagtgattccaggttttaaataatttgtaagtgttcagtttctacactttatcatctgctaagaatttaaaaaaaaatcacattctctgttcagctgttattgctgggatccatatttagttttataagcttttccctgtttttagttttgtttgggttttttggtcttcatggattttatttctgtttgtcgataagcaatgtaagagtggaatgttaataaatttcagtttagttctgtaatgtcaagaatttaagaattaaagaaagtggattggttaaaaaaaaaaaaaaaaaaaaaaaaaaaaaaaa

SEQ ID NO: 3770 - DNA, 1607 bp, Cricetulus griseus
gggcgttgcgcgagggggtcgaggcagactcagggcagtaggacgtcccccggctctgcgcccgcgtgggatgctgcggcgctggctgctgggccccgaagcagctgcaagccaggccggcgacaatggcagagcgcccgccgcggcgcgcgccccccgccgcgccctcctgcctggccctggccggggccctgctggcgccccatgcggcccgagggtgaattttatggggacccagagaggagcttatgaagtggccagaggatgctgtgtgtgcacatgggcaatgctgtgaagactgccagctgaagcctccgggaactgcatgcaggccctccagcaactcctgtgacctcccagaattctgcacagggactgcccctcactgcccagccaatgtatacctacatgatgggcacccatgtcagggagtggatggttactgctacaacggcatctgccagacccatgagcagcagtgtgtcacgctctggggaccaggtgctaaaccagcccctggcatctgctttgagagagtcaactctgcaggagatccttatggcaactgtggcaaagactccaagagtgccttcgtcaaaatgtgagatgagagatgccaagtgtggaaaaaatccagtgccaaaggtggtgccagccgaccagtcattggtaccaatgcagtttccatagaaacaaatatcccacagcaggaaggaggtcggattctgtgccgggggacccatgtgtacttgggcgatgacatgccagacccaggacttgtgctttcgggaacaaagtgtgctgaaggaaaaatctgcctcaatcgtcggtgtcagaatatcagtgttttcggggttcacaagtgtgtgatgcagtgccatggccgaggggtgtgtaacaacaggaagaattgccactgtgaggcccactgggcacctcccttctgtgacaagtttggcttttggaggaagcacagatagtggtcccattcggcaagcagataaccagggcttgactgtaggaatacctggtgagcatcctgtgtctgctggccgctggatttgtagtatatctcaaaaggaagaccttgatgcggctgctgttcacacataagaaaaccaccatagaaaagctgaggtgtgtgcacccttcccggatacccagtggctctcaccttagccaggctcaccccaccctcggaaaaggcctgctgatgagccggtcaccacattccaacacccccaaggacaggcggtccctgcaaagccagaccatcgacatcagcaggcccctcaacactcgagccatccctcatccccagtcacctcagcgagtgctcccgcctctccaccaggccccacgtgcacccagcggccctgtcaggcccctgcctgccaatcctgcactccggcaggcccagggtacccacaagcccagccctcatcagaagcctctgcctgctgatccactgagcaggacatctcggctcactagtgccttggtgagaaccccagggcagcaggagcctggcctccgcccagtcccaaacacgacctgctcccaagcatcaagtgcccagactcttcacacaatcgcctacaccaagt

SEQ ID NO: 3771 - DNA, 1606 bp, Cricetulus griseus
acactttacactctgtatttagaagaacctgattcctcagggcactcacacggacctgtcagcagtgaggttatcaaggccttgcagaaggttgaccgaatggttggcatgctgatggatggcctgaaggacctgaacttggataagtgcctgaacctcatcctcgtctcagatcatggcatggaacaaggcagctgtaagaagtatgtgtacctgaataagtatttgggggatgtgaacaatattaaagttgtctatggacctgctgctcgactgagacccactgacgttccagagaaatactattcatttaattatgaaggtcttgaaaaaaatctttcttgccgggagccaaaccagcactttcggccttacctgaaacaattcttacccaagcgcttgcactttgctaaaagtgacaggatcgagcctctgacattctatctggaccctcagtggcagcttgcattgaatccatcagaaaggaagtattgcggaagtggatttcatggctctgacaacctcttttcaaatatgcaagctctctttattggctatggacctgccttcaaacatggcgctgaggttgactcctttgaaaatattgaagtctataacttaatgtgtgatttgttgggtttgatcccagctcctaataatggaagtcatggcagtcttaaccaccttctaaagaaacctatttacaccccaagtcttcctgaagaagagagctccccggatcagtgtccaatcaaatcaatatccagtaacctcggctgcacatgtgactcctggattgtaccagtgggtggactttgagaaaagaggtttaattctgaccatggaagttgtagagggtatcagaaatattactgcaccttacggaagaccccggtttctgcagaagaaacacagcatttgtcttctttaccaacaacactttatgagtggatacagccaggtcatcttcatgcccctctggacatcttacaccttcctcagtaatgactatgtctccacagaagacttttccagctgcctataccaggaccttcggatccctgttagtcccgcccataaatgttccttttataaaagtaattctaagctaagttatgggttcctcgctccaccaagactaaatacaattgaaaatcaaatatattctgaagcattgcttacttctaatatagtgccaatgtatcagagttttcaagttatatggcagtacatccatgacaccgtgctacaaagaacagcaaagtcatccgtaatcaggaaattctggttccaactcacttcttcattgtgctcacccattgcaaactgtcatctcagagtcccttagagtgcacagacttggatgcttcagccttcatcttgcctcatcggcctaatcacatggagagctgtacttatgggaaacaggagtctacatggatcgaagagttactgacattgcacagagctcgggtcacagatgtcgaactcatcactggactcagcttctaccatgaacgacaagaatcagtttcagacctgttgaggttgaaaacacatttgccaatctttagccaagaagactgattctttttttaattaaaaa

SEQ ID NO: 3772 - DNA, 1605 bp, Cricetulus griseus
aggcatcatgacacccttgaagacccagcactgcttggtgggtcagccttacacagtgccccttatccagccggacctgcgacgagaggaggcaatccagcaagtggcagacgccctgcagtacctacagagcatctccggagacatcttcagcaggatctcccagcgagtagagctgagtcggtgccagctgcaggcccttagggagaggggtctccttggcccaggcgaagatagagaagatcaagggcagcaagaaggccatcaaggtcttctctagtgccaagtacccggcgcctgagcgtctgcaagaatatggctccatctttactggtgccctcgaccctaatctgcagagaagaccccggtacagggtccagagcaagcaccgccccctggatgagcgggccctgcaggagaagctgaaatactttcctgtgtgtgtgaacaccaagtcggagcctgaggatgaggctgaggagggacttgggggtcttcccagcaacatcagctccatcagctccctgctgctcttcaacaccacagaaaatctgtacaagaagtatgttttcctggaccctctggctggcgcagtaacaaaaacccacacgatgctgggcacagaagaggagaagttgtttgatgcccctctgtctatcagcaagagagagcagctggaacagcaggccccagagaactacttctatgtgccagacctgggccaagtccctgagattgacgtgccctcctaccttcctgacttgcctggcatcgcagatgacctcatgtataatgccgacttgggccctggcattgccccctctgctcctggtgccattccagaactgcccaccttccacacagaggtagctgagcctttccagccagaactggaggatggagcgcttctggcagcgccaccaccaccgccaccgccaccaccaccacctcccccagctcccaccgtggtggtcagtgccccacaaccaccagtgttccctgaagtggcaactgcacctggccaggttgccagggaagaagacaggagcagcggcgtggcccactcagcctctgtccaaggagctcctaaggaggtggttgacccctccagtggccgagccactctgctggagtccatccgccaagctgggggcattggcaaggccaagctgcgcagcgtcaaggagcgcaagctggagaagaagaaacagaaggagcaggagcaagtgagagccaccagccaaggcggggacttgatgtctgacctctttaacaagcttgtcatgaggcgcaaaggaatctctggaaaaggacccggttctggcactagtgagggacctgcgggagccttcacgcggatgtcagactccatcccacccctgccacccccacagcagcccgcgggcgacgaggatgacgatgactgggagtcctgagtgtgctctgacccctctcccacattcagcagcagcagcttcgaggggcttctcagccagctgaggcctttcaggtcctgctgcccatgcaggtccagggggtgatacaagtgttaggggtctgtgcccaatctcttcatggagtggggactgtgcgagccgcctgctg

SEQ ID NO: 3773 - DNA, 1605 bp, Cricetulus griseus
cttcaagatggctgctgggatgtatttggaacattatctggacagtattgaaaacctcccatttgaattacagagaaactttcagctcatgagggacctagaccaaaggacagaggacctgaaggctgaaattgacaagttggccactgaatatatgagtagcgcccgcagcctgagctccgaggaaaaattggcccttctcagacagatccaggaggcctatggcaagtgcaaggaatttggtgacgacaaggtgcagcttgccatgcagacctatgagatggtggacaaacatattcggcggctggatacagacctggcccgttttgaggctgatctgaaggagaaacagatcgagtcaagtgactatgacagctcttctagcaaaggcaaaaaggccggactcaaaaggagaaaaaagctgcccgtgcccgttccaaagggaaaaactcagatgaagaagcccccaaggctgcccagaagaagctaaaacttgtgcgcacaagtcctgagtatgggatgccctcagtgacctttggcagtgtccacccctctgatgtgttggatatgcctgtggatcccaacgaacccacatattgcctttgtcaccaggtctcctatggagagatgattggctgtgacaacccagattgttccatcgagtggttccacttcgcctgtgtggggctgacaaccaagcctcgagggaaatggttttgcccacgctgctcccaagaacgaaaaaagaaataggtttccttggattccatcccagatctcttccaaatccccctgacctgggctagtgacagagaggaacgcctctgctggggactgggggtccagggagatgtcgacagtgcagtaccgccgtcccttctccctctccctactcctggtgctgaggctgcatccaaaccccggtagggagggcgccacagccactgacggtatgtgctctcgctccactctctcctccagagggaaggaatcccactcactgtccttttgcctccatggtgaggttggtgctgtatttcagagggagggtcctcttcattcccttgctttgtatttaagggctggggcagtggagtgggcactctcccagtctcctcaatctccccttcccccaccggggctaggtaggacaaacctctccatcctctttctttttccatggtgagggatcttctagatcatttgggctctggcctagttgagtgattaccccttcctctgtgacccggggatttatcctgactgaatgggagaggggcaaggtggagcacagataactcacatgtaaaaggagtggggtaggtaaataaaagctatccacgctggcctgctgtgtttattgtagagcctgtttccgtacatgtgctaaacattccttttgcatcctctggattggatgagaggcaggagaatggcttgccagaaataggacaagacatgaaacccaaagtggtacttgtcctgtgatatttacgacttgcccacctggaggggtgccttgcactgggggactcagaactttgtaattatgcatctgctccagtgaagcacttttcacctgattccaataaatcatgtatttgc

SEQ ID NO: 3774 - DNA, 1605 bp, Cricetulus griseus
ggagactccccacagccttcagggagaagaaaggaggcagccaagccgattaaaaggaacttgtggcttgtggccttttgtgcaggggccgcctggaaggggagaaaagtgtgctgaagccacagcggcggttaatgagctgtgagatgaggagcagctgcagctgacactgcttccaggatccttcgtctgccctttgtgcttcgtcacggctgccggggaaagaccgcccaccatgcccacggagacgctacagacaggtagcatggtgaagccggtcagtcccgcgggcaccttcacatcggcggtacccctccgcatcctgaacaaaggacccgactacttccgcaggcaggcagagcccaaccccaagagactcagtgcggtagagaggctggaggctgacaaggccaagtatgtcaagagccaggaggtgatcaatgccaagcaggagccggtgaagccggcagtgctggccaagcctccagtgtgcccaggagccaagcgcacactgggcagccccactcttaaggtgtttggcaaccatgccaagaccgagagcggtgtgcaacgtgagaccctcaaacttgaaatcctcaagaatatcatcaacagctccgagggctccagctctggctctggccacaagcacagctcccgaaactggcctcctcacagggacaccactgacctgcaccgacactcctttgcagagtctctgaaggtgtaccctacgcctgggcgaggcagcccgcaagagagtagctcccatgtgagcaggagactgctggagcagtctgcagagtccttcctgcacgtctcacacagctcctccgacatccgcaaagtgaccagtgtgaagccccttaaagccatcccctgcagcagttctgcccctcccctgcctcctaagcccaaggtggctgccatgaagtcccctgaggctgaccaggtggaaccagcctgtggggtcagccggagaccttcccttcagaggtccaagtcagacttgagtgacaggtattttcgagtagatgcagatgtggagaggttcttcaactactgtggactcgacccggaagagctagaaaacctgggcatggagaactttgcaagggctaattctgacatcatatccctcaacttccgcagcgcaagcatgatcagctcagactgtgaacagtctcaggacagtaacagtgaccttagaaatgatgacagtgccaatgaccgggtaccatatggcatttctgccatcgaaagaaatgctagaatcatcaagtggctatatagcatcaaacaagctagggagtcacagaaggtgtcccatgtgtaagaggcacagtggtagaaaggagggagggggggtctgtctgtgcatacacagttgtgaaggttgtgaggtctccttgaagtgttgtgagcttctccactctttgtgttgcttgttgtgcaatgttctcaagttgcatgcctgtcaacatggcaactggcctggcttccttctcacatctctgcagagtcttgctgaacactcatctgccaaaagtttccagccagaatctgaccgactagggccttgctcttaatacaaaacttgtttac

SEQ ID NO: 3775 - DNA, 1605 bp, Cricetulus griseus
  modified_base (1585)..(1585): a, c, t, g, unknown or other
agggcaagaccatggcgtctagggcctctgaacttcctccaggacgcagtgtgacggcgggcatcatcattgttggagatgagatccttaagggacacactcaagacaccaacacttactttctctgccggacactgcggtccctgggggtccaggtttgccgagtctctgttgtacctgatgaggtagccaccattgcagctgaggtcacctcattctccagccgcttcactcatgtcctcactgcagggggcatcggccccactcatgacgatgtaacatttgaggcagtggcacaggcctttggggaggagctcaaaccacaccctgagctccaagcagccatcaaaaccctaggaggggtgggttgggagaagctgtctctggtgccctcctctgccagcctgcattatggcacagatcctcgcactggccagcccttcacgttcccgctggtctctgtccgaaatgtctacctcttcccagggatcccggagctgctgcggcgagcgatggagggactgaaaggactgttccaaaacacagctgtgcaattccacgtgaaggagttgtatgtggcagctcctgagggttctattgcctccatcctaactgaggcccaggctcactttgggcgtaggcttagcctgggttcctaccctgattggggcagcaactactatcaggtgaagctgattctagactctgaggaaaaagagccctaggaggaatgtctggcttacctaactgctcgtctgcctcagggatcattggtccctacctgcccaatgctgttgagcaggctggtgaggctgtatacaaactcgctcagtcaggatcttgtctggggaaaaaggtagcaagcgccctacagaccattgagactgccctcgatcagtaccacctctccaagctctgtgtgggcttcaatggtggcaaggactgcactgccctcctacacctcttccatgcagctgtgcagaggaaatttcctgatgttccaaaacctctccagatcctgtacatccgtagcatctcacctttccctgagttggaacagtttctacaagacaccatcaagaggtataatctgcaggtattagaagctgagggcaacatgaagcaggccctgggtgagcttcaggaaaagcaccctcagctggaggctgtcctaatgggcacccgtcggactgacccctactcctgtagccttagccatttcagtcccaccgaccctggctggccttcattcatgcgcatcaacccgctgctggactggacctacagaaacatctgggattttcttcgtcagctgtttgtcccctactgtatactatatgaccgagggtacacatcactggggagtcgggagaacacgatgcagaacccagccctgaagtgcctgagcccaggaggacaccctgtctaccgtccagcatacctactggagaatgaagatgaggaaaggaactcccgcacatgatctcacacactctggacaagactgagggaacggggctggcaatgggggtgtaacctgtcacgtcaagtaaactgtacctcacaccaaaggcaaaaaaaaaanaaaaaaaaaaaaaaaaaaaa

SEQ ID NO: 3776 - DNA, 1605 bp, Cricetulus griseus
gccgccgccttcaccccaccctcgagcgtgcgcctcccacaatccccccgcgggacgttccattgcgcgcggcggctgccggggccggggagaagagggcaggccgcggcgggtgcggctggcctcggcgacaggaaccgcgggcgtagcgagcgaacagacctaggcaccgacgatctcctgggaccggccgccgcggcgccgagactcgccgcccgcttccggccgcagggcaggcggcgcggtgcccctccgctgggctgtggttggagccgcggcgactgcgcgttgggtagcttcctgccacacgacccgagtttgcttcgcggtcgcagggccggtccctgggatccagctgctgacggcgtgtgcgggtcgccgcggcaggagtcctggttggtgctagactcacgagagcatagacaatgctgacgggagtaacaaggctttcctccagggtgcaaaagttggacccaaggtgttttttgcatgggagtgcccaggcagctcagagcaatccagttccagctgagcatccgagatttatttcccgcaccagtgacaatgacccagctaagcatggggagcaacatgagggcaagtactacagcatccccctgcaggatctgaagacagtatttcctcatggcctgcctcctcgatacatgatgcaggtgaagactttcggcgaagcctgtctgatggtaaggaagccagctctggagcttctgggctacctgaaaaataccaatttttctcacccagctgtgcgctatcttctctatggggagaagggaacgggaaaaactctcagtctttgccatgctgttcatttctgtgcaaaacatgactggctgattctgcatatcccagatgctcatctttgggtgaaaaactgccaggagcttctgcagtccacctacaacaaacagcgctttgatcagcccctggaggcttctacctggctgaagaacttcaaaactacaaacaagcgcttcctgagccagataaaagttgaagagaaatacgtttggaataagagagagagcactgagaagggaagccctctgggagaggttgttgaacagggtatcacacgagtgaggaatgccacagacgctgtcgggatcgtgctgaaggagctgaggacccagagttcctcagggctcttccgcctcctggtagcagtggatgggatcaatgccctctggggaaggagcacgctgaaaagagaagacaggaccctgattgccccagaggaactagcccttgttcacagccttagaaaaatggtgaaaaataattggcatggaggtgcaattgtgttgagtttgagccaaaccgggtctctctttaagtcgtcaacagcatatttgccgcacgagcttctgggaaaggaaggatttgatgccctagatccttttcttcccatcctcatttccaactatactccaaaggaatttgaaagttcttttcagtactatttagagaataactggcttcagcatgagaaagctgcaacagaagaagggaggaaggagctgaagttcctgagtaattgcaacccgggacagctggagcggctctgtgcctccctgtaagcac

SEQ ID NO: 3777 - DNA, 1604 bp, Cricetulus griseus
cggcctccgggtctgagaagagcgggaggaggtggcggcctcgggaagatgctgctctttggcgtaaattgcaatcgattagggatcgtttctcagactcgaggtagaagtgagagttcagattaagtgaggccgacattgctgctttgaacacctcagaaggggagaatggatttatcaggagtgaaaaagaagagcttgctaggagtcaaagaaaataataaaaagtccagcactagggctccttctcctaccaagcgcaaggaccgctctgatgagaagtccaaggatcgctctaaagataaaggggccactaaagaatcaagtgagaaggatcgtggcagggataagactcggaagagacgcagtgcttcaagtgggagcagcagcaccaggtctcgatccagctcaacctccagctcgggctccagcactagcacaggctcaagcagtggctctagttcctcctctgcatccagccgctcaggaagctccagcacatcccgaagctccagttctagcagctcttcaggctctccaagcccttctcggcgcaggcatgacaacaggcggcgttcccgctccaaatccaaaccacctaaaagagatgaaaaggaaaggaagaggcgaagcccttcacctaaacccaccaaggtgcacattgggaggcttaccaggaatgtgaccaaggatcatatcatggaaatattttctacttatggaaaaattaaaatgattgacatgcctgtagaaaggatgcatcctcatctgtccaaaggctacgcatatgtggagtttgagaatccagatgaggcagagaaggcactgaaacacatggatggaggacaaatagatggccaagagatcactgctactgccgtgttggcaccctggcctagaccacccccacggcgattcagcccacccaggagaatgcttccaccgcctcccatgtggcgcaggtcacccccacggatgaggaggaggtctcgatccccaaggcgcaggtctcctgtgcgtaggaggtctcgatctcctggccgccgccgccacagaagccgatccagctccaactcctcccgataagcagggacattgattcgtacctctgtaacttatgttccccctactcagttttgtcctttctctagccaaatgtggatccaaagggaaggatcccacagcagttgagatatttcctcttcaggaggattctggctgcagaggtactgttgattcaggactgtgcccatagaggtaccctgtagttttctggctaggaaaagttcaccccttccagttcttgactgtccccgtgtctctgttactctctgaaattggtgagccagttagtactacagggtcctcatggaacctaccccacccccgttatcacctgccattcatgatgatgttgcaggttaacctgggcagtgtatatatacattgcctctttttgcttttattgtacagtcagtactataaactttgttttgagttttataactttgtagcattttaggtaaggttgtgtttgtacttgtatagagtgaaaggactgtgttgaataaacctaggattagatgcaaattagaaaaaaaaaa

SEQ ID NO: 3778 - DNA, 1604 bp, Cricetulus griseus
  modified_base (1051)..(1051): a, c, t, g, unknown or other
  modified_base (1174)..(1174): a, c, t, g, unknown or other
  modified_base (1377)..(1377): a, c, t, g, unknown or other
tgccaagcccaactgcttccgcaaagacccagacatcaacatgcatcccctgttcttcgccttgggcaaggtcctctctgtggagcttgggaaacaaaagaagaagcacatgccatacaaccatcagcacaagtacttcttcctgattggacccccagccttgttgcctctctacttccagtggtatatcttctattttgttgttcagcggaagaaatgggtggacttggcctggatgctcagcttctatgcccgtgtcttcttcacttacatgcccctgctggggctgaaaggcttcctgggccttttcttcattgtcaggttcctggagagcaattggtttgtgtgggtgacacagatgaaccatatccccatgcacattgatcatgaccggaatgtggactgggtctccacccagctgcaggcaacctgtaacgttcaccaatcagccttcaatgactggttcagcggccacctcaatttccagatcgagcaccaccttttccccacgatgccccgacacaactaccacaaagtggcacccctggtgcaatccctgtgcgccaagtacggcatcaagtacaagtccaagcccctgctctcagccttcgccgacattgtttactcactgaaggagtcggggcagctctggttggacgcctatcttcaccaatagcagcagcagtcctccatctgggggaggaagaggacaactggagccaaagcagagggagcttgagggacaatgccactatgaatcaatgttcaaaagggttaggggacatagatgtgtgtgctcatacctgccccctttgccttcttggtgccaaacttgagggaaggaagaactgttggggttagggttacaaagctgttctgttgtttcttctactttagcagaggcaaatggggggggatctacagagcccagcatgaagcagggaccctgccctagaaattcccctcttgtaaagtgtgaacccatctcactgggctatgtttctgactctaccctccctgttagtctctgtgggccagtgtgacccctttnaacaagactcagaaagggggcattcatgcatagaatcctgaagcctggcacagctccctgctcaggagcttagcttgctgccaagagctggttgtaaccatgtctgtctccagctgctggganaagcacttgtccaagtgtcttattcttctggaggtcagataggaattcaggataacttctgacaaagcatgtcagtctaacaatgaaatagggttttgtaatcttctggctttgtagaaagggggacgttgagtgacaagactgagaatgtgacagtgataaaagtgagggtatctcaactccactgacagaaaataaagtcngaaaagtcacctctgctcatgtagacagtggcagaacattggaacgaaagcttgttaactccagcttccatgttcatctttattacattcatcttcctacttcctggccaacggtgttgttccctttaattgggcctaatgtcagtatccatgtgtcagtgctgttaccacatcctgatgagactaaaaataaacattaatttggaaccaaaaaaaaaaaaaaaaaa

SEQ ID NO: 3779 - DNA, 1603 bp, Cricetulus griseus
gtcagaaatgccatctgctctggtcccaccaagccacaagtcagggatatggcctgtcagaccaatgggtccaggacggcagggacacagactgtgcaggcaatcagtgtgggcctgcagactcgaggccctaccgtgccagcggtgtcaccagcagccccaacaagtgtctcacaccaaaagccggaggtggcactacgcctgtgtcttctccttcccgaagccttaggagcagacaggtggcccctgccattgagaaggtgcaggccaagttcgaacgcacctgctgctctccaaagtacggttctcccaagcttcagagaaagcccctctcaaaagctgaccagccaaatagtaggacctcccccaggcatggcccagaaagggttcagcgagtcagcctgggcccgatccaccaccaccagagagagccctgtgcacaccaccatcaacgatggtctctccagcctcttcaacatcatcgaccacagtcctgtcggggtgcgagctgggagtcgttctcgctcagcagagcctcggcaggagctgggtccaggccaggaaacgggcaccagttcccgaggaaggtcccccagccccctagggatgggctcggagatgtgtagggagggtgggggagagagcacgccagtgagacaggacttatctgctcctcctggctgcacgctccctgagaatgtggcccggatcctcaacaagaagttgttggaacatgccttaaaggaggagaagaagttagctgcccatggccccttcggtctccccagcgacagtcacaccggagaagcaggaccagctgaaccagggtccatggaggaacctatttttgtctccatcttttttacacacaatatattaaacaaaaaaggtaaataaggtataaatcgatgtaagacttttaaaatgtacatcttaagggattccaaaacaccccttgttcgcaaccctgactgcctctgttaaatttgcactgttcccttgtggttgggtttctccatgttgagttcagagtgttccaggttaaattttattttgtccagagttaattttttaagagtcttttttagcgcttcagactgtccaactcagtgaactttttgtagtgagaaggccatgaggccagaaggccagagtgtgtgtactctggaaggatggaggtcgacatttcggtgaaggtacggagcccctcagatggatttaaacccactgtgtgacccatgcacgctgcctaccgcacatccttgggcgtctgtacatacactgctctgtcgctgcccttacctgcgtgtgcgtcggcctgtcccgctgtaacttgtcgtgaagttccttgtactgtactgtgaccgttggtccccctgtaccaacgagacaacagcagcatttttaaattattgttaagacattaactggcattgtacaaagctcactcaatattttcttagtttaaggaaaagcactataaaaaaaaaagtaatgaggatgccaaattgagacaaatgatggtgcctcagagtctgtctgagaccatgatgatagaaaaaaataaacgcccccttacaagaaagaaaaaaaaaaaaaaaaa

SEQ ID NO: 3780 - DNA, 1603 bp, Cricetulus griseus
atggaagtatgaaccatttaaggcaattctgtcttgaactaaatggacttgctgtcaaacttacagcagatacgttgtactcaaatgacagcaactgaacaatggatttttctttgtgcagctcataaaaactccaaaaagagtgtcctgctatagactatacaagacacacacttgatggtgctgcatgtcttctgaatagcaataaatattttcccagcagggttagcataaaagaatcatctgtagcaaaactaggatcagtgtgccgtaggatttatagaatattttcacatgcctattttcatcaccggcagatatttgatgaatatgaaaaatgaaaactatttttatgtcatcggtttactaaatttgtgatgaaatataatttgatgtcgaaggataacctgattgtaccaatattagaagaggaagttcagaattcagtttctggagaaagtgaagcatgaagggaatcatgtcgaacagtgtactgattgcataattaacaattatgtactgtatatatatcattttagacacatcaatcatgtatccatattatagcttatttgtttagtataggtttttgtatgctatgtgttgccttttaaaatgggaaatacattttaagttattcatgagctgtatattcactggtgtggcactcatggtttttaaataagtttagtattatctacttttaacttttccaaaaagagataaaagtgtttaaaaggtctgtttatagtttttgtatgcataaccaattatgtatatgttcagagaaatgcaatgaggcgtagtaatacttaaataatctcactctgctacatagagtgtcttctaggtcagtgtacttggaaacagtatcttttttgtgacagtggattattaaatacctggtgatgatgataaaggcacatacatgatgttctcatgaacacctgccccttcttgtttcccttagttctctccccaaactacattagtcaagaaatttatttaccaagctatggttagtggtggcttctccctgtttatatttgtattaattgcttacagagcatacctcatacttgcagtgacattacactacaggaagtctgtactgcataggctcctgcctacctttgttttgggaaattgttgtaactacttagaaaatagtccttaatatagtttggttcttcctgttagtaatattaatctttttatctaattctaggcagcattaaatacatatggaaaagatagtgtatttattttattctccctcccagaagcttattgtttgaattatatgcacatataagattatttacagtaattcacaggttccggtggtgttgatgagtggtcatactttttttatttctcccagcactcttaaaaatttaagtgcagccaagaggtggtggcacacgcctttaatcccagcacttgggaggcagaggcaggtggatctctgtgagtttgaggccaggctggtctacaaagtgagtgccaggacatgctccaaagctacacagagaaaccatgtctacaaaaaccaaaaaagaaaaaaaaaaaaagaaaagaaaagaaaaaaaaaaaaaagaat

SEQ ID NO: 3781 - DNA, 1603 bp, Cricetulus griseus
cgcctttgctcctgccgtccccgctgcagtgcgaagggctcgaagatggccggttggcagagctacgtggataacctgatgtgcgatggctgctgccaggaggccgccattgtcggctactgcgacgccaaatacgtctgggcagccacggccgggggcgtcttccagagcatcacgccagtagaaatagatatgattgtaggaaaagaccgggaaggtttctttaccaacggtttgactcttggtgcaaagaagtgttcagtgatcagagatagtctatacgttgatggtgactgcacaatggatatccggacaaagagtcaaggtggggagccaacatacaatgttgctgttggcagagctggtagagcattggttatagtcatgggaaaggaaggtgtccacggaggcggattgaataagaaggcatactcaatggcaaaatacttgagagactctgggttctagctgctaggcagactgttaagtattaggggaaaattgctcttaaattttcctagctgtaagcttaagtcttgtaaccaacctttatctggcatcataattgcagcacaataatgatttgcatgatatcttgaaattggggaagggggcatgccgagttgggcatcactttgtcttagcaattaatgggatactgattactaaaataagttaatattaagcaaggtgccagttgtacaatctctaatttgatcaatgtcttttcagcactttgagcatttacttggctcatttagtcttccttttgtagcgcatggttgggaggaaaaagtgcatgcatctttacttcactcttttttcatcccctccctttgaacatgaggtatttggtttgcttccattctcttttgtgtagtgcctggtttatttaacctaattaatacctcctttgttgatgagctattgaaagctgcagtgatttgcttttaatactatgattgcacttgagacagactatttgtagtgtctgtaggatatgaagagtgcaactgtcaagagcaaaggcatttcctcccatgaccttactacagtaaccatactgatcaaattcccagggacattctgtcattgcagtagctcagacttcttgtcttttctttgcacaccagctctattcttgagtaaaattgtaaaaggctgccattatggatattaggtatcccaacataaccatctggagtgtgtccagtttattttcataggaccaatttttatttgcagcttaggttttatatgaagttgcattattgtggacttggctgtcttgtgatgtattttttcatatgtattctgtgccatactattgttaaaatgaactgttgctattgtgagatggattttctttcgaatggcacttctttagggacattctagtatttgcttctattgtttgggcattgtggataatgtacagatttaaaaacaaatcttgttgctgatttgtccatttctttccctgcactttgttacatctgggatacagtctaactcatctgatttaatatgcatttaaaaaaatgccataactattaaacaccttgtttacagacagatgaaataaatttattccaaccaaata

SEQ ID NO: 3782 - DNA, 1602 bp, Cricetulus griseus
gggaggagcggttaacaacccgctaatgtagggtcctctgagccagggtcagacatggactggaaagacgtgctccgccggcgtttggcgtcgcccaacacggatccaaagaggaaaaaaaaaagtgaacaagaattaaaagaggaagaaatggatttatttaccaaatattactcagaatggaagggaggtagaaaaaatacaaatgaattctataagaccattccccggttttattacaggttgccagcagaagatgaagtcttactacagaaattaagagaggaatctagagctgtctttctacagaggaaaagcagagagctcttagacaatgaagaattacagaatttatggtttttgctggataaacaccagataccacctgtgattggagaggaagcaatgatcaattacgagaattttttgaaggttggagaaaaggctggaccaaagtgcaagcaattttttactgcaaaagtctttgccaaactccttcatacagattcatatgggagaatttccatcatgcagttcttcaactatgtcatgcgaaaagtttggctgcatcagacaagaattggactcagtttatatgatgttgctgggcaagggtaccttcgggaatcagacttagaaaactacatactggaacttatccctactttgccacaattagatgggttggaaaaatccttttactctttttatgtttgtacagcagttaggaagttcttcttctttttggaccctctaagaacagggaagatcaaaattcaagatattttggcatgcagcttcctagatgacttattggagctaagggatgaggaattgtccaaagagagtcaagaaacaaattggttttctgctccttccgccctgagggtctatggtcagtatttgaatcttgataaagatcacaacggcatgctcagtaaggaagaactctcccgttatggaacagcaaccatgaccaatgtcttcttagaccgggttttccaggagtgtctcacttatgacggagaaatggactataagacctacctggactttgttctcgccttagaaaacagaaaggagcctgcagctctgcagtacattttcaaactcctggacattgagaacaagggatatctgaatgtcttttcccttaattatttctttagggccatacaagaactaatgaaaatccatggacaggatcctgtttcatttcaagatgtcaaggatgaaatctttgacatggtaaaaccaaaggatcctttgaaaatctcacttcaggatttaatcaacagcaatcagggggacacagtcaccaccattctaattgatctgaatggcttttggacttatgagaacagagaagcccttgttgcaaatgacaatgagaactctgcagatctggatgacacgtgagctctcagagaccagactgccttcataaagatgaagcctgaatgctgcatgcaaacctttgatgcaggatccttggaaacatcctaaataaaacttggcacatgcctgtacaacacagcagatatctgccttactagagttctggttgcagctggaacaatttcaaagtaataagaccaacta

SEQ ID NO: 3783 - DNA, 1602 bp, Cricetulus griseus
cagctgcagaagcatcgtcgggtgctgccactggaagcatagctgccagtagcgtggcaaccagtggtgtggtgcctggaggtggtttcatggccagcgctactgcagttgctggccctgaagtgcaaactggcagaaattaattttgtcatccggaggaacccagctgaccctcagcgtatcccttccaacccttcccaccggatccagtgtgcagcaggctatgagcagagtgagcataacgtatgccaagatatcgatgagtgcacctcagggacccacaattgtagagaggatcaagtgtgcatcaatttacgtggctccttcacatgccagtgtcttccggggtatcagaagagaggagagcagtgtgtggatatagatgaatgcaccgtgcctccatattgccaccaaagatgcgtgaacacaccaggatccttttactgccagtgcaatcctgggtttcagttggcagcaaacaactacacctgcgtggatataaacgaatgtgatgccagcaaccagtgtgctcagcaatgctacaatattctcggctcattcatctgccagtgcaaccaaggatatgaactgagcagtgacaggctcagctgtgaagacatcgatgaatgcagaacctcgagctacctgtgtcaatatcaatgtgtcaatgaaccagggaagttctcatgcatgtgcccccagggctaccaagtggtgagaagcaggacctgccaggatatcaatgaatgtgagaccactaatgagtgccgagaagatgaaatgtgctggaattatcatggcggcttccgttgttacccacgaaacccatgtcaagatccctatgttctaacatcagaaaaccgatgtgtttgcccagtgtcaaatgctatgtgccgagaggggccccagtctatagtctacaaatacatgagcatccgatctgacaggtctgtgccatcagacatcttccagatacaggccacaactatttatgccaacaccattaatacttttcggattaaatctggaaatgaaaatggagagttctacctacgacaaacaagccctgtgagcgcaatgcttgtgcttgtgaagtcgctatcaggaccaagagaatacatcgtggacctggagatgctgacagtcagtagcatagggaccttccgcacaagctccgtgttacgattgacaataatagtggggccattttcattttagccttttataagagtccaccacaggcatttaaataagccaaagaatattgtgatgttaaagcactattttatttatagatatatctagtacatctatatccagacagttacactacgggaggaagtgggcatttaatctgtaagattcaaagtttatctttatcactgtatgtaaattagatattaatccaacattctttttgaagggagctaagcatatattatctggtgaaagttggattctttcctataaaaataggaccaagcaatggtactgttctgtagtgtacagagaaatacacaattccacagaccatctcatgaggattgaccatcttaacagcaagaacgtggaggaggggtttttaactgctttgtaagaaaa

SEQ ID NO: 3784 - DNA, 1602 bp, Cricetulus griseus
atggtttccctggggtctgtgtttggcctgctgctgctgctcataatcgttcgagccagcagaagtgcaggtattgattttcgatttggctcatatattgataattacatggtgctgcagaaggagccttcaggggcggtgatctggggctttggtacacctggagccacagtgacagtgaccttgtgccaaggtcagaacaccttcaagaagaaagtgaccactgtgaaagcccactccaacacctgggtggtggtactggatcctatgaagcctgggggaccctatgaagtgatggcaaacagactttgggattacgaatgtcaccctgaggattcacgatatcttatttggagatgtctggctgtgcagtgggcagagtaacatgaagatgactgtgttacagatcttacaacgcctcgaaggagttggctgttgctgctgcctaccagtctgtgcgctatcttctctgcctcccttgtccaggcagaggaggagccaggaggaccttgataaggttgacctgtcatggtccaggcccactgcaggaaacctgggcaatggaaattacacttatatgtcagcagtgtgctggctctttggccgttacctgtatgataatctgcaatatcccattgggctggtctcctccagttggggtgggacacccattgaagcctggtcatctaaaagggcactgaaatcctgtggagtcctaatacaagcaatgaaagaattcttcagaccacgagccacgaggagtgagtgtaagagtgaggggtccttgtgtcctttggggagttttactctaccaccgtctgtgactggacctgcaacacactctgtcctctggaatgccatgatccatccactgcaaaaaatgactttgaaaggggtgatatggtaccagggggagtccaatgaggatcttaacagggacctgtattcatgcatgttccctgcactcattgatgactggcgccagactttccacgatggctcccagaagcagacagagcgtttctttccatttgggtttgtccagctgtcttcatatgcagagacgaacacatcagattatagatttcctgagatccgctggcatcagacagcagactttggctttgtccccaacttgaagatgcccaatactttcatggctgttgctatggatctttgtgacctgaactcaccttttggcagcatccaccctcgagataaacagactgtggcctatcgactgcacctgggggctcgagctctggcttatggtgagaaaaatttggcctttcaaggaccactacctaagaagatagaactgttggctcacagtaggctgctcagcctcacttatgatcagaaaatccaggtgcataggcaagacaacaagtcatttgagatctcctgttgcagtgaccgtctgtgcaaatggctacccgtttctgtgaacagcttttctaccaagaccctgatcttgggtatcagtgcttgccgaggcaccgtggttgatgttcgctatgcctggaccacatggccctgtgactataagcaatgtgccgtttaccaccctagcaatactttgccagctcctcccttcactgc

SEQ ID NO: 3785 - DNA, 1601 bp, Cricetulus griseus
ggtttctgtgtgtccctgaagcttccaggccttcaccatggacttccagcacagacctggaggcaagactgggagtgggggcgtggcctcctcctctgagagcaaccgggaccgcagggaacgcctgcgacagctggccttagaaaccattgacatcaacaaggacccatatttcatgaagaaccatctgggatcgtatgaatgcaaactttgcctgacactgcataacaatgaggggagctacctggctcacacccaagggaagaaacatcagactaacttggctcggcgagctgccaaggaggccaaggaagcccctgcacagccagcacccgagaaggtcaaggtggaggtgaagaagtttgtgaagattggccgccctggctacaaagtgactaagcagagggacacagagatgggccagcagagcctgctgttccagattgactatcctgagattgctgagggcatcatgccacgccaccgcttcatgtctgcctatgagcagaggatagagcccccagaccgccgctggcagtacctactcatggctgctgagccctatgagaccattgccttcaaggtgccaagccgggagattgacaaggctgagggcaaattctggacccactggaaccgagagaccaagcagtttttcttcagttccactttaaaatggaaaagccaccggccccacccagtctcccagctggacccccaggcgtcaagcggcccccacccccactcatgaatggcctgcctcctcgccctccactgccggatgccttgcccccacctccgcctggtggcctgcctttgccccctatgccccccacagggcctactcccgctgggccccctggacctccccagatgcctccaccagctcctggggtccatccaccagccccagtagtccatccacccacatctggggtccatcctccagcccctggggtacacccctcagcccctggggtacacccacaaacatctggggtgcacccaccagcccctggggtgcacccaccagcccctggagtgcacccaccagcccctggggtgcaccctccagcccctggggtgcacccaccagcccctggagtgcacccaccagccccaggtgtgcacccaccagctccaggtgtgcacccaccagctccaggtgtgcacccaccagctccaggggtccaccctcccccatcagctggagttcatcctcaggctccaggagtacatccacctactcctgcagttcaccctcaggcccctggggtgcaccccccagctcctggtatccaccctcaggctcctggggtgcatccccagcctcctcctggggtccatcctgccacccctgtggtccaccctcagcctccaggggttcacccctcaaatcctggtgtgcacccagctcctatgccccccatgctaaggcccccactcccatcagatggccctgggagcatgcctcctcctcccccaggcaactgaacactggccccagcatcccttgctgcctgtgtgtggccttttcctggccagtccttggaaaagttttctgttttgtcctgtcctgagcccattaaacagcctccccc

SEQ ID NO: 3786 - DNA, 1601 bp, Cricetulus griseus
ctgcagcccgggaaagatggcggcgctgagggctctgtgctgcctccgcggcgtcggagcccaggtgctgaggcccgggtctgggatccgactaccgaatcagcccagcagaggtgcccggcaatggcagccagatatagaatgggcacagcagttcggaggagctatcatgtacccctccaaggaaacagcccactggaagcctcctccttttaatgatgtggacattgtgaaggacaaagtggtctccaatttgaccctgaactttgggccccagcacccagcagcccatggagtcctgagactggtgatggagttgagtggagagatggtgcggaagtgtgaccctcacatcgggctcctgcaccggggcactgagaagctcattgagtacaagacctatctgcaggcccttccatactttgaccggttagactatgtgtccatgatgtgtaatgaacaggcctattctctagccgtggagaagctgctaaacatccagcctcctccccgggcacagtggatccgagtgctgtttgcagagatcacacggattttgaaccatatcatggctgtgaccacacatgccctggacattggtgctatgactcctttcttttggatgtttgaagaaagagagaagatgtttgagttctatgagcgggtatctggagcccgaatgcatgctgcttatatccgaccaggaggagtgcaccaggaccttcctcttgggcttctggatgacatttacgagtttactaagaacttttctcttcggattgatgaggtggaggagatgctgaccaacaataggatctggcgaaataggactgtcgatattggggttataacagcagaagatgcacttaactatggattcagtggagtgatgctccgtggctcaggcatccagtgggacctgcggaagacccagccctacgacgtttatgaccaggttgagtttgatgtccctgttggctctcgaggggactgctacgataggtacctatgtcgtgtggaggagatgcgccaggcccttcgaatcattttacagtgtctgaacaagatgcctcccggggagatcaaggttgatgacgccaaagtgtctcctcctaaacgagcagagatgaagacttccatggagtcactaattcatcacttcaagctgtatactgagggctaccaagttcctccaggagccacatatactgccattgaagctcctaagggagagtttggggtatacctggtgtctgatggcagcagccgtccttatcgctgcaagatcaaggctcctggatttgcacacctggctggtttggacaagatgtctaagggacacatgttggcagatgttgtagccatcataggtacccaggatattgtgtttggagaaatagaccgatgaacaaaggcatagcctttgagctcctgtgcctggcagcttcatctgcaaggcctgtccctcataggctatgaggctgtgtgtctccgtgtgtataaacaaacatacatgtacatgctgacttaagctgtacaggctttctgtgcatgtgctagaaaaggagaaattatattaaattagccgccttgcggcccct

SEQ ID NO: 3787 - DNA, 1601 bp, Cricetulus griseus
gttttttctgtggcgggtacgcagttacagccttgatttcctggatctggtaacatggcaaaagatgccagtctaattgaagccaacggagaactaaaggtctttatagaccagaatcttagtcctgggaaaggtgtggtgtctcttgtagctgtccacccatccacagtgaacacacttggaaagcagcttttgccaaaaacctttggacagtccaatgtcaatatcacacagcaagtggtgattggcacgcctcagagacctgcagcatcaaacactattgtggtaggaagcccacatactcccaacactcactttgtgtcccagaaccagccgtctgactcctcaccttggaagaggaacaggaaaggtgagaagaatggcaagggcctccggcatttctctatgaaggtgtgtgagaaggtgcagaggaaagggaccacctcctacaatgaggtggctgatgagctggttgcagagttcagcgctgctgacaaccatatcctaccaaatgaatcagcttatgaccagaagaatatccgtcggcgtgtctatgacgccttaaatgtgctgatggccatgaacatcatctctaaggagaagaaggagatcaagtggattggcctgcccaccaactctgctcaggagtgccagaacttagaggtggagaggcagcggaggctggagaggatcaagcagaagcagtcacagctccaggaactcatcctacagcaaattgccttcaagaacttggtgcaaaggaaccgccaagcagaacagcaggcacgcaggccacctcctcccaactctgtcatccacttgcccttcatcattgtcaacaccagcaggaagaccgtcattgactgcagcatctccaatgacaaatttgagtatctgtttaactttgacaacacgtttgagatccatgatgatattgaggtgctcaaacgcatgggtatggcgtgcggcctggaatcggggaactgttctgctgaagatcttaaggtggccagaagtttggtaccaaaagctctagaaccgtatgtgacagaaatggctcagggatccattggtggagtatttgtcacgacaacaggttctacatccaacggcacaaggctttctgccagtgatttgagcaatggtgcagatgggatgctggccacaagctccaatgggtctcagtacagtggctccagggtagagacccctgtttcctatgtcggggaggacgacgatgatgacgatgactttaatgagaacgatgaggaggattgattgctcaacctgtagacccctctcctcttcaaattcagcttcaggaagaaatgtctagagaagagaaacttttaaagtgggactttctgttctttttggcctgctcccaagaagatacccatgagttgtggagttagatctgcacctccagtaaggatctctctctctctctctctctctctctctctctctctctctttaagtttgaagtttattttgcccctcaacagttgttgctgggtttgctgaagaaactgcactgcacccacaccagtgacaataataaaatgctaccctgcctagacatccagcacccagctggt

SEQ ID NO: 3788 - DNA, 1601 bp, Cricetulus griseus
agtagtttgaaacagaaactggaggcaaaggacaactctgccattgaagagtggaagaagaaaaatgaaattcttgcagacagatgtagccagttggatagtgcattgaatgaagctactagtcgtgtgcgaacacttgaaaataagaataatttactagaaatagaagcgaacgatttgagagaacgattcaatgcagccagcagtgcctccaaaattctgcaggaacgaattgaggaaatgagtcttgtcctgaaaccttgccaaacggagtgaagaaagtgtctgcgagacaagcctgggagaagagtaaatcagttagccttgagcaatgtaagccactgtcagcagcacctcaggggaatgattttgaatatacagcaaaaattaggaccctagctgaaacggagcgattctttgatgaacttacaaaagaaaagaccagattgaggcagcattaagccggatgccttcccctggaggaagaatcactttacagacaagactaaatcaggaagccttggaagaccgtttggaaaggatcaaccgtgaactgggttcagttcgaatgacactcaagaagtttcatgtcttgcgcagctctgcaaacctttgagattggtagccattaaagttaagacacctttgtttgcactgatgtacagttatgcactcagaaaaggcaagctcttttgtacttgtttataagacttcaaactagtagttttacagtcatgttattcttacactttgcttattttatacttcaaatggccacatattttcaagatattttgttatgctcaggaacctcttgtatattttactatttaaaatagctttatcttgccaaggagttatcttcttaggtgcctataattggcttattccaaaaaaggcattaagttccatcaaaacatcttctgtgcttctcagaaagcatatgctttggtttttgaagtgtgtaatagatttaaactatcaaattacttatttgaaaaaagaaattttattctttttttttttttttaatggcatatgagggccttgttacttccagaggactccaccactgagctatattcccaacccagtgatttcttttgaaagttgatgattttgttccagtcactacattgggttgtcatttgtgttaggtggtatatgttgtctttgctctttgataaaatcaagggttttcttggtttttaaattaatttccttaatgttatttatttactggctgactaaaagttgtaaaaggttaacccatcaaatgtgaattccaaaagcattttcatctaatgggtggaaggaaatgatggggcataaatattggcttctttccattatagtttattgttagtttaaccaaaataattttcccctcaaatgtttcatgattagacctccaaggaggatggtccacctggaagaggtgcctgccactgagccttagtttatatggatttacagccatcgagagactagtggaatccttttaacctagaaaagccaggtgcttttccaaatgctgcttgtcctttgaagcctgcacccaaatatgtagtgaaatcagacattttcatgtcttaaatttc

SEQ ID NO: 3789 - DNA, 1601 bp, Cricetulus griseus
tggacttgggaggagaggcgcggagtcaggcagaaaacttgttggaggggagttaagagccgctgcctctcctccactgcgctacgcttaaggggttcccaccggccttgcgatttatttttttatctgctttttatagagagacgtaaatatatatatttttttcttctaaagagaaaattcctgtttcaagagaaaataaggcaacatcaatgaaggagagaagagccagccagaaattatccagtaaatctatcatggatcctaatcagaacgtgaaatgcaagatagtagtagtgggcgacagccagtgtgggaaaacagcgctgcttcacgtcttcgcaaaggactgcttccccgaaaattacgtccctacggtgtttgagaattacacagccagttttgaaatcgacacacaaagaatagagttgagcctgtgggacacttcaggttctccttactatgacaatgtccgtccctctcttacccggattctgatgctgtgctcatttgctttaagtctgatttgcggacagatgtcagtacattggtggagctctcaaatcacaggcagacgcctgtgtcatatgatcagggggcaaatatggccaagcagatcggagcagccacttacatcgaatgctcagctttacagtcagaaaacagcgtcagagacatttttcatgtcgccaccttggcgtgtgtaaataagacaaataaaaacgttaagcggaacaaatcacagagggccacaaagcgaatttcacacatgcccagcagaccagaactttcagcagtcgcaacggacttacggaaggacaaggcgaagagctgcactgtcatgtgaagcttcgctgtctttaatgaggacgcgggaaaaaccaagagcaaaacgaaaaggagtcaaacgaagtgcacagccaaagtcacatggacgcaggctgaggaggcccctgaaagggtacccaggtttggaatcccgtccttaggttcggcatgtagaccgagtggtgagaagtgagtacattgaagagttttgaagtgtgacttagaaaaatatgaccaaaaaacaaaggggagctaacaaatgggctagatagagctagaggaggaggaacgccagtacctctgaagaagaaatccatgccctgaatggtgcttgggatgtgatctaatttcctcctagctcatcattaaaatggaaattgtatccgggacccgtgggattcgagaggaaaacttcacgaggctttgaaatcttgacttcctgtgaaggtcgctgctgagcgagatggtttgaaagcaaggcctctgccggccttacaagatgtgtagaccagtgctgcaaagatcgcatagatcaaatagaaaagagtgttgctttatattccgtctgatggtttcgttcatccttgtgattgttattaacaagtggaaaattgctcaatgtaatattttgtgcgctgtttagaaaagagagtgtgtggttttgttttctttttgccatcattgaataaaaactcgaagtcaaataaaaagtgtcttggtttgatatgatagtgatttaaagaggaagcagatgggaagggggctgcctggaa

SEQ ID NO: 3790 - DNA, 1600 bp, Cricetulus griseus
ggcgcggagagggagggcgggcggggcagtgggagcgccgcgggtctctatatgggcgacggctctgtcgggtctggctgtccggctgtcgcgctcggccgccgcccgctcctatggggtcttctgcaaggggctgactcgcacgctgctcatcttctttgacttggcttggcggctgcgcatcaactttccctacctctacatcgtggcttccatgatgctcaatgtgcgcctgcaggtacattgagatccactgaagccatcctgactaatagacatcacccggctcactgcatcagagggagcaaagcatgaggggtggaagagggaccctaggacttgcctggaaactgtaaagaggtcacaaggaggtgacttggacaaactatcatgtggccttaagacgagaagccagaaggggagccccagctcagcagatgtgccttcctggacaggtcagcctgcagcagatactgatggaaagtcacaggacacagtggtggcatccttgggaatgaaacatgatcagagtgaggctgacctcatgcttcacagtgggtacagagtgcttcagtatctgaaggaatcaatgggaagaaatttggctccagcagctcctatggcattggagatgccataggaagcgactggccaggaagaaggcccagggccacagacagctgtggacagtaccccaaaggagagtcctgggtgtcaggatggccaggccatccaaaactgagggaaatgggtttcctgaagggtgaacaactaagtgctgccactgaggggccggacaccaggttggaactgtctaacccatattttgagctgtgccagctgctatatgcttatgcctattgtgcagttctcccagaagacgagacaagatgtgtattcctccactgttcatacccctgttttcagaacaaaaagtagagtacgaggaaactctccttcagatggtctgcagatagtcatgaggtcactggctctgcaatcttccagattagcaagtctgatgccatagttaaggtacaagcagaacaataaaaatagcagattaattttaaaggttgtcttgcagtttcttttgcattaaatctggcatacgctgcagccattcagttcctgctctgattcctgtgaccagacacacctcgctgattgatgcagagggacattttgagcatgttttcagttgtttcggaaagacgcacttttggaaaagttgcaatattaaatttaggattatcttaaaccacagaagagtttgagactcttttctgctgacagaacacagattacaaatgaagtggtccctcccccccaaccctaggattcatgatctcttttatcttaagattattttctaaagtaattctccatttgtggtttgttgataactttaataaaggtcgcttaaggagtggacatttttaaagctccctacccaagagagagttaaaaaacagcccagggtgggggagagagcaacctgactgtatatgtcattttattgtgtgctaaattactatgccatgggcttattttagtgttttggggaaataaataaaatctgttctttagcaataaaaaa

SEQ ID NO: 3791 - DNA, 1600 bp, Cricetulus griseus
ggggttctcgtctgtctctgaggcgacagcagtttggctcaagacacacttagaagggttttagggagctcctcctcacttttgcaaggactcctgctgctgttcctgctctcccctttggagctgactgtcatctgtaattacataatcctgggggctagcctggcccagggtttcactgaagaccttacccaggatgtccaaaggggcctagagagagtgctggagacccagagtcagctggagcccaagttgcagcagggactccaggggctgtggcactctgtgctctctgcctcctccctcctgccaaagctgctacctgccttacactgcctggccagccttcaagctatcttctggatgtgtactgaccacctgggggacctggccttagttgctgcaaaccctagcactgagcaggctgcatgaagcagcctcaggcgtgtgtccaccatctgtgttagttcaggtgtacacagcgctggggacctgtctccgtaagatgggaaatccacagagagcactgctctacttgactgcagccttgaaggtgggtacaacctgtgcccttccacttctggaggcgtctagaatatatcggcaactaggagacactgcagcagagctggagagtttagagctgctggttgaggccttgagtgccactcatagtggccaagcgcctgctagcaagtcggtgtctacagacagggagggcagaagatgctgcagaacattacttggacctgctagctatgttgctgggtagctcagagccaaggttctccctgcccacctcctctccagggccttgtataccagagttgtgtctggaggctgcagcggcgctgatacaggcaagccgagccccagatgctttgactgtatgtgaggagctgctcagccgaatctcatctctaattcccaagacgtccttgtgggaaaatgccaagaaaaagaactaaagaactgccatactgcccgatctggatctctgctacccacctgcttcagggccaggcctggtcacaactaaaaggctacgaaaaagaagcacttagtgagtttagccagtgtcttgagctcctcttccgggccctgcctgaggacaaagaacaagggcaggctccaactgtgagcagaagtgttggcctgatgtggcactgaaacagcttcaagtagctgctctgcttagtcgtgggctggaatggatagccagtggccaggataccaaagccttaagtgacttcctccttagtgtgcagatatgcccaggcaatagagatggttccttttacctgcttcagactctgaaaagattggaacggaggaatgaggccgctgctttttggagggaggcccaaaatcaaccactacaggaagaagccacttggtctcttccactgtacttagaaacctgtttgagctggatccatccccctaactgtgaagctctccttaaggagtttggaacatctctgctataagtctcgtgattattagcttccttgtttccaggagcttgagctggggctcctgtggaccatctccatggggaggttttttttttttgttttcttctacctttcccactttg

SEQ ID NO: 3792 - DNA, 1600 bp, Cricetulus griseus
  modified_base (1582)..(1582): a, c, t, g, unknown or other
ggagtactgccacaaccatcacatagtccaccgggacctcaagacggagaacctgctgctggacggcaacatggacatcaagctggcagattttggatttgggaatttctacaagccaggagagcccctgtccacgtggtgtgggagccccccatatgcagctcccgaagtcttcgagggaaggagtacgaaggccccagctggacatctggagcctcggcgtggtgctgtatgtcctcgtctgtggctcccttcctttgacggacccaacctgccgacactgagacagagggtgctggagggccggttccgcatcccttcttcatgtctcaagactgtgagacgctgatccgacgcatgctggtggtggaccctgccaagcgcatcaccattgcccagatccgccagcaccgatggatgcaggctgaccacaccctcctgcagcaagatgatcccacctactccatgcagggctacacctccaacctgggcgactacaatgagcaggtgctgggcatcatgcaggcccttggcatcgaccggcagaggacagtggagtccctgcaaaacagcagctacaaccactttgcggccatttactacctcctgctggagcgcctcaaggagcaccgaaggcacccagccctcatcccggcccagccctgcgcctcccagacagccccggctccgaagctcggacctcagcagtctggaggtgcctcaagaaattctcccatgtgaccctttccggccctctctgctgtgcccgcagccccaggccttggctcagtctgtcctgcaggcggagatggactgtgacctccacagctcacttcagcccttattcttccccgtggataccaactgcagtggcgtgttccggcaccgttccgtctcccccaacacgcctgctggacacagctatcagtcctggggctgaacaagatcaaagggttggcacgccaggtgtgccagtcctccatccgagctccccgaggaggcatgagtaccttccacaccccagccccaagctcaggcctgcaaggctgcacggccagcagtcgggaaggcaggaacctgctcgaagaggtgctgcaccagcagaggctgctccagttacagcaccactctgtatatgtatataaataggagacagacactacttattttttctattttgtatacacttttgtgttcctggcttaaacctcccttggtcacattaaaaagtgtccccatctgcaccacgtttgtgttgaaggggccacaggctgcccacctccacacagggtagaggtgtcagtgaaggggtggccccacttgacaccaaaaagtgtccctcctgccagtcgactcaccagatgtgtggatcggggaagcacccagcagcctgggcagccagcccttgtctcccacagttcctgtccggataccacagatcaaaggcctgggcactgctgtgtgtcagaagcgacaagcactttactttctggcagtttctgtgtcttctagtcactgtcaaccctctccaggggacagtaacgtcatggttttaagttcttgttttttggttttttttttntttttttttggtgggtgt

SEQ ID NO: 3793 - DNA, 1600 bp, Cricetulus griseus
gctgagctaggctgggcgcgggcacttccgcgggggagcagccggagagggagccatggggacagtgcacgcccggagtctggagcctcttccatcgagtggacctgactttggagctttgggagaagaagctgagtttgtggaagttgaacctgaggcgaaacaggaaattctggaaaacaaagatgtggtggttcagcatgttcattttgatggacttggacggactaaggatgacatcatcatttgtgaaattgaagatgtttttaaggctaaaaacctcattgaggtaatgcggaaatcacatgaaacccgtgaaaaactgcttcgcctaggaatttttaggcaagtggatgttttgatcgacacatgtcatggtgatgatgcactgccaaatggattagatgtcacctttgaagtgacagagttaaggaggcttactggcagttacaacaccatggttggaaacaatgaaggcagtatggtacttggcctcaaactccccaatctcctaggacgtgcagaaaaagtgacttttcagttttcatatggaaccaaagaaacttcctatggcctgtcattcttcaaaccacagcctggaaacttcgagagaaatttctctgtaaacttatataaagttactgggcagttcccatggagctcactccgggagaccgacagaggagtgtctgctgagtatagttttcccatatggaagaccagtcacaccgtcaaatgggagggtgtgtggcgggaactgggctgcctctcgaggactgcatcatttgctgtgcggaaggaaagcggacactcactgaagtcgtctctctcgcatgccatggtcatcgactctcggaattcatctatcttaccaagaagaggggccttgctcaaagtcaaccaggagctggcgggctatactggaggtgatgtgagcttcatcaaggaagactttgagcttcagctgaataagccactcatgttggattcggtattctccacatctctctggggtggaatgttggtgcccattggtgacaagccatccagcattgctgacaggttttacctgggaggtcccacgagcgtccgaggatttagcatgcacagcattggaccccagagcgaaggagactacctgggaggggaggcatactgggctgggggcctgcacctctacaccccactgcccttccggccaggccagggtggcttcggagaacttttcagaacccactttttcctcaatgcgggcaacttgtgcaacctcaactatggtgagggccccaaagcccacatccggaagctggctgaatgcatccgctggtcctatggagcaggcatcgtcctccggcttggcaacatcgctcggttggagctgaactactgcattcctatgggcgtacagcgaggtgacaggatctgtgatggcgtccagtttggagctgggattcgattcctgtaacttaagttacacccaggtcagcttggatgtgcagcgagaatctcccaggccacaggcctgtttggaggtgacacagttgagtgcttctggatcataatccttatgggaaatcaggtcaataaatttgaaacactc

SEQ ID NO: 3794 - DNA, 1600 bp, Cricetulus griseus
gacctagaagctgagaaagtgagcactgtagctggcgttggtgttcaagggacagatacagaagggggagagagaggcgagaagcagcccatcagctccccttgggatgtcgtggttggaacctcagattcagaagtccaaagaaatgacatcctgtggatagccatggccgggactcatcagatatgggctctcctcctggactctggcacactgccaaagaaaagtgaactgaaaaaaggaacctgccttcgttttgctgggagtggaaatgaagagaaccgaaacaatgcctatcctcacaaggcggggtttgcccaaccctcaggtctctctctggcctcagaagacccctggagctgcctctttgtagcagacagtgagagcagcacagtgagaagcgtctcactcaaagatggagccgtgaagcaccttgtaggaggagagcgggaccccatgaatttatttgcttttggtgatgctgatggagtcggcatcattgcgaagcttcagcatccacttggggttgcatgggaccagaagaggagtctgctgtatgtcgcagactcgtacaaccacaagattaaagttgtagatccaaaaacaaaactctgcacaacactagccgggaccggagttgcaaatgatgttgtttgcagttttgcggagtcggcctttaatgagcctggaggcttatgtgtcggtgacagtggccggctgctgtatgtagcagacactaataatcaccagatcaaagtgatggacctggaagcaagaacagtctctgtgctcccgatcctgaagcctggcagtgttgtggtagatggccccttcgctacagagaagcagaagacagcgcccaaagtacccaagtctgcccccaacattcagctcccccctgtgcctgtgtgtcctggccagactctgcaactcaagctcaagctggaccttccaccaggggcaaagctcacagaaggtgtggccagctgctggttcctgaccgctgaaggcaatgagtggcttcttcaggaacagatcccatctggaaacatagagaatatttccaatcaacccacaatttcacttcagattcctgctgagtgcttgtcacttgaagctgtgatatccgtcagcgtgtttctttactactgtagtgcagacagcagtgcctgcatgatgaaggcaatcttgttccggcaacctttgcacataaccgatacccagccaggctgtggagctcctgtagagctcacacatgtattctagaaatttctaggggcatgcagacctactcttaactatttctcaaatgaacacattcctagcagacaatgcccacgtccccagagacatgctgacttttgaggtgggggtcaggccatgttgctgtgtgagatagtttattgtaatggtagaacttgatataagtgagtattgtgttgttttggaaatttatacttcagttttaagagttaaatacagatttattgagtttgggttttttgttattgttttggttcccatatttagaatttaaattatgatctttaattctgatattttaaaagatcacatgtaaaccttcaaattgctgttgtca

SEQ ID NO: 3795 - DNA, 1599 bp, Cricetulus griseus
cgcggcttttcgctgacgggagctcgaagatggcggcgtccgcagtctgtcgggctgcctgctctgggacgcaagcgctgcttcgcagccgccgcacgccggccctgctgcggtcacccgccctgcggggtaccgccaccttcgcccaggccctccagagcgtgccggagacccaggtcagcgtgctggacaacgggctgcgtgtggcctcggagcggtcctcccatcccacctgcacggtgggagtgtggattgatgctggcagccgtcacgagactgagaagaacaatggggcaggctactttttggaacatctggctttcaagggaacaaagaatcggcctggcagtgccttagagaaggaggtagagagtatgggggctcatcttaatgcctacagcactcgggagcatactgcttacctcatcaaggcactttccaaggacctgccaaaagttgtggagctcctggcagatattgtgcagaactgcagtctggaagactcccagatcgagaagcaacgagacgtgatcctgcgggagatgcaggaaaatgatgcatctatgcagaatgtggtctttgattacctgcatgccacggcattccagggcacacctctgggccaggctgtagaggggcccagtgagaacgtcaggaagctgtcgcgagcagacttgactgattacctcaacagacattacaaagctcctcgaatggtgctggctgccgctggaggggtggaacaccagcggctgctagaacttgcccagaagcacttcagcagcgtctctcgagagtatgaagaggatgctgtacctggtgtaactccatgtcgcttcactggcagtgagatccgtcatcgtgatgatgccctgcctttagcccacgtggccattgctgtagaaggacctggctggtgtaacccggacaatgtggccctccaagtggccaatgccatcattggccactatgactgcacttatggtggaggagtgaacatgtccagccctctggcttccgttgctgtgtctaacaagctttgccagagtttccaaaccttcaacatctcctactctgagactgggctgctaggtgcacactttgtatgtgatggcatgagcatcgatgacatggtcttcttcctgcaaggccagtggatgcgcctgtgcaccagtgccacagagagtgaagtgacccggggcaaaaacatcctcagaaatgccttggtgtctcatctggatggcaccacccctgtgtgtgaagacattggtcgcagcctcctgacttacggccgccgcatccctctggctgagtgggagactcggattgcgaaggtggatgcccaaatgctgcgtgaggtttgctccaagtacttctatgaccagtgtccagcagtggctggatatggccccattgagcagctcccagactacaaccggatccgtagcggcatgttctggctgcgcttctaggcaggaagtctgtgctggcaggcaagagggtggggccagggaccctgggtcctctgccacaaacataccactcctgctgctcagacgtatgcagccaattaccactaataaagtcctattgagaact

SEQ ID NO: 3796 - DNA, 1599 bp, Cricetulus griseus
atgtgttcagcctgtctcctggggaaaagaaccagctgataacagatatcatcgacattgtcaaggatcctgtgcctcccagtgagtataagacagaagaagaccccaagctattccaatcagtcaagactcatcgggggcctctctctgacaactggatcgaggagtacaagaagcggctccttcccatcatgtgtgcctacaagctctgcaaggtggagttccgatactggggcagtccaagatagaaagattcatacatgacaccggcctgcggcgagtgatggtgcgggcccaccggcaggcctggtgctggcaggatgagtggtatggactgaacatagagaacatccgagaactggaaagggaagtacagcttatgctgtcccgaaaaatggcccagtttgcagaggaaggaggagcgtcagagctctgcaaggacatcaccactcaggaccaggcttctggagcaacctctgagcccagcagcagcaatggggagtccatggggcggggtctgaagaagcagtggtccacctcctccaagtcctcaaggtcctctaagcggggagccagcccctccgacacagcatctcagagtggaggatgcagagtattgccagggactctgacgaagactcagatgaagagttcttcgatgcacaagaggacctgtgcaacgaggaagtattccccaaggacatcactaagtggaactcaaatgacctcatggacaaatggagaatccagagccgctactggccgacaatcactgccccactaggggtcccagtggccagtgcctcctccctcaaccacacccgtcttgcctcagcctaggtgaccagccattgggagaagcacctggaagcctcaggccacctgcaataaaggccagggaggccctggggtcagtgggcttggtctctcccccctgggcagcccactgtggctctgaatgcccctgcctgcccagccgccagccatgccaaggacaacagcaatagtcccctggggctctcccagggcctttagccatagatggtgagacgggcagcctccccccaaacctcgctcaagtctgctctctgcttcccttaagattccttttggctaattctcttaaggaagccccactttacaaagactgagaggaaggtcaaagtcccttaaaaataccaaaaaatgtttacagtgtcaggtgctgagctgcagggctcaggcctggccattcgtaaccaaagggtgaggcagaccttgtcacctgccacccaccccaggcctgttagaatagaagccttagtcactccctccacatccacagtcctaggactgagcctcaatgccatccagcaccaaccacctgccttctctttgatttctaaaggaggattcagcaaagaacccaaccccatccccttcctggttctgtgtgagctgcccaccaccccacccctgtcgatatcttcacatctcagccccctcccgtgtcgtccttgtaccatctgtttctctggacgatgtgtgaaccgtgcccctgaccccaccccatgctgtctaaagaatggagaggctacaaaaaaaaaaaaaaaaaaaaaa

SEQ ID NO: 3797 - DNA, 1599 bp, Cricetulus griseus
  modified_base (307)..(307): a, c, t, g, unknown or other
  modified_base (350)..(350): a, c, t, g, unknown or other
ggagagagcgcagccccgacagccgagatttctgctgtgggaattaccagtaacaattcactatgggggatattctggcccatgaatctgaattacttggactggtgaaagagtatttggattttgtggaatttgaagacaccgtgaagacattttcaaaagaatgcaaagtaaaaggaaagccattatctaaaactgtaggtggatcaataaagaaggactccaagtcactgataatccggaaggatctggtggcagcatttgacagtggagaccagaagttgttcttcgatctgtgggagggacnccttccagctccatccgagacaacagtcagtggcaagatgatnacccctcgagtacctgcagagcgtctgcgtcgcctcttcagtaaccagatgcggcagagcctggctcacagtgtggacttcacaaggcctgggacggcctcaaccatgttacgagcctctttggtacctgagaagttgaaggatgtcccattactgccttccctggattatgagaaactgaagaaggatttgatttggggcagtgaccgcttgaaagccttcttgttgcaggctctgcgctggcgcttgaccacatcccatccaggagagcagagggagacagtcctgcaagcctatatcagcaatgacctcttggattgtcacagccacaaccagaggatcgtgctgcagctgctgcactccaagagcgaggctgtgcggcagtacatggccaggctcatcaatgccctggcatccctggctgaaggtcgactctatcttgcccagaacacaaaggtgctgcggatgctggaaggaaggctgaaggaggaagacaaggatgtcatcactcgtgagaatgtccttggggccttgcagaagttcagcctcaggcgcccactgcagacagcaatgattcgagatggcctcatcttctggttgatcgaccttctgaaggaccccgactgcctgtctgactacacattggagtactctgtggctttgctcatgaacctctgcctccgcagtgcaggaaagaacatgtgtgctaaagtggcagggctcgtgctgaaagtcctttcagatctccttggccatgaaaaccatgagatacagccgtatgtgaatggagccctgtacagcatcctttccatcccatccatccgtgaagaggccagagccatgggaatggaggatatcctgcgatgcttcatcaaagaaggcaatgccgaaatgatccgccagatagagttcatcatcaagcagctgaattctgaagacttactggatggtgttcttgaatccgatgatgatgaagatgaagatgatgaagaggatcatgacatcatggaagctgacctggacaaggaggaactgattcagccccagcttggagagctctcaggcgagaagcttctaaccacagagtacttgggaatcatgaccaacactgggaaggcacgggcggaaagggccggccaggtgtgcagtggagtggggatggagccctgcgtcggcccgtcacccctggtcggccacagggacggggtgcccagtgtaagttcgggatacagaatcgggagtctatttt

SEQ ID NO: 3798 - DNA, 1599 bp, Cricetulus griseus
tttgtggtagcgcagctatgcagacttgaaaatccaagtagcactaaatttattatttcatacttgtacaataagcttcccaggagacgtgtcaacatttttggtgaagagcttgaaagacttcttaagaagaagtatgaagggcactggtaccctgaaaagccatacaaaggatcagggtttagatgcatacatgtcggggagaaagtggacccagtgattgaacaagcatccaaagagagtggtttggacattgatgatgttcgaggcaatctgccacaggatcttagcgtttggatcgacccgtttgaggtttcctaccaaattggtgaaaaaggaccagtgaaggtgctctatgtggatgacaataatgagaatggatgcgagttggacaaggagatcaaaaacagctttaacccagaggcccaggttttcatgcccataagtgacccggcctcctcagtgtccagctccccatcacctcccttcggtcactctgctgctgtcagccctaccttcatgccccggtccactcagcctttaacctttaccactgccacttttgctgccaccaagtttggctctaccaaaatgaagaatagcgggcgtagcagcaaggtagcgcgtacttctccaatcaacctcggcctgaatgtaatgtgaacgacctcctgaagcagaaagccatctcttcctccatgcactctctgtatgggctgggcctgggcagccagcagcagccacagcagccacagcagcagcagccgccatcccagccgccgcctccaccacctccacagcagcagcagcagcagcagcagccagcagcagcagcagcagcagcagcaaacctctgctctttctcccaatgccaaggccccttaacctccaatcctctccagtacagtaatgcctttgatgtgtttgcggcctacggaggcctcaacgagaagtctttcgtagatggcttgaattttagcttaaataacatgcagtattctaaccagcaattccagcctgttatggctaactaaaaacaaaaaacaaaaagaagaacatgtatcgtacaagttaaaatgcatcggcccaaggggtaattttttttttttgtcctccttgagtattttttttttaaagcttatagtaaggatacattcaagcttggttacaaaataaaaacatgcatcatttttcatttgccaaccaagcacaaagttattttatactgactgtatattttaaagtatactctcagatatggcctcttacagtatttaagatatagcaaggacatggctgaattttttttttataaaaaattggcactaataagtgggtttattggtcttttctaattgtataatttaatttagtacaaagtttgtaaaatatcagaggatatatatattgtttctacgacatggtattgcatttctatctttttactacagtgatctgtgacagcagcagctttcatgttgtatttttttttactgaaattgtaaaaatatccatcttaaagacatcaactattctgaaattgtgtacaggatttttgctatatattatggaagaaaatgtaatcgtaaatattaattt

SEQ ID NO: 3799 - DNA, 1598 bp, Cricetulus griseus
cgggatattgggggagcggccggccgagtagcgggtgtagaaccacgcagcgactgccttctccaccaccatggggtcccagctgagcacgttgagccgcgtggtgctctctcccgtctggttcttctatagcctcttcatgaagctgtttcagcgttcttcaccggccatcaccctcgagaaccctgacatcaagtacccactgcggctcatcgacaaggagattatcagtcatgacacacggcgcttccgattcgccctgccttcaccccagcacatcttgggccttcccattggccagcacatctacctctcaagtaggattgatgggaacttggtcattcggccctacacccccgtctctagcgatgatgacaagggcttcgtggacttggtggtcaaggtttacttcaaggatacccatcccaagtttcctgctggagggaagatgtcccagtacctggaaaacatgaatattggagacaccattgaattccggggccccaatgggctgctggtctaccagggcaaagggaaattcgccatccgtgcagacaagaagtccaaccctgttgtcaggacagtgaagtctgtaggcatgattgcaggagggacaggtatcaccccaatgctacaagtgatccgtgctgtcatgaaggacccaaatgaccacactgtgtgctacctgctctttgccaaccagtctgagaaagacatcctgcttcggcctgagctagaggaactgaggaacgaacattccgctcgcttcaagctctggtacacagtggacaaagcacctgatgtctggaactacagccagggcttcgtgaacgaggagatgatcagggaccatcttccaccgcctggggaggagccactgatactgatgtgtggacctccacccatgatccagtttgcctgtttgccaaacctggagcgtgtgggccaccccaaggatcgatgcttcaccttctgatggctggatgctggccactcccatgcctgctgctcatgtattcaccacagccacctgtccacccttttcttctcaccactgtccctcactctaacataagttcacatccatactggggcctgggttcagcctggcctgcccagccctggtcatccagctgtactggcccctgaggggcctttgggatcaggactttgtatcaggtgacccctgttaaccactttctgtataggctcctgtttggcactaattagccattatcagagatgtcccgtgacacacacacacacacacatacacacacacacacacacacacacacagagagagggagagagaggagagagaggagagagagagaggagagagagagagggagggagtaggagaggagaggctggcttgtttctctgtcccaaacctcgctcctgcctggtcccccgcctgggggagggcttctgagcagtgcctcttgtgggagacagaccccgtgcccggcactgcctccagcaggtgatgttgtatcctgcacactggcttttttagtcatttatgggcagaaaagagttgaagtaaaactttgctaatactagaaaaaaaaaaaaaaaaaaaaaaaaaaaaa

SEQ ID NO: 3800 - DNA, 1598 bp, Cricetulus griseus
  modified_base (706)..(706): a, c, t, g, unknown or other
  modified_base (776)..(776): a, c, t, g, unknown or other
agtgtccgaagcattgggtccgtctgcttcttaaagactggcgtccgcgatggcccaaataagggaaagagcttctacgtgtgccggacgaacacatgcgacttcgtgctggctaaagatattcctgtttctcattgtttattgcatgaggactccgtggtagagcttcagggcttgtttttaccacagggcaagaaagaatggagggtctgccctgctcgctgaatccatcactggaagaacgaggtaagagaaacgaagtgaacaagcaacaaactcagaatctatctctaccatggacccaacagaaatcggcaagcaaaagtactctctacatatgacatcgtgattactacttacagccttctggccaaggagattcctacaatgaaacaagagggagaggtcccaggtgcaaatctcagtgtggagggcatctcagcacctttgcttcaagtagtctgggctcgaatcatattggatgaagctcataatgtgaagaatcctcgagtccagacatccattgctgtgtgtaagctacaagctcaggcccggtgggctgtcactggaacccccattcagaacaacttgttggatatgtattcactaatgaagtttctccgatgctccccatttgatgagttcaagtctttggaagagtcaggttgacaatcttgccaggtcaaggtcagctcttcagtcctanctaaagagacacgaaggcagaggcagccaccctggaaaagccctgataatccattcactagagtggcacnggagtttggctccagtgtgccccggtgctccgctgcagcagacctccctgagacccagcaccgtccacgtcctgtcccagcttctgcgactccgccagtgctgctgccacctttccctactgaagtcggccctagacccgacagagctggagagtgaaggcctcgtcctgtcattggaagaacagctcagtgctctgactttgtccaaactcgacttctcggagccatcacccaccgtttgtcttaatggcacgtgcttcaaggtggagctttttgacaacacacgaaagagcactaaggtgtcttctctgctggcagaactggaggcaatccgaaaaggcccagggtcccaaaagagtgtcattgtctctcagtggaccagcatgctgcaagtggtagcactgcacctcaagaagcacggactgacttactccaccattgatggctctgtcaatcccaaacagagaatggatttggtggaggcatttaaccactcccgggggcctcaggttatgctaatctccctcttggctggcggtgttggactcaatctgactggagggaaccaccttttccttctggacatgcactggaacccctcacttgaagaccaagcttgtgaccggatttacagagtaggacaggagaaagatgtcgttgtacacaggttcgtctgtgaggggacagtggaagagaagatcttacagctccaagaaaaaaagaaagacttggccaaaacaggtcctttcagggtctggaggatctgttaccaagctcacactggctgacctcaaggtcctctttggcatctagcttcctctg

SEQ ID NO: 3801 - DNA, 1598 bp, Cricetulus griseus
acaagtcatttattcaatacccagcatgcacgattggctcctccatccctggctcagcagcagggcttccaaccaggcctctctcagccaacatccgttcagcagattccaatccctatctatgccccactgcaaggtcagcatcaagcccagctgagtttgggggccggacctgctgtttcccaggctcaagaattattcagtttcttcaattcaaccttatagatcgcaaccagcctttatgcaaagcagtctatcccagccctctgtggttctttctggtacagctatcccaacttcccagctgtccagcaccaggaacttgccaaggcttgtgttctttggatgtgtctatggcatttctgggcttgaaagtaaaatgatgctaactggtgctgggtagaggtagccttattttttatttacggtcagcttgttatttttgtaacatggtgatttggttgaacacaataaagtacagtaataactgatctccccttcttcctggatgagtgagcagatgattaaatggtgatgtcagcattcttgagtatattcaaatgagcaacatttggcttctgcttctgtttaaatgatgctgtgttttgattgtggtccgaagctttgaagcactacttggcatctccttccttccttggaggtctcaccattcaaacataacatttgatgacatgttggtaaggtgaggtcttgcttgtctccactaggttgtcttcatatgaatccagcggttataggactttgttttaggggcattctttcatttatttaataacggtttttagctgatgttcatggagagaatgaatcctcagaagtgtgccgctagtgaaaggaaatcctatctaagagtgtgtttctttacagagctgtgtcataccatcctttgggccctctgctggaaaagtagaatcaagtctcaaataatgcctttcaaattgtatcctctagtattatagatgtaggacagtactgtgtcatacctctgtgaatgtaaaatagcttgtacctgctttatgatacatagtagtgaccgtgctttatcagagctgtttttaatgatgttgctcagaatggtttccttccagatgatgattgagaagctaatttaaaaaaaaaaaaaaaaaaaatggtgccaggtaccacaagagtaacagaactgtgctgttttctgggattttgttttttactttttttttttttttttttttttgaaaagagtgtgctggatgtctctacaattttgttcaaatgactgcagaacctggaaaagctgttgctgctattgatgcataacatactgctattattggtctttttatataaatataaatatatatatatacatatataatttgaatttttggaaactttagctgtgctgtcaactttggaaaaaagtatcccagtttaccgtgttgagttggcattgtacagaaattaacagccatattggtctagaaatgttgaacttaatttttttccatttgtacaggggtaacgcactgtattaaatatgtaaggtcttatctacgtgggtttgattacaaaaactaataaagtattctctaaataat

SEQ ID NO: 3802 - DNA, 1597 bp, Cricetulus griseus
ctctggcccttcgcatggctgcaagtagcaggtctcactgaagagcagcttcaggaaccaattactggatggaggaagactgtatgccacaacggggttcttggtctgagccgccttgctctttttccttgcttggcttccttcggatccgtgttcggggacagagggcctcacgcctggaagcccctgtcctggttgctgccccccattcaactttctttgacccaattgttctgctgccctgtgacctacccaaggttgtgtctcgagctgagaatctttcggtgcctgtcattggagcccttcttcgattcaatcaagccatcctagtatcaaggcatgacccagcctctcggcgcagagtggtcgaagaggtccgaaggagggctacctcaggaggcaagtggcctcaggtactattttttcctgaaggcacctgttctaacaagaaggctctgctgaagttcaaaccaggagccttcatcgcaggggtgcctgtgcagcctgtcctcatccgataccccaacagtctggacactaccagctgggcatggaggggccctggcgtactcaaagttctgtggctcacagcctctcagccctgcagcatcgtggaagtggagttcctgccagtctatcagcccagccccgaggagagtaaggaccccaccctttatgccaacaatgtgcagagagtcatggcacaggccctgggcattccagccaccgaatgtgagtttgtggggagcttacctgtgattgtggtgggccagctgaaagttgctttggagccacggctctgggaactgggaaaggtgctacagaaggctgggctgtcccctggctacatggacatgggggcagagccaggccggagtcgaatgatcagccaagaggcatttgcccagcagctacagctctcagatcctcagacagtggctggagccttcagttacttccagcaggatgccaagggtttggtggacttccgaaatgtggcccttgcactagcagccctggatggtggcagaagcctggaggagctgatgtgcctggcctttgagctctttgctgaagaacaggcagaaggacctgaccgcctgctgtacaaagacgggttcagcaccatcctgcacctgttgctaggttcaccccgccctgctgccacgactttgcatgccgagctttgccagcctggatgcagccaaggcctctccctctgtgagttccagaacttctccctccatgaccctctgtatggaaagcttttcagtacctacctacgccccccacacaagcctcgaagcaactcccagataccaaatgcctcatccccaagcagccccactgccctggccaacgggactgtgcaagcccccaagcagaaggatgactgagcacctcagcacccccccccactcgattccagccctgctctcaggacagcgccagaggcctaccctacacctcaaccccgtgtctgcttctgtttgattttttttttcatttgttgtgtttttttttttttaaatttttgtttggtggggttttttgtaaaagactattttatatataaatataaatatatatatatata

SEQ ID NO: 3803 - DNA, 1597 bp, Cricetulus griseus
agaaggacagtcaaggttcagggtcagaaagtctgtcaaattctggaaccagttctgcagaaatagatagctcccagattctaaccaaccctcttcctccagtgtcctcccctcctcctgcttctaaaatcaaaagaagtttcagatggggaaaatctaagagcaagatctatgcaccttcttgatatcaagagcctgtaagaactcaacactggctaattacttatactggtacgtgatcgtggagtgtgaagatcaggacacacagcagagagatccgaagactcatgagatgtacctgagtgtcatgaggagattcagccaagccttgcttaagggtgacaagtcagtcagagtcatgcgctccctgctggcggcacagcagacttttgtggaccggctggtgcatctgatgaaggcagtacaacgagagagtggaaatcgcaagaaaaagaatgagaggcttcaagcattgcttggagacaatgaaaaaatgaatttgtcagatgtggagctgatcccattgccattagagccacaggtgaaaataagaggaatcataccagagacagccacactgtttaagagtgctcttatgcctgcacagctgttctttaagacagaagatggaggcaaatacccagttatttttaagcatggagacgacttgcgtcaagatcagcttattcttcagatcatctctctcatggacaagctgctacggaaagaaaatctggatttgaaattgacaccttacaaggtgttagccaccagtacaaaacatggattcatgcaattcatccagtcagttcctgttgcagaagttcttgacacggagggaagcatacagaactttttcaggaaatatgccccaagcgagactggacccaatggcatcagtgccgaggtcatggacacttacgtcaaaagctgtgctggctactgtgtgattacgtacattcttggagttggagaccggcacctggataaccttctgttaacaaaaacaggcaaactcttccacatagattttggatatatcttgggccgagatccaaagcctcttcctcctccaatgaagttgaataaagagatggtagaaggaatgggtggcacacagagcgagcagtaccaagagttccgaaagcagtgctatacagcctttctccacctgcgaaggtattcaaatctgattttgaacttgttctccttgatggttgatgcaaacattccagatattgctcttgaaccagataaaactgtaaaaaaggttcaggacaagttccgtttggacctgtcagatgaggaggctgtgcactacatgcagagtctgattgacgagagtgtccatgcactgtttgctgcagtggtggagcagatccataagtttgcccagtactggagaaaatgaaagtggatttggctcttcgtgatacctggcccagtaagaaaacacatgagaagccactgttgtttatgctaaagatgtcagagaaatgaccaaggaagagaaggtgtccagaagttacattgtggcaaagttttgtctccttggatgccagtgcttaaatctcggcaaagaaggtttgtttaaagc

SEQ ID NO: 3804 - DNA, 1596 bp, Cricetulus griseus
cgtcctgcgtggccccaggccttgaccgctccgcggagctggacacccctgctttcctggcggcggacgagcctgcgcgctcgcccggacgtgaagaaggggagcagggagagggccacctgggaactgaatggtggctggaagtgacgtctctgctcttggagagggagccggctcaacttggatcttccaaagtttgcttcctgggctatgggagatgtgagcgagttaaaatgcaaataacaccggaaactccaggaaggatccccgttttaaatccctttaaaagtcctagtgattattctaatctccataaacaaacacttgccagtccttctgtctttaaatccacaaagctaccaactccagggaaatttaggtggtctatcgatcaactggctataatgaatcctgtagaaatagacccagaggagattcatcgtcaggcctcctacttaagtcattctcgaacagataaagatgtggaagacaaaagacaaaaagccattgaagagtttttcactaaagatgtcatcgtaccctctccctggactgagcatgaggggaagcagcctttagagcttcatcccagccagtgccttaatagcaacagtgactctcccttccctctgagaaatgcaatgctgcttgtcagactctgctgtctcttcctgtggattttaatttggaagccatattgggagactattttagagctgatgactccacggaccaatctcctgggaacctcagttcctcatctctaagaaggaagctgttttggatgtgaatgggagcatctcagactccttgccttcagcttctcctggaagtcctccgagtagtgctggagaatctcttgagggacagttttcttctagccccattcaaagtaatgcaaaaaaatacagtttgggagagtataactagcccacccgctatttctttacccactttctcaccaattgcacttcaagtaggaaagacaccactctcagaacagaggaagtttacatttcattctcctgaagcttcatatggaacaagttctaccggaatcaccaatccaagcatcaggagtccgtacatagatggctgctcaccaattagaaactggtctcctgggagactcagaggtggtcctcagtacctgtcctcactgatgcggatccctttcaccccttgagactcaaggtgaagatgaagatgtggcgagtctttagttgtcactgccatgtctgtcacacaaagtcagtctagtgcctctgagaaagagctagtgctgttggaagacgctgaaagcaagagggaaaatgacactgtggatatgttcgatcctatagacacagttgatgagagcacttggataaaggagcccgtggataatgggaatttacccatgactgattttgtcagtgggattgccttcagtattgaaaactctcatatgtgcatgtcacctcttgcagaaagcagtattctgccctgtgaaagcagcactatccagatggacagtggctataacacgcagacttgtggaagcaatatcactgatattgctgggacagaaagctactgcaaagaaaatgtcacaca

SEQ ID NO: 3805 - DNA, 1596 bp, Cricetulus griseus
tctgtttcagaaactcaacacgtcctatccaaagatgactttctgaagttgatgcttcctgatagccccttagtggaggagggaagacggaagttttcgttctatgggaacctgtctccacggaggtcattgtaccgaacattgtccgatgagagtgtatgcagcaaccggaggggctcttcctttgccagttctcgaagctccatcctggaccaggccctgcccaacgacattctattcagcaccactccaccctaccacagcacactgcctccaagaacccaccctgctcccaacatgggaagcctacggaatgagttctggttctccgacgggtccttatcggataagtccaagtgtgcagatcctggcctgatgccactaccagacacggccacggggttagattggtcccaccttgtggatgctgcacgagcgtttgaagagaccagagggtggcatctttctgtaccctgactgacctccagcatggacaagacctggaaggggctccagagctgtccctgtgtgtggatcccaccggtggcaagcagttcatggatgcacctggggagcgatcaccctccacactaactgggaaagtcaaccagctagaactgattcttcgacaacttcagaccgaccttcgaaaggagaagcaggacaaggcagtgctgcaggctgaggtccagcacctgaggcaagacaacatgcggctgcaggaagaatcgcagactgccaccgcccagctgcgcaagttcaccgagtggttcttcagcaccattgacaagaaagcttaaccagctagctagctgctcctcatccggggaccagtgggctggcctgcctgcctgcctgcctgcctgcctaggtgacctacagagatgctaagtctgtgtacaatagcggggctgtaggattgtaaaaaatcaatacggaggcagataatcagacatgtactttaatgttaaaggtgctctatttttttggatgtacagtagttttatttccacagccacactatcatagcaataagaagggtgcagtaagtagttggcagagctctgtcagagagaagccctgaagtttaacactaactcaaacgctgttaccgtagagacgtatttatttgcaggaacaaacggtgcctgaatattaacagtgttctgatttttttaagagatgcatatgccttgtaaatggctgaacctgttggtagtcacttcaatgagtagtttgctttcttgtagttactctgctgaagacagagtcaatctgccttccccactagagtcccctgatgctgagtgcccgagggatcctgtgtacaactccagatttttgtttatctttgtacagaaactctgataaagtgtcttgtatttaacattcttatttaagcttatttaaccctaacttgttaattttatatgatttggtttcacctgcactgtatggagggaggcaggcaggcaggcagtgactgagctcacccggaacagactggagcagggtgggcgaggcgggggactggatgctgctggctaacacggtttgtttgtattgtcttttccatttttaactgttatatttgag

SEQ ID NO: 3806 - DNA, 1595 bp, Cricetulus griseus
gagagtcctcgggaagcgaccccgccgccgagccagcgcggacccggagagcttcagtggagagagcaacaccggggtgcacactcggcaccatggcccagacgcccgctttcaacaagcccaaagtagagctgcacgtccacctggatggggccatcaagctggaaaccatcttatactttggcaagaagagaggcatcgccctcccagcagacacagtggaggggctgcgcagcgtcatcggcatggacaagcccctctcgcttccgggcttcctggccaagtttgattactacatgcctgttatcgcgggctgcagggaggccatcaaaaggatcgcctacgagtttgtggagatgaaggcaaaggagggtgtggtgtatgtggaagtacgctacagcccacacctgctggccaattccaaagtggacccaatcccctggaaccagaccgaaggggatgtcacccctgacgaggttgtggatcttgtgaaccagggcctgcaggagggagagcaagaattcggggtcaaggtccggtccatactgtgctgtatgcgccaccaacccaactggtcccctgaggtgttggagctgtgtaagaagtaccatcagaagactgtggtgggcatcgacctggctggtgatgagaccatcgaaggaagtagcctcttcccaggacatgtgcaagcctatgagggagctgtgaaaagtggcattcaccgtaccgtccatgctggggaggtgggctctgctgaggttgtgcaacaggctgtggatgtactcaagacaaacagggttggacatggctaccacacactggaggaccaggccctctataagaggctactacaagaaaacatgcactttgaggtctgcccctggtccagctatctcacaggcgcctgggatcccaaaacggagcatgcagttgttcgcttcaagaaagaccaggccaactactcactcaacacagacgaccctctcatcttcaagtccaccctggacactgactaccagatgaccaaacgggacatgggctttactgaggaagaattcaagcgactgaacatcaatgcagcaaagtcaagcttcctccctgaggaagagaagaaggagattctggaacaactctacaaagcataccaatggccaccgcaggctgaaggagggcaggtcccctgaagatggcaaggccacttctctgagcctcagcctgtggatggaatctgcacaactctgtgacactcttaccttcattccttccagaccctggagtggccaggtctgtcctctgatcaggtgttctggctagggcccaggggccttgccaatcgtgggtatgaatcaggaaccttcctttaaggctaaaaatctgttgttcaataaagcagctggtgactggtatcttgcagcacacggtgaatgtggtcatggggccgctggcttgggtgggtaagaatgaagagtcttggggccccatgctggacactgggctgggaggagccagggacattccctcccgaagtgacatttttccagaggtgtttgagcacatgctcctgaactcttggcttctttaatcagagtcctttg

SEQ ID NO: 3807 - DNA, 1595 bp, Cricetulus griseus
ggcggccctgcggacgggcgcgccatggacttcaacatgaagaagctggcgtcggacgcgggcatcttcttcacccgggcggtgcagttcacagaggagaaattcggccaagcagagaagactgagcttgacgctcactttgaaaacctcctggctcgggcagacagcaccaagaactggacagagcggatcctgaggcagactgaggtgctgctgcagcccaaccccagtgctcgagtggaagagttcctgtatgagaagctggacagaaaggtgccctcgagggtcaccaatggggagctgctggctcagtacatggccgaagcagccagcgagctggggcccagtaccccctatgggaaaacactaatcaaggtgtcagaagctgagaagcgtctgggagcagcagagcgggacttcatccacactgcctccctcagcttcctcactcccttgcgcaacttcctggaaggggactggaaaacgatttcgaaggagaggcggctcctgcagaaccggcgccttgacctggacgcctgcaaagcacggctaaagaaggccaaggcagcagaagccaaagccacgacggtgcctgactttcaggagactagacctcgtaattacattctctcggccagcgcctctgcgctttggaacgatgaagtagacaaggctgagcaagagcttcgagtggcccagacagagtttgaccggcaggcagaagtgactcgtcttctgctggagggtatcagcagcacccatgtgaaccacctacgctgcctccatgaattcgtcaagtctcagacaacctactatgcacagtgctaccgacacatgctggatctgcagaaacaactaggcagatttccaggcacctttgtgggcactacagaacctgcctccccacccctgagcagcacttcacccaccaccactgcagccaccatgcctgtggtacccacaggggctggtttgtcccctccagaagaggcagcactctgtttagaggaggtggctcccccagccagtgggacccgcaaagcccgggtgctctatgactacgaggcagctgacagcagcgagctggccctgttggctgatgagctcatcactgtctacagcttgcctggcatggaccctgactggctcattggtgagagaggcaacaagaagggcaaagtccctgtcacctacttggaacttctcagctaagcagcccctttccaggccctgccacttaccttgtctgctggagacatacctttttaggataggggagctaaccctgttctggctgtggctctgtcacccaattatgaaggacctacacaacagaatggctccaggcccctctgctagccctgcttctgatctgcatccccgcatactccaggtttcccagctcccttaaggcaggagggatacaacatttggtaccacaattggggtgctgtcctccctccttctatcacagctctggctgagtgcagtggctgcagccatcactcatgcaatttctaactggcattctttcttctgcctgtctgcttgctctctggcaaataaatggtttgtgtgaaaaaaaaaaaaaaaaa

SEQ ID NO: 3808 - DNA, 1594 bp, Cricetulus griseus
ggatgtggtgccataagttgttgcacctacaaagcagtctccagaagctgatgaagagaggatacataggtcaagctcttcatctgtccaactttaaaagtttattttcattatccatccattggtgccatacagcttccaagtgtgtgaatttgtacttggcaccaacatgaagatcatttggaaatacaatatgctagcattgtgatgcgatttgattatgtctggcttcgagaccactgccgctcagcatcatgctataattctaagactcaccagaggagcctagacactgccagtgtggatttatgtatcaagccgaagaccattcgtctggatgaaaccacactcttttttacttggccagatggtcatgtgactagatatgatctggattggctggtgaaaaatagctatgaagggcaaaaacaaaaggttatccaacctagaatattatggaatgctaaactctaccagcaagcccaagttccgtctgttgatttccagaatttcttaaaaacaaatgatgaactgaagaagtttctgcagaactttctgctatatggaattgcatttgtagaaaatgtccctcccactcgagagcacacagagaagctggcagaaaggatcagtttaaagagaaaccatctatggaaggatgtggtatttcacttcagatttttctagaggtgacactgcatacaccaagctggctctagatcggcacactgacactacctactttcaagagccctgtggcattcaagtatttcattgtcttaagcatgaaggaacgggtggcaaaacactgttagtggatggattctatgcagcacaacaagtacttcaaaaagcacccgaggaatttgaactcctcagcaaagtaccattaaagcatgaatatattgaaaatgttggagaatgtcataaccacatgattggggttggaccagtcttaaatatttacccatggaataaagaactctatttgatcaggtacaacaactacgaccgggctgtcatcaacacagtgccttatgatgttgtccatcgttggtatatagcacaccgaaccctaacaactgaattgagaaagcctgagaatgagctttgggtcaaactgaagcctggaaaagtactatttatagacaattggcgagtccttcatggaagggaatcattcactggctaccgccaactctgtggctgctatttaacaagagatgatgtattgaacactgctcgtctcttggggcttcgtgcttaaaattgaaagcactgggattatgagtgaacttggaaccctgctaccagaattttgtatcaagagaacaatattgtgtcaaaaattgtttcactgtgtctcctgcacattccaaaaaaaacagaagcttttccttattttactaggaaaaagctgttaaagaaagggggcttctgaattatctaatgtcagccatcttgtaaggtagctatcttcccaagttaatatatatagatgtgtgtgtgtgtgtgtgtgtgtgtgtgtgtgtgtgtgtgtgtgatctccatggatatatatatatatatatatatatatatatatatatatata

SEQ ID NO: 3809 - DNA, 1594 bp, Cricetulus griseus
ttttaaagtaaaggctgtctggatggagccactggccatcctggtgcttctgtgcctgccagtctcttcagcatatcctctgcatggagcagtgaggcaagaccacccaagcatggatcttgctcagcaatatctagaaaagtactacaactttgaaaaaaatgagaaacaagtatttagaagaaaggacagtagtcccattgtcaaaaaaatccaagaaatgcagaagttcctcgggctggaggtgacagggaggctggactccagcactatggatgtgatgctcaagcccaggtgtggcgtccccgatgtcggtggcttcaccacctttccaggttcaccaaagtggagggaaacaaacctcacctacaggattgtgaattatacaccagatttaccgaaagagagtgtggactctgctattgagaaagcactgaaagtctgggaagaggtgaccccactcacattctccaggcgctctgaaggagaggctgacataatgatctccttcgcagctggagaacatggagacttttacccttttgatggaccaggacagagtctggctcatgcctacccacctgggcctggattctatggagatgttcacttcgatgatgatgagaaatggacacttggaccatcagggaccaacttattcctggttgcagctcatgagcttggccactccctgggactctttcactcagacaaaaaagaagctctgatgtaccccgtctacaggttgtccaccagcccggcacagttccagctttctcaagatgatatagatggcattcagtccctctatggaccacatccgtcctctgatgccacagtggtacccatgtcctctgtctctccaagacctgagaccccagccaagtgtgatcctgctttgtcctttgatgcagtcagcaccctgcgaggggaactgctgttctttaaagacaggtacttttggcgcatatcccgctggaatcctgagcctgaagtcaatttgatttcggcattttggccctctcttccttcacacttagatgctgcctatgaagctcatagcagagatagcgttttcatttttaaaggaaatcagttctgggcagtccgaggaaatgaggtccaagcaggttatccaaaagcacttcacactctgggtttccctcccactgtgaagaagatcgatgcagctgttagtgataaggagaagaagaccacgtacttctttgttgaggacaaatactggagatttgacgagaaaagacgtcttatggataaaggcttccccaggctgataaaagatgactttccaggaatcgagccacaaattgatgcggtgttgcaggcatttgggtttttttatttcttccatggatcatcacagtttgagtttgaccccaatgccaggacggtgacacacaccctgaagagtaacagctggctcctctgctgactgtcacagaagacatacacaaacactggaaaatgagtctcagcatttcttacctaatttattatgtgtcagaatgactaattattcctgtgtgctgtgtggctcacgaagatgagcccagcagacagctttcttagtgag

SEQ ID NO: 3810 - DNA, 1594 bp, Cricetulus griseus
cccctcgctcttcttgtaccctctcacctacctcggctcctggcctctccaccctcctggcttcatctgcttttgaaagccacagaaacctcaggcccaacatacatcaaattgggccagtgggccagcaccaggcgcgatctcttttcagaggctttctgtgcccagttctccaaactgcatgtccaggtgaccccccacccttgggcccacacggaatgcttactccggcaggcgtttggggaggattggggcagcctcctcttttttgatacccagcaacctgtgggttcaggttgtgtggcgcaagtgtacaaagcattcgctagcactaccttgctggagaaggacagagtctggagacttgggagaccctgtgccccaggaacccgggcagttgggatgcagagagagccctttgcggagtggcagcctttggaaaaccttgctgacgaagcatttctagaaaagctgcttctccctaaagctgaccttgttaggtcagaagtggacacatgccaggttcctggctatccacctaagtcagatcacctcatcccagtggcagtgaaagtgttacaccctggcctgctcactcaggtgtacatggatttactgctgatgaagattggcagccaagccctggggcttttaccaggagtcaaatggcttagcttgcctgagattgtgaaagaatttgagaagctcatgatccaacagacagacctgcggtacgaagctcgtaatctagaacactttcagcacaactttgagaacatggcatctgtgaaattccccaccccgttgcaccccctcatcactcgggacatactggtggaaacatacgaagagagtgtcccagtgtccagctaccagcaggcagggattcctgaagacctgaagaggaagattgcacagctggggatcaacatgcttttgaagatgatatttgtggataactttgtgcacggagatcttcaccctgggaacatcctggtccaaggtgctgacggattgtccccaagcctggagattcaacagcagcaggtggacgtcagtgacacactggtggctaccatagcgcctgccctgtgcccactgcgcctggtgctgttggatgctggcattgtggcagaattgcaggcttcagacctgaggaatttccaggcagttttcctggctgtagcgctggggcagggccacaaagtagctgagctcatcctgcatcatgcccgggccaatgagtgcaaggatgtggaaaggttcaaggaggagatggctacactggtgacccaggccaggaagaacaccctcacactggaaaagcttcacgtctccagcctcctctccagtgtttttaagctgctgatgacccacaaggtaaagctcgagagcaactttgcctccatcgtgttcgccatcatggtgctggaggggcttggccgctcgctggaccccaagctggacgtcctggaggcagcaaagcccttcctcctcaaagggaggagggctcctgtgactgtgggcacccagtgagggcagatcctgagggtctgtcctttggcagctgagacatctacacttgggatgtgtg

SEQ ID NO: 3811 - DNA, 1594 bp, Cricetulus griseus
cacggagcaggcgccatggttgtgctgcacgtgctgttcgagcatgcggtcggctacgcgctgttggccctgaaggaagtggaggaaatcagcctgctgctaccgcaggtggaggagtgtgtacttaaccttggcaaattccacaatgtcgttcgtctggtcgccttctgtccgttttcttcatcccaggttgccttggaaaatgccaatgccgtgtctgaaggtgttgttcatgaggacctccgtctgctcctggagacatacctgccgtactaaaaaaaagaaagtattgctgggggttggagaccccaagattggtgctgcaatacaagaggagttggggtacaactgccagactggaggtgtgatagctgagatccttcgaggagttcgtctgcacttccataatctggtgaagggtctaacagacctgtctgcgtgtaaagcccagctagggttgggacacagctattctcgggccaaagtgaaatttaatgtgaaccgggtggacaacatgatcatccagtccataagccttctggaccaactggataaagatatcaataccttctcaatgcgtgtcagggagtggtatgggtaccactttccagagctggtgaagatcatcaatgacaatgccacctactgtcgcctggctcaattcattggaaaccgcagggaattgaatgaggaaaagctggagaagctggaagagttgactatggatggggccaaggctaaggccattttggatgcctctcggtcctccatgggcatggacatatctgctatcgacttgataaacatcgagagcttctccagtcgtgtggtgtctttgtcagagtatcgccagagcctacacacttaccttcgctccaagatgagccaagtagcccccagcctgtcagccttaattggggaagcggtaggtgcacgtctcattgcgcatgctggcagcctcaccaacctggccaagtacccagcatccacagtacagatccttggggctgaaaaggccctgttcagagccctgaagacaaggggcaatacaccaaaatatggactcattttccattccaccttcatcggtcgagcagctgcaaagaacaaaggccgcatctcccgatatctagcaaacaaatgcagtattgcctcaagaattgattgcttctctgaggtgcccacaagtgtatttggggagaaactgcgagaacaagttgaggagcggctgtctttctatgagactggagagatcccacggaagaacctggatgtcatgaaggaagctatggttcaggcagaggaagcggctgctgaaattaccaggaagctggaaaaacaggagaagaaacgcttgaagaaggaaaagaagcgactggctgcattggccctggcatcttcagaaaacagtagcactccagaagagtgtgaggagatggagataaatgaaaaacctaagaagaagaaaaagctaaaaccccaggacaggaggattagaatggacatgctttgtgggaggggcataccttaaggtaacagttcctaccccatgataaaccccaataaaaacaacaaaaaaacaataaaaaaaaaa

SEQ ID NO: 3812 - DNA, 1594 bp, Cricetulus griseus
cctcctcctcgcctccgccaacctccgggcagccgcaaagcagcaaccatgcgtgagtgcatctccatccacgttggccaggctggtgtccagatcggcaatgcctgctgggagctctactgcctggaacatggcatccagcctgacggccagatgccaagtgacaagaccatcgggggaggagatgactccttcaacaccttcttcagtgagacaggcgctggcaagcatgtgccccgggccgtgttcgtagacctggaacccacagtcatcgatgaagttcgcactggtacctaccgccagctcttccaccctgagcagctcatcacaggcaaggaagatgctgccaataactatgcccgtggccactacaccatcggcaaggagatcattgatcttgtcttggacagaattcgcaagctggctgaccagtgcacaggtcttcagggcttcttggttttccacagctttggtgggggaactggctctgggttcacctccctgctgatggagcggctctctgtcgattatggaaagaagtccaagctggagttctccatctacccagccccccaggtttccactgctgtggttgagccctacaactccatccttaccacccacaccaccctggagcactctgattgtgccttcatggtagacaacgaggccatctatgacatctgtcgtagaaacctcgacattgagcgccccacctacactaacctaaataggttgataggtcaaattgtgtcttccatcactgcttccctcagatttgatggagccctgaatgttgacctgacagaattccagaccaacctggtaccctaccctcgcatccatttccctctggccacatatgcccctgtcatctctgctgagaaagcctaccatgagcagctttctgtagcagagatcaccaatgcctgctttgagccagccaatcagatggtgaaatgtgaccctcgccatggtaaatacatggcttgctgcctgctgtaccgtggggatgtggttcccaaagatgtcaatgctgccattgctaccatcaagaccaagcgtaccatccagtttgtggactggtgtcccactggcttcaaggttggcattaattaccagcctcccactgtggtacctggtggagacctggctaaggtccagagagctgtgtgcatgctgagcaacaccacagccatcgctgaggcctgggctcgcctagatcacaagtttgatctgatgtatgccaagcgtgcctttgtgcactggtacgtgggtgagggcatggaggagggggagttctctgaggcccgtgaggacatggctgccctagagaaggattatgaggaggtgggtgtggattctgttgaaggagagggtgaggaagaaggagaagaatactaaattaattgtcacaaaggtgctgcttttacagggaagtttattctgttccaacaaagaaagctgtggtctgatcagttaatttgtatgtggcaatgtgtgctttcatacagttactgacttatgaaatatgaatgacttgtcatagacccaagccgtccatttcactgatgggttttaaataaatattccc

SEQ ID NO: 3813 - DNA, 1594 bp, Cricetulus griseus
ggcgacagcgccctcactccgccgcattccctcggctcccggcggcggcgccatggacgaggctgtgggcgacctgaagcaagcgcttccctgcgtggcggagtcgccctcggtgcatgtggaggttttgcagcgcagcagcagtactgcaaaaagagaagacataaagctgcatgttcacaaactgctcaacaggcataacattgtgtttggagattacaagtggactgagtttgatgagccttttctggccagaaatgttcagtcagtttctattgttgacacagaactaaaggccaaggaccctcagcccatcgatttgagtgcatgcactatcgctcttcacatcttccaattgaatgaagatggccccaccagtgaaaatttggaagaagaaacagaaaatataattgcagcaagtcactgggttttgcctgcagctgaatttcatgggctttgggacagcctcgtgtatgacgtggaggtcaaatcacatctccttgactacgtgatgaccgccttgctgttctcagacaagaatgtggacagcaaccttatcacctggaaccgggtagtgctgctgcacggtcctccaggaactggaaaaacatccctttgtaaggcattagcacagaaactgaccatcagactgtcaaacaggtaccggtatggccagttgattgaaataaacagccacagcctattttctaagtggttttcagaaagtggcaagttggtaactaggatgttccagaagattcaggacttgattgacgataaggaagctctggtgtttgtgctgatcgatgaggtggagagtctcacagctgctcgaaatgcttgcagggcaggtgcagagccatcagatgctatccgtgtggtcaatgctgtcttgactcaaattgatcagattaaaaggcattccaatgtggtgattctcaccacatccaacatcactgagaagattgatgtggcttttgtggacagagctgacatcaagcaatacattgggcccccttctacagcagccatcttcagaatctacctctcttgtttagaagaactgatgaagtgccagatcatatatcctcgtcagcagctgctgaccctccgagagctggaaatgattggcttcattgaaaataacgtgtcaaagctaagcctccttttgagtgaaatttcaaggaagagcgagggcctcagtggccgggtcctgaggaaactccctttcctggctcatgcactctatatccaggctcctagcgtcaccatcgagggtttcctccaggccttgtctctggcagtggacaagcagtttgaggagaaaatgaagctttcagcttgtgtttgattccaggcatccatatctgtggtttgcaatggacaactagtaggtgacaccacctacctcaccgtggtgcatcagaaattacactaaaccatataggtctgcaagccagacagaggtgtgggcaaactttgtcaaaagaaggactgttttgtgttattttaatgcgtatttaaaggcaagctgcctgtctttttcactgtttttaaaagttcagattctgtttgtgtctatgtaaagacccat

SEQ ID NO: 3814 - DNA, 1593 bp, Cricetulus griseus
atggcggccgtggtgtctgctgcgggtggagcgtgccccgcagttctgcaggtggccggcctctaccggggcctgtgtgcagtgcgcagccgcgccctagggttggggttcgtgtcaccagcacagctgcgcgtgttcccggtacgccggggctccggctccccctccgggggagcagatggcaacggggtcagcgagctggaagctaaccccttctacgaccgctaccgggacaagatccagcagctgcgcaggtctgacccagccgcctttgagtcccgcctggagaagcgcagtgagtttcggaagcaaccagtggggcactccaaacaaagtgattttatcaaatgcatggagcagaagacacatgcctcagggaaacagcctgtgagcaaaggattcactaaggacaagactctcagttcgatctttaacattgagatggtgaaagacaaaactagcagaggaaatacaacagatttggcagcagtatttttcagcgaaagacacagtctatgcggttattccaaaagagaagtttgatttgatctggaaccgggctcagtcctgcccaacatttctttgtgcactgccaagaagagatggttatgagttctttgtaggacaatggaccggtactgaactccacttcactgcacttataaatattcagacccgaggggatgctgcagccagccagttgattttatatcactatcctgaacttaaggaggaaaaaggcatagtgctgatgacagcagaaatggattccacatttctgaatgttgctgaggcacagtgcattgccaatcaggttcaactcttctacgccactgataggaaggagatctttggactagtagagacctttaacttcagaccaaatgagttcaaatatatgtctgtcatcgctgaattggagcaaagtggacttggagcagaactgaaatgtgcccagaaccaggataagacttagagacatcttgattggcccttcagagtcgactcagtcgtggatagcctgaagcccactcacaccctgacctccagagctcaacatctgcaacaagcagtctggaaagagttaccatgtatgcttattacaagaagtgattgtgggcatgagccctaatacttgatagtcaggaacaaagatatacaaatattctgataattgcctctcaacctaagggttccttttatgtttctgggcatttgaacaaggaaatatttgacttcatagctcccagttctatgtcttcataaacctgtaacaataagcctgagatcttagagatgtcagctttacatattctttccatgcaccaatgagctggctaaaaatataacccccaaatcctggccagactcagtacagtcagctatgttcctcaaaaaggaagacttctagaatcccctccagagttgccttcagtgtaactcagcagctttcaggtatagttagataaacaggtacaatgcctgcatactgttaaatgattatagccctactctctgaactcagcctgtgagaagctgatgaattagttcagtgtaaataaaaccgttttataagatcattccagatttgca

SEQ ID NO: 3815 - DNA, 1593 bp, Cricetulus griseus
aacaagcatgtggcccggttgttgttcagttctggtacctgtccgagatgtatctattctgtggtgtggatcttcatggaccttacaaacgcccatccaaggagttgttcaatgatctacagaaatttctagaaactgaaaaagatgagttaattttggagcttccaaacccaccactgaagaaaattcgtcttcaagaagacggaatggataatttgagtggaaatggagtaagaggggagctctgccacagaagatgaaatcattgcctctgaggcttcagatttgcgtgtatgcaatgtttgcttaggaatccttcaagagttctgcgagaaagagtttgtagcaaaggtgtgtcaaaaggttgaagcctctgggtttgaattcaccagcatggttttatcggtttccttcccaccacagctgtctgtgagagagcatgcagcatggttgctggtaaaacaggaaataggaaaacagagtctgcctctgggaagaaacgatttagttcagctgaaagaagcctacaaatggataactcaccccctgttttcagagggactgggtaaattcccatttgatggaaagagcttgtttgaagtgagtgtggtctttgctcatccagaaacagttgaggattgccacttcctaggtgaagtttgcccagattgtttcaaaccagccaaaaaacaaacagtcagtgttcaccagaatggccgttttgaaagctttgaacaagataaaagaagaggatttcttcaagcaatttccttgtcctccaaactcaccaaagactgtatgcactgtccttgaaattgaatgtactcatggtgcttgtttttgttgctggtggataattgatggagaaaggaaaatggaatcttcggtagaagaactaatttcagatcatctgttggcagcattcaaagcagagagttttaatttctcatcctctggaagagaagatgtagatgtgagaactttaggaaatggaaggccttttgcagtggagctgctaaatcctcatagagtgcgtttcacttcgcaagaagttaaggagctccagcagaaaggaaggtgaagaagagaagaccaagacctacagtgccctgatatggacgagtaaagccatacagaagaaagacattggatttctaaacgacctaaaggacttaaagattgaccagaaaacacctctccgggtccttcaccgaaggcctttggctgtgagaactcggtccattcattctatggagacacactacctggatgagcatcattttcgtctgtatttgaagacccaagctggaacctacattaaagaatttgtacacggagactttgggagaaccaagccaaacatcggctctctgatgaacgtgactgcagacattcttgagctagatgtggagtctgtggatgttgactggccacctgctttggatgactagctctcacatttgaacactaagggttttcctaacacgatgctcgtacaggcagcatatcctggaagatgacttactcaccacaacagtgtcttcagaacgacctggatcgtgttgatctgtcccaaagctcactgtaacatct

SEQ ID NO: 3816 - DNA, 1593 bp, Cricetulus griseus
ggcaagatttggccgcgcacctgtcgtacgggcgagtgaacctgaacgtgctgcgcgaggcgttgcgtcgcgagctgcgggagtttctggacaagtgcgctgggagcaaggcaattgtgtgggatgagtacttaacaggaccatttggactgattgcccagtattccctactaaaggaacatgaagtggaaaaaatgttcacacttaaaggaaatcgtttgccagcagctgatgtcaagaacatcatttttttggtcagacccaggctagaattgatggatataattgctgagaatgtgctcagtgaagacaggcgtggccctaccagggattttcattattttgtttgtgccacgccggagcttgctgtgtgagcaacgcttgaaggacctgggtgttttgggatcctttattcatcgagaggaatacagtttggatctcattccatttgatggggacctcttatccatggaatcagagggtgcattcaaagagtgctacttggatggcgaccagactagcctgtaccatgcagccaaggggctgatgaccctgcaggcactgtatgggaccatcccccacatctttgggaaaggagagtgcgctcggcaagtggccaacatgatggtcaggatgaagagggagtttacaggaagccaaaactcagtgtttcccgtgttcgataacctcctgctgctggatcgcaatgtggatctactaacgccgcttgccacccagctgacatacgaaggactcattgatgagatttacggcattcagaatagtatgtgaagtcacatgcaggccgccaggggctccctcgccaaccacacctcaattgcagaattaatcaaagatgtcaccacgtctgaagacttctttgataagttaacagtggagcaggagttcatgtctgggatagacactgataaggtcaacaattatatcgaggactgtattgcccagaagcatccgctcatcaaggtgttgagactggtttgccttcagtctgtgtgcaatagtgggctcaagcagaaggttctggactctccagacctatggctatgaacacatactgaccttgaacaaccttgagaaggctggcctgctaaaggctcagacaggggcagaacaattacccaacgattcggaaaacattacggctctggatggatgatgtcaatgaacagaaccccacagacatatcctatgtgtacagtggttatgcgccactcagtgtgcgacttgctcaactcctttcccggccaggctggcggagcatcgaggaagttctccgaattctcccagggccccactttgaagaacggcagtcactgcccaccgggctgcagaagaaacgccaaccaggagaaaacagagtcacgctgatatttttcctcggaggtgtcacctttgctgaaattgctgccctgcgctttctctcccagttggaagatggaggcactgagtatgtaattgcaaccactaaactgatgaatggaagcagctgggtagaggctctcatggaaaagcctttctagggtgttgagaggagactggaccagtcagcacagaataagttgtctctgtgaa

SEQ ID NO: 3817 - DNA, 1593 bp, Cricetulus griseus
  modified_base (27)..(27): a, c, t, g, unknown or other
  modified_base (34)..(34): a, c, t, g, unknown or other
cctgctgagtgtgatcgccaacttcancccttcnctgatcataaccagagtcctcggaacatgtaccagtgccagatgggtaagcagaccatgggcttcccgctgctcacttttcaagaccgatcagataataaactctaccgtcttcagacacctcaaagccctctcgtgagaccatgcatgtatgattattacagcatggacaactatccgattgggacaaatgccattgtggctgtgatctcctacactggctatgatatggaagacgccatgattgtgaataaggcttcttgggagcgaggctttgctcatggaagtgtctacaagtctgagttcatagacctctctgaaaaatttaagcaaggaaatgataatcttgtgtttggaatcaaacctggtgacccacgggttatgcaaaagttggacgatgatggattgccattcataggagcaaagctgcaatttggtgacccctactacagctacctaaaccttaacaccggggaaggctttgtggtttactataagagtaaagaaaattgtattgtggacaacatcaaagtgtgtagtaatgacacgggcagtgggaaattcaagtgtatctgcatcacaatacgagtccctcggaatccaactattggagataaatttgccagccgtcacggacagaagggcattttgagcagactgtggccagctgaggacatgccttttacagagagcgggatggtgccagacattctgtttaatcctcatggatttccctcccgtatgaccattggtatgttgatcgaaagcatggctggaaagtctgcagccttgcatggtctctgccatgatgcaacacccttcatcttctctgaggagagctcagccttagggtactttggggagatgttaaaggctgctggctacaacttctatggcaccgagagattgtatagtggcatcagcgggatggagctggaagcagatattttcattggtgtggtttattaccagcgcttacgccacatggtgtcagacaaatttcaagttagaacgactggagccagggacaaagtcaccaaccagcccattgggggaaggaacgtccagggtggaatccgctttggggaaatggagcgggatgctctgttggcacatggtacatcctttctccttcatgatcggctcttcaactgctctgaccgctcagtcgcccacgtttgtgtgaaatgtggcagtttgctctccccgctacttgaaaagcctcctccttcttggtctgctatgcgcaacagaaaatacaactgcactgtctgtggccgcagcgacaccatcgacactgtctctgtgccttatgttttccggtattttgtagctgagctggcagctatgaacatcaaagtgaaactggatgtcatttaacttgatcctaaccatctgagttaggagatcagaactttttcaagacaaggtttctccatgcaaccctggagcctatcctggaactcaccttgtagaccaggctggtctcaaactcacagagatccacctgcctctgcctcctgagtgctgggattaaaggcgtgcgccaccaacgcccag

SEQ ID NO: 3818 - DNA, 1593 bp, Cricetulus griseus
  modified_base (368)..(368): a, c, t, g, unknown or other
gtgatgcttctcctgtgaccaacaacaccatccagtttcactgtgatcctagtttctgggcccaaaatattatcaacttgggttctttagttatcgaggataaagagagccagccacaaatacctaagcagagtcctgtcgtggagcagagttcacagccaccaggtggtttaccttccaaccagttatccaagttccccacacagatcagcctagctcagttacgactccagcatatgcagcaacaggtaatggctcagaggcaacaggtgcaacggaggccagcacctgtgggtttaccaaaccccagaatgcaagggcccatccagcagcctccatctctcaccagcgttcaagtaactatcatngttggacaatattgcaaggaaagatacaagtgtagatcatggccagccaagacctccatcaaacagaacggtgcagtcaccaaattcatcagtgccatctccaggccttgcagggcctgttactatgactagcgtccatcccccaatacgttcacccagtgcctccagcgttgggagccgaggaagctctggctcttccagcaaaccagcaggagctgattctacacacaaagtcccagtagtcatgttggagccaatccgaataaagcaagaaaacagtggaccacctgaaaattatgattttcctgttgttatagtaaaacaagaatcagatgaagaatctagacctcaaaatactaactatccaagaagcatacttacgtccctcctcttaaacactaatcagagctcttcttctgaggaagccgtgttacgatctgatgctcctgacagcacaggagatcaacctgtccttcatcaggaaaactcctcgaatggaaagcccgagtggcaggatgcctctcagaagtcccctgtgattgtcggagaggcaaggaaggaggacgatcccatggaggggagcttctttgctgtgaaaagtgtcctaaagtattccatctgagttgccacgtgcccacattgaccaatttcccgagcggagaatggatttgtactttctgccgagacttatctaagaccagaagttgaatatgattgtgatgctcgcagtcacaactcagataaaaggaaaatcgaaggccttagtaaattaacgccaatagataaaaggaaatgtgaacgtctgcttctgtttctttactgccatgaaatgagcctggctttccaagaccctgttcctctaactgtgcctgattattataaaataattaaaaacccaatggacttatcaaccatcaagaaaagacttcaggaggattattgcatgtatacaaagcctgaagattttgtggctgattttagattgatctttcaaaactgtgctgagttcaatgagcctgattctgaagtagccaatgctggtataaaacttgaaagctattttgaagaacttttaaagaacctttacccagaaaaaaggttcccaaaactagaattcaggaatgaaccagaagacagtaagttcagtgatgactcagatgatgactttgtgcagccccggaagaagcgtcttaagagcttggaggaccgccaactgctgaaataa

SEQ ID NO: 3819 - DNA, 1593 bp, Cricetulus griseus
ctagaggcgtgtcttgcgttgcgccgccctttcctgcaccgctaagcctccctgatcgctcttgttttccggagcgctgcttctctttcccgcgccgtctacacctccttcccaccagggataatggcgacagctgaggtactgaacattgggagaaaactctatgagggtaagacaaaagaagtctatgaattgttagataatccaggaaaagtcctcctgcagtccaaggaccagattacagcaggaaatgcagctagaaagaaccatatggaaggcaaagctgcaatctccaataagattaccagctgtatttttcagttgttacaggatgccggtatcaaaactgctttcaccaagaaatgtggggagactgctttcattgcaccccaatgcgaaatgattccaattgaatgggtgtgccgaagaatagcaactggatcttttctcaaaaggaaccctggtgtaaaggaagggtataaattttacccaccaaaagtagagatgttcttcaaggatgatgccaataatgacccgcagtggtctgaggagcagctcattgctgcaaagttctgctttgctggacttgttataggccagactgaagttgacatcatgagtcatgctacccaagctatatttgaaatcctggagaagtcctggcttccccagaactgtacactggttgatatgaagattgaatttggtgttgatgtaaccaccaaagagattgttctggctgatgttattgataatgattcctggagactctggccatcaggggatcggagccagcagaaagacaaacagtcttaccgtgacctcaaggaaataactccggaaggactgcagatggtaaagaagaactttgagtgggttgcagatcgagtggagttactcctgaagtcagatagtcagtgcagggttgtagtgctgatgggttccacttctgaccttggtcactgtgagaaaattaaaaaggcttgtggaaacttcgggattccatgtgaacttcgagtaacatctgcccataaaggaccggatgaaactttgaggattaaagcagagtatgaaggcgatggcatacctactgtatttgtcgcagtggctggcagaagcaatggtttgggcccagtgatgtctggtaatactgcatatccggttatcagctgtccccccatcacaccagactggggtgctcaggatgtgtggtcatcccttcgactgcccagtggtcttggctgttcaactatactttctccagaaggatccgcccagtttgctgctcagatatttgggttatacaaccatttggtatgggccaaacttcgagcaagcattcttaacacatggatatctttaaagcaagctgacaagaaaatcagagaatgcaatttataaaaaaaaaagttaatttttaggagaaaagttacacattcctagtttgaattaaaaagaaagaatttaagcaaaatgatttcacatcagagaaaacaattcagtttactgttgaacaaatggtcctctatattttaggggttgacaaaagttgtcagtggaaaataaaatctcagtatataacaaaaaaaaaaa

SEQ ID NO: 3820 - DNA, 1593 bp, Cricetulus griseus
caggtgggagcatgcccgggctgcggaggcagaggctcccttcggcgtgggccttgctcctcctgccgttcctgcggctgctgatgcccgcagcccccgcaccccaccgcggctcctacaagccggtgatcgtggtgcacgggctctttgacagttcctacagcttccgccacctgctggactacatcaatgagacgcaccccgggaccgtggtgacggtgctcgacctcttcgatggcagagagagcttgcggcccttgtgggagcaggtgcaagggttccgagaagccgtggtgcccatcatggaaaggcccccgaaggggtgcatctcatctgttactcccaggggggcctggtgtgccgtgccttgctgtctgtcacggatgagcacaacgtggattctttcatctccctggcctctccacagatggggcagtatggagacacagactacttgaagtggctcttccccacgtccatgcggtctaacctctatcggatctgctacagcccttggggccaagagttttccatctgcaactactggcatgatccccaccacgacgacttgtacctcaatgccagtagcttcctggccctcatcaacggggagagagaccatcccaatgccactgcatggaggaagaactttctccgagtgggccgtctggtgctgatcgggggtcctgacgatggagtcatcactccctggcaatctagctttttcggtttctatgatgccaacgagacggtgttggagatggaggagcagccggtttatctgcgagactcctttgggttgaagactctcttggcccggggagccatagtgaggtgtccagtggctgggatctctcacactacctggcactccaatcgcacgctctatgacacttgcattgaaccatggctctcctgaagatgtcctcaggagttccaggagttccccagcccagagaccaagtggtggccttgggaagcagatgccagactctggcaagcctgtgaccacctcatcgctcccacactgccccaccccaccagggcgccctgaatcctcctcccctctgcccctctgtgaatgacaggtcctggtccctacctcatgtcctcacttggggatgctctccctttctcccacggctgaggttgggaagcgagcaccaggtttttaactggctcaccgctaccgctgccgctgccgctgctgctccggatctggctgtaccggaggagaacccagcccctgcccgccacaggggtctctttccaggccactcaggacatttttagcttctgttgtccccttttccctttttctcaacttcctgtcgccggccttcccactaggagggacacccataggaggggttctgaggtccccctatggggacagctccacttttgaagtgtcagtgttggggaatatctgtggcctgcaaggcccatctcaggtttggggatcccccagtccctatgatcagtattggggtgtcccctgggagcctaggttctttgaggtcccagcccctcttttaaggacccttgactgggtgctccctgtatttatagaaataaaagttccatttcctc

SEQ ID NO: 3821 - DNA, 1592 bp, Cricetulus griseus
tcacgtttagccgcgcccgggcctggcctcgggcttccaccgccgccccccgcctccggcctcccgcctccagaccatggatccccgcaaagtgagcgagcttcgggctttcgtgaagatgtgtaagcaggacccgaacgtcctgcacaccgaggaaatgcgtttcctgagggagtgggtggagagcatggggggtaaagtaccacctgctactcataaagttacatcagaagacaaagtcaaggaagaaaaaagagataataagacagaggaaaacataaagacggatgaaccatcaagtgaggagagtgatctagaaattgacaatgacggtgtaattgagccagacactggtgcccctcaagaaatgggagatgaaaatgcagagataactgaggagatgatggatcaagcaaatgaaaagaagggggctgccattgaagccctaaatgatggtgagctgcagaaagccattgacttgttcactgacgccatcaagctaaaccctcgattggctattctgtatgcaaagagagccagtgtcttcgtcaaattacagaagccaaatgctgccattcgagactgtgacagagccattgaaataaaccctgattcagctcagccatacaagtggcgagggaaagcacacagactcctgggtcactgggaagaagcagctcatgatcttgcccttgcctgtaaactggattatgatgaggatgccagtgcaatgctgaaagaagttcaacctcgggcacaaaaaattgctgaacatcggagaaagtatgagcgcaaacgtgaagagcgagagataaaagaaagaatagaaagggtgaagaaggctcgagaggagcatgagagagcccaaagggaagaagaagccagaagacagtctggagctcagtatggctcttttccaggtggttttcctgggggaatgcctggtaattttcctggaggaatgcctggcatgggaggaggcatgccaggcatgcctggaatggcaggaatgcctggactcaatgaaatcctcagtgacccagaggttcttgcggccatgcaggatccagaagtcatggtggctttccaggatgtggcccagaacccagcaaatatgtcaaaatatcagagcaacccaaaggttatgaatctcatcagtaaattgtcagccaagtttggaggtcaagcataatgtcataacaatgctgaatgaagagcagcttagctcacttactggatgttgcaataatacaaaccagtgtacctctgacctcatccggagagctggggtgcttcgaagataatccagtcccttcctttctgcatcaaatgcggctgaagcattttacagtggtttgccattagggtcttcattcagataatgttttcctattaggaattacaaacttaaaacatttttcaaccttaaacatatttttaaaaatttaggggtgttaattcctacatttttctttactaatctttttggggttttcctttgaattactgggcaaggaagctgaatatggtcgacttactgctctcatgaatggaaataaagatttgttagtgggaagcaaataaaacccatt

SEQ ID NO: 3822 - DNA, 1592 bp, Cricetulus griseus
agatcatgaaccgcaaccgccaagtgacctgcgtggcctgggtccgccgcggcgtggccaaagagacgccggacaaggtagagctaagtaaagaggaagtaaagcgtctcatcgatgaagcaaaagaaaattacaagaagaaggtagcagtgatgaagaggaggcaggcagtccttcagaagatggcatacagagtatccggacccaggcacggcctagggagcctctggaggatggtgacccacaggatgaccgtacactagatgatgatgagctggctgagtacgacttggataattatgacgaagaggacaacccagatgccgagactcttggtgaatctctgttgggtcttacagtatatggcagtaatgatcaagatccatatgtcaccctgaaagatacggaacaatatgagcatgaagatttcctgattaaacccactgacaacttcatcatttgtggccgtgccgaacaggagcaatgcaacttagaggtgcatgtctacaatcaagaagaggagtctttctatgtccaccacgacatactcctgtctgcataccctctcagtgtggaatggctgaattttgatcctagcccagatgcttcctctggaaattatattgctgtgggaaacatgacccctgttatcgaggtgtgggacctggatatagtggactctctagagccagttttcacattgggaagtaagctttcaaaaaagaagaagaagaaaggaaagaagagctcctcagcagaagggcatactgatgctgtccttgacctttcctggaataagacagtcagaaatgtgctggcaagtgcatcagcagatagcactgtgattctctgggatatgtctgtggggaagccagcagccagactcactgcacacacagacaaggtccagactctgcagtttcatccatttgaagcacaaactctgatctctgggtcatatgataagtcagttgctctgtatgactgccgaaatcccaatgagaatcatcgcctgtggcggttcagtgggcagatagagagagtgacctggaaccacttctcaccgtgtcattttttggccagtacagatgacggctttgtgtataacctggatgcacgttcagataagccaatctttacactcaatgctcacaacgatgagatctctggtcttgatctgagcagtcaggtcaagggctgcctcgtgactgcttcagcagacagatacgtgaagatctgggacatcctaggggacaagccaagcctcattcactctagagacatgaagatgggagttctcttttgttcttcatgttgtcctgatttgccatttgtttatgcctttggaggtcagaaagaagggcttcgagtttgggacataagcactgtctcttcagtgaatgaagcatttggaagacgggagagactggttattggcagcacaaaaggcttgtctggtagtggcccttgcgggagtggaagcccacagacaccaatggagtcctgacaaagttcaatctcctgggatgtttatatgaactcggggttttaaaagctggcctaagaatgttccttgtgtagctgcaaccata

SEQ ID NO: 3823 - DNA, 1592 bp, Cricetulus griseus
  modified_base (1525)..(1525): a, c, t, g, unknown or other
  modified_base (1578)..(1578): a, c, t, g, unknown or other
agatcagtggcagccatggctgggttgacatgttgattgacattgctcgaaagctggacaaggctgagcgggagcccctgctcatgtgtgctcggtactttaagaagctggacagtcctggctatgctgctgagacctacctaaaggtcggtgacctgaagtctctggtgcagctgtatgtggacaccaagcgctgggatgaggccttttgctttgggtgagaagcaccctgagttcaaggatgacatctacgtgccctatgctcagtggctagcggagaacgaccgctttgaggaagcccagaaagcatttcacaaggccgggaggcaaggggaagcagtccgtgtgttggagcagctcacacacaatgctgtggtggagagcaggtttaacgatgctgcctattattactggatgctgtccatgcagtgcctcgacatggcgcaagcagatcctgcccagaaggatgtgatgcttgacaaattccaccatttccagcacctggctgagctgtaccatggctaccaaaccattcatcgctatacggaggagccgttcagctttgacctccccgaaaccctcttcaacatctccaagtttttgctgcacagcctgaccaaaagccacccccttgggcatctcgaaagtgaataccctcttcacactggccaagcagagcaaggccctgggtgcctacaagctggcccggcatgcctatgacaagctacgggggctgcagatccccgccaggatccagaagtccattgagctgggcaccctgaccatccgctccaagccttttccatgacagcgaggaactggtacccttgtgctaccgctgctccaccaacaacccgctgctgaacaacctgggcaacgtgtgtatcaactgccgccagccctttatcttctccgcctcttcctatgaggtactgcacctggtggaattctacctagaagagggaatcactgatgaagaagctgttgccctcatcgacctggaggccccaagacacaagagggagagcaaatggcaggaggttgcgagcaataattcacagatgctgaagctggatgagaccatggactccttaggtgatgatgacccgttcacagccaagctgagctttgagcaaggtggctctgagttcgtgcctgtggtggtgaaccgatcagtgctacgttccatgagccgaagggatgttctcatcaagcgctggcccccgccactgcaatggcagtacttccgctcgctgctccccgatgcctccatcaccatgtgcccctcctgctttcagatgttccattcggaggactatgagctgctggtactccagcacgcctgctgtccctactgccggagacgcattgacgatactggcccatgaacactgactggcctctgggaccacctgctcacctggcctccttgctgtccccagactgtcgtggagaaagaattaaaccctcagaatatgtctcctgcccagatgaagtttgtatgttgggggagggcctgccttgngtaaccacagatttccatttatggcatttcatgccttgaaatagcaccagganatggagaagagaac

SEQ ID NO: 3824 - DNA, 1592 bp, Cricetulus griseus
ggtgtcatggctgccaggctcataggattcttcttacttcaggcagtatcatgggcatatggtgcacaaccctgcatccctaaaagttttggctacagctcagtggtctgtgtctgcaatgccacatactgtgactctcttgaccccctgaccttacctgctgctggtaccttcagccgctatgagagtactcggagtggacgtcggatggagctgagtgtcgggtccatccaggccaatcgcacaggcacaggtctactactgaccttgcgtccagaagagaggttccagaaagtgaaaggatttggaggagcaatgacagatgccactgccctcaacatccttgccttgtccccctctgcccagaatctgctgctcaaatcatacttctctagtgaaggaattgaatataacatcatccgggtgcccatggccagttgtgacttctccatccgaatctacacctatgctgacacccctaatgacttccagttatccaacttcagcctcacagaagaagacaccaagctcaagatacccctgattcaccgagctctgaagatgtccccacgccccatctcactccttgccagtccctggacatctcccacttggctcaagaccaatggagcagtgaatgggaaagggtcactcaagggtcaggcaggggatgtctatcaccggacctgggccaattactttgtcaagtttctggatgcttatgctatgtacaagataaaattctgggcagtgacagtagagaatgagccttctgcagggctcataactgggtaccccttccaatgcctgggcttcactgctgaacaacagagggacttcattgcccgtgacctagggcccgcgcttaccaacagttctcatgatgtccagctattcatgctcgatgatcagcgtttgctgctgccccgctgggcacaggtggtgctgtctgacccagaggcagctaagtacgtccatggcattgctgtacactggtacatggatttcctggctccagctaaacccactttaggggagacacaccgcttgttccccaacacaacgctctttgcttcagaggcctgtgtgggctccaagttctgggaacagagtgtccggttgggctcctggagtcgaggggtgcagtacagtcacagcatcatcacgaacctcctttaccacgtagctggatggactgactggaaccttgccctgaatcctgaaggagggcccaattgggtccgcaactttgttgatagtcccatcattgtagacatccccaaagacacattttacaagcagcccatgttctaccatcttggccacttcagcaagttcattcccgagggatcccagagagtggggttggtggccagtgagaagaatgacttggacaccgtggcactgatacgccctgatggctctgcagttgtggtcgtgttaaaccgctcctctaaggatgtccctcttaccatcagtgatcctggcctgggcttcctggagaccatctcacctggctactccatccacacttacctgtggcgtcgccagtgatggaacagataagagcaggcacttggacttagcatgga

SEQ ID NO: 3825 - DNA, 1592 bp, Cricetulus griseus
  modified_base (490)..(490): a, c, t, g, unknown or other
  modified_base (503)..(503): a, c, t, g, unknown or other
  modified_base (560)..(560): a, c, t, g, unknown or other
tgcagaacctggaggggaaactgaggacgctcccggcgactccagagtgtccgtctcacgacctcttctcggcgttatgggtgtgataggtatacagctggttgttaccatggtgatggccagtgtcatgcagaagattatacctcactattctcttgctcgttggctactctgtaatggcagtttgagatggtatcagcatccttcagaagaagaattaagaatccttgcagggaagcagcagaaaggaaagagcaaaaaggacagaaaatataatggtcacattgaaaataagccactaaccattccaaaagatattgaccttcatctagaaaccaagtctgttacagaagtggatattctagcattgcattacttcccagaataccagtggttggttgatttcacagtggctgctaccgttgtgtatttgataactgaagtctattacagtttcatgaagcctacacaggaaatgaatacaagcatnttaaacttggccngaaatgcgtagatcaaatgaagaaagaagcaggccgaataagtacagttgagctacngaaaatggtggctcgagtctttttattacctttgtgtcattgccctgcagtatgtggcccctctggtaatgctgcttcacacaactctgcttttgaaaacactaggcaatcattcctgggggatttatccagaagctgtctctcccttgccagtgaataacctcccttccaactctgtgtctgaactaccgtcaactgatgggaagatgaaggtgactgttacacaaatcaccgtggcactgagcagcttaaaaaccatcttcacccccctccttttttcggggacttctgtcatttttgacatggtggattgcagcttgcctcttttccacaagcctttttgggcttttctatcatcagtatctgacagtggcatgaatttcagtcaaaaatggatgtccaagtcacacttcaaattcaaatagttgtgcccttgaagggttgacaaaagaagaatgcaaatacaaaggagaaaaagaattataggactccagttactggttactcttcatggtgttgtggtactgttattacttagttgctgcctatagaacaatcttcaaactgagccatgctctaggggagggaaaagacataaactcacttctgttggtaatctattaatcttcaaacaaacaaaaaatccaacagaaaggaagagaatgctgctgtatattacagtaagaaaagctgcatagtcatcttaaattgaatggagatataaatgcctaatgtctacaagtactgctacttgagagtagcaaaagtactgtttaaaacgtatgccaccaagcttgaaagttcttttcaaatgattggctatctgaacatttgcagtctcactgttaatttgggtctgctgtattttattattactttgattcctacatagttacgtttaatctaaaaatatttatcaatactgatcaaatattttaagttgcagaatgttcaaaactgatttgaataagatgtatttgtatctagaaattttgtttggaatgagattaaaatacattttttaaagctcaa

SEQ ID NO: 3826 - DNA, 1591 bp, Cricetulus griseus
ccgaccttacgtgacccggtgaccccggctacctaggtcgccccggccaccatgccgcgctccttcctggttaggaaggcgtccgacccccgccggaagcccaactatagcgagttgcaggacgcgtgtgtagagttcatcttccagcagccctacgaccaggcccacctgctggccgccatccctccgcccgaggtcctcaaccctgcagcctcgctgcccaccctcatctgggactcgctcctggtgccccaagtgcaaccggttgcttgggccaccctcccgccgcgggagagccccagggcggcagagctgacctcgctgtccgatgaagacagcggcaaaagctcccagccacccagcccgccctccccggcgccgtcgtccttctcttccacttcggcctcatccctggattccgaggccttcgtctccttccccggcttgggtcaactgcccaagcagctagccaggctctcggtagccaaggacccccagtcccggaaggccttcaactgcaaatactgcaacaaggagtacctcagcctgggcgccctgaagatgcacatccgaagccacacgctgccctgcgtctgcgcgacctgcggaaaggccttctccaggccgtggctgctgcagggccacgtccgcactcacactggtgagaaaccattctcctgctcccattgcaaccgtgccttcgctgaccgctctaacctgcgtgcccaccttcagacacactcagatgtgaagaaataccagtgccaggcatgtgcccgcactttctccaggatgtccttgcttcataaacaccaggagtctggctgctctggaggcccacgctgaccccactgtctcaacatcctttctctgcatctccctggttccctggagctggtcctcaccacaggactccatccagccttggtccaggaacctgtggaggccacgtctggccctggttcctgcttagctctctcggtggcctttccacagatgacggatggagggccaggtgcctgggttccctccctgagccacccctcagtattcatgaggtatagcctctggacacagctacttcgagccataggactaaagccaacccactggctgggaagcttgaaccccactcaggggacccctacttccccacctcccccaaggacccttcaggacaacttcctcaaggtacaacagactatgcaatagtctccctccacccgcggctacattcaggcctcagcgggtgattgctggacacatgtccaggtgcccctgggccggggcagctgtttcagccctgcccccatttgtcctggtgacacctgtttcacagtttaactgtctgagaaggggaccatgagtaatggccgtcacttgttagggccaagtggggtgcttcggcctggccaacgtgtctcccagaactattttcgggccaacaggtggccctgggaggaagatgtttacattttaaaggtatttatattgtaagcagcgttttgtatagttaatatgtacagtttattgatactcaataaagtggttaatttatatactaaaaaaaaaaaaaaaaaaaaaaaaaaaa

SEQ ID NO: 3827 - DNA, 1591 bp, Cricetulus griseus
gcctccaccccgacctaccagccacctccattgcaacagatgcctcagcccccaactcaacagcaagtcactattctgcagcaacctcctccacttcaggccatgcaacagcctccacctcagaaagttagaataaatttacaacagcaaccaccacctctgcagagcaaggttgtgcctccacccactctgaaaatgcagactgccctgatccctccagctgtggaaagcagccctgagcagcctctaaattgcagccctgaggctcacacagcagaagcaacctctcctgagacaatctgtgaaatgatcacggatgtagttcctgaggtggagtctccttctcagatggatgttgagttggtgagtggatcccctgtgacactctcacctcagcctcgatgtgtgaggtctggttgtgagaaccctcctgttatcagtaaggattgggacaacgaatactgcagcaatgagtgtgtggtaaaacactgcagggatgtattcttggcctgggtggcctctagaaatccaaactctgtggtgtttgtgaagtagcctttctgttttctccaagcctggaagattcatctgccagacacaagttccaagagtcctgtccaagagcctgtatttgaaacacaagctgggcttcttctggtagtgcctgacctttaacacccatagtccttcatgtccccatcttttctttcttcagcagaggccagactatagcagggccagtgaatttactgtaatttggaattgtttttcactctcgactacaagcaaaattaccaggttatagcacaggaaagggtaaagggaatatggaagcaaaccatagtgggttattagaagaaatgtgtcggtaaaattatcagaggacttgcttcagatgttattggaaaagttcttagctctgtccctaggaggaaacagcactgggataagaggcttagggttacagctcagtggtaaagtgcattgggtttaaatcccaaattaaagaggaatgaaaatactgacttaaaataccccctttaaaaagggaacttactattattaatctacacagtactttaaaaacaaaggtttgttggactggggttatggcctagcactaacaaaactgagttcagccccaggcagaaagaccaaggagttcaaggtcagtcttggccactagtgagtttgaggtcagtctaggctacatgaggcaaacggtcagaactctacctttaatgagaggttttacaaagtaaaagaagttgtgtttgataaacactcctcttaaggtatggcctgcagagccacagctctgagtgctcagctttgtaaggaagtgcttctataaattcttaggtttagagatgataccatctggatacctttgcttaaaccgggcaaccacatctgggtctagtaggtgtatcccatccagttggtttccaagagtaatcctaaaacaaggggaaaagaggaggcaaaccaaaaactcctgtaaggctttagtactgctcatgccaagttttgtttctttaggtttctcaggctgttctggatctctatgtagaccaggctaaccttgaac

SEQ ID NO: 3828 - DNA, 1591 bp, Cricetulus griseus
aaaacaaaattcaaaaggttggttcaaaatggcatggacatttgtaaatgacagtctctgcaccaccctgtcactgcagtgggagccggagatcatagctgtagcagtaatgtatcttgcgggacgtttgtgcaaatttgaaatacaagagtggacctccaaacccatgtacaggagatggtgggaacagtttgtccaagatgtccctgttgatgttcttgaagacatctgccaccaaatcctggatctttactcacaagggaaacaacagatgcctcaccacacccctcaccagctgcagcagcccccatctcttcagcctgcaccacaagccgccacaagtgccacagtcgcagccatctcaaggctctgaagcagcacagcctcagcagaaggattcacagcagtcggccagcagcagcagcagcaacaagcacagcagcccaagaaaccgtccccacaacctagtcctccccgacaggctaagcgcaccgtggtggtttctcccaaggaagagaacaaagctgcagaaccaccaccaccacctaaaattcccaaacttgagaccactcacccaccattgcctccagcacacccacctccagaccggaagccccctctcgctcctgccttaggtgaggctgaagcaactggtccagtggaagcaagtgacctccccaaagtccagattcctcctccagcccatccggcacctgtgcaccaacccccaccattgccgcatcggcctccacccccccaccctccagctacatgactgggatgtctaccaccagctcctacatgtcaggggaaggctaccagagcctgcagtccatgatgaagaccgagggcccctcctatggcgccctgcccccagcctatggcccacctgctcaccttccctaccacccccatgtctaccccccaacccacctccacctcctgttcctccacctccagcgtccttcccccacctgccattcctccccctactccaggttaccctccacctccccctacctacaaccccaatttccatccccccacctggcatgccacctgtcggggggctagggcgggctgcctggatgagataactgtggtgtgaccacatccagtcttcagctgccatctgtgtcctgcactgggttacttatactagtgaagacggtaaatagccacattggctcagtaaatagcctcaaaaaatgagtaactttccctctagacatcagtgcctaattttctggggactcaacttttgtagctgtgtcctcctgtctgcgtctgctgttgtcttcccattcagtgcttctctctatggtcctagtaggtgaggtggccccgcttagcttgtgactctccatcctctattgtctggaggggctgccatgctgggtggctatccccttttttccagggagaaaggaggtgtgtatttggaaagtaatgtatgtttacatctctttgcaaagtcttgtacataaagatatatttttaagtgtgaatgtaactacatactgtgaattccatcttggttacaaatgagaatccttcagtcagttactcaaataaagtcggttactataaa

SEQ ID NO: 3829 - DNA, 1591 bp, Cricetulus griseus
gcgtcgcgccgctgccgcctccgccgcggaggaagacaggacctcccgcgctcctccgagcgaccccttggcagagtcccaccacctcaggcctcgggccagcggccaggagctgcctcccccagcccccgtcccgcggcccccagccgcccccaaccccgccccacgggcccggcgccatgagtgagctggagcaactgagacaggaggccgagcagctccggaaccagatccgggacgccagaaaagcatgcggggattccacactgacccagatcacagctgggctggacccagtggggagaattcagatgagaacacggaggacccttcgtggacacctggcaaaaatctatgccatgcactgggggacagactcaaggctgctggtcagcgcctcccaggatgggaagctcatcatctgggacagctataccaccaacaaggtccatgctatccctctgcgctcttcctgggtcatgacctgtgcctacgccccctcagggaactttgtagcctgtgggggtttggacaacatctgctccatctatagcctcaagacccgagagggcaatgtcagggttagcagagagctgcctggccacactgggtacctttcatgctgccgctttctggatgacaaccaaatcatcaccagctctggggataccacctgtgccctgtgggacattgagacaggccagcagacagtgggttttgctggacacagtggggatgtgatgtccctgtcactggcccctgatggccgcacctttgtgtcgggtgcctgtgacgcctccatcaagctatgggatgttcgagattccatgtgccgacagacattcataggtcatgagtctgacatcaatgccgtggctttcttccccaatggctatgccttcaccacgggatcagatgacgccacatgtcgcctgtttgacttgcgggctgatcaggagctgctcatgtattcccatgacaacatcatctgtggcatcacctcggttgccttctcgcgcagtggccggctgctgctcgctggctatgatgacttcaactgcaacatctgggatgccatgaagggtgaccgtgcaggtgtcctcgctggccatgataaccgtgtgagctgccttggggtcacagatgatgggatggccgtggccacaggctcctgggactccttcctcaagatctggaactaaccaccccaacccagatgggcctaggcagggagcggccctgcctgtgcccacactacaggcccggagctttggggctgggtacacatgccaagcctccctccctgggctacagggccatgggtcctgctcctacacccaggtttggttcctcccgggggcggggggggtgccctgtgaagataaaagtcgagatggaatggggaagaagggcaggaaagccctcactctttgctgccctggggctggggcctcacccctctggagggccagaggcaggagatggaaaccccagaggctggcttttttaaactggttttattttaatttttattatattttcagtttttccataaaggaaccacttccaactctaaaaaaaaaaaaaaaaa

SEQ ID NO: 3830 - DNA, 1590 bp, Cricetulus griseus
gagatcggcgaggtctccccggatcaccatgttccctcgccctctgaccccactggcgtccccgaaaggagccgagcccctgggccgcacgccgaggcggtctccattgagtagggcccgggctggactcggagggccacccctgctgctgccgtccatgctgatgtttgcagtgatcgtggcctccagcgggctactgctcatgatcgagcggggcatcctatcggagataaaaccccttcccctgcaccctcccagccacaaaggcgcggcctggcgtgggacagctcccaagcctggaggcctatccttggtggggactccgacttgcaagtgcgggaggatgtccgaaaccggaccttgagggcagtgtgcggacaaccgggcagtcggccccgggacccctggggacttggccggtggacagcggcgcaccctgctgcgccactaccgcttcctctactgctacgtccccaaagtggcctgctctaactggaagcgcgtgctgaaggtgctggcgggcgtcctggacaacgtggatgtccgcctcaagatggaccaccgcagtgacctggtgtttctggcagacctgcggcctgaggagattcgctaccgtctgcagcattacttcaagttcctgtttgtgcgagaccccttggaacgcctcctgtctgcttaccgcaacaagtttggggaaatccgagagtaccagcagcgctatggggctgaaattgtcaggcgctacagggctggagctggccccagtcctgcaggggacgatgtcaccttcccagagttcctgagatacctggtggatgaggatcctgagcacatgaatgagcactggatgcctgtgtaccacttgtgtcaaccatgtgctgtgcactacgactttgtgggttcttatgagagactggaggctgatgccaatcaggtgctggagtgggtgcgggccccaccccatgtccggttcccagctcggcaggcctggtatcggccggccagcccggaaagtctacattaccacctgtgcaatgccccacgagccctgcttcaagatgtgctgcctaaatatattctggacttctccctctttgcttacccactgcccaatgtcaccagggaagcttgtcaccagtgatagttggccagcagcttctggagtttggtttagtgacaccagctttgaagtgcctttcacagaaacccctggttctggggcttgctagtttctctaggtatcatcgtatctcagtggctgggactgccctgaggccagctgctatcactggtggactctcttaggagccagtggcatccttatctggcagggccagacaccaatgtgttattaaaaccatatgtttgatataaagactgacttcaggttcctggctgctaggcctgtgcagcccacctggtccatcgtaacttaacctgtggccaaatcctgaaggcggcaccagccaaacacatgaccatgcccaggaccaatggctttgacctcctggttgcccaccccattaacctcaggactagagtgagctgtggtgccttagaaataaattttgagcctttctactccagact

SEQ ID NO: 3831 - DNA, 1589 bp, Cricetulus griseus
gcacgtgccatgcggcgcttcttgttcttggcaggagctaccccggccggtggttgcggtgaaccttagagcaggatgtggggcccggcgatggggctgcccccgcggctggcgctgtcagtgtttgctggtcccgctcgctcttgcgttctggggtcgcgaactgcggcgcggaaggactggcaagccaagagccgtcgtggcttctctgacttctacatgcagccgttatttgatcctgagttagaggagtcgcccttttttgcacccaagggtcgctccgagcctacgtgttacgtggcatgcaagaaactggccaagaacctggtacggaacctgctgggctaccacaacccatcccgtcaacttttactggagtgcaatccaggacctggaatcctgactgaggcattacttagagccggtgccagagtgattgcctttgaaagtgaaaagacttttattccacatttaaagtctttaaggatgcatttggatggattgctgcaagtggttcacagtgacttctttaaaattgatcccagacatcaggaagtggtaaaaccagaatataattcacgtatcatttttaaggatttgggaataaatccagttccttggtcagcaggtgttcctataaaagtatttggaatcctaccaactaaattagaaagacgaatactttggaaaactctatttgatctgtattcctgcgagtctatatacagatacggacgaatagaactgaatctgttttgttactgaaaaagaatactaatcgcgactcctaagaggccagatttatatcaagtattgagtgtgctttggcaagtggcttgtgatattaagtttattcacatggaaccttggtcatcatttagtatgcataacgaaaatgggtcctcagagaactcaaagcttggggaatcgttgaaatcaatgaaacaaaatctatattttattcagttgactcctcgtagaactttatttacagaacacctaagtccattgaactatgatatatttttccacatggtcaaacactgctttgggaagcgcagttccccaataatacaacatttacgttctctgagtactgttgagcctattgaaatactgaggaaggtgagaataaaacctggagagacaatacttagaatgtatcctcatgacttcaaaagactttttgaaatgatagagcgttctgaagactgtgtctttaaatgggtctatgatgagagcttggaggacattgtgctctaggaaagcagtctatgagccatgaactgcagctgcttatctatttatttggaaataatgagacaaatgaaaactgagtttcaagaagttcatgcactttgaacaagaagagaaactgtccttgcttggcacaaaggaggaaaataatttcttctgcagttgatacctttgatgcactagaagaaacagtagttgcacttttatttgaaattgaataaaatggaaaagttgtcggtttgatcagatcacatttgtttgttttaaactactctctgctgtagatcaatggtagaacacataacctagtagtccaaggctctggttttgct

SEQ ID NO: 3832 - DNA, 1589 bp, Cricetulus griseus
taaatggaaatgatgtcttcctggtagctgtgcatgagttgggccatgctctaggcctggatccaacgatccctctgccatcatggcgcccttttaccaatggatggacacagaaaactttgtgctacctgacgacgatcgccgaggcatccagcaactttatgggagtaagtcagggtcacccaccaagatgccccctcagcccagaactacctcttggccctctgtcccagataagcccagaaaccccacctatgggcctaacatctgtgatgggaactttgacaccgtggccatgctccgaggagagatgtttgtcttcaaggagcgatggttctggcgggtgagaaataaccaagtgatggatggatacccgatgcctattggccagttctggaggggcctgccagcatccatcaatactgcctatgagagaaaggatggcaaatttgtattcttcaaaggagacaagcactgggtgtttgacgaggcttccctggaacctgggtaccccaagcacattaaggagctaggccgaggactacctactgacaagattgatgcagctctcttctggatgcccaatggaaagacctatttcttcaggggaaataagtactaccgtttcaatgaggagttcagggccgtggacagcgagtaccctaaaaacatcaaagtctgggaaggaatccctgagtctcccagagggtcgttcatgggtagtgacgaagtcttcacatacttctacaaggggaacaaatactggaaattcaacaaccagaagctgaaagtagagcccgggtaccccaagtcggctctgcgggactggatgggctgcccttcagggggccgacctgatgaggggactgaggaggaaacagaggtgatcattatcgaggtggacgaggagggcggcggagctgtgaatgccgccgctgtcctactgcccgtgctgctgctggtgctggtgctggtggtaggccttgcagttttcttcttcagacgccacgggacccccaagagactgctttactgccagcgttcactgctggacaaggtctgacccccaccgctggcccacccgcttctaccacaaggactttgcccctgaaggccagtggcagcaggtggtggcaggtgggctactcacacccaccctgagccctctccctccagcctcacttctcagtccctgaatggcctctcctaccttcaccccagcattgcttcatccataggtgggacccctgagggcggagcaggaaggcggtcccttctggcctctggccctcgagggaacctcacagcttggtgtgtgtccagccctgtttgaatgttttcagggctctgcacttgaaggcaagaccccctgacctcacaggcaaaggccaggtggggtcatctgcttcttttccatcccctgactatgtaccttaaatctctgaactctgacctcaggaggctctgggtatgtgagccctataagtaccaagtgtacccagttggcagccctcccaccactctaactagaaggaatctgagagtgtgtgtttggaggtggaaagattgctcagctactctaaagactt

SEQ ID NO: 3833 - DNA, 1589 bp, Cricetulus griseus
gaagtgctatgtgctaacctttgccgagtactgcagattctgtgccatggccaagcgccgaggtgagggccttcccagccgaaagacagcactggtgcccccatcttcagactactctaccccaccacaccgcacagtgccggaggacacggatcctgagctggtgttcctttgccgccatgtctatgacttccgccatggccgcatcctcaagaacccccagtagcctcttcatgctcatactcgggctgccttcgggagagtggggcctggggtaggggacactgcttgaagcacagcacttggttaaggggccatgggttgctggcctgtggttctctggggggggggggagggcagggaagggtggcaggagccagctttacctcacccactgtgacccactgcttccctgtcagcctgggaccaggttctgcagatctagcacagctctggcttgctccatgagtcaagagagccaagctttgacttcctcttcctggactcaaggcttttccctggctttcttcctttacccctgcagtagctactggtgctggcacaagttgaccgggcccacccatgggtgtctgcctcccgtcgactttccattaaggggccaccccagcaggtctggcttcccagagtactggtcaacatggagcttgtcgtatctgcctcttgccttattcttggaggttctgggaaacctcttgcagaacttcacacatgactcttcaagccacacccacctgaaatcaaaccaaaggagtgctgtggctcccctcgccctgccaccccttacccctcatcttttgtagattgcactaatttacatcccagtgagaatcaacactgtatcagtccacagaccagagctgcagccactcactctaggagctaggacctgcattttcagttggcactggggttagtacagtctggcacaggctacagtgggagatggaagtgagccctgaaggcaaagccctggcacctccaggtccaggtcctgattcttagaagatagattgattgctcctgatgggtgatgggctgggtgagggcctgaaggcttcagaggttaaagttttgttttggaagccctgtcccagccccaaagggaaagattttgtattgaaaaagctctttagaggaaggcatcagtctggaagagcaagggacaagtaagaggctggcagagtggcagtggaccctttgggagcctgctcgttctagggtgctgccaaggagcccagcctcacccacaggaaaggagatgagactcctaggaggcaggggctgctgcccagatgttaaatgcttttggaatctcttagatgtggaaatattttttcgaacatgaaaatgcagctggtagaatttcaatggaagtataatccatgtaaaatatattttagttgatattttgtaaaatgcactttttgtgtgtgtcgatcctggtttcccagatctgtatttcagtgtttacaagggagggggtacctttcctaacctcccttttgacagagattagaagtacttctttaaagaaaaataaataaatttgagaaattgtattgatttag

SEQ ID NO: 3834 - DNA, 1588 bp, Cricetulus griseus
tgggatagggaggcatacaccatatggtaaccaaaccgactataggatatttgagcttaacaagcggctacagaactggacagaggagtgtgacaatctctggtgggatgctttcacgactgagttctttgaggatgatgccatgttgaccatcactttctgcctggaggatggaccaaagagatacaccattggccggaccctgatcccacgctacttccgcagcatttttgagggggtgctacggagctgtactatgtacttaagcaccccaaggaggcattccacagcaactttgtatccctcgactgtgaccagggcagcatggtgacccagcacggcaaacccatgttcacccaggtgtgtgtggagggccggttgtacctggagttcatgtttgacgacatgatgcggataaagacatggcacttcagtatccggcagcaccgagaactcatacccaggagcatcttggccatgcacgcccaggacccccagatgctggatcagctctccaaaaacatcacccggtgtgggctatccaattccactctcaactacctccgactctgtgtgatactcgagcccatgcaggaactcatgtcacgccacaagacctacagcctcagcccccgagactgcctcaagacctgccttttccagaagtggcagcgcatggtagcacctcctgcggagcctgcacgacagcagcccagcaaacggaggaaacggaagatgtcagggggtagcaccatgagctctgggggtggcaacaccaacaacagcaacagcaagaagaagagccccgccagcaccttcgcgctctccagccaggtagatgtgatggtggtgggggagcccaccctcgatgggcggggagttcggggacgaggacgagaggctcatcactcggctggagaacacccagtttgacgcggccaacggcattgacgacgaggacagctttaacaactcccccgcattgggcgccaacagcccctggaacagcaagcctccatccagccaagagagcaaatcggagaaccccacgtcacaggcctcccagtaaagaaaggccctgctgtggccacccagggctctgcctgccccacccctcacagcccagggagcagaagacaaatgagagactgagcatctgaaatgggcaacctccatccatccacttcagggaggaactggactcatggggggcaggtgccaagatttgccccagagttgccctgggctgggcctggcccctgcagagccttttgggggaagggggttctcatattgatgcctgtgtggaccctgggcctctgagatgtcctaaccctcctctccccagggcatttgcccccattctcaccccaggttctgggtgtcccagcttcctgatttgtccctctgagcctggggtttatacccacagcccttaggggcttaaagttatggggcttggttgaatgcctttccctaggcggctgttaatagagggtaaaattctgggatcctcccttttgccacttacccagctccaaagtttttaaaaaaataatattattaaaaatgtaaaattaaaaaaaaa

SEQ ID NO: 3835 - DNA, 1587 bp, Cricetulus griseus
ggatgtggccgagagaaaaggagaatggcggccgaggcctggctttggcgctggggctggggccagcggtgcccagggaggcctgggcttcctggccccggcccaggccccactacacttctacatttccttctattgctgggtccggtggctgcggacataaccgacggcaacagcgagcaccttaagcgggagcactccctcatcaagccctaccaaggggtcgggtccagctccatgccgctctgggacttccaaggcagcaccatgctgacgagccagtacgtgcgtctgacccccgacgagcgcagcaaggagggctccatttggaaccaccagccgtgtttcctcaaggattgggagatgcacgtccacttcaaggtccatggcattgggaagaagaatctccatggagatggcatcgccttgtggtacacccgggaccgcctggtaccaggacctgtgtttggaagcaaagacaacttccatggtttagccatcttcctggacacgtaccccaatgatgaaacaacggagcgtgtgttcccgtacatctcggtgatggtgaacaatggctctctatcatacgatcatagcaaagatggacgctggagtgagttggcaggctgcacagcggactttcgcaaccgggaccatgataccttcctggctgtccgctattcccggggccgccttactgtgatgacggacttggaggacaagaacgagtggaaaaactgtatcgatatcacaggagtgcgcctgcccaccggctattactttggcgcctctgcgggcaccggcgacctgtctgacaaccatgacatcatctccatcaagctgttccagctcatggtagaacgcacgcctgaggaggaaagtattgactggaccaagatcgaacctggggtcaacttcctcaggtcccctaaagacaacgtggatgaccccactggaaatttccgaagcggtcccctgacggggtggagagtgttcctgctgttgctgtgtgcactcctgggcatcattgtctgtgctgtggtgggcgccgtggtgtttcagaagcgccaggagcggaacaaacgcttctactgagtggccagtctggctggaagggcctgaccttgggccagagctcttaaatgaactttttttctactgggattgtaaaatcaaccaaccaaccttatttcttaactgtttcaaagaaataattaaagtattttcatacattttgcttctggcccagctgagacagctggcaggactggggctcagggctcccctacagctggaggctcttgccccatctcgaggcatgctcctgggagcaggggagtctgtacttggggcccagctgaggccctgttatcttcagtttcctggtgagctgctttgcagaggttccttcccacgagctatgcttcccatagctaatgacgtcatttgatgtgcagtctgcatttacatggcatttattagtcttttccaaagatgattttcctaaaggtttttaactttttacctttaaaattttgcactttgttgaagggggcgtgcgcagtgctaaggtcaccaccctgctgt

SEQ ID NO: 3836 - DNA, 1587 bp, Cricetulus griseus
aacagcctgatctatcctgatgatggccccactggttactgctgtatccagtccacgtgcccggctctttgcctgtttccttaggctgggcactcagcaggctgcacttctccagctgcacacaggagcctgctgcacagccaaaaaccactatgaggtggctggtgcttggtgggggtagtgggggaatcaccatggctgctcgtatgaagaggaaagtgggagcagagaatgtggccattgttgaacccagcgagagacatttctatcagcccatatggacattagtgggtgctggtgccaaacagttgtccttatccggccgttccacagcaagtgtgattccatctggtgtggagtggattcaagacagagtggcagagctgaacccagacaagaactgtatccgcacagacaacgggaaagagatctcctacaaatatcttatcatcgctcttggaatccagctggactatgagaagattaaaggactacctgaaggttttgcttatcccaaaatagggtccaattattcagtgaagacggtagagaagacgtggaaggccctgcaggacttcaaagagggcaatgcagttttcaccttcccaaacactccagtgaagtgtgctggtgccccccagaagatcatgtacctatcagaagcctacttcaggaagaccggaaagcggcccaaggctaatgtcatcttcaacacggctcttggaacaatttttggggttaagaagtatgcagctgccttgcaggagattatcagagagagggacctcactgtcaactataagcacaaccttattgaggtccgagccgacaaacaggaggctgtttttgagaacctggacaagcctggggaaataaaagtgattcagtatgaaatgcttcatgtcacaccacctatgagctcaccagatgtcctcaagacaagccctgtggcagattctgctggctgggtggacgtggataaagacactctgcagcataagaaatacccgaacgtgtttggcattggggactgtaccaaccttccaacttcaaagactgctgctgcagtagctgcccaatcaggaatccttgatagaacaatttctctgattatgaagaatcaaagacccacaaaaaagtatgatggctatacttcgtgtccgctggtgactggctacaaccgtgtgattcttgctgagttcaactacagtgccgagcctctggaaacctttccctttgatcagagtaaagaacgattatctatgtatttcatgaaagctgacatgatgcctttcctatattggaacatgatgctgagaggctactggggaggtccagcctttctgcgaaagctgtttcatctgggcatgagttaagaatggctcagagcatgctctccttggatggcttctgaaccaaaattgcagttaccgattgactatgatggacatggaggactcagaaccttgccctgtgaggagtttcttactggatatggtgacctttctagacctctgagtagctgtcatgtggacagccccgaaaagtaaatagtaaaaattattttctaaataaaaaaaaaaaaaa

SEQ ID NO: 3837 - DNA, 1587 bp, Cricetulus griseus
ggcggcggcacgcgggacgaactaggacttaaatacgctggcaccatgacgctgaggctcttggaagactggtgcagggggatggacatgaaccctcggaaggcactattggttgctggcatcctcccgacctgcggagtggcagacatcgaggaggccctgcaggctggcctggctcccctgggggagcacagactgcttgggaggatgttcaggagggatgagaacaagaatgtagccttggtggggcttacagtagagactagcagtgctctggttcccaaggagatacctggaaaggggggtgtctggagagtgatctttaagcctcctgatgctgataatgagtttttatgcagattaaatgagtttttaaagggggagggcattacgatgggtgaattgaccagagttcttgggaatcgaaatggccctctcagactaggccagggcatgatccctgaaattcgagcccccatgttggcacaggcattagatgaggctcttaagcctaccctgcagtatctgaggtacaaaaagcttagtgtattttcaggcagggatcctccaggaccaggagaagaagaatttgaatcttggatgtttcatacttctcaggtaatgaaaacatggcaggtgtctgatgtagagaaaagaaggcggttgatagagagcctaagaggcccagcgtttgaaattattcatgttctcaagataaacaatcctttcattacagttgcagaatgcctgaagacccttgagacaatatttgggattattgataatcctagggcattgcaagtcaaataccttactacttaccagaaggatggtgaaaagctgtctgcgtatgttctaaggttagagcctttattacaaaaattggtacagaaaggagcaattgagaaagaagttgtgaatcaggcccgcctagaccaggtcgttgctggagcagtccacaagacagttcgaagagaacttggactgccagagggtggcccagccccaagtttacttcagttacttgcactgataaatgacaaggaggcagcagaggaggaggaagaggtccttcgtcaggccgaattagaagggtatttcacttgacccaagactggcaaggatgtcatgatgagcagaacatgatggaagaattcatatcagtgatcagcccattcccacttgtgctgccaaagtagcttaccctttgttgtgttcaccttattgaatgtctccctaatgtattactgacatgaacaatgtcattctacactgataattaaatcaaaagatgagtcattctactagtgcagtgtcctaggaggcaaacaaattcacttgcacgtgtaatagtcttatgtgaccatattattggtaattgatagttttcaagtgttgcccacatttatggtgaagaccctgagccaaggctggctaagatagtcagggtatatatatcagttattgattctgtgcgatcaaaaagcacaattgaatgctgaggttaagtctacaacagctatctttaggtttatgatgtatctgatgtgttgtcaaagtgtctggttctaaatatctattttcttg

SEQ ID NO: 3838 - DNA, 1586 bp, Cricetulus griseus
gagtggtggccgaagctggggtgccgcgggggacgtttaggcagggaccatggcggacggcggctcggagcgggccgatgggcgcattgtgaagatggaggtggactacagcgccacggtggaccagcggctgcctgagtgcgagaagctggccaaggaaggtcgacttcaagaagtcattgaaacccttctctctctggaaaagcagacccgaactgcttctgatatggtgtccacttcccgcatcttggttgcagtagtgaaaatgtgttatgaggctaaagaatgggacttacttaatgaaaatattatgcttttgtcaaaacggcggagtcagctaaaacaagctgttgcaaaaatggttcagcagtgctgtacttacgtggaggagatcacagacctcccagtcaagctgcgattgattgatactttacggatggttacagaaggaaagatttatgttgaaattgagcgtgctcggctgactaagaccttggcaactataaaagaacaaaatggtgatgtgaaagaggctgcctccatccttcaagaattacaggtggaaacctacgggtccatggagaagaaggagcgagtggagtttattctggagcagatgagactctgcctagctgtgaaggattacattcgcacacagatcattagcaaaaaaattaacactaagttcttccaggaagaaaatacagagaaattaaagttgaagtactacaacttaatgattcagctggatcagcacgaggggtcctatctgtccatttgtaagcactacagagccatctacgacactccctgcattcaggcagaaagtgagaagtggcagcaggctctgaaaagtgttgttctctatgttatcctggctccttttgacaacgagcagtcagatctggttcaccggataagtagtgacaagaagctggaagagattcccaaatacaaggatctgctgaagctttttaccacaatggagctgatgcgctggtccacacttgttgaggactatggggtggagctacggaagggttccccggagaccccggcaactgacgttttcagtgctacagaagaaggtgaaaaaaggtggaaagacttgaagaacagagtcgtggaacataacatcagaattatggccaagtactacactcggataacaatgaaaaggatggcacaacttctggatctctctgtggatgagtcagaggctttcctctccaatctagtcgttaacaagaccatctttgctaaagtagacaggttggctggagtcatcaacttccagagacccaaggatccaaataatttattaaatgactggtctcagaaactgaactcgctgatgtctctggttaacaaaacgacacacctcatagccaaagaggagatgatacacaatctacagtgaggcctggatgcttttaggaaagacacaaaattggaggtcattaaaaaagaaagactgttttcatggtgtatatgttgtttttttcttactccttgcttttttctaaaattttaagatagtgaatgtgtttgagcccccttctgtcttcccctctctcagtttcatg

SEQ ID NO: 3839 - DNA, 1586 bp, Cricetulus griseus
agatgacacacggttttacttggtctttgagaaattgcaaggaggctccatcctagcacacatccagaagcggaagcacttcaatgagctggaagccagcagagtggtgcgggacgttgccactgcccttgacttcctgcatactaaaggcattgctcaccgggatctgaagccagaaaatatactgtgtgaatctccagaaaaggtgtctccagtgaaaatctgtgactttgacttgggcagtggggtgaaactgaacaactcctgcacacccataaccacacccagagctgaccactccatgcggctctgcagaatatatggcacctgaggtggtagaggtctttagggacgaggccactttctatgacaagcgctgtgacctgtggagcctgggtgtggtcctctacatcatgctgagtggctaccccccctttgtaggtcactgtggggctgactgtggctgggaccggggagaagtatgcagggtgtgccagaacaagctgtttgagagcatccaagaaggcaaatacgagtttcccgacaaggactggtctcatatctccaacgaggccaaagacctcatctctaagctcctggttcgagatgcaaagcaaagactcagcgctgcccaagttctgcagcacccgtggtacaaggggcaagtcctccagagaaacagcagcaccatggacctgacactcttcgcagccgaggcaattgcccttaaccgccagctgtctcagcatgaggagaacgaactggctgaggaacctgaggcccttgctgagggcctctgctccatgaagctgtcccctccttccaaatctcgcctggcacgaaggcgagccgggatctgccctgcagctccaggcgggccttttccatccacaaaggctccatgggttcccacccatcccccatttcccttgggtccttagaggaaaaagcttttccaaaggggttgtctttgaaaaggaaaagcaatcacttgtcactttgcataatcgcctgcagcatgaacatctctttgctgggctccaagtgctcgctgtgtgcagatcccgggatccagctggcggtgggggcgtgctggggccgcagccttcagggagcagcttcccggagctgacagaggctgctgacacacatgcctcttctctccctgcactgtcaccttctggcaattcttccaccttcctctgtcctacagacgtcctcgctgactgtcctctccctggctgagcaaagccatcccctcaattcaggaagggcaggaagccagatcagtcttccagtctgtagcacagagaagcacataatctttctttgccgtgaccgaaatgtattcctcatttatcatcctcttccatgtttgggattgctgatagactcagtattatttcttttttaaaatattttttaaccatgtcttccagcaagcatagaacttcaaactcccactgcaagtccatggacctccccaaacaagggtttccatgtgcttgggttttaatcccctcttctccacagtcccaactgattttaagctgttactatgacatacactttagagatggtgtctt

SEQ ID NO: 3840 - DNA, 1586 bp, Cricetulus griseus
  modified_base (31)..(31): a, c, t, g, unknown or other
gagtctgtgcttgagaaccaccacctggctntgggatcaagctgctgcaagaagagaactgtgacatcttccagaacctcagcaagcgccagcggcagagccttcgaaagatggtcatagacatggtgctggccacagacatgtccaaacatatgaccctcctggctgacctgaagactatggtggagacgaagaaagtaaccagctcgggagttctcttgctggacaactacgctgaccgcatccaggtcctcaggaacatggtgcactgtgcagacctcagcaaccccaccaagcccctggagctctatcgacagtggactgaccgcatcatggccgagttcttccagcagggtgaccgggaacgggagcgtggaatggagattagccccatgtgtgacaagcacacagcctctgtggagaagtctcaggtgggcttcattgactacattgttcacccgctgtgggagacgtgggcagatctcgtccatcctgatgcccaagacatcctggacacgttggaagacaacagggattggtatcacagtgccattcggcagagcccctccccacccctcggaagaggagccaggacatcttggccatccaaccctacctggcaagttccagtttgagctcacattggaggaggaagaggaggaagattccttggaggctctgggattgtccacagctgaggaaatctccctggcttcagatgacatcacagctcaggctacagaacagtcaaaggtcaaagacaaagacccgaactctgaagtggtagagagagaaaagagtctgaggcagggggcagacccagcatgtgctactcccaaggagtccgtggagactgtgggttgctccttcagccctggaactcccattctgcctgacttgaggaccctgtgccccccagaggaggtcccgggcctcctgggcctcccctccatggcggcagaggtggaggccccaagagaccatctggctgcctcgagggcgcttatgcctgttctgggacaacaggagacaggttctgccatcgtctcagcttcaggcacattggggtcagggtggggaccctgcctgagccctgctcccttcacccttttggggtcccttccctttgtccctctctcttcactcaccatggaccacctcaacactcctcttactgaacctgaccttcccccatccagcccagccacaggcagtccctaagcaatacagacagagcaaggccattttctccaagccatgggggtaaggggacgtttaaaaaggaatgactccattctcctctgccacacccggccagtctgcagcagggcagtgggagttctgattccttgcctgccctgttatgtctctgtacacggtactgtagcccttcccccaattcctccccagatgtccatctgtctgacctaccaacccactctccttaccccatgatgcttacagggtttttgtttgtttattaagcagaggttagtttctgttctagctggtgatgagaataaccccgctttccaagtgtgtggggttttctgtacatactataaggctggtatataaattattct

SEQ ID NO: 3841 - DNA, 1586 bp, Cricetulus griseus
  modified_base (200)..(200): a, c, t, g, unknown or other
gagactgctcgccagctttttaggcagtttcgttaccaggtaatgtctgggccccaggagaccctgagacaactacggaagctctgtttccagtggctgcggccagaggttcacaccaaagagcagatcctggagatcctcatgctggagcagtttctgaccatccttcctggggagatccagatgtgggtgaggaaacngtgtccaggcagtggagaagaggcagtgacccttgtggaaagcttgaagggagatcctcggagactatggcagtggattggcgtccaagttctaggacaagagatcccgtctgagaaggtgaaagagaccaggacatggaacagcattctcccagcagtacatcaggaacagtggagacacctggattctactcagaaggaacagtacgtgggatttcatgctggagacctatgggaaaaatggtctcaggagcaggtatttctaactccaaacctgacctgactaacatagcagactatggggaagagctggcagggctgcaacttcatatcagtgagaagataccaagactcacctgcaaagaagacagacaagaaaatgacaaagagaacttaaacttggaaaatcacagggaccaggggtctctggatgttttctgtcaggcatcaggtgaggcaccaccacagactgccttggatttcctgggtgagagtgagctgcatcgctttggaggagagaatgtccctgaagctctggaaagccttcgagggtgaaggatgccttgtggctggaggagaagagagaggcctctcagaagggacaggccagagctcccatggcccagaaactgcccacctgcagagactgtgggaaaaccttctataggaattcacagcttgttttccaccaaaggactcataccggagagacatactttcattgccccatttgcaaaaaagcctttctgcgaagctcagactttgtgaaacatcagagaactcacacaggagagaagccctgtaaatgtgattactgtgggaaaggctttagtgacttatcaggcttgcgctaccacgagaaaatccacacaggagagaaaccctataaatgccccatctgtgagaaaaggtttattcagaggtcaaactttaatagacatcaaagggttcacacaggtgagaaaccttataaatgtacccactgcggcaagcgcttcagctggagctccagcctcgataagcatcagagatcacacctggggaagaagccctgcccatagccacactcccagccagcctgccagtctgttgcagccctgctcagctctgcctggaggtactgcaatcagaaaggacctctcctctctgaaggttggagggagaggagctgggcacttgtttttgtcacatggagggatgttattctgagtggatttcttggcttagtttttcctttgcaccaggaaaagaaaccagtctttctttttgagctggtctcttactttggaccccttgggaaagacatgtcatgtagataatggctttagtagctgtctctaaaaaaaaaaaaaaaaaaaaaaaaaaaaaaaaaaaaaaaaaaaaaaa

SEQ ID NO: 3842 - DNA, 1586 bp, Cricetulus griseus
caagaagtggaaatagatagaaatatcattcaagaagaagaaaagcaagcaattcctgaattttttgaggggcgtcaaactaaaacaccagaacgctatttgaaaattagaaattacattttggatcagtgggaaatatgcaaaccgaaatacttaaataagacctcagtacgtcctggcctgaagaactgtggggatgttaattgtattggacggattcatacatacctcgagttgataggagcaatcaattttggatgtgagcaggcaatatataacaggccacagccagttgataaagtacgagtgagtgacagaaagatgcagaagcagcagcataccagcttgcctgcccgcctacagtctatgcgtacaaggagacgtagagtccgagaaagaagaggaaaagtagcaaacctactaaatcttcaaaagtttcaaaattaacaaaaagctcacttgatcccttccaactgataccttgtaatttttcaatgaagaaaagcaggagccgtttcaggtgaaagtggcttcagaagcacttttaataatggatttgcatgctcacgtgtctatggcggaggtgattgggctattaggaggaagattctcagagtctgagaagacagttgaagtctgtgcagcagaaccgtgtaacagtctgagtacaggactgcaatgtgagatggatcctgtatcacaaacacaggcctcagaaaccttggctcttagaggctacagtgttattgggtggtaccattctcatcctgcatttgatcctaatccgtctttacgagacattgacacacaagccaaataccagacttacttctctagaggaggagcaaagttcattggaatgattgttagtccatataatcgaagtaatcctttaccgtgtttgaaaagacaagatggataattgaaaaatacaggttttctcatagcagtgtccccatggatagaatctttcgccgggattctgacctaacttgtttgcagaaacttttggagtgtctaaggaaaacactaagcaaagtagccaattgcttcatcgctgaggaattcttgactcagatagaaaatttgttcctttccaattacaaaagcaaggaagaaaatgggctggctgaagaaaacagtacaaaggagttgttcatgtaactatttaaaatgatcttaaatttgtttcctgttctgacctgggtaaattaaattaataatagtactcctttattagatttagtcttcttcaaaaataatactcaagaaaacaaaatcagtgaaacaagaccagcaaggtaaaactccttggccatcatttaccctcgaaccattcttctccagtccttgttagtggcctgaagctccatttctagagttggtttgaccctgtgctcacagttcatgaggtttttaggccccaagcactttggccaacttggaccccttccaaacaaaatttaaatgttcatttaataattgtgtttgtataaaatgacagcattcatattttggattaaaatattcctttaatactaaaacttggattattttactaataaaattaagtcaaatgcttgtta

SEQ ID NO: 3843 - DNA, 1585 bp, Cricetulus griseus
gcagcaccatgtaccgcgcactccggctcctcgcccgctcgcgtcgcctcctgagggcaccgtcggccggcgctgcagtctcaggggaagcaggcgccctcccgcagcgtgtcccgaacgtcgctcgaatggcaagccaaaattccttccgtatagaatatgacacctttggtgaactgaaggtcccaactgataagtattatggtgcccagaccgtgagatctacaatgaattttaagattggaggcccgacggaacgtatgccaatcccagttattaaagcttttggcatcttgaagcgagctgctgctgaagtaaaccaggattatggtcttgatccaaagattgctagtgcaataatgaaggcagcagatgaggtagctgaaggtaaactaaacgatcactttcctctggtggtgtggcagactggatcaggaacccagacaaacatgaatgtaaatgaagtcattagcaacagagcaattgaaatgttaggaggtgaacttggcagcaagaagcctgtgcaccccaacgaccatgtgaataagagccagagctcgaatgacacctttcccacagcaatgcacatcgccgctgcggtggaagttcatgaggtcttgttaccaggactacagaagttgcatgatgcactcagtgcaaaatccaaagagtttgcacaggtcatcaaaattgggcgaacccacacgcaggacgctgtcccacttactcttgggcaggaattcagtggttatgttcagcaagttcattatgcaatggcgagaataaaagccgccatgccaagaatctatgagctcgctgctggaggcactgctgtcgggacaggtttaaacaccagaatcggctttgcagaaaaggtggctgccaaagtggctgcactcacaggcttgccttttgtcactgccccaaataagtttgaagctctggccgctcacgatgccctggtggagcttagtggagccatgaacaccactgcctgcagcctgatgaagatagcaaatgatatccgcttcctgggttctggtcctcggtcaggtttaggagagctgatcttgcctgaaaatgaaccaggaagcagcatcatgccaggaaaggtgaaccctactcaatgtgaagcaatgacgatggttgcagcccaagttatggggaatcatgttgctgttactgttggaggcagcaatggacattttgagttgaacgtttttaaaccaatgatgattaagaatgtgttacactcagccaggctgctgggggatgcttcagtgtccttcacagaaaactgtgtggtggggatccaggccaacacagagaggatcaacaagctaatgaatgagtctttaatgttggtgacagctcttaatccccatatagggtatgacaaagcagcgaagattgccaagacagcacacaagaaaggatcaaccttaaaggaaacggctattgaacttggctatctcactgcagagcagtttgatgagtgggtgaagcccaaggatatgctgggtccaaagtgacttaaataaatttatattaaaataaacttgtatgaaatttaaaaaaaaaaaaa

SEQ ID NO: 3844 - DNA, 1585 bp, Cricetulus griseus
ggtgttcagccttcaagaaaattactcccaatatagacgaagaaggagccatgaaagaagatgctggaatgatggatgttcattacagtgaagaggttttgctggagttgctagaacagtgtgtggatggcctgtggaaggcagagcgttatgaagtaatttctgagatttccaagttgattattccaatttatgagaaacgccgtgagtttgagaaattgactcaagtctatagaactcttcatggcgcttacacaaaaattttggaggttatgcacagacaaaaaaagacttttaggtactttcttcagagttgccttttatggccagtctttttttgaagaagaagatggaaaagaatacatctataaagaacccaagctcacgggcctttcagagatttccttgagactcgtgaaactttatggtgaaaaatttggtactgaaaatgtcaaaataattcaggattcagacaaggtcaatgccaaagaacttgatccaaaatttgctcatatacaagtcacttatgtgaagccctattttgatgataaagaactcacagaaagaaagacagagtttgaaaggaatcataatatcaacagatttgtttttgaggccccttataccttatcaggcaaaaagcaaggctgcatagaagaacagtgtaaacgccggaccatcttgaccacttcaaactcatttccatatgtgaaaaagaggattcctataacctgtgaacagcaggtgaatttgaaaccaattgacgttgctactgatgaaataaaagatagaactgcagagctgcagaagctttgctcctcggctgatgtggacatgattcagctgcaactgaagctgcagggctgtgtctctgtgcaggtcaatgctggtccattagcctatgcaagggctttcttaaatgaaagtcaagctaccaagtatccacctaagaaagtgaatgagttgaaagacatgtttaggaaattcatacaggcatgtagcattgcacttgaactaaatgagcggctaattaaagaggatcaagtcgagtaccatgaagggttaaaatcaaattttagagacatggtaaaggaattgtctgacattatccatgagcagatattacaagaagacacaatgcattctccctggatgaacaacacattacacgtattttgtgcaattagtggtacatccagtgacagaggttatggttccccaagatatgctgaaatatgaagggatttggaaagaaatggcaatgagactgacttttctcaggaatattcggagcggtgcaaatgttaaaacttggagatttgatatgtgtggagtgtttcctcccgacaccaaaatcgtcaagcttttcatacagggtgcttacgtatttgtaaatatttaagcaacttgaaagtgcctggaaattgcaccactgtgcttggtttgtacttttttttaggtaaatctatatgctgaaaagtagaggtcaaaaccattcattcaattcgcttaattactgcttaataataacgagactatgtacaattgtataatggaatccaataaaaggtaaaaacttatttgt

SEQ ID NO: 3845 - DNA, 1585 bp, Cricetulus griseus
gaatcagagagacataggaagcagttaacagaagaactccaaaacgtgaagcaggaagccaaagccgtagctgaagaaacccgagctctgcgaagccggctccatcttgctgaagctgcacagaggcaggcacatgggatggaaatggactatgaagaagtgatccatctgctggagactgagatctcagagctaaaggctcagcttgctcattattctgaccaaaataaagaaagtatccaggacttgagaaagagagtcacagttcttgactgccaattgcgaaaatcagaagtggctcggaaaactttcaaggcatctactgaaagcctccttcattttgttgaggctgctcaggaagtacttttggatagttctgctcctttctcaaatttaagccgaaaggagagctgtgtttgcatcgcagacttcactcccactgctgggaaagaatggggcgcagcttcccagcaaacctgcttctggaatccaaaggagctcgttagatccgttcgtgccatacttgatatggactgcttaccttacgggtgggaggaagcttacacagcagacggaatcaagtacttcatcaatcatgtaacacagaccacatcctggatccatcctgtgatgagtgtcctgaacctgtcctgctcagaggagaatgaaagaggactgtcccagagagctgacagaccagaaaaagctgatggatgctttcaaccctcatcttatttaaaccagacagcatggggatagggctgatctgttggccatttccactcatgacttcagctggacgaacagtgcttcagagagacagagcatcctggcccagggctaagactcacacctcatcttctgattccatgtccagtcagtcccctttgccctgctcctgactggcctcacagagagaggttgtagtccagcagagcaccttccttgttgatgcagctgggtccacagctgtgcattccacgcaatccaagaggaccacctccgagtcaacacacacacacacacacacacacactactgatttgtttttctgtataggggtaagaagttaggaatttgtttccttaagaaacccttaaatttgaataattatggaaattgctgaccccccaccaccaccactaccttggctagaaaagggtaagaaggaacgtgctggaagaggttctccaataacaaatgaaaggcagctgtcaaaatagagagtcaaatagcacattcataaagtgcttgcacaatcagaaaatattagcctttttctagggagaaatgggacatttctctatggtaagcaaaatgtaacttttgaagggtcaacacacttgacatttttatgatacttatgcagaaagacctgaacaaacattaaatacagctttcacagtcttgtgtataattttcaagatgatgaaaagcacagaatatgcctgtgggaattttaaaagaattaaacagaatatgtctgtggaacataactttaggaatgttctatccaagatgtttagcatagctgttcacatataatatataaatactaaaaaaaaaaaaaaaaaaaaaaaaaaaa

SEQ ID NO: 3846 - DNA, 1585 bp, Cricetulus griseus
tcggctaagaaatgcttggttatggatgctgatgatgaagctgtcctgaacctcattgctgagtgtgagtgggacctaagcaatcctcccgggagcacgagctccagccaaaaggaacatgaggctgacctccattatgcccaagagtccggacatctgttaagtcctttgtccatccagcaccaatgtggggactcagtgaggagaggtcacgagaagaagaaaggcacctccagagggtgctgtccaggtcattcaccacaggaccagctctatggggaactcaccccacagcacggagtgccagagtcctgccatgtgcgtgtgcagcacagccgcttcactccatacccagactctgtggatgttgaggacggtagttcatcttctcagaagtcaactttgtcatcacaaaatatattaaatcctttgcctgttcctgaaaagtacaggaagcgaaggatgcctggtgggagattccagttgccttcagaccgggagtgtctgagctgcctagagaggcctgatgggtcctcgggcctcgaggacagtctgagcagacaggatggcttggagggccacagtcagatgaccatgtctcatcctgaggctttggaggctgaagatcggacatctcatggcacaaatgaccctagagtgctgtctcctaaactctgctcagcagcagtgcctgagcggaagcctgctctggaagtggcactcctggaggcactcctcgacctgatagacaggtgcgcaagtggctgtggatccctgcatggcaacgaggcattccttgctcaggccaggcatgttttgtcatctcttcaagagttcacagcatctccagacagttcagcacttgaaaaggaagacattaattacctgtctcttgaaaataagtctctgcagagccgccttgctgagcagcagcagcagtatgctgctacagtgagcaaggtgacagcagaactcaacagttcaaggagggagctggacacattgagacaacatttagacaaatctttggaagagaatagtaacttaaaatctcttctgttaagcgtgaaaaaagaagcaaaaaattcagacacttcagctgcattaactttgcagatcacgggacttcaggcaagtatgaaacagctctcaggggaagttatggagttgaagcagcacttggagcactatgacaagatccaggagctcacacagatgctgcaagagagccacagttccctggtcagcaccaatgaacatctcctgcaggagttgagccgcacacggtcacaacatagagctgaggtagagcagatgcactggagcttccaggagtttaagaagactgctgccctgctcccacgccgcagctcccggcttggtggccgccagtcctgttagctcctactgagatgtgtcctctatcagtcatagctccagagttgcacctgggcatgtatctatctgaatatcctggtgagactgtaattaccttaagatcctcaaaatgtgttgatggtctgaagttcagcttgcttatgtgtcctaaattgacaaagttgaccctgggtctttgccatatttg

SEQ ID NO: 3847 - DNA, 1585 bp, Cricetulus griseus
atcaagtgtaacattttgatgcttggcatctagactccttgtgctgtcactatgccagcagcaactgtagatcatagccaaagaatttgtgaagtttgggcttgtaacctggatgaagagatgaagaagattcgtcaagttatccgaaaatataattatgttgcaatggacactgagtttccaggtgttgttgcaaggcccattggagaattcaggagcaatgctgactatcaataccaactattgcgatgtaatgtagacttgttaaagataattcagctaggactgacatttatgaatgagcaaggagaataccctccaggaacttcaacttggcagtttaattttaaatttaatttgacggaggacatgtatgctcaggactctatagagctactaacaacatctggtatccagtttaaaaaacacgaaggaggaaggaattgagacccagtactttgcagaacttcttatgacttcaggagtggttctttgtgaaggggtcaaatggttgtcatttcatagtggttatgactttggctatttaatcaaaatcctgaccaactctaacttgcctgaagaagaacttgattttttttgagatccttcgattatttttccctgtcatttatgatgtgaagtacctcatgaagagctgcaaaaacctcaaaggtggattacaggaagttgctgaacagttagagctggaacggataggacctcagcaccaagcaggatcgtgattcattgcttacaggaatcccttaaatgataggcaatatctcccctccttttgtagcccttattttctgctttcagtactaagtatggccttcctagctgtgatcttataaaagtacattcaggttaaatctggccttaatttaatacacttcttatcaagcttgtgtgacagagctacattactgagtaatttgataaactttgcctacttgagcttggttttgttttcccttttcctaaattaactagcattgactgtaatttatttccctgtttcatgcctctccttctattctgcagtacttataggtatttaagattgtggaccatcaagtttgcactttagagagtaattccaatcctctattttatcagaaattgtggtttttcttgctctttgctggaaaaatgaccatctgcctacctttttacagtatttacttgtttttgacattcagagtacagcacatgctattgtgcaaattgttgtttctgtgcatagtgtttaaccttccaagcacattctcgggtctgttggtttctaattggcatgcataggctgctctgtgactgaagactttgagactagctttacacccttcaggaagaagccctgtgattggacgtttactatctgccagaaagctgcacttcaagatgttggaactacagttgtattttatgacagcaacacttcccttaattggcttccttttactccatcacttttacccttattttattttataggcatatttatgatgttcttgatttgttgactatacaaatcaatttcattaaagtccaaagataacaagtctttaggtacattttatatcaa

SEQ ID NO: 3848 - DNA, 1585 bp, Cricetulus griseus
ctgtcgaatgttgatgctcatcgggcctcttggctgatgtcactgattctggtggcttgcccatcctgggctggaattgtctggaccatctggaggcctgctccactgtcctgcccctctatgacaagtactatgtgctctgtgtggtcaccatcttttctgtcatcttattggctatcgtggcattgtatgtccgaatctactttgtagtccgttccagccatgccgataattgccggtcctcagacactggccctgctcaagacagtcaccatcgtactgggtgttttcatcatttgctggctcccagcttttagcatccttctcttagactctacctgtcccgtccgggcctgtcctgtcctctacaaagcccattattttttttgcctttgccacactcaactcactgcttaaccctgtcatctatacgtggtgtagccgggaccttcggagggaggtgctgaggcccctacagtgctgtcggcaggggaagagagtgacaggccgtagaggtgggaccacgggtcaccggctcctgcccctccgcagctccagttcactggagaggggcttgcatatgcctacatcacctacgtttctggagggcaacacagtagtctgaaaggaaggggtgaactgacagatagccaagccacagagagagctctgtggagagagaccaggtgacctcacgtgtccctcagtgccacaggcttagtggaactgaccacagctcataggtcagttggccaatggagccactgactgaaacagattgtagtaccatgactgcgaggaccgttaagggtctagggacacagcaggctggagcttagggctagagcatttgccacttggtacaaagggtgtcagtatcctgtcctaccttccagccacctggctccctgcctcctccttttaaacagggcctctctatgttgccctggctggcctagaacttgctatgcagaccaaggctgacaaccttaggccacttattgtggaaaccctgtccccaggggacccaaggcttcctccctgtcaatctgaggcctaaatccacagcttcctcaattgcatcaactgtatcacaggggtgcaccacaaacacctctcttgcatgttatcatgaataacagagttaacagagatgtgaggtggctatggacattcctgggtactcatatgtaaccttcccttgaaggactttgctgaatcctgtggagatatagaaagtccaatgcggtacaaactgtatttatatatgtctgtgtgccagtgagtagggtccatgacatgtcccagtgtggggtgctgtctgacctctcgtgttcgcatctctgttgaaactgccagagagatagggggtctggccatgcacaggccccttgggaattgctggttcatctcttccacacatagaaacctctgcctcagatttgtgaaagaaaaggtggaggaaggggaaatttgggatgcaaggagccagttgggagtgtatctcctctcatatagcttcccagatatcctccttgtgctggagacccagatctgggctaataaacagttcagtttctcttgc

SEQ ID NO: 3849 - DNA, 1585 bp, Cricetulus griseus
ggccaccaaacccacggtgcaggagccgcttcgccttcctcttcaacaacgaggtgctgtgcgacgtgcacttcctggtggggcaaggggctcagctcgcagcgcgtccctgcgcacaggtttgtgctagctgtgggttcaatggtggaatggctaccacatccactgaaattgagttgcctgacgtggagcccgctgccttcctggcactgctcaagttcctgtattcagatgaagtacaaattgggcccgagacagtaatgaccacgctgtacaccgccaagaagtatgcagtgcctgcactcgaggcacactgcgtggagttcctgaagaaacacctgcgggctgacaatgccttcatgcttctcacgcaggctcggctctttgatgagccgcagctagccagcctgtgcctggagagcatagacaagaacacagccgacgccatcgccgccgagggattcactgacattgacctggatacactggtggcagtgctggagcgtgacactctgggcatccgtgaggttcgactattcaatgctgtagtacgctggtctgaagctgagtgtcaacggcaacagcttcaggtgacacctgagaacaagaggaaggcgctagggaaggccctaggtctcatccggttccccctgatgaccattgaggagtttgcagcaggcccggcacagtccggcatcctggcggaccgagaggtggtcagtcttttcctgcactttactgtcaaccccaagcctcgcgtggagttcattgacaggccccgctgctgccttcgaggcaaggagtgcagcatcaaccggttccagcaggtggaaagccgctggggctacagtggcaccagtgaccgaatcaggttctccgtcaacaagcgcatctttgtggtgggctttgggctctatggatccatccacgggcccactgactatcaagtgaacatccagatcatccacacagacagcaatacggtcctcggccagaacgacactggtttcagctgcgatggctcggccagcaccttccgtgttatgttcaaggagccagtggaggtcctgcccaatgtgaactacactgcctgcgccacgctcaagggcccggactctcactatggcaccaaaggcttacgcaaggtgactcatgagtcgcccaccacaggggctaaggcatgctttaccttctgttatgccgccgggaacaacaatggcacctctgtggaggatgggcagatcccggaagtcatcttctacacctaggacattctccaccgaggtcaccccttgccagccacaggccagcctccctccctgccacttccctcatcatcatggaaggggctgccttgtgttcacagtgacaagtgtgacccccatcccaaggcactggggagttggtcgggccatgggctgggccctgtcaagacaatccctcagtcttggtgggcagagtgggcctggtcgtgtatggacagtacctgtgacctcctacccagaacccatgtcctccccaaagccatgggaggtgacccctccacactgtatccccaaatgaaaatttttttaaataaaggaaa

SEQ ID NO: 3850 - DNA, 1585 bp, Cricetulus griseus
tctgggcctccctcctccgtccgcgcccgccggagcctgttcgcgtcgactgaccagagtccgcgaatcgttcgctccggctctccggaccgcccagatcccagctttctgacctttgaaaacacttaagaatcatgtctctgcatcagtttctgctagagccaatcacctgtcacgcctggaacagggatcgtacccagatcgcccttagccccaataatcacgaagtgcacatctacaagaagaatgggagccagtggactaaagctcatgagctgaaggaacacaacggacacatcacaggtattgactgggcccctaagagcgaccgcatcgtcacttgtggggcagaccgcaatgcctacgtctggagtcagaaagatggcatctggaagcccaccctagtgatcctgagaattaaccgagctgccacttttgtgaagtggtccccactggagaacaagtttgctgtggggagtggggcccggctcatctctgtttgttactttgagtctgaaaatgactggtgggtgagcaagcacattaagaagccgattcgctccacggtcctcagcttggactggcatcccaacaacgttttgctggctgcaggctcatgtgacttcaagtgcagagtgttttctgcctacatcaaagaggtggatgagaaaccagccagcacaccttggggcagcaagatgccttttggtcagctgatgtctgagtttggtggcagtggcactggtggatgggtgcatggggtcagcttctctgccagtgggaaccgcctggcctgggtcagccatgacagcaccgtgtctgttgccgatgcctcgaaaagcgtgcaggtttcaactctgaaaaccgagttcctgccactgctgagtgtgtccttcgtttcagaaaacagcgttgtggctgctggccacgactgctgcccgatgctctttaactatgacgaccgtggctgtttgacctttgtgtccaagctagacgtcccaaaacaaagcatccagcgcaacatgtctgccatggaacgcttccgaaacatggacaagagagccaccactgaggaccgcaacacagccttggagacactgcaccagaatagcatcactcaggtgtctatttatgaggtggacaagcaagattgtcgaaaattttgcactactggcatcgatggagccatgacaatttgggatttcaagaccctggagtcttccatccagggcctccggataatgtgaagccgagggagcctctgccatccagcatggggaacggacttcgctcactctaccattcgttcatatggtgatgaggatcgccagcccatggaaacactgtcacactatcaagcaactagcgtgtgttcgtgtggatgttgtggggagagtgtgggtttttcaagataggggttccttttttttttttttcctttcgtttcgttttgattttgctatctcattccatttttgaccaaagcttctctttaagtagtttatgttggaagattgtcacactaacttaaagggtaagggaagtgtgtattgtctgctaaaaaaaattaaaaatcccaagtgtg

SEQ ID NO: 3851 - DNA, 1584 bp, Cricetulus griseus
gcgttccaccgactggagagtggcggcccggcctccgcaagcttccccgggtaaaggagctccagctccgtagctaccttgccaagctcatccttagccgcaatcttaacttccttcgcgaccctcctcttgcttgtcgccaaaccacctccggggttcttccctctgatccttttcttcttgttgctttcctttttcctgtctctccagctaccgtttcccaactccgcgttttcccaaaatacccctagcctgtaatcccaggcatccccacctgccaccttttaacttctgctcctccttgacctcagatccttcggtcaacagggccttctcgccagacccccctacactcctctttctcctctctttgccaccctctgaaccccaagttccctctaaccttatttcacttcttgacatttgaccctgacactttaactctctaaattctacctgttgccgcctggactgcaaaagccaggtgttactctgatatccatccctgcttttggtaggcctttgctacccctaccatggacttcttgttgagtggtatggcagcctgcggggcctgtgtgttcaccaatcccctggaggttgtgaagaccagaatgcaattacagggagaactgaaggccccgggaacctaccagcgccactaccgaaacgtcttccatgccttcttcaccattggcaaggtggatggcctggccgccttgcagaagggcctgggccctgcgctcttgtaccagttcctaatgaatggcatccgactgggcacctacgggctggcagagcgtaagggatatctgagcactgatgaaggcgtcctcagtcctgtccgcagcgctgcagctggggccctagctggggtcattggagcctatctgggaagcccaatctacctggtgaagacacacctccaggctcaggcaacctctgaaattgctgtagggcaccagtataaacatcagggcatgtttcaggcactaacccagattggccagaaacatggtctagtggggttgtggcgtggggccgtgggcggcctgcccagagttgtcatcggttcctctacccagctgtgcaccttctcatccaccaaggacttcttgagccagtgggagatctttcctccccagagctggaaggcggctctggcagctgccatggtgagtggcatggcagtagtactggccatgacacccttttgatgtggcgagcacaaggctctataaccaacccactgatactcacggcaagggcctcatgtaccgggggatcttcgacgctctgctgcagacagctcggacagagggcatttttggcatgtacaagggtataggtgcctcctattttcgccttggcccccacactgtcctctccctcttcttctgggatcagcttcgttccctctacaacacatacactaaaatgagttgctctactatacccaagtcaacaccctttggacacctctgcctctacttactatctcagtgactactgaccgatggacttctcatccacttgaggacagccacacccactccctctctgttctcttagggttgaatcact

SEQ ID NO: 3852 - DNA, 1584 bp, Cricetulus griseus
cagagacagtgctgcgacctctctatatggatgtgcaggctacaactcctctggatcccagggttctggatgccatgctcccataccttgtgaactactatgggaaccctcattctcggactcatgcatatggctgggagagtgaagcagccatggaacatgctcgccagcaagtagcatctctgattggagctgatcctcgagaaatcattttcaccagtggagctactgaatccaacaacatagcaattaagggagtggccaggttctacaagtcacggaaaaagcacgtggtcaccactcagactgaacacaaatgtgtgctggattcctgccgctcactggaggctgagggctttcgagtcacttacctcccagtgcagaagagtgggatcattgacttaaaggaactagaggctgccatccagccagacaccagcctagtatcagttatgactgtgaacaatgagattggtgtaaagcagcctattgcagaaatagggcagatttgcagttccagaaaggtctatttccatactgatgcagcccaagctgttgggaaaatcccacttgatgtcaatgatatgaaaattgatctgatgagcatcagcggtcacaaactctatggtcctaaaggggttggtgctatctatatccggcgtaggccccgggtccgtgtggaggccctacagagcggaggcgggcaggagcggggtatgcggtctgggacggtgcccacacccttggtggtggggctgggagcagcttgtgaggtggcacagcaagagatggagtatgaccataagcggatctccaagttagcagagcggctgatacagaagataatgaacagccttccagatgtggtgatgaacggggaccccaaacagcactaccctgggtgtatcaacctctcctttgcatatgtggagggggagagtctgctgatggcactcaaggatgttgccttgtcctcaggaagtgcctgcacttcagcatcactggagccctcttacgtcctcagagcaattggcactgatgaggatttagcacactcttctatcaggtttggcatcggccgcttcactacagaagaggaagtggactacactgtggagaaatgcatccatcacgtgaagcgcctccgggaaatgagtcccctctgggagatggtgcaggatggcatcgacctcaagagcatcaagtggacccaacattagaagagccggcctgtgactttgtgctgacctggcccttcctgcctcactgacccatgtacagccaggaaccttgttacctgctgggtggtccatggtcaaccagagctggcatagcccagttgatttcaccaaagaacgctgttaattgagaaattcaaggaagcatccttcttagcctcagcctttgtagggagacgttccctgttcctcctcaggggctcttctctatttagtgtgtggacattctttgctaagcgcctagaggcactgctgcctctctgccactaggcttaccgacccttggggaggtggaagaactggaagacggctctaggttcaaagactgtttctccatgtgaacatt

SEQ ID NO: 3853 - DNA, 1584 bp, Cricetulus griseus
tctaatttttcaggtgccgacttattaaagctgacaaaggaggatttagttcagatttgtggtgcagccgatggaattcggctctataattcccctgacgtcaaggtcggttacggccccgcttaaccatctatgtctgtcaggagcagccgaatagcactgtgctgcaagggcacgccccaagctgcaggcagcggaggagagagtggcaggtgggacgccctgcgtttatcatgcaatctacttggaagaaatggttgcctcagaagttgctcgaaaacttgcctattcctttccaccaaattaaccaggtttacagacagggccctactggtatccacattcttgttagtgaccagatggttcagaacttccaagacgagagttgttttttattctccacagtgaaagctgaaaataatgatggtattcacataattttgaagtgataccttatacagactgaactctatccagtaccaaataaagtcatgcttaaaagtgtgtgaagactgaatccaagaagtcttgggattggattttactgtgaaatgtttcatattgaaaacacaagatgaccttcctaatgagctgtaggagagacaaatctcctcgttgtcactgccacagcccagcaccctcacgagagcgaggtgggcacagtgcccacttccctagcaggggccagtggacaaagttcccaggagtctctgctggctttttgacactgtatgcggtttgaaatgaatgtaaaaactcaaccgtgggcatttacctttctgtgccagtttggctttttgttgcctgacccttatactacctcggggaggagatagggtgtgctctccttggggcctaataggtacaaagacttggggtgttttggctttttgcttccattttagcattttagtttccaaatttcactttttgaaacctccttgccttttaaaactcatgtggtttccttttctctggaaacactagatgtcacaacaagacactaaaatgtaccctgaccttttcctaccctcacatgctgagtttcagtacaatcatggctgactgcttcagcgggtgaaggctttaacgtcttgcgttttagtcataatggggttaattatttgccacaaattctcaactccgtctcggtatgttcatcttgggcttggcagtgctgtagctctgcaggcccttcacgaggggcacactccatctgtcctcccttgcttttctgtgaccacatgctttctgtaccagtcacttatttggaaagaagtgaatttatctaattggttttagaattttgcttgtctgttagctttcctttttggatctcatgatttatggaacaataaatgtcatttaatgctgtgtgctattttgaattccttatcaggttttagaagtggggtgaaagtactttcaagctcctcagacttgaaattgtgctgagcagcacacagtgctagtctgtctcagtgaaactgtgcagaacccccggcaccagcagtttgcttactttggttaataggatgtacagttcagtctaataaatgtttctgatggttttaagtaaaaaaa

SEQ ID NO: 3854 - DNA, 1584 bp, Cricetulus griseus
  modified_base (38)..(38): a, c, t, g, unknown or other
  modified_base (573)..(573): a, c, t, g, unknown or other
ctggtcaatcaccagaccatgacgacgtggatggaganctttcggaccatcattgacaggatggtccctccggagactcttcaaattgatgaggatgaccgaccagagctggtgtggtggaagtgtaagaatgggctctgcacattgctgcccgtctctttgagcggtatggaagcccgggaaatgtcacaaaagaatacttcgaattttctgaatttttttgaaaacctatgcagtaggaatccagcaggtactactaaaattttagaccaatacagacggaaagaatatatagccccataattatgtgacagtagacaccaacgcgttgctgtcaaatccaaagcacttagaagtcttgttcactatgtgcaggaaggtactgtatggagaggcaggagaggacgctgagtgcttcgccgccaactcctggaagtcatcattcttcagtgcaaaggaaggggaattgatcagtgtatcccgctgtttgttcaacttgtcttggagagattgacccgtggggtcaagaccagcgagctgcgcacaatgtgtcttcaggtggcgatcgccgcnctttactacaaccctgagctgctgctgcacaccctggagcaggtccagctgccacacaacccaggacctgtcacctcgcagttcataaaccagtggatgaatgacaccgattacttccttggacaccacgaccggaagatgtgtatcataggactgagcatcctcttggaactgcagcaccgacctcctgctgtggacgcagtggctgcacagatcctgccttccattctcttcctgttccttggcctgaagcaggtctgtgctacccgtgaactggtaaaccgcggagatccctcaaaagcagagaaagccgacatggaggaaaatgaggagatttccagtgaggaggaggaggagacaagtgttactgctcaagctatgcagtcacacaatggcagagttgaagaggaagaagaggacgactgggatgaagaagtgctggaggagacagccctcgagggcttcagcaccccactggaccttgacaacagtgtggatgagtaccagttttttacacaagctctactgactgtgcagaatcgggatgccgcctggtatcagctgctggtggcaccactcagtgaggaccagaagagaaagcttcaggaggtgtacacagtggcagagcatcgacggacaatggcagaccgttcaccgaccatcatcaccgttgctgcatatttcacgggatgcgagagggccgagagagagggaagcaaggggctgtgtcatcggcatcaggcagccgtggactcgctcgcccttcccttgttccttctaacctggaatacgtatttttcaacagctactgtaatgtacgaagtttaagaaaagcagaatcattgatcagaaaggacaaagcgtctgctcggaaggacgaacgctgaggggtttagagttaggtacggcgcatgcgtctcaggtttttgccatgcagaatcagtggatttatgcggataacagtgccttctgttgtacatgaattatcaagaaaaaaaaatttttttagga

SEQ ID NO: 3855 - DNA, 1584 bp, Cricetulus griseus
gccgccgtcgccgcctctcctttccgcagccatggagtcctccatctttgtcttgctgcctgttgtcacccagctgaacaatctcccaagctgcctccccactattggtgcagcctccatccgtgccctgcgcctgtgtctcagccatgtcactcctggcgaccctggggctggaactggacagggccctgctcccagctagcgggctgggctggctcgtagactatgggaaactccccctggcccctgcccccctgggcccctatgaggtccttgggggagccctggagggcgggcttccaggggggggagagcccctggcaggtgatggcttctctgattggatgacagagcgagttgacttcacggccctcctccctctggaggcccctctgccgccaggcaccctccccccaccctctccagccccccctgacctggaagccatggcttccctgctcaagaaggagctagaacagatggaagacttcttccttgatgccccactcctcccaccaccctccccaccaccaccctccccaccaccaccagcatcctccctgcccctgtccttgcccctgcccacctttgaccttcctcagccccctgctctggataccctggacctgctggctgtctactgccgaagtgaggctgggccaggggatgcaggcttggcaaccctgcctgccccccagcagcctcctccttctctggcccctctgccttcaccctctcgcccagccccctatcctagtcctgccatcaccagaggtgaccgcaagcagaagaagagagatcagaataagtcagcagctctcaggtaccgccagaggaagcgggcagagggcgaggccctggagggcgagtgccaggggctagaggcacggaaccgtgagctgagggagagggcagagtcggtggagcgggagatccagtacgtgaaggacctgctaatcgaggtgtacaaggcccgcagccagaggacccgaagcacctagggtacatgcaggtccaggctggaagagggaggtctgtcatccctctgcccccagcttcactcctaccctccatcccactcttctatctcatccatgtctggatttccctacctactccccctatggttatttggtttagtcagtttctgtaccctttcaatgcaactgaggaaccaaggccctcagggaatttgagaatacagcctgaaccctggtttctggagtctaaaacaagtgtgtttttgcaggtagtcctagttgggttcgggggactgtcaggtctggcatggaggtaaggcaggaagccactcagggtaactgctgatgagaacctagtcagggagggagggctttaaggaggggacataggacacacatgagaagtcagccaacggaagggagtcaagtcctcagtacaggagagatgttagccaagagagaagggtggctgtagttggtaactaggggccatttagctttgggagagaatcagtgtttggtgaaggtgttagggagggattgcatctagtgggggctgatcctccaggggttatgggcacaaataaaatgcagaatttcctgt

SEQ ID NO: 3856 - DNA, 1583 bp, Cricetulus griseus
cgcacggcacccacgcgcgcgtgctcactggggccacggaacctccgcctccgccgccgcggctttccgtgtgggctcccgaattagacttctgttttcttgctgcctcgcctctggctcaccgggcggcagcaatagcgactgcgctgcaccggccctcgcggcgtgggccgcggaagctccggcgcgatgctgcgctggctgatcgggggaggccgcgagccgcagggcctggccgagaaagctgctttgcagacaataggagaagaccaaagtcaaaacccctacactgagctgctggtcctcgaaagcccatcgagatattgtccggttcctggtgcagctggatgataacagatttgcatctgctggcgatgatggaattataattgtgtggaatgcccagacaggagaaaagctcctggaactcagaggacacacccagaagataactgctgttattgcatttccttccctggactcttgtgaggtggacagtcagctcatcttgacagcctctgctgacaggactgttggtgtttgggactgtgataccggcagacaaatccagagagtctcctgcttccagtctactgtaaagtgcttaactgttcttcagggactagacatttggctttcgggtggtaatgacttaggtgtgtggaaccgaaaattagatctgctgtgtaagaccgaccacctttctgatacagggatcagtgctttggttgaaatccctaggaattgtgttgtagcagcagttggcaaagaactgataatttttaggttggtagcacccacagaaggcttgctggaatgggacatcattgaagttaaacgccttcttgatcaccaggataatattctgtcattggttaacatcaatgataagagtttcgtcactggctcccatgttggagagctgatcatttgggatgccctggactggactgtgcaggcctgtgagcgcagcttctggaatccatctccacagccggatgcccagcaagaaataaaactctgccaaaaacaaaatgacatttctattaatcatttcacatgtgatgaagagaatatatttgctgcagttggaagagggctgtatgtgtataacctacaattgaagcatgtgattgcctgccagaaaaccgcacatgattccaacgtcctacacatcgacagacttcccaacaggcagttaatctcatgctcagaagatggcagtgtgcgcatttgggaggtccgagaaaaacagcagctggcagcagaacctgtcccaacagggttttttaatatgtggggatttggaagagtgaacaaacaagccagccaacctgttaaaaagcagcaagaaaatggcactacgtgttctctggagctcattggagatttgattggccactcatcctccgtggagatgttcctgtactttgaagatcatggactagtaacatgctctgcagatcatctcattattctgtggaaaaatggagagcaagaatctggattccgaagcataaagttatttcagaagttagaagaggacggtgacttacacccctgagcccctacagtagtctttt

SEQ ID NO: 3857 - DNA, 1583 bp, Cricetulus griseus
catcgtattgattagaagacttgattgtaattttgatataaaggttttaaatgcattggtgaagcatcagctaattccctgaaagatgaattcacatatgaaaaagggggccacgtcatcttagttccagaactgagtcttcctttggagtactatctgattcctttcctcatcatagtgggcatctgcctcatcctgatagtcatttttatgatcacaaaatttgtccaggacagacatagaaacagaagaaacagacttcgtaaagatcaacttaaaaaactccctgtacataaattcaagaagggagatgagtacgatgtatgtgctatttgtttggaggaatatgaggatggagataagctaaggatccttcccctgttcccatgcttatcactgcaagtgtgtagatccctggctaactaaaaccaaaaaaacctagtccagtctgcaaacaaaaagttgttccttcccaaggtgattcggactctgacacagacagcagtcaggaagaaaatgaagtgtcagagcatacccctttactcccaccttcagcttctgtcaggacccagtcatttgggtctttgtcagaatcccactcacatcagaacatgacagagtcttcagactacgaggaagatgacaatgagaccgacagcagtgatgcagacaatgaaattactgaacacagtgttgtggtccagctgcagcccaatggtgaacaggattacaacatagcaaatactgtgtgactttcaggtggttggtttatttccctttaaaatgtttatttaggtatatgatttggtttttctgctctcttagaggtttctgtagaaataacttattttttaattttctagtgtaatcacgttcctgaaataggctatttgatctatgacacttatctccaatagtatacatccatttcactaacaagtaacacactggtgctgtacttcaggcatcaaattagctctctgggaatgatgaaatgtagccaagacacttttaaaatcctcaatatagcttgaaatgaagacctagatctttaggatttttcctcctagaaccacagagaaactaaaagatgtcattttctttcctattcccaaatatttttcctcataagaaatgtctagtgtagacttcaaatatttcattttagggtttttaaaacagtatagtgttatgagtttgattccacaggaacatctctgtaccttacttttccatatttcagtatccttttgtgttgcaataaaaaaatgctgcataaaaataccaaatttcagcaactgttaatactgaaatcatatacctcttcataaagagcatcttatgctagttagccctgctgaaccatgtgcagaggaaatcgttcatgtattgggtttgaaaataagtgcttttgcttaacagaactaatgtattgaggcaatgtattatgaaaagctaaattgtataacactgtaactatgaaaatatacttaaatataatcagaatgctaagactttttatatggccttgtatgatgggagcttcaatgttaataaatgttttccaatttaaaagccaacaa

SEQ ID NO: 3858 - DNA, 1583 bp, Cricetulus griseus
gcgtcagaccgcggcgcgggacaccgcgggatgggagggtgcagctcttcgagattcgcctgagacagggccgcgtcgtctacagtcctggggagccgctggctggggccgtgcgcgtgcgcctgggagcgccactgccttccgagctatccgggtgacctgcatgggttcctgtgggggtctccaacaaggccaacgatggggcatgggtggtggaggagagctacttcaacagctccctgtcactggctgacaagggaagtctgccagctggagagcacaacttcccctttcagttcctgctgcctgccacagcacccacatcttttgagggaccctttggaaagattgtacaccaagtgaaggcctccatcgatactccacgtttttccaaggatcacaaatgtagcctcgtgttctatatcctaagccccctgaacctgaacagcatcccagatattgagcaacccaatgtggcctccactaccaagaagttctcctacaagttggtgaagacgggcagtgtggttctcacagctagcactgaccttcgtggctatgtggtgggacaggtgcttcgactgcaggctgacattgagaaccagtcaggcaaggacactagccctgtggtggccagcttgctccagaaggtatcctataaggccaagcgctggatctatgatgtgcgaaccattgcagaggtggaaggtacaggtgtcaaggcctggaggcgtgctcagtggcaagaacagatcctggtgcctgcccttccccagtcagccctgcctggctgcagccttatccacatcgactattacctacaggtctccctgaaggcacctgaagccaccgtgactctcccactctttgttggcaatattgctgtgaaccaaaccccactgagcccctgtccaggcccagggtcttctcctggggccttgtcctcagttgtgccctctgcaccaccccaggaagaggctgaggcagtggctagtggcccccacgtctcagacccagtttccctgtctaccaagagccattctcagcagcagccactgtcagctactatgggttctatgtctgttgccaccattgatccctgtgttcaggttggaagccctgctcgacattctctgcaccctcccttgtgcatctctataggtgccactgtcccctactttgcagaaggctccgggggcccagtacccaccaccagcgccttgattcttcccccagagtacagttcatggggctacccctatgaggctccaccatcttatgagcagagctgtagtgccagtacagaccctggcctgatcccagggagctgaccctggtgagctaacccttgccaccttcttcggtggacctggcctttgccctgggacaagatgcccagggcctcgtgcctttgctctctacctggcccagctactcaggacctgcagccgatgggacgaccccttgtggaccagcctctcctggctcctctggaattaatcagtcctcttctcgagaggaatggggtagggcggcagggatctgggacctggagagactataaataaagcgctttatttgta

SEQ ID NO: 3859 - DNA, 1583 bp, Cricetulus griseus
ggaggaccaggagtggcaggatgagctctcagacaaccagtccgagtattccattggctctgaggatgaggatgaggactttgaggagagacccgaggggcagagtggacggcgacaatctaggaggcagctgaagagtgacagggacaagcccctgccgcctcttctggctcgagttgggggcaacattgaggtgctgggcttcaatgccagacagaggaaggcctttttgaacgccatcatgcgctggggtatgcccccgcaggacgccttcaactcccactggttggtgcgggaccttcgtgggaagagtgaaaaggaatttcgagcctatgtgtccctcttcatgcggcacctgtgtgaaccgggggcagacggcgcagagaccttcgcagatggtgtgccccgggagggcctgtccaggcagcatgtgctcactcgtatcggggtcatgtcgctggttaggaagaagtctgagatccacaagggcaactacttggaaatgaagaacaagtttttggcccgcaggttcaagctgctggagcaggcactggtgatcgaggaacagctccggagggctgcgtacctcaacatgacccaggatcccaaccacccagccatggctctcaatgctcgcctggcagaagtggagtgccttgctgagagtcaccagcacctatccaaggagtcccttgccgggaataagcctgccaatgctgtgctgcacaaggtcctgaaccaactggaggagctgctgagtgacatgaaggcagatgtgacgcgcctgccctccatgttgtcacgcatccccccggtggctgcccgtctgcagatgtccgagcgcagcatcctgagtcgcctaaccaaccgtgctggcgaccccaccatccagcagggcgctttcggctcctcccagatgcacaacagcagctttgggcccaacttccggggccctggaccgggagggattgtcaactacaaccagatgcccctggggccctatgtgactgacatctagtcgtcctcgtgacatccccctgttgcagcgcccctttccagctgagccgggccacctgcccaaccccatgggagagaaaagctacagcccttttaggagttggtgccgtgttggatacaaagggaaccaagcaattctatcacgcagaggacaggaggaggaagctaacccacccaatttatatacccggaagtttacaggttgtggtgcgtcagcccaaagtcgtcggtgtccttgtgtttaatggatatttccctcttaattttcagatttttttttttttaaacaaagtattttttaggtgcgataacccggaaagggcctgttgggtgtgtgtgtacgtcctgaactctccacatagccacatagggaccagagcccagctcagaggcagctcctccacccagcctggagaggaggggagggcccctctgctgcctgccagggtcaagctagactctccagggagttctcttcctgcccaggccaggccagcatctgtcgcactggagccccatccagcacaacctggtgaagcaggagcaggcacttggggctagctggg

SEQ ID NO: 3860 - DNA, 1583 bp, Cricetulus griseus
  modified_base (173)..(173): a, c, t, g, unknown or other
  modified_base (184)..(184): a, c, t, g, unknown or other
gctgatgagcatggagattccctgagaaccatccagcagctggagatgcctgaagctgctgccagggagttggactttagtcccaaagcccatgggaccaatggggatggagtctgaagaaagcgagtctgatggaagtttcattgatgtgcagagtgtgatcagtgatggtnaacttgaaacngattcatcggagcttctaaacctccctctgaacaagatagaagaggaaccaagaggaactcggaagaacacaacaaagctgacagagatgccaagggctcgcctgatgaatggctagatattaatctggaagaactagacagcctggagagtaacctcttagcagagcagaattcactggaagctcaaaaacagcagcaagaacggattgctgcctctgtaacaggccagatgtttctggaaagtcaggaactcctgcgcctgtttggcattccctatatccaggctcccatggaggcagaggctcagtgtgccatcctggaccttactgatcagacttcagggaccatcactgatgatagtgatatctggctctttggagcccgacatgtctataagaatttttttaacaaaaacaagtttgtagagtactaccaatatgtggactttcacaaccaattaggattggaccggaacaaattaatcaacttggcttatctactgggcagcgattatactgaagggatcccaactgttggctgtgtaacagccatggaaattctcaatgaattccccggacgaggcctggacccactcctaaaattctcagagtggtggcatgaagctcaaaccagcaagaaggttgcagccaatccccatgacaccaaagtaaaaagaagttacggaagttgcagctgacacccggctttcccaaccctgcagttgcagatgcttacctcaggcctgtggtggatgattccaggggatcgtttctatggggcaaacctgacgttgacaagattagagaattttgtcagaggtattttggctggaacaagacgaagacagatgaatccctttttccagtactaaagcaactgaatgtccagcagacccagctacggattgactcttttttcaaattagctcaacaggaaaaacaagatgctaaacacataaaaagccaaagacttaacagagctgtgacatgtatgctaaggaaagaaagagaagaggcagctagtgagctggagaaagagactgaggccctggatgaggcaaaagggaaaactcaaaaaagaagcctgatgagcccacgagagacatcagtccccaaaagaaggagggcttcaggaagtggtgggtttctgggggactcccacctctcagaatcacctcgagattcaagtgaggatgcagaaagttcatctgtggtgtgcacaccacggggaagaacagctgagtcctcaacagtcagctgctcggatttgcccgacgtagtgagagatgctcacaggagggatggttatatgtccactagcagctccggtgaggatggacgggacaagctaaggctgtcctagtgactgaaaaactaatttaaagaaaaaaaaaaaagt

SEQ ID NO: 3861 - DNA, 1583 bp, Cricetulus griseus
cgagggggaagagtgtgtgtctgtgcgggagaaaggggagaatcgcccgaaaggtctcggaagcccctgggagtgaggcccagcctgcaggaagccctgcagtgtatgtgtggtaacgccatgtctgtgcccctgctcactgacgctgccaccgtgtctggagctgagcgggaaacggccgcggttatttttttacatggacttggagacacagggcacagctgggctgacgccctctccaccatccggcttcctcatgtcaagtacatctgtcctcatgcgcccaggatccctgtgacactcaacatgaagatggtgatgccttcctggtttgacctgatggggctgagtccagacgccccagaggatgaagttggcatcaagaaggcagcagagaacatcaaggctttgattgaacatgagatgaagaatgggatccctgccaatcgaatcgtcctgggtggcttttcgcagggcggggccctgtccctctatacagcccttacctgcccccaccctttggctggcatcgtggcattgagctgttggctgcctctgcatcggaactttcctcaagcagccaatggtagtgccaaggacctggccatccttcaatgccatggggagctggatcccatggtacctgttcggttcggggccctgacagctgagaagctacggtctgttgtcacacctgccagggtccagttcaagacatacccaggtgtcatgcacagctcctgtcctcaggagatggcagctgtaaaggaatttctggagaagctcctgcctccggtctaactagttgctggctcccattgcggtccccagctcatgagggacccagcaaacaacaccgcaccatcttggatctgagccggtcgagcccctgtcccttctcttcccatcctgtcttcttcccacaggcctctggggcaggtggccgaggctggccaggccttcctgctggcctcagtcatctggaagtcagcagcaggggtgggctgctttcttatccactcccccggaggcgggccccagcagcagtattggaggggctgtaggcagcgggagaaaggggcccagctgctgacccactcactcaggacctcactcactagccccgctttgggccccctcctgcgacctcagggtttggcccgtggggccctcatgggcccccccaccccagtgattctgcccggataatcgcgtctctcctgcctcactgcagctgcttctctgtcacgaatgtgtccatggccggggcccttgctactgtgggctgcctgctcctgtgcaggcgagttggtgtggaggtagagtccctcagggcctccccttagctcctcccccaaggggctgggccctgcctccccatggcccttccttgcaggcctggagcctgcagggctggattgaggttcaagggcccctgctcccgctgtctcacccccactatgtccccactctagggccagggaggtggggggaggggttgtgtcttgtcttctgtctccatgtggttttgggtgtttttcttgttttgtcctggattccaataaaattaaagaaattgcttc

SEQ ID NO: 3862 - DNA, 1582 bp, Cricetulus griseus
ttttcttagaaaacaaaaaaaaaaaaaaaaaaaaaaaaaaaaggccacaaggtgatcaacggttagggccctgcagcccaagcccatggtcccaagtttgagtcctcccccaggaaggctggaggcttgaggatcacagacggtcccttttctaagttattgatctcccatgtgccctcatgaccatctgctccccagactccaagaagtgggggtgggcggcatctgtgcccaccctgggaagtgcctaaccgtttttgttttgtttttgaagaaaagagaaatactctcctccactctgtcttggcagggcaggtgacatattgcaggtcccctgctctgagtaactgtcacccttgtcccctgcctcagacagggcctggcctgtggcagagcctttgggggcattgagcccctgagatccacttcccaatggcctggccaggagaggccctggagaccctgaggggctgtgtggagctgggcagctggagggacgggtgcacagaggcctcttccacgttttctcaggtccgtccccagacacgggcggtggcctcacccatgtgctagatcgcggcccagctgctgcactgctgcccggggcttcccaagcccgagagccagcatccagaaggtggtggccatggccagagaggacacaggtggcccccctgctgctcatatacactacagtgtctgtctgtctgtccgtcagtcagtcagatttctttacttttgcacgtgcattctgggcttggatatccggccatgcctttgtcctgcctgccacactggactccaagccccagagtgtccactcagacacacgccagtctgggcagttggtcacattgctgtcccaggcagaagggaacaagagagcagtggacataacagagccccagggtatggacaggtggctgtgacaagcactcacattcctggcctctggcccatggattcctcaccttcccacacccggctcctcttctgtctccagctgagggtccaatctcgtgccatcccaacacgatggggctacgtggatgacagggtcatcctctgtataggtatccaaggtctgggccaccccaagccggcaaagtgttagcccctttcaggcagcgttccaagtgtgccaggccacagtggccacagccaaagccctggggcaatacccagctcacccaagtggtgggtggcaggttctgcccaggggatccatgctagggcccttggggctgtgccacacagttcacaatggggacccagcctccccagtggctgctgagccccttgtatattagtacacagtcctcatttcagcctatttaagagaacactcaaaacactgtttttaaccctcgtcctttgcgaagcatgttccttgtgtcggtgggggaggcttgggtacctggctcggtgccaggctcctgcaggcccttggccacaaggcatggatgccagggtgtgagctgtaggtcggggccttgaccccttacccagagggtctcgctgaagccaccttttcatatctttctcttgaattctgttttgaatcggaataaactttgttcct

SEQ ID NO: 3863 - DNA, 1582 bp, Cricetulus griseus
ggaataaaaggatcctcacagagatttgaaaatggccacaaacaaaagcgccgacatcttcagctcggcatcactggccgtggagtatgtggattcactgctgcctgagaaccctttgcaggagccatttaagaacgcctggggctacatgttggataactatacaaagttccagatcgcaacctgggggtctctcatagttcatgaagccatctatttcttgttctctttacctggctttttattccaatttatacctttcatgagaaagtacaaaatacaaaaggataaaccagaaaccttggaaggccaatggaagtgtttgaaaggacttctctttaatcatttttgtatccagctacctatgatttgtggaacttactattttacagagtatttcaatattccttatgattgggaaagaatgccaagatggtttatgattttggcaagatgcttgggctgtgcagtcattgaggacacctggcactatttcctgcacagactccttcaccacaagaggatttataaatacattcataaaatccaccatgagtttcaggctccattcggaatcgaagcagaatatgcacatcctttagaaaccataattcttgggactggatttttcattggaatcgtgcttttgtgtgatcatgtaattcttctttgggcatgggtgactgtacgtttgctagaaaccatcgatgtccatagtggttactacattcctatcaacccgttgaacttcatccccttttatacgggttctcggcaccacgatttccaccacatgaacttcattgggaattacgcatccaccttcacatggtgggacagaatctttgggacagacgcccagtatcatgcctacaatgagaagctgaagaagcttgggaaaaaagactgaatgaatacccccatatatatatatttaagtacagttttcatgaggaggctttaaaggccatattgctcacctcaccaaaaggttccaggtgtcagaggaagtattaatgtacaatttatcacttcatgccacctgaggctgaagttgacattgccttttaagccttttgcatacactggtcagttcaaaactttctcaacaataatgtttgccatctagttaactttagacatggtgttttttagaaatgaaaatatcgtgaattgaatatattattagctgacagagcaagtgactgaaacccactctggtctggggctgaccggtttatgactattctttctgtgaaggattcttagtaactttattggcatcttgtaaatcgactcatttcttacgtaatgtatatagaatattatagtctaaagattttcaaattacttgatgttttttaaaccaaggagctcatttatgctgtcaatccctcatttttgtgtgtcaagtgttcaatgaagttgtgtcttgagctttgtgaactgacttcaatctgcacccagaactgttgaaataaatgtgatttttgtccagttctctggttttcagttgtgaccattaactgccatcttttattcttataaggaaaagcacagaaatcattaaaggaatttttac

SEQ ID NO: 3864 - DNA, 1582 bp, Cricetulus griseus
ccagttctactgttttgaggcggagtgattccccagagattccttttcaggctgctactgggtcttctgatggcttggatgcctcatctccaggaaatagctttgtcgggctccgtgttgtagccaagtggtcatccaatggctatttttactctgggaaaatcacacgggatgttggagctgggaagtataagctgctcttcgatgatgggtatgaatgtgatgtgctgggcaaagacattctcctgtgtgaccctatacccctggacactgaagtgacagccctctcagaagatgagtatttcagtgcaggagtggtcaaaaggacacagaaaggagtctggggagctgtactacagcattgaaaagaaggccaaaggaagtggtataagcggatggcagtcatcctgtccttggaacaaggaaacaggttaagagagcaatatgggcttggcccatatgaagctgttacaccctcacaaaggcagcagacatcagcctagataatttggtggaaggaaagcggaaacgtcgcagtaacatcagctccccagccaaccccactgcctccagcagcagcagcatgcttccacgggagttccatcaggcaaaaggaaactcatcacttctgaagagggaacggtccccagctaagcgaggccgcaagtctgtcaccgtgaaacctggtacagtgggggcaggagaatttgtgagcccctgcgagagtggagacaacacaggtgaaccttctgtcctggaagagccaagagggcctttgcccctcaacaagaccttgtttctgggctatgcctttctccttaccatggccacaaccaatgacaagctggccagccgctctaaactgctagatggtcctacaggaagcagtgaagaagaggaggaatttttagaaatttcctcctttcaacaagcagtatacagaatgccagcttcgagcaggagctgggtatatccttgaagacttcaatgaagcccagtgtaacacagcctaccagtgtctcctaattgctgatcagcattgtcgaacccggaagtacttcctgtgccttgccagtggaattccttgtgtgtctcatgtctgggtccatgacagctgccatgccaaccagctccaaaactaccgtaattatctgctgcctgctgggtatagccttgaggagcagcgaattctggattggcaacctcgtgaaaaccctttccagaatctgaaggtactcttggtgtcagatcaacaacagaacttcctggagctctggtctgagatcctcatgactggaggggcagcctctgtgaagcagcaccattcaagtgcccataacaaagacattgctttaggggtatttgatgtggtggtgacagacccctcatgcccagcctcggtgctcaagtgtgctgaagccttgcagctgcctgtggtgtcacaagagtgggtgatccagtgcctcattgttggggagagaattggattcaagcagcatccaaaatataaacatgattatgtttctcactaaagatacttggtcttactggttttattcctgctattgtggagattgtgttt

SEQ ID NO: 3865 - DNA, 1582 bp, Cricetulus griseus
tttctgtgcctgagtaagtctttgctgtcctgaattctctgttctctccacaggcagtgctctgcccaccggcccaccgcgtcaggggaacgatggccacagagtctacagccactactgccgtcgccggagagctggcttccgctgacaaaattgaagatgctcctgccccttctacctcttcagataaagtggatagtctggatgtggatagtgaagctaagaaactactgggattaggacagaaacatctggtgatgggagacattccatcagctgttaatgcattccaggaagcagctagtcttttaggtaagaagtatggagaaacagctaatgagtgtggagaagccttctttttttatgggaagtcacttttggagttggccagaatggagaatggagtgttgggaaatgccttggaaggagtgcatgtagaagaggaagaagagaaaaaacagaagatgaatctttggtagaaaataatgataatgtagatgaaactgaaggctcagaagacgacgacaaagaaaatgacaaggctgaagaaacaccaactgaatcggttcttgaaaacaagtctcttcaagaaaatgaagaggaggagattgggaacctggaacttgcctgggatatgctggatttagcaaagatcatttttaaaaggcaagaaacaaaagaagcccagctttatgctgcacaagcccatcttaaacttggagaagttagtgttgaatctgagaattatatccaagctgtggaggagtttcaggcttgtctaagcctccaagaacagtatttggaagcccatgaccgtctcctagcagagactcactaccagttgggtttggcctatggttacaactctcagtatgatgaggcagtggcacagtttggcaaatctattgaagtcattgagaagagaatggctgtactaaatgagcagatgaaagaggctgaaggatcatttactgaatatgagaaagaaattgaggagctgaaagaactgctacctgaaattagagaaaagatagaagatgcaaaggagtctcagcgtagtgggaatgtagctgaactggccttgaaagctactctggtggagagttcttcttcaggtttcactcctagtggagctggtgcctcagtctccatgattgccagtagaaaaccaacagatggtgcttcctcgtcaaattgtgtgactgatatttctcatcttgtcagaaagaagaggaaaccagaggaagagagcccccggaaagatgatgcaaagaaagccaaacaagagccagagctgaatggaggcagtggggatgctgtccccagtagaaatgaagtttcagaaaacatgaaggctgaggctgagaatcaggctgaaagctcggcaaaggaagaggggacagtggagtctgcaactacagtagaaagcactgcatgttaagagggagcagaacctttctcccgagggaaagtggttttgtacataatgtattttttcacttttggggattctttttgtataacttcaataaagattgtaggcaacagctaaggctttgatggcttttttcttaaatattgg

SEQ ID NO: 3866 - DNA, 1581 bp, Cricetulus griseus
cgggccccgccatggcgacgtacacctgcatcacctgcagggtggcgttccgcgacgcggagatgcagcgggcgcactacaagacggactggcaccgctacaacctgcggcgcaaggtggccggcatggccccggtgacggccgaaggcttccaggagcgggtgcgggcgcagcgagccgtggcggaggaggaggaggcgagcaagggcacggccacctactgcaccgtgtgcagcaagaagttcgccaccttcaacgcctacgacaaccacctcaggtcccggcggcacgtggagctggagaagaaggcggtgcaggccgtgagccgccaagtggagatgctcaacgagaagaacctagagaaggggctgggcgccgacggcctggacaaggatgccatgaacgcggccatccagcaggccatcaaggcccagccgtccacgtctcccaggaaagcgccctccgtgcccacggcggcggccccgagggcggagggcgcgatcgcaggcgcgggcagacggggcgctcaggagccgcgggacccgacggagaagccgccccggctgcagtggttcgagcagcaggccaagaagttagcgaagcagcagaggggaagagagtgagcaggaggatgaagaggaagacgaggaagattgggaagatattgattcagacgatggaatggaatgtgagaactccggagtggaggaccaggatgcagaagatgcagacgctggggagagcccgcccttaggtgccatcccaataacggactgcttattttgttcccatcactcaagctccctcatgaagaatgtggctcatatgactaaaatccacagcttctttattcctgatattgaatacctctcagatctgaaaggactgattaaatatttgggagagaaagttggtgttggcaagatttgcttgtggtgcaacgagaaagggaaatccttctactccacagaagctgtgcaggcacacatgagtgacaaaagccactgtaagctcttcacagatggtgacgctgctttggaatttgcagacttctatgattttaggagtagctacccagattacaaggaggggcaggaccctaatgaaattgagcagttgtcctcggataagactttggaatgcgatgatgaaaccatggagctgatacttccttctggtgccagagtgggtcatcgctccttgatgagatactacaaacaacgatttggcttgccaagagctgtaacagttgctagaaaccagaaggctgtgggtagggtactccagcaataccgagccctggggtggacaggcagcacaggagcagctctcatgcgtgagcgggacatgcagtatgtccaaaggatgaaatcgaagtggatgctgaagacgggaatgaagaacaataccactaagcagatgcacttcagggcccaagtacgattctgagaggctgagattgagagacgtatctctcactgcactttcctccttgtccgaggaccagtgaagccagattgtggaatggatcttctgctgctacttcatttgttctgatctaataaagtcagaatcatggtt

SEQ ID NO: 3867 - DNA, 1581 bp, Cricetulus griseus
gaggccctggaccagtgcatgacagccctagacctcttcctcaccaaccagttctcagaagcactcagctacctcaaacccagaaccaaggagagcatgtaccactcactgacatatgccaccatcctggagatgcaggccatgatgaccttcgacccccaggacatcctgcttgctggcaacatgatgaaggaagcacagtcgctatgtcagaggcatcggaggaagtcttctgtgttcggactcttttagcaacctagtccaccgtcccaccatggaccagttcacagaagccataggcactttgaaggaggggtgaagcttggtgttggagccttcaacctgacgctgtccatgcttcccactaggatcctgaggctgctcgagtttgtcgggttttcaggcagtgctgtgtgtcatgctgctgcttgtgttaccacactttcctcaccttcgtgctcggtactgggaatgtcaacatcgaggaggcagagaagctgctgaagccctacctgaacagataccccaagggtgccatcttcctgttctttgccgggcggattgaagctatcaaagggaatattgatgctgccatccagcggtttgaggagtgctgcgaggcccagcaacactggaagcagtttcaccacatgtgctactgggagctcatgtggtgcttcacctacaagggccagtggcagatggccttcttctacgccgacctgctgagcaaggagaactcctggtccaaggcaacctacatctacatgaaggctgcctacctcagcatgtttgggaaggaagactacaagcctttcggggatgatgaagtagagttattcagggctgtgccaggcttgaagctcaagattgctgggaaatctctgcccacagagaagtttgccatccggaagtccagacgctacctctcccctaaccccatctcattgccaatccctgctctggaaatgatgtacatctggaacggctatgctgtgattgggaagcagcggaaactcactgatgggatgcttgaggtcatcaccaaggctgaagagatgctggcaatgggcccagagaatgagtactcgacagatgatgactgcttggtcaaactgctgaaaggcctgtgtctcaaatatctgggccgaatccaggaagcggaggagaatttcaggatcatctctgccaatgaaaagaagattaaatatgaccactacttgatcccaaatgccctgctggagttggccctgctgttcatggagcaaggcagaaatgaagaggccatcaaactcctagactctgccaagcaaaactacaagaactactccatggagtcaaggacccattttcgaatccaggcagccacgctccaggccagatcttccctagaaggcaacagatctacagtctcatcaacgtccttgtagctttttgcagcacttctgggctggaagatgaacacacagctagctggacagagctcctggaaacatttcaaaagattccccacccctgccctgcctttccttggggtccactttggtgctccagtgggatggctcaagaatatttgtgcag

SEQ ID NO: 3868 - DNA, 1581 bp, Cricetulus griseus
ggaaaaaggcttgagagcatacagaaagccttggaggtggcgttctcagaggcagcctggaggcagccgtctgtcattctgctggacgacctggacttcattgccgggctgcccactgtcccagagcaggagcacagccctgaagcagtgcagagccagcggcttgcacacgctttgaaagatatgatcaaagagttagtttctgtgggaagtttgattgcgctcatcgccacaagtcagtcccaatgctgcctacaacccttgcttgtttctgctcaaggaatccacacctttcagtgtgtccagcacatccaacctcctaaccaggaacaaagatgtgagattctgcagaatgtcgtagaaaaataactgggctgcaatataaacaagtcttctgacattgacctgcagcgcataggtagttgcaagagagagtggaatgaatttattagtatcaagggaccagagttactcagcaaatatattggagcaagtgagcaagctgtcagagacgttttcaccagagcacaggctgcaaagccctgcattcttttctttgatgagtttgaatccattgctcctcgaagaggtcacgacaacacaggggttacagaccgagtagttaaccagttgctgacacagttggatggagttgaaggcttacagggtgtatatgtgttggctgccactagtcgccctgacttgattgaccctgccctgttgcgccctggccgattggataaatgtgtatactgccctcctccagaccaggtgtcacgtcttgagattttaaacgtcctcagtgcctctctacctctggcaggtgacgtggaccttcagcacatggcgtcggtaacagaatccttcactggagctgatctgaaagctctactgtacaacgcacagctggaggccttgcagggaaggctgctgcccggtgggctccatgatggaggctccagctctgacagtgacctaagtctgtcttcaatggtctttcttaaccacagtagtggttccgacgactcagctgcagatggagaaagtggcttagatcagtcccttggtttctctcgagatgtctgagatccttccagatgaatcaaaattcaatatgtaccggctctactttggaagctcctatgaatcagagcttggaaatggaacctcctctgacctgagctcacagtgtccctcggcaccaagctcagtgactcaggatttccctgcagctcctggaaaagagccattgtttacacaacatcctatgttcaggacaccttcccaggaaggctaccaagagctgacccaggagcagagagaccagctgaaggccgaaatcagcatcatcaaaggcagataccagagccaaagtggagaggatgaatcccttagccagccaggaccaatcaaaaccagttttgctattagccaggcacatttaatgactgcgcttgcccacacaagaccgtccattagtgaagaggaagagaaggatttgctgagctgtatgaaaaacttccaaaatccaaagaagagaaaaaataccaaaagtgggacagtgtttcgacctggacagaa

SEQ ID NO: 3869 - DNA, 1581 bp, Cricetulus griseus
tgctctagctggccgctagctcgctgcgcctcccctgcagcctggttggcaccgactgccacttcagcttcagccttcatcgtgacccctattttggcttcagcctcggacccagctccggccctctctctacccgattgcatcctccctcctagttcctgacttgctccaaatcctgcttcgaatccagtagccgcatccccaagccatggctggtcccttctcccgtctgctgtctgcccgcccgggactcaggctcctggctttggctggagctgggtctctagccgctgggattctgctgcgtccagattctgtacgagccgccagtgaacggaggagactgtatcccccgagcgctgagtacccagacctccgaaagcacaacaactgcatggccagtcacctgaccccagcagtctatgctcggctctgcgacaagaccacacccactggttggacactagatcagtgcatccagactggagtggacaaccctggccaccccttcatcaagactgtgggcatggtggctggagatgaggagacctatgagatatttgctgaactgtttgaccctgtgatccaagagcgacataatggctatgacccccgaacaatgaagcacaccactgaccttgatgccagtaaaatccgttctggctactttgacgaaaggtatgtattgtcctcaagagtcagaactggccgaagcatcaggggactcagtctgcctccagcctgcactcgggcagagcggcgagaggtagaacgcgtggtggtggacgcactgagcggcctgaagggtgacctggctggacgatactataggctcagtgagatgacggaggcggaacagcaacaacttattgacgaccattttctgtttgataagcctgtgtctccattgctgactgcagcaggaatggctcgggactggccagatgctcgaggaatctggcacaacaatgagaagagtttcttgatctgggtgaatgaggaggaccacacacgggtcatctctatggagaaaggcggcaacatgaagagagtgtttgaaagattctgccggggcctcaaagaggtggagaagctgatccaggaacgaggctgggagttcatgtggaatgaacgtttgggatacatcttgacctgtccatctaacctgggcactggacttcgggcaggagtgcacatcaaactgcccctgctaagcaaagatagccggttcccaaagatcctggagaacttacggctccaaaagcgtggaactggaggagtggacactgctgccacaggcagtgtctttgacatctctaatttggaccgacttggcaagtcagaggtggagctggtgcagctggtcatcgatggagtaaattatttgattgagtgtgaacggcgtctggagagaggacaggatattcgaatccctgcacctctcgtgcatggcaaacattaactccccatccccagcaaatgcatcaagatccccaggacttctgcatatttaacggtggcccattgtacttgccctggacctgcccctcgctccctgtcctagtaaagactccacattat

SEQ ID NO: 3870 - DNA, 1580 bp, Cricetulus griseus
gggccccctccccactccgctcgagtagaagtgtgagagagcccagcaggactcagaggggagagttggaggaaaaaaaggcagaaaagggaaagaaagaggaagagagagagagtgagaggagccgctgagcccacccgatggccgcggacgaagttgccggaggggcgcgcaaagccacgaaaagcaaactttttgagtttctggtccatgggtgcgccccgggatgccgtctggagcccgaatcgccccaccgagggggccccgcccgggcacgagccagccacagggccagggccagcctgtgcccacgcccccgccgcagagccgcagtgccaagagaaggaagatggcaaaatcctccctcaaaggattcgggagctggtccccgagtcccaggcctacatggacctcctagcgttcgagaggaaactggatcaaaccatcatgcgaaagcgggtggacatccaggaggccctcaagaggcccatgaagcaaaagcgaaagctgcgcctttatatctccaatacttttaaccctgcgaagcccgatgctgaagattctgatggcagcattgcctcctgggagctgcgggtggaggggaagctcttggatgatcccagtaagcagaagcgcaagttctcttccttcttcaagagtttggtcattgaattggacaaagacctttatggccccgacaaccacctcgttgagtggcacaggacacccacaacacaggagacagatgggttccaagtgaagaggccaggggacttgagtgtgcgctgtaccctgctccttatgctggactatcagcctccccagttcaaactggacccccgcttagcccggctgctggggttgcatacccagagccgctccgccatagtccaggcactgtggcagtatgtgaagacaaaccggctgcaggattcccatgacaaggaatacatcaatggagacaagtatttccagcagatttttgactgtccccgattgaagttctctgagattccccagcgcctcacagccctgctgctgccccctgacccaattgtcatcaaccatgtcatcagcgtggacccatcagaccagaagaagacagcgtgctatgacattgacgtggaggtagaggagccactgaaggggcagatgagcagctttctcctgtccacagccaaccagcaggagatcagcgctctggacagtaagatccacgagacgattgagtccataaaccagctcaagatccagagggacttcatgctaagtttctccagagacccaaaaggctacgtccaagacctgctccgctctcagagccgagacctcaaggtgatgacagatgtggctggtaaccctgaagaggaacgccgggctgagttctaccaccagccctggtcccaggaagccgtcagccgctacttctactgtaagatccagcagcgcaggcaggagctggagcaatcgctggtcgtgcgcaacacctaggagcccatgaacaagcatcactgtggaccagccagccacactgtccagcataggccctggactctggcctccgccccctcgctgcggtg

SEQ ID NO: 3871 - DNA, 1580 bp, Cricetulus griseus
catgagctcgtatttgatggactctaactacatcgatccgaaatttcctccatgcgaagaatattcgcaaaatagctacatccctgaacacagtccggaatattacggccggaccagggaatcgggattccagcatcaccaccaggagctgtacccaccaccgcctccgcgccctagctaccctgagcgtcagtatagctgcaccagtctccaggggcccggcaattcgcgagcccacgggccggcccaggcgggccaccaccaccctgagaaatcacagccgctctgcgagccgcctctctcaggcgcctctgcctccccgtccccagccccgccagcctgcagccagccagcccccgaccatccctccagcgccgccagcaagcagcccatagtctacccttggatgaaaaaattcacgttagcacggtgaaccccaattataacggaggggagcccaagcgctcgaggacagcctacactcggcagcaggtcctggaattagagaaagagtttcattacaaccgctacctgacccgaaggagaaggatcgagatcgcccactcgctgtgcctctctgagaggcagatcaaaatctggttccaaaaccgtcgcatgaaatggaagaaggaccaccgactccccaacaccaaagtgaggtcagcgcccccggccggtgctgcgcccagcaccctctcggcagccacccctggtacttctgaagaccactcccagagcgccacgccgccggagcagcaacgggcagaggacattaccaggttataaaacataacttacacccctgccccccaccctgtgctccgtgaccccctcacacacaaattgactcttatttatagaatttaatatatatatatatttgttttttccctcttcctcctgcctcctcccttgtcaattccaaacagacaaaacagataaacaagccccttgcccttcttccttcactgttaagaagccctttaagcatgtggtgttatcttagcatggtacctgctgggttttgttttggttttgttttttttaaggccattggggggtatttattttttaagaaaaagctgcaaaaattatatattgcaaggtgcgatggtctagtttgggtgaatttcaggggaaatgaggaaaagaaaaaggaaagggagatttttaagtggattctcctgtctcctcctcctcccccctctttccttaggccctttgcattgaaaatgcaccaggggaggttagtgagggggaagtcattttaaggagaacaaagctatgaagttcttttgtattcttgtgggggggtgggaggaggggggaggacagcagacaaagctaaatgcatctggagagcctctgggagctgttcagtttgaggagccaaaagaaaatgaaaatgaactttcagttcagagaggcagtctataggtagatgctcccctacccccaacgtggttattgtgtttttggactgaatttacttgattattgtaaaacttgcaataaagaattttagtgttgatgtgaaatgccccgtgatcaataataaaccagtggctgtggactagttt

SEQ ID NO: 3872 - DNA, 1579 bp, Cricetulus griseus
ccctgctagagtgcagaggtcttaccctcagtcaggtgttcctataccagctgctgaactgtcggggtcccaatctcagggtttctgaagggctccaaaagagccagtctagatcttatggcggcacggatccgcttgggccggaagcgcccactgccggtttgccccaacccgctcttcgttcgttggctgaccgagtggcgggacgaggcagccagcagagggcgccacacgcgctttgtttttcaaaaggcactgcgctccctccgacggtacccgctacctctgcgcagcgggaaggaagccaagatccttcagcacttcggagacaggctctgccggatgctggacgagcgactgaagcagcatctagcatcaggcggtgaccatcgaccccaacctaccatcctggagagaagtgcactgacaccagagggcctagagctggcccaaaacctggccaagtcagaaggcctgagcacactgaacattgccattaggccagaggagccccatggagaggagtcagcagccccagaagccaccttgtcagaacctggcaccagtgaaggtgttgtccagcagccaccactggagctgaggcctggcgagtacagagtgctgttgtgtgtggacactggagaaaccagagggtcgggacacagggccagaaatgctccgagagttacagcggctgcatgtgccccacacagtacgaaagctgcatgttggtgacttcgtgtgggtagtgcaggagaccaggcccagagacccagcaagacctggggagttagtcttggaccacattgtggaacgcaagcggctagatgacctgtgcagcagcatcattgacggccgatttcgggagcagaagttccgcctgaagcgctgtggcctggggcaccggatatacttggtggaggaacatgggtctgtccaccacctcagccttcctgagagtacattgctgcaggctatcacaaacacccaggtcattgatggtttctttgtgaagcgtaccatggatattaaagagtcagctggctacctggcccttttgacaaagggccttgaaagactatatcagggccataccctacgcagccgcccctggaaaaccccaggggatgctgaatcaggagcaaggccttctacaaaccctctctgctcactcctcaccttcagtgacttcaatgcagaagctgtcaagaacaaggcccagtctgtacgggaagtattcgcccggcagctgatgcaggttcatggactgagtggggagaaggcagcagccctggtggatcggtacagcacacctgccagtctcctggctgcctatgatgcctgtgccacccctaaagagcaggagatgctgctgagctctatcaagtgtgggcgtctacagagaaatctgggacctgctctgagcaggaccctgtaccagctctactgcagccacagtccactgacctgacctatacctggagacacacccaagtacccatcttcacctctgccaaggctagccagcctttgaactgggatcctttgggctataatacaagctaaatgtttgtggtct

SEQ ID NO: 3873 - DNA, 1579 bp, Cricetulus griseus
tgggtcggggcttcggtcgactgagagatcctgagccagctgtgtcacctcagcagcctcgacatggacaacagaaagcgcctggcctacgccatcatccagtttctgcacggccagctacggaatggtgggctttctcctgatgcccaggagagcctagaggttgccatccagtgtctggagacagcctttggggtgacagtggaggacagtgacctagctctgccacagacactgccagagatatttgaagccgctgctaccagcaaggagatgccacaggacccaaggggctctgacaggacgccaccttctgaggaggactccgctgaggcagagcgcctcaaaactgaaggtaatgagcagatgaagctagagaactttgaggcagctgtacatctctatggcaaggccattgagctcaacccctccaatgccgtctacttttgtaacagagctgcggcctacagcaagctggggaactacgtgggggctgtgcaggactgtgaacgtgccattggcatcgacccaggctatagcaaagcctatggccgcatgggccttgcactctccagcctgaataagcatgccgaagccgtggcttactacaagaaagccctggagctggaccctgagaatgacacttataagtccaacctcaagatcgcagagctgaaactgcgggaggcaccaagtcccacgggaggcgtgggcagtttggacatcgccggcctgctgaacaacccacacttcatcactatggcttccagcttaatgaacagtccccaactgcagcagctgatgtcaggcatgatctctggtggccataaccccttgggtaccccaggcagcagttcatcacagagtgacttggccagcctcatccaggcgggccagcagtttgcacagcagatgcagcagcagaacccggagttcgtggagcagatccggagccaggtggtgcgcagccggacacccagtgccagccatgaggagcagcaagagtgacgctcatctgtgtggtgatcccatcgatctttggcctcctggtgttttagccttttctccgtcgggctgcccaagaaagagactggacctgcatgttaagacggactcatccgctgtttctcttcacccccacttccatgtttgtattcgtgctggccccaccccttcctggaagagagtcagccagacagctacgcaccagcacccattcctccagcacctagggaagctgaggggtggggccactgccagccccagctgggtgccagcgttttgcgcccacacttgggttgctggtcctagcaagtgcccctgcctgccttatcccagtggcctatgccacacaggagaggcctgtgacttgtgccccacttgtggacgtccgtgtctccttccccaccttccctcccgtctccacagccatcagccagtcctaattttgtgtgcagtccggctccattctcagcgtgggcagaagacgtggccaccctggcccatacttgcccttctgtcttcaatttcatgggaattcgacgtctgcggttggcaggcagttttggagtattggccc

SEQ ID NO: 3874 - DNA, 1579 bp, Cricetulus griseus
ggtcgctggaagaccctgagcaagctatggcgtccggcggcccgcgggtgctggtggtgggcggcggcatcgcggggctgggcgctgcgcagagactctgccgccacccggctgctccacacctgcgggtcctggaggccaccgccggcgccgggggccgcatccgctcggaacgctacttcggtggtgtagtggagctgggtgcacactggatccatgggccctcccagggcaatcctgtcttccagctggctgcggagttcgggctcctgggggagaaagagttatcagaggagaaccagctggtggagacaggagggcacgtggccctgccttccgtgagctggaccagttctggaacacgtgtgagcctggaggtggtgacagagatggctaatctgttctatggactgatagaccagacccgagagttcctgaatgcaactgagactccagtggccagcgttggagagttcctcaagaaggagataagtcagcaggtggctaactggaccgaggatgaggacactaagaagctcaagctggctatcctgaacacctttttcaacatagaatgttgcgtgagcggcacccacagcatggacctggtggcccttgcaccgtttggggagtatacagtgctaccggggctggattgcacctttgctggtggttaccaaggacttaccgactgcatactggcttccttgcccaaggattcgatggtttttgacaagccggtgaagaccattcactggaatgggtccttccaggaggctgcttttccaggggagaccttcccagtgttggtggaatgtgaagatggtacccgcctgcccgcccatcatgtcatcgtcaccgtgcccttaggttttctcaaagaacatcaagataccttctttgagccaccactgcctgccaaaaaggcagaagtcatcagaaaaataggctttggtaccaacaacaaaatatttttggagtttgaggagcccttctgggagcccgactgcaagttcatccaggtggtgtgggaggacacatcacccctacaggacacaaccctctcactccaagacacttggttcaagaagctcattggctttttggtcctgcctccttttgagtcttcacatgtgctctgtgggtttattgctgggctcgagtcggagtttatggagactttgtcggatgaagaagtgcttctgtctctaatgcaagtacttcggagagtgacaggaaacccacaattgccagcagccaagagcgtgctgaggtctcgttggcacagtgccccatatacccgaggttcctacagctatgtggctgttggcagcactggtgatgacctagatctgttggctcagcccctccctgctgatggaactggtacccagctccagatactcttcgctggggaagccacacatcgggcattttattccaccacacatggggccctcctgtctggctggagggaagccgatcgcctcattgatctgtgggactcacaggtacagcagccccggcctaggctgtgaatatctgcagctctgctctatcatgtgggctgaccaagctc

SEQ ID NO: 3875 - DNA, 1579 bp, Cricetulus griseus
cggccgccgcggtatcccgagcgctgctgcccgcggcccggcggaggttgtggggattcgcacgcgggctcccggtccgcggcgccgctgcgcagccattgtattttggagggaacagactaagaagtacacaggctgctacacaagttgttctgaatgttcctgagacgcgagtaacatgtttggaaaatggactcagagtcgcttcagagaactctgggatctccacgtgcacagttggactgtggattgatgctggaagtcggtatgaaaatgagaagaataatgggacggctcactttctggagcatatggctttcaagggcaccaaaaagaggacccagttagaccttgaacttgagattgaaaatatgggtgctcatcttaacgcctatacctccagagaacagacggtgtactatgccaaagccttctctaaagatttgccaagagctgtagaaattcttgctgacataattcagaacagcacattgggagaagcagagattgagcgtgaacgtggagtaatccttagagagatgcaggaagttgaaactaacttgcaagaagttgtttttgattatcttcatgccacagcttatcagaacactgcacttgggcggacaattctgggaccaactgaaaatatcaaatctataaatcgtaaggacttagtggattatataaccacacattacaaaggaccaagaattgtgctggctgctgctggaggtgtttgccacgatgagctgcttgagctagcaaagtttcactttggtgattctctctgcgcacacaaaggagaaataccagctctgcctccctgcaaattcactggaagtgagattcgagtgagggatgacaagatgcctttggcacatctagcaatagccgttgaagcagttggttgggcacatccagacacaatctgtctcatggttgcaaacacactgattggcaactgggatcgatcttttggaggaggaatgaatttatctagcaagctggcccagctcacttgtcatggcagtctctgccacagcttccagtccttcaacacttcctacacagacactgggctatggggactctatatggtttgtgaagaagccacagttggtgacatgctgcatgctgtgcagcaagaatggatgcgactctgtacaaatgttactgagagtgaagtagcacgagcgaaaaatctcctgaaaacaaacatgttgctgcagcttgatggctcaactccgatttgtgaagacattggcaggcagatgctatgctataataggagaattcccatccctgagcttgaagcaagaattgatgctgtgaatgcggagatggttcgagaagtatgtaccaaatacatttatgacaaaagcccagctattgctgcactaggtcctattgagcggttaccagattttaaccagatttgtagtaacatgcgctggattcaagactaacttttgtgatcaaacattctgcacatatatatttataaaactagagattccaaagttttaaaaagctgtctgtcagtcctcaaatgaaaaaataaaaatgtatttgcaacttt

SEQ ID NO: 3876 - DNA, 1579 bp, Cricetulus griseus
gatgactgcactcccttgaaaaccatcaccaaattctacaaccaccccttgcactttgttttcaatgacaccaagttggacgctatgctggaagaatttaagaaaggtaaatctcacctggccattgcagcgagtgaacaacgagggggaaggggacccgttttacgaagttctaggaattgtcaccttggaagatgtgattgaagagatcatcaaatctgaaatcttggatgagacagacctgtacactgacaacaggacaaaaaagaaagtggcccaccgtgaaagaaagcaagatttctctgcctttaagcagacggatagcgagatgaaggttaaaatatcaccgcagcttctcctggccatgcaccgtttcctagcaacagaagtagaagcgtttagcccatcccagatgtcagagaagatcctcctcaggctgctaaagcaccccaatgtcatccaggagctgaagtatgacgagaagaacaagaaggcccccgagtgctacctctaccagcgaaacaagcctgtagactactttgttctcattctgcaggggaaagtggaagtagaagccgggaaggaaggcatgaagttcgaagccagcgccttttcatactacggtgtgatggccctcacagcctctccaggtgaaaataagtcacctccctcgcccctcgtggcctgaaccactcagactctctcagtcgaagcgaccggattgatgccatgacaccaaccttggggagcagcaacaaccagctcaattcttcattcctgcaggtctacatccccgactactcagtcagagccctctctgacctacagttcgtcaagatctccagacagcaataccaaaatgccttgatggcatcccggatggacaaaaccccccagtcttcagacagtgaaaacactaaaattgaattgactcttacggagctgcatgatggtttgccggacgagacggccaacttgctcaatgaacagaactgtgtgtcgcacaacaaggccaaccacagcctgcacagtgaaggcgccatctagggcccttcaagccctccttaatcggcctcctggcctgtctgaccatgacttccactagtgtgagcttgtctgccatgctgcgacatacagcattgagaccaaagactttgcccctttccctggaggctgcggaggacggcatgggggagggatggaagctagacacgtgacatcgacagctggggcatggctttcaagaattcggagacaaacttcttccgcccaaatagaatcatgtttattttttcagtaccttttatcatttctttcctccctcaatttgcatgaatttaaaaattgtttcatttatttttttcaagagatcatgttttgtttttaagtgtcttttgcagagttttaagttggtctgtctgagctaactctgctgtgatcccatgatgtgaccctaacaggctggacttgccccttgagtggccttccttggccgtccccaggaaggatacctttcctctgtgtgccggtgggtgtcgccgttgaacttgacggatgaatgaagaaaaccacgtcactg

SEQ ID NO: 3877 - DNA, 1579 bp, Cricetulus griseus
aaaacgccctctgcgctaggagagaccagccacgatgcctacctctgtgccccgcggggcccctttgcttctaccacctctgctgatgctatcagttgtgctggcggtgccactggaccgcgcggccccccatcaggaggacagccaggccactgagagcccggacacaggcctatactaccaccgatacctccaggaggtcatcaatgtgctagagacagatgggcacttccgtgagaagctgcaagctgccaacgctgaggacatcaagagtggaaagctgagccgagagctagactttgtcagccaccatgtccgaaccaagcttgacgagctcaagcgacaggaggtatcaaggctgcggatgctgctcaaggccaagatggatgcaaagcaggagcccaacttgcaggtggaccacctgaacctcctcaagcagtttgaacacctagaccctcagaaccagcacacgtttgaggctcgggacctagagatgctgatccagacggccacccgagacctcgcccagtatgatgccgcacatcatcaagagttcaaacgctatgagatgcttaaggaacatgagagaagacgctacctggagtctctgggagaggagcagcggaaggaggccgagaggaagctacaagagcaacagcgcagacaccgggaacaccccaaagtcaatgtccctggcagccaagcccagttgaaggaggtatgggaggagctggatggattggaccccaacaggttcaaccccaagaccttcttcatactgcatgacatcaacagcgatggtgtgctagatgagcaagaactggaagctctctttaccaaggagttggaaaaagtttacgacccaaagaacgaggaggatgacatgagagagatggaggaggagcggctgcgaatgagggagcacgtgatgaagaacgtggacaccaaccaggaccgtcttgtgaccctggaggagttcctggcatcgacgcagaggaaggagtttggggacactggggaaggatggaagacagtggaaatgtatccggcctacacagaggaggagctgaggcgctttgaggaggagcttgctgctagggaggctgagctcaatgccaaggcccagcgcctcagccaggagacagaggccctggggcgctcccaggaccgcctggaggctcagaagagagagctgcagcagatggagcagaggaagcagcaacagcaagaacagaatgttccaccttccaaacctgagggaaagctgcagttccgtgcagacacaggtgacgctcctgtcccagctccagcaggtgaccagaaagatgtggctcctgaaaagaaggccgcagagcagccccctgagctgccccagctggatccccagcccttatgacctctcagtgaccccagccctcaaattcctgcagaaagtgacagaagccagatgaagtagccttgcagcctctgtggaggcctgagcctgcaaggcttcctggggaggagaaagggctaccctgttcctcagatgcatctctgcctgtgtctgccactctcagctctcacagcctccaggtcc

SEQ ID NO: 3878 - DNA, 1578 bp, Cricetulus griseus
  modified_base (1567)..(1567): a, c, t, g, unknown or other
caggacctgatggcttcaaaattccagcacaacacccccaaaaccaagaatcccaacggcaaggctgaatctcaaggacaatggggccgggcctgggaagtggattggttctccctagccagtgtcattttctgctgctctttgcaccattcattgtgtactacttcatcatggcatgtgaccagtacagctgctcgttcgaccacccccactagtggacatagccaccggccgtgctagtctggcagacatctgggccaagacaccgcctgtgacagctaaagctgtccaactgtacaccttgtgggtcagcttccaggtggttctttactcctggcttcctgacttctgccatagatttttgccaggctatgtgggaggtgtccaagaaggtgccgtaactccagcagggttgtaaacaagtatgaggtgaacgggctacaagcctggctcattactcacctcctctggtttttgaatgcttacctactatcctggttctcccctaccatcatttttgacaactggatcccactgctgtggtgtgccaacattctgggctatgccgtgtccacattcgcactgatcaagagctacctgttccccacaagcgctgaagaccgcaaattcacaggcaatttcttctacaactatatgatgggcattgagttcaacccccgtattggaaagtggtttgacttcaagctgttcttcaatggacgcccagggattgtagcctggaccctcatcaacctgtcctttgctgctaagcaacaggagctttatggccatgtgaccaactccatgattttggtcaatgtcctgcaggccatctatgtgttagacttcttctggaatgaaacctggtacctgaagaccattgacatctgccatgaccactttgggtggtacctgggttggggtgactgcgtgtggctgccctacctctacacgctgcagggcctgtacttggtataccaccctgtgcagctctccactcccaatgctgtgggcatcctgctgctcggcctggtgggctactatatcttccgaatggccaaccatcagaaggacctgttccgcaggacagatgggcgctgcctcatctggggcaagaagcccaaggccatcgagtgctcctacacatcagccgatgggcagaaacatcacagcaagctgttggtgtctggcttctggggtgtggctcgccacctgaactatactggtgacctgatgggcagtctagcctactgcctggcttgtggtggcggccacctcctcccctacttctacatcatctacatgactatcctgctcactcaccgctgccttcgtgatgaacaccgttgtgccaacaagtatggccgcgactgggagcgctacacagccacagtcccctaccgcctgctgcctggaatcttctgaggaccgtcctaagaggcatagggaggctttattgagtgtgtggagctcgatgcatagaggctggcatcctgcttcccctgttgggtgtgaatttgctcatctggagaatggagagcctttcttacatgaaaagaaaaaaaanaaaaaaaaaaa

SEQ ID NO: 3879 - DNA, 1578 bp, Cricetulus griseus
tgaataggctgcgttcttttggaacgcgccgcagaaccgggttctggtgactctagctgcgttcgctcctctgtccttttgcctacccaccgccgtatccggccgactcacccctcctgtgccaggaacgtgctgtcaccggcgccatgccctacccatacccagcactgaccccggagcagaagaaggagctgtctgacatcgctcatcgaattgtggccccgggaaagggcatcctggctgcagatgagtccactggaagcattgccaagcgcctgcaatccattggcactgagaacaccgaagagaacaggcgtttctaccgccagctgctgctgactgctgatgaccgtgtgaatccctgcattgggggggtgatccttttccatgaaacactgtaccagaaggccgatgatggacgtcccttcccccaagttatcaagtccaagggcggtgttgtgggcattaaggtagataaaggcgtggtgcctctggcaggaaccaatggtgagaccaccactcaaggactggatgggctgtctgaacgatgtgcccagtacaagaaggatggagctgactttgccaagtggcgttgtgtgctaaagattggggaacatactccctcagcccttgccatcatggaaaatgccaatgttctggcccgttatgccagcatctgccagcagaatggcattgtacccattgtggagcccgaaatcctccctgatggggaccatgacttaaagcgctgtcagtatgtaactgagaaggtactggctgctgtctacaaggctctgagtgaccaccatgtctatctggaaggcacactgttgaagcccaacatggtcaccccaggccatgcctgtacccagaaattttccaatgaggagattgccatggcaactgtcacagcacttcgtcgcacagtgccccctgctgttactggggtcactttcctgtctggagggcagagtgaggaagaggcatccatcaacctcaatgctatcaacaagtgcccactgctgaagccatgggccttgactttctcttatggccgagccctgcaggcctctgctctgaaggcctggggtgggaagaaggagaatctgaaggctgcccaggaggagtacatcaagcgagccctggccaacagcctcgcttgtcaaggaaagtataccccaagtggtcagtctggagctgcagccagtgaatctctcttcatctctaatcatgcctactaaccagaggtgatctaaggctggctgccccatcaacactccaggcccctgcctacccacttgtgttcaagagggggccttcaggctctttcccatcactcttgccctcgtgactggtgtgtggtgttgtctctgaatgctaattctgccatcccatccagcccactgccaataaacagctatttaagggggaaaaaaaaaaaaaaaaaaaaaaaaaaaaaaaaaaaaaaaaaaaaaaaaaaaaaaaaaaaaaaaaaaaaaaaaaaaaaaaaaaaaaaaaaaaaaaaaaaaaaaaaaaaaaaaaaaaaaaaaaaaaaaaaaaaaaaaaaaaaaaaaaaaa

SEQ ID NO: 3880 - DNA, 1577 bp, Cricetulus griseus
  modified_base (1523)..(1523): a, c, t, g, unknown or other
ggaatgcagccatatgtctcttttgtgaggatcaacagctcgctggctgtggcggcttacgaggatggggttcttaacatctgggacctgaggaccgggaagttccctatccatcgttttgagcatgatgcaagaatacaggcccttgcgctcagccgggaaaaggctacagttgccacagcttctgcttttgacgttgtgatgttgtaccctaacgaggaggggtactggcatgtagctgcggaatttgaagttcagaaactggttgactacctggaaatagtcccggatactgggaggtaccccgtggcaatagccacagctggggacctggtatacctgctgaaggccgaggactcagccagaacccttcattatgtctacggccagcctgccacatgtctggatgtctcagccacccaggttgcctttggagtcaagagtctgggatgggtatatgaaggaaacaagatcctggtgtatagcctggaagcagagcgctgcctctcgaagcttggcaatgcacttggtgactttacctgtgtcaacctccgggacagccctcccaacctcatggtcagcggcaacatggacaggagagtccggctccatgacctccgcagcgacaaaattgccctgtcactgtctgcccatcagctgggggtgtccgcagtccagatggatgactggaagattgtcagtgggggagaggaagggctggtgtctgtgtgggattaccgcatgagccagaagctgtgggaggtgcactccaggcaccctgtgcgtcacatctccttcaatagtcacagcctcatcaccgccaatgtgccctacgagaaagtggtgcggaactccgacctggacaactttgcctgtcacaggagacatcgtggcctgatccatgcctatgagtttgcagtggaccagctggcctttcagagctctcttcctgtctgccgcttcccctgtgacaccatggctgggtacagctatgacctagcactttctttcccctatgacagtgtttagggcgtcaccttatggagaagtgggaagagccagttttacaaatgtcagagctgcagggaagatctgcagcacagagtggaatttggggatagtgcccctctcaggtggcctatggccacacagccttgctgcctctgagggaacttcaccctggaaagggaaaggaactccagcccgtgcccagctgagccttgctgtcacaggtgcccttcccaggacacacagccctcagcctcactacccactgcaggggccattggagtggcaccacttccctgtgaagacaagcctaccccttgctggcttggcgtcactgttgccaccctgccctagctggagttctgagccctcctttggctgtgttcccgcaccaagccctgttgacatttagccagcccatggcagaggcagacaaggtgctgctgatgccatggaaagtggcctggtttcagcactggctcttcaaggtcacggcatgcaaggacaacctttanggcaggtgtttgccaaacctcaaggtgacttgcgtttctgcctctccgtacacc

SEQ ID NO: 3881 - DNA, 1577 bp, Cricetulus griseus
ggccgcttgagtcgagccatcatgcctatccgcgctctgtgcactatatgctccgacttcttcgatcactctcgcgacgtggctgccatccactgtggccacacttttcacctgcagtgcctaatccagtggtttgagacagcaccaagtcggacctgcccacagtgtagaattcaggttggcaaaaaagctatcatcaataagcttttctttgaccttgcccaggaagaggagggtgtattggatgcagaattacttaaagaatgaattggacagtatcagagcccagctttcccagaaagagagggagaaacgggacagccagaccattatcgacactctacgggacacactagaagaacgcaatgccactgtggagtccctgcagaacgccttagacaagacagagatgctgtgttccactcttaaaaagcagatgaagttcctggagcagcagcaggatgagaccaagcaggctcaggaggaggcccgccaactcaagagcaagatgaagaccatggagcgaattgagctcctactccagagccagcggtctgaggtggaggagatgatccgagacatgggtgtgggacagtccgcggtggagcagctggctgtgtactgcgtgtccctcaagaaagagtatgagaatctgaaagaagcacggaaggcctcaggggagctggctgacaagttaaagaaggacttggccacctctaagagcaagttgaaggctgtctacactgagctggatcaggccaagttggaactgaggtcaactcagaaggatttacagagtgctgacaaaggaaatcacgagcctaaagaaagaagctaaagatgcttcaggaaaccttgaacctgcctccagtgaccagtgagaccgtcagccgcctggtttttgagagcccagccccagtggagatgctgcaccccaggctccaccggccatccatcagtgatgagattgacctcaatgctacctttgatgtagttacccctccagcccagccctccagctcccagcatggccaccccaagaagctctccctggagagggcacgctctcctgtgcaggacgttctcaagaagatccctaaagtctccaagcaggagccccagctctcactgggtggccagcgctgtataggagagccagacgaggaactggctggtgccttccccctcttcatccggaatgcaattcggggtcagaaacagcccaacaggaccacagcagactcccgttgcagcacagatgtggtaagaataggctttgatggtcttggaggacgaacaaagttcatccagcctacagacacagccattttccgaccaatgcctgttaagcccaaggccaagagtaagcagaaagtgagaataaagactgtgaattcttcctcccagcccaagatggataccttcctgttgcagtgagcaaatgacagagtcgtgtctccaattagtagtccaagacctttgccaacccaggagtgtttggggagatggctcctcttggaaagtgcgagagtgagagcagaaactgcacttcctgagttctctttgccctgccccac

SEQ ID NO: 3882 - DNA, 1577 bp, Cricetulus griseus
gcccaggaggcaggggagggacatgaagagacgaagcattaccatggaccgatgggcttaccactgacaaggtcaccccggagccgatggcctgccccaacagcacctcacttccgcatcctcgggactccatcagaaactgtgccctcagcatggaccagattccaggatctacactctcccctgtctcccatctccgagagtcccagctcccctgcctatagcactgtaacccgtgtccacgccgcccccaccaccccctccaccacagcaccgcctgcctcaccagttgcccgacgccccagtgaacctcagtcatctcatggaagtactccaaagcctcctgtggagtcagacaagcctcatgcaagcccctcccacaccctctgcaaagcctcaaggtctccatcactcaatagctacagtgacccgggatctggccactactgtcagctccagccttctgtccgtggcagccgggagtgggcagcaggagagaccccccggaagaccaggagctctggagagaggcaaaaggaactgtcagaaaatggggtctctgatggggagtggggcaagcccttcgcagtccctgtcgtagaagccacctcgtccttcaacctggctaccttccagtcccagctgatccccaaagagaaccggcctctggaggtgggccttctgcggaaggtcaaggagctgctctcggaggtggatgctcggacactggcccggcatgtcaccaaggttgactgcctggttgctaggatactgggcgttaccaaggagatgcagaccctaatgggagtccgctggggcatggagctgctcaccctcccccatggccggcagctaagactagacctgctagaaaggttccataccatgtccatcatgctggcggtggatatcctgggctgcacaggctccgcggaagagcgggcagcgctgctgcataagaccatccagctggcagccgagctgcgggggacgatgggcaacatgttcagctttgccgcggtcatgggcgccctggagatggcccagatctcgagactggaacagacatgggtgaccctgcgacagcggcacacagagggtgccatcctgtatgagaagaagctcaagcctttcctcaagggtctcaatgaaggcaaagaaagcctgccgctgagcaacaccacgttcccacacgtgctgccattcatcactctgttggagtgtgattcagcccccactgagggtcctgaaccttggggcagcacagagcacggtgtggaggttgtgctagcccacttggaggccgcccgcactgtggcacaccacgggggcctctaccacaccaacgctgaggccaagctgcaggggttccaggcccggccagagctcctggaagtgttcagtacagagttccagatgcgtcttctctggggcagccagggtgccaacagcagccaggcccggcgctatgagaagtttgacaaagtcctcactgccttgtcccacaaactggaacctgccatccgctctagtgagctgtgaccttggagaccttgcctctctgcagctgtgggcag

SEQ ID NO: 3883 - DNA, 1577 bp, Cricetulus griseus
cagatactacagcgtccgtgtagtccagctacctagggacagatgagcagtgatgtgcatgtccactcctggccttgttcctactacctgaaccttgagaagcaatgggttcctgggaaactgaccttgacacctcattcactgaagttcagtgcagacagaactgaagaggtccttgtgggcctgcctctctccagcatcactgagatcaggaaagagtcttctctcttttatcttcagtgccatcacagtcctggagaagggccaggccaagcactggttcagctcactgcggcccagtcgcaatgtggtcttcaacatcatcgagcacttctggagggagctgctactgtcccagccaggcactgctgccagcacaacctccccatgaccagggggcaggagctggtgggactgatggctagttcccagagacgaatggaagacacatcaaaggtccttcatcaccagggagagcagctagacagcgttatgaggggcctggagaagatggagtcagatctagatgtggctgacaggttgctgacagaattggagtctccttcctggtggccctttagctctaagctttggaagacgccagcagaagccaagaccaaggaagctgtctctatagccgcttgtgagccctttggaaaggaaggggtggtgatcagagtccctgctattgtttctcagagaacagagtctcattccaagccaggaaagctcactgtcctggtttctggtttggaaatccatgactccagttcatcactcctgcataggtttgagagggaagatgtggatgatatcaaggttcactctccttatgaggtcagcatacggcagcggttcatcggcaagccagacgtggcttatcgggtgatatctgccaagatgccagaggtcattcccattttagaagtgcagttcagcaagaagattgagctcctggaagatgccttagtgttcaggagcagggcccggacttcccctgcagagggcatgcagcatccagactgatgggctgcaatacacaccgagagctacccacaggaggccaggaaggcgagcagctgcagctgcagaagacctggccactgctctctgagggggaagcccaggagctgacacagatcctgagcaagctgaagggactggcactggacactgaggcagagcttgagcgccaggatgaggctctggatggcatcaccgtagcagtggaccaggcaaccctgactgtggacaagcataatcggcgtatgagaaagctgatgtagtggggccagcttcagaacagccaccctggcatggctctcctgattctgctgtcgttagccctgtgtcctttgcactggaacctgggaagccattcttggtgctgtggactataagaccctgcctgggaactgtgccttcctaggatgggccaccaagaggagccacatgaatgtgatgtgttttctgggtgccctttgcatgtgggccaagtccagttcaagtaaggatggccaccacagcatagccatgcttcctgtcctcactgagaccccagctttgtgctgccattg

SEQ ID NO: 3884 - DNA, 1577 bp, Cricetulus griseus
  modified_base (67)..(67): a, c, t, g, unknown or other
ccgagcacttggactcgaactatgccgggaggggccccgccccttccctttcggttttttttttttnttttttattattatttttattattattattagagttttcgttcttgttgaaataaaagccaacgaactttttgtaaggatgaacaaaatagtcacaacgggcagttgtgatgcgatagaacaaaagataccaaacacttgtttaggtctcagatgagttttgaaactctagtttataaagaagaataaataaaaaaccagcccagcaccagcagctaaaaccaccattccatctcttctttcacttgaaagccttagttacagtccagatgtgagaactcttagaccagtgtgagccagccggctgccacctccccttaataagcttttagagttcaatgtaatgccaagaacatgccttgaaacgagtagccttcagccggggtttgtcgcggttgttgtccttgtttttgttttttaacgaagttatatgtttgggggtggggggacccttgcattccaaagtctgatactggtctcattgccaccgtttagtgagtgtttagcttagaaacattccctctgctctctggaagccttgagcagagctcagttcataattgttgggaaataagtgcttcatttttagctgttttgagttgattcgcaccacaactcaatatgaaaaaaaaaacctatttaacttatttattatcttgtgaaaagtatacattgaggatgtttgttcatactgtatttatcgagtatgatgaaaagcaatagatatatattcttttattatgttaaattataattgccattattaatcggcaaaatgtggagtgtatgttcttttcacagtaatatatgccttttgtaacttcacttggttattttattgtaaatgagtaagaaaaaatcttaatttaagagattgtatgtaatatttatttcattaatttctttccttgtttacgtaaatttcgaaagattgcatgccaccagctctactgtgacattgagtataaagacatgtagcaataacggggaaataatggtctcagtgccttcatggggcccgaacttgccttaaatcttcctcaaccaaataagtatttcattagtgcttgagcgaatttgaatgccagatgggttaacctgcacaaaacgagatttttttaccactttttttttatatatagctataaagtgaagagggccatcttagtgctgaaaatggtctgtagaacatgaatatgccttgtttcataacagtccgaaacttgtactatgacttttcgatgtaaaaaggcaggaatgtccctccaggccttcctggatggcagatgagtgagcaggcgcttagttttgtatgtagggtacagttggagcaccgagtgtgtgtattctggactactttgacacagtaggttcttttttgaatgtaacaagataagtcaacttgagttgtaatatatttttggggaatcagttcactacaaattgtgactgtaaacattgtactgtaaatgttttgtagtttccccccaataaaattttttggaaaaaaa

SEQ ID NO: 3885 - DNA, 1577 bp, Cricetulus griseus
ggcttgccctgcccgaccttccacctcccggcctccgttcccttcggcccaacgcacctcggccccgccccagcccaccggattctttccagctcgaccccggctgccccgtttcccccgccgccatgatgatgatggcgctgagcaagaccttcgggcagaagcccgtcaagttccagctggaggacgacggagagttctacatgatcggctccgaggtgggaaactacctccgtatgttccgaggttctctgtacaagagatatccctcactctggaggcgactagccactgtggaagagaggaagaaaatagttgcatcgtcacatggtaaaaaaacaaaacctaacactaaggatcatgggtacaccaccctcgccaccagcgtgacgctactgaaagcctcggaggtagaagagattctggatggcaacgatgagaaatacaaggctgtgtccatcagcacagagccccccacctacctcagggaacagaaggccaagagaaacagccagtgggtgcccaccctgcccaacagctcccaccatctggacgctgtgccatgttccaccaccatcaacaggaaccgcatgggtcgggacaagaagagaaccttccccttgtgctttgatgaccatgatccggctgtgatccatgagaatgcatcacagcctgaggtgctggttcccatccggttggacatggagattgatggacagaagctgcgggatgcctttacctggaacatgaatgagaagctgatgacccctgagatgttctcagagatcctctgtgatgacctggatttgaacccgctgaccttcgtgccagctatcgcctctgccattagacagcagattgagtcctaccccacagacagcatcctggaggaccaatctgaccagcgtgtcatcatcaagctgaatatccatgtggggaacatctccctggtggaccagtttgaatgggacatgtcagagaaggagaactccccagagaagtttgccctgaagctgtgctcggagctgggtttgggtggggagtttgtcaccaccattgcttacagcatccggggacagctgagctggcaccagaagacctacgccttcagtgagaacccacttcccacagtggagattgccatccgaaatacaggagatgctgaccaatggtgccccctgctggagacactgaccgatgctgagatggagaagaagatccgggatcaagaccggaacacaaggcgaatgaggcgtctcgccaacacggccccagcctggtgatgaagccatccatgctcaacttccacggagcatctcaaaagcctgccttgccttcctctgtggtaaagagagaggcaaagggacagctggtgccatcctgaggaatggggtagggcctcctgggtaccttccttcagcacacattccatttgctaagccccagcactgtcccccaaagtctagagtcaggaagcaacctcgtttgggttgtgttttgtttttgtataggagccccagacggggctagtaacactttttaaataaaaaataagttcagttaaaaaaaaaaaaaaa

SEQ ID NO: 3886 - DNA, 1577 bp, Cricetulus griseus
gcggggacaccagcggggcggtgaccgtgtgggaggtggtctcactcttggggaaattgctggggaccgtcgccgcgctgaaggtggtcctgtacctgctccgggtgtgcttcgcgatggcctggaaatccggcggcgccagccactcggagctaatccacaacctccgcaaaaatggaatcatcaagacagacaaagtatttgaagtgatgctggccacagaccgctcccactatgcaaaatctaacccttacatggattctccacagtcaataggtttccaagctacaatcagcgctcctcacatgcatgcgtatgcactagaacttctgtttgaccagttgcatgaaggtgctaaagccctcgatgtaggatctggaagcggaatcctcactgcatgttttgcacggatggttggacaaagtggaaaagtcataggaattgatcacattaaagaactagtagatgactcaataaataatgtcagaaaggacgaccccatgcttctgtcctcggggcgagtacgactggttgtgggtgatggaagaatgggatatgctgaagaagctccttatgatgccattcatgtaggagctgcagccccagttgtgccccaggcactaatagaccagttaaagcctggtggaagattgatattgccagtcggtcctgcaggaggaaaccaaatgttggagcagtatgataagctacaagatggcagtgtcaaaatgaagcctctgatgggggtgatatacgtgcctttaacagataaagaaaagcagtggtccaggtggaagtgattttctcttctgctctttcttcttccacacattcaagggatgaactgtaacggcaacatgagcttgaccagtctataccattgcagtggattgctcatctcagtccttaaagcatctgaaaaccaacagcatcacagcttgttttggactttgttaaactcttattttcagcatgaaaatgtgtggttttgtaggacttcctaattcaaagaggcgcagagccagactggtagaggagggctggctgcaaagtataactttgtatgttgttttaacacgtccacattttactttaaaaggattaaaagaaagggttctccacatgcaaaaattagttttgaagagtggctttgctgttcttgacacttaattctgttccaatattaatttatcagacttcttttgtgcatcagataacaccaccattcacaagtttaggtttcttggtagctgatgtctgttagatgctaccaagaaaatagagatgagctttctttttaaagcttttgatgtggtgtcataggatagcatgttgtagatacaatcagctgctgtcaccttaaaactaggtgtttgtaaatactgaaacttaagacgccgacggcaggtggtgtgctgtaaacactcagctgttcagattggacatctctgatgtagttttcctctctttaaaaatgataggaggttgtagctcaatattgttttctgtttctagtttgctgctgatactgtatctgcacctaacactctgtgtaagctgttgctagtctctgcaca

SEQ ID NO: 3887 - DNA, 1577 bp, Cricetulus griseus
ggcctggccccacagctccagtcatcccaccctgtcctgacgtgccacctggtcttgtgggccgagtggtcatcgagttcacctcacccatgcctctggagcgggtgcagagggagaacccaggcgtgctcctgggaggccgttatacaccacctgactgcaccccagcccaaacagtggcagttatcatcccctttagacaccgggagcaccacctacgctattggctccactatctgcaccccatgttgaggcggcagcggctgcgctacggtatctatgtcatcaaccagcacggtgaggagaccttcaaccgggccaagctgctcaacgtaggcttcctagaggcactgaaggaggatgctacctatgactgtttcatcttcagtgatgtggacctggtccctatggatgaccgcaatctgtaccgttgtggtgaccagccccgccactttgccatcgccatggacaagtttggcttccggctgccctatgctagctactttggaggtgtgtcgggcctgagtaaggcccagtttctgaggatcaacggctttcctaacgagtactggggctggggcggtgaggacgatgacatcttcaaccggatctccctgactgggatgaagatctcacgcccagatgtccggataggccgctaccgcatgatcaagcatgaccgggacaaacataacgagcccaaccctcagaggtttagtaagattcaaaacacaaagctgagcatgaagtgggatggcattggatcgctgcggtaccgagtcttggaagtgtctcggcagccactcttcaccaacatcacagtggacatcgggcgacccatgtcatggctcaatcaaggctgacactaatggacaaaggccctccatgcccttctgatgtggaggtttgcctgccagaggactgaactacagcctggctgacagtggctctgggggcatccccaagactgagactgtgagctgttttctgagggtcttcaaagacggcctagaagtttcagaacccactttgaggggcttctgggcaagcccctcttatggctctctctgaggccaatccttcctgccctacttcctccagccctaacctcctcactgttagggttgggctagcccctgcactgcctcgcggagtggcctgggctaggtcactccacttctctgtgcctcagtttccctccccccttgagtcccctagggcctggaaaggtgggaggattgacttagggggcagtgtctcttccaggggggagttctcagatctggagatccctcatgcttccaggggaggggaaacctttttcattcaacattgtagggggcaagctttggttagccacctactgaggagcgcccccccccgggaggggaccagaaggggtgctgtttcctgggatcatggggttggcctttgcatgggggacaggtggggcttggatcagtccgtggttctggcctccctgccttagagaggaggcggaagcccagggcctgctcatgtttatatgttgcacagaaacttgtgtgggtgctttagtaaaaaacgtaaatggagca

SEQ ID NO: 3888 - DNA, 1576 bp, Cricetulus griseus
ttgcatgaggtttccctccaagagtcaatccgatatggcccctggagatgcagtagagaagtggctgaatgacctgctgtgcctggactgcctcaacatcacccgaatagtttctggctgcccattgcctgaggcctgtgagctctactatgttaacagagatactctcttttgctaccacaaggcctctgaagttttcctccagcggctcatggccctctatgtggcttctcattacaagaactctcccaatgatcttcagatgctttctgatgcacctgctcaccacctcttctgccttctgccacccgtgccccccaccagaatgcgctgccggaagtgctggccgttgtccaggtgtgccttctgcagatgtactatgaaggcaggttcccttgtctggaggaaaaggtctttgagacaccacaagaaatccacactgtgagcagtgaggccgtcagcttgctggaagaagtcatcactccccggaaggatctgcctcccttactcctcaagttgaatgagaggcctgcagagcgcctggattaccttggtgtttcctatgggctaacccccagactcctcaaattctggaaacgagctggatttgttcctgtctatttgagacagaccccaaacgacctgactggagaacactcatgcatcatgctgaagacactggctgatgaagacgaggctgagcagggagcctggcttgcggcattttggaaagatttccgaagacgattcctggccttgctgtcttaccaattcagcgccttctctcctgccctgtctctcaacataatccagaacaggaacatagcgaagccagcccagccagccctaggccgggagcatctggaggcgctgtttctcccctatgacctgaagcggctggagatgtactctcggaacatggttgattatcatctcatcatggaccttatcccagccatttcccgcttgtacttcctgaaccagctcggggatctgggcatgtcggctgcccagtcagctcttctgttgggaattggcctacagcacaagtctgtggatcagctagaaaaggagattgagctcccttccggccagttaatggggcttttcaaccgcatcatccgaaaagttgtgaagttgtttaatgatgttcaggaaaaggccattgaggaacagatggtggcagtgaaggatgtggtcatggagcccacaatgaagaccctgagtgatgacctggatgaagcagcaaaggaattccaggagaaacacaagaaggaagtggggaagctgaaggacatggacttctctcagtacgtaatccgtggggatgatgaagagtggaacgacgtcttgagcaaagctgggcagaatgcctccatcgttagtttgaaaagtgacaagaaaaggaagttggaaacaaaacaagaacccaaacagaacaagaagttgaagaagagagagatgaacaacagaaaggatgcaaaattgaaacggaagaagtagtgacacgcgaggagatgccagacgtgtgagctgtgttggcctggggccgggcagcagtgtgggcagtaacagt

SEQ ID NO: 3889 - DNA, 1576 bp, Cricetulus griseus
gtgctcccttgcagattctggaggagctagtcctggggctagccgctgaggtgtctgatgattttcttttcttctgtggagacacgcatggcagcttcgtggtcagaactctgctgcaagtgttaggaggtactcttctggagtctgagagagccaagtcccgtggttcccagtcgtctgaaacacagaggacctcagctcgggaatgtaagcccactgattttgaggttcctaaaaccttcttgaattgccttcaggacctgagtgcctgctttctgaaggacattgcagtatttatcactgacaagatctccagcttttgtcttcaagtggccttgcagatcttacatcacagattacctcagcattgtgcccatctctgtgatgctgtcatcgattacctgagttctcgtaattcttcagcaagtggcagccctctactcctatttcttcgggatcagacgagctccagactcttggagcaggtgctactggtattagaaccagcgaggctccagagcctctttgaagatcactttcagggccagctgcattccttggctgctcatcccattgctaacttccccctgcagcgcttactggatgcagtcacttcccctgagctgctgtcccttgtgtttgaggagctgagccctgccctggaagctgtgctggcccagggccacccaggggtagttgtcgctctggtggaagcctgccgcagggttgggactcaccaagtccaagtcttgcaactgctattggaggcattccactgtgcagagccctcatcccggcaagtagcctgtgtgcctctctttgcctctttgttggcatatgaggtatactatgaactagtggaagaggagggggcggtgcctgcagaacatcaggtagaaatggccacaaccagagctctgagggaagtgacagtacttggatctctactgctccaacatttgttgtatttctccaaccctggacttgtacttcgaagtctgagtgccttgacaggaccacagctcctggctctggcccagagccctgctggctctcatgtatttgacgccatcctgactagcccctctgtgacgcacaagcagcgtcgtcgtgtgctgaagacactaaagggacattatgttgctcttgcctgtagccgccatggcagccgagtattagatgccatctggagtggagcagctttgggggcccggaaggagattgctgctgaactgggagagcagaaccaagagttgattcaagatgcttttggccaccacgtggcccgaaatgtggccctgactaccttcttgaagcggcgagagacttgggaacagcaacagagtgctatggccaagcggagacgggcatttaactctatacttgaagactgaggcttcactgccttggaataggtgttgattggagggtgaaaggatacgcttgtctttcctgcttcaagttggattacaagtctcattggagcagatgtagtaacacacaaaactgtaaccctagtgtagctttggctgtcctggcatttctctatagactaggctggcctctaactcacaga

SEQ ID NO: 3890 - DNA, 1576 bp, Cricetulus griseus
cccgcagcggaggctcggacccgaggtggacgccgggcgcccctcctcctgcccgccatggctgcgccccgcgagcccgcgttctcacggccgccgcgcccgggtccgggaaggccacgctgacgcaccccgggaaggcaatcctggcaggaggcctggcgggaggcatagaaatctgcatcaccttccctaccgagtacgtgaagacgcagttgcagctagatgaacgctcgcacccaccgcggtaccggggcattggggactgcgtgaggcaaactgtccgcagccatggcgtcctgggcctgtaccgcggcctcagctccctgctctatggctccatccccaaggcggctgtcaggttcgggatgtttgagttcctcagcaaccacatgcgggatgcccagggtcggctcgacagcacgagagggctgttgtgtggtctgggcgccggcgtggcggaagcagtggtggtcgtgtgccccatggagactatcaaggtgaagttcatccatgaccaaacttcccccaatcccaagtaccgaggatttttccacggggttagggagattgttagggaacaagggctaaaggggacataccaaggcctcacagctactgtactgaagcagggctcaaaccaagccatccgattcttcgttatgacctcactacgcaactggtaccgaggcgagaaccccaacaagcccatgaacccattggtcactggagtctttggagccattgccggtgcagctagtgtctttgggaacacacctctggatgtgatcaagaccaggatgcagggcctggaagcacacaaatacaagaacacactggactgtggcttgaagatcctgaagaatgagggacccaaggcattctacaagggcactattccccgactgggccgagtctgcctggatgtggccatcgtgttcatcatctacgatgaagtggtgaagctgctcaataaagtttggaagacagactaaccctagagggtgcggcggggtgtcccagctcctccagaccagacccccgccatcttctcttatgattccagtgcagtagtgccaaaaggcccttccccttgtccctcaagttctgtggcctggtgtgttccatagttctgtgtctgtcatgtggtctgtatgtgacactactattgtgtctgtgtccagcctggccatggctgggtgtctctatggcttgtgaatatgtgctcacttctccattgcttgcttgtgagccatgtgcttgtttcatgttctgtgtcatgtgaccctgtgccccacttcctggggtgcctgtgtgccctggtccatggccttggagccatggtcaggtcacagtccggtgccttccacccccgatggcaggggcgccctcccctggcctaccacagctgcctccgggcctcggcctggcttcaccgcattccaggggctatatgcccccctgcttctcccgccattggccttaaatggccctcgggccctccctctgcccgggacagggtggcacctgccactctcaggaccaccctgccaaggagaataaaccggatcctgtcgca

SEQ ID NO: 3891 - DNA, 1575 bp, Cricetulus griseus
cacggttgtcgacaggcttttcatgtcacctgtgcccagatggcaggcctgctgtgtgaagaagaagttctggaggtggacaatgtcaagtactgtggctactgcaaataccacttcagcaagatgaagacatcccgtcactccagcgggggaggaggaggaacaggaggaggtggtggcagtggaggcggcggcggtggcagcagtggtggaggtggcacaggggggaggcggcggcagcagcagcagcttccttactggcaggagaagtcggtcggcctcaccatccacccagcaggagaagcaccctacccaccatgagaagggccagaagaagagtcgaaaggataaagaacgccttaaacagaagcacaagaagcggtgaccttcagtttcttcccagtagaagggatccctttgactgtttctcatcatcccctcccactaagggtcacaagctgagcttggaaaagcctacagatgtggggggctgaggaagggcaggatagcacctattggggccccactgatggggctgggcaggggaagtcccgcctctgcctcctgtgtgctgggattaaaggtgtgtgccaccatgtctggctttggtccattttttgataaagagctttggtggagtgaggggaaggatgcagatttggggccatctctgtctgggggaggggaaggatgtggtttgcagagcggaagtggagtctgagaacgcatgagtggatcttaatgtcaccgccctcagtgagaagagatgagtgagtagtgcgagctgagtctgtgcccaccaaagggggaggggggctggggtcattggagctggctttacaggtgactgctctaagcctaggagggacaggtacttggtgacagcggtcataagccacagtacctagcctggtcattcctgttccattgccagccttttagctgcagctgtttggctggctgtccctgtgtgtgtggtgtgtgtgtatgatggtgtggttgtgagtgtagggttgtgcccatggtgggaaggtaatctatgtagcactgactgtcttagctctgagctgacgaatcctctccatagacaatgacactttaagggttgcctttaaaaaataaattgtatctccccataccttctccctcatcccagcttgtgggttttcccctcaggctcctgggtctactgctgccaccagaccaccttgtcttgacctactgaagagttgggggctgtctcctgtgttcactttttccagttcacttggcactgaagaccgaactctggctcccttccttccatcccagcctgtttccatgtagcagacccttcctaggggagcgaggaagggaagccacagattgcaaacccaggggctcatttttcattctttctgaaacctttatatcctcagcccaagcggcagtgttcccttgcgacctccaagcctggaattgtgcatagcctgggtcttgtatctttgtataacggatgttatttgtacgaagggcagttcgtaaacagcacttgttcttttaataaaagaaatagttttaactaaaaaaaaaaaa

SEQ ID NO: 3892 - DNA, 1575 bp, Cricetulus griseus
ggtggatccatgcacattacctgcaagatggttttgttactataatccccatccaaaatacaggagatgctctgttccggaagaacaagaacgcattgatgaagacttatacctgagcaaggctaagcaacaagaagaaactgttgagaagaagcagaaggctgtggaaagtgacaagcaccaggtcctcagtaatccaacaaagagtcctgctacacaagatatggctgaactaaatgacaagacaattggatatgagcaaatcaatacccctaatttgcttccatctgttagagaagaaaacaaatcacctcttcaacttaagtctctggattccagtgtttttcagttttccagtaagtacaagttgatcctgggtgatgagcctgtggagaaacgaaggagattccaaactgacatgacaccgtctcctatagactattccatgtccagtccttacaggagggtagacgcagctgttgcctacccagatggagaaaacagccatgataaatccagttctgagcgaagtacaccaccatacctcttaccagaatacccagaagcaaacaagaatacaggacagaacagggaagctccagcactttgtccagggtcccaggaccaagaccaggaatccctgcttcctgaagaattagaagatcagatgccaagattggtagcagaagaatctaacagaagtatcgaaaacataaacaaagaagtgaataaagggccttttgtggctgtagtcggtgttgcaaagggacttacagattcaggagctcccatccagctgatccctttcaacagggaggagtttgtagggagaagaaaggcagcagaatcatggaacccaaatccttattctgtggcccctgccacagccactccagggaaaggaaagggctgccaggagagcggaggtcgtaacatgccaaagataaagaatcagaaagaactggaagaattgaagagaaccacggaaaaactggaacgtgttttggctgaaaggaatttgttccagcaaaaggtggaggagctggaacaggagaagaaccattggcattctgaatttaagaaagctcagcatgagttggtgacctatagtacccaggagacagaaggcttatactggagcaagaagcacatgggttatcgccaagctgaattccagattctaaaagccgagctagaaagaaccaaagaggagaagcaagaactgaaagagaaacttaaagagacagagacacacctggaagtactgcagaaggcccaggcctcctaccggaacgcagagggagatgacctagaaaggttaattactagagtttagttatcagcttgtgaggactaatgggaattacctgctaagaccccccttaattcattgaccaccatggattgattaattatttcttagaaagccgcagccagtctccctgtgtttgatggcatggtgctttctgcctcctttctacctaatggagacataattgttaagaaatgtaggcccattttgaagggacttcatttaattctgttggctaatgacttcatgtcatctcttctcct

SEQ ID NO: 3893 - DNA, 1575 bp, Cricetulus griseus
tgcgcaggcgacacgccgagggacgaagccgagctgctgaacagccgccaggtccgctccggctccacgccgcccgtcgcgccgccgcccgcgtcctctcctccccgccaacgccgccgctgccatgggagtgcaggtggagaccatctctcctggagacgggcgcaccttcccgaagcgcggccagacctgcgtggtgcactacacgggaatgcttgaagatggaaagaaatttgattcctctcgggacagaaacaagccctttaagtttatgctaggcaagcaggaggtgatccgaggctgggaagaaggggtagcccagatgagtgtaggtcagagagccaaactgacaatctccccagactatgcctatggagccactgggcacccaggcatcatcccaccacatgccactctggtttttgatgtggagcttctaaaactggaatgacagaagtggcctcctcccttagctcctcacacatggatctgccatggaaggatctggtacctccagacgggtgcacatgaatccatgtggagcttttcctgatgtcccactactctttgtatagacacctacccgactgaatgtgttccgtcactcagctttgcttcggacacctccatgtcctcttccccttctgtatatgtgttgacctaaactatgccataaatctcaagttattttgttttggggtgaagattcagtttcagtctttcagatctaggtttccaatggagtatatggtcaagtattaacagcacaagcgatgggttaactttagaataggaattggtgttgggggtgggatttgcaagaatttttattttattttattttaattttttggatgaaaaaattattatatattatgacattcttgctgctgtgctgcaaagccatagcagattggagatgctgttgagggctggatttttccagtgagggaggtcctgttaaattgaaatccctacccaaactgaattgggaaggaagggagcgagcctttgcttctaacggtcctcccaccttctgaaaccgtctgccttttaaagcaggttcctttactgctgtgttggacactacagtacctgtccctgggtcagcagggacctctgaagccttctttgtgacctggcttaatttgtttttcatcctatggtttttctaatgaattttcaggacttttataatcttgtaactatccaagctccacttcctaaattttaagaactttaatggaaagtttaaattgaaggtgctgtttgtagactcaccacccaatggacgcccggccatcactacaaatccttgagtgttctctaagaaaatgatgctggtcatcacagcttcagcatctcctgggttttgatgcttggctctctctgctaatctcggcttcctggcttttttccctccttcagttccttctcaccctctgctgtcctgtgtagtgatttggtgagagaaaggcttttgtcccctgccctctgcactacatatgcgttccaagttttattattgcaataaaagtgctttatgctggcttttctcaaaaaaaaaaaaaaaaa

SEQ ID NO: 3894 - DNA, 1574 bp, Cricetulus griseus
taggaaacctccctaggatatttgactactcgccgttagatccaacgcaggacttcaacacacagatgactaagttggggcatggcctcctctctggccagtactcgaagcctcctgtgaaatccgagctcattgagcaggtgatgaaggaggagcacaagcctcagcagaatgggatctctccatgcatgttcaaggcctttgtcagcaagagccacccagaattctcctctaatagacaacaagatgcccaggtagtttttcttgcacttggtcaatctggtagagaggaaccgaattggctcaagaaaacccaagtgatgtcttccggtttttggtggaagagcgcattcagtgctgtcagacccgaaaggtccgctacacagagagggtggactatctgatgcagttacctgtggccatggaggcagcaaccaacaaagatgagctgatcgcctatgaattgatgagaagggaagcagaagcaaatcgaagaccccttccagagcttgtgcgtgccaagatcccattcagtgcctgccttcaggcctttgctgaaccagacaatgtggatgacttctggagcagtgccctgcaggcaaagtctgcaggagtaaaaacatctcgctttgcctcattccctgaatacttggtagtgcagataaagaagttcacttttggtcttgactgggttcccagaaaatttgatgtttctattgatatgccagacctactagatatcagccatcttagagccaggggcttacagccaggagaagaggagcttccagacatcagtccccctatagtcattcctgatgactcaaaagatcgcctgatgaaccagttgatagacccctcagacattgatgaatcctccgtgatgcagctggctgagatgggctttcctttggaagcctgccggaaggctgtgtacttcactggaaacactggagctgaggtggccttcaactggattatcgtgcacatggaggaacctgatttgctgaacccttggccatacctgggtatggaggggctggagcctctgtatatggtgctactggattggacaaccaacctcctgaggaaattgtagctatcatcacctccatgggatttcagcgcaatcaggcagtgcaggccctacgagcaacgaatcataacctggaaagggcactggactggatcttcagccacccagagtttgaagaggacagtgacttcatgattgagatggagaacaatgccaatgcaaacatcatgtccgaggccaagcctgaagggcccagagtcaaggatggatctggaatgtacgagttatttgcattcatcagtcacatgggaacatctacaatgagtggccattatgtttgccatatcaaaaaggagggacggtgggtgatctacaatgaccacaaagtttgtgcctcagaaaggccccccaaagacctgggatatatgtacttttaccgtaggataccaagctaaacctcacaagagttggctagaagaagccatacacctttttaatttgccaaaaaaaaaaaagaaaaaaaaaaaaaaaaaaaaaa

SEQ ID NO: 3895 - DNA, 1574 bp, Cricetulus griseus
agggaaccggcaccatggcgtcgggttgcaagatcggcccgtccatcctcaacagcgacctggccaacctaggggccgagtgcctgcgcatgctggactcgggggccgactacctgcacctggatgtaatggacgggcattttgttcccaacatcacttttggtcaccctgtggttgaaagcctccgaaagcagctaggccaggaccctttctttgatatgcacatgatggtatctaggcccgaacagtgggtaaagccaatggctgtggcaggtgccaatcaatatacctttcatctggaggcaactgacaacccaggggctttaattaaagatatcagggagaatgggatgaaggttggccttgccatcaaaccaggaacaacagttgaatatttggccccatgggctaatcagatagatatggccttggtaatgactgtagaacctgggtttggaggacaaaattcatggaagatatgatgcccaaggttcactggttgaggacccagttcccaactttggatatagaggtcgatggtggagtaggtcctgacactgttcagaaatgcgcggaggcaggagctaacatgattgtgtctggcagtgccatcatgaggagtgacgaccccagatctgttatcaacttactaaggaatgtctgttcagaagctgctcagaaaacgctctcttgatcgatgaagccacaagaaacctggtctctgctcatgaaatcttttttacttgggaaaattaactaccaaatcacattgaatcgaagcagtgctgcattccagtgattaaattcaattgtgcaggatgttcaagaggttagaaataactacctttttagtgatgccatttagagattagcatgatgaaatgtttatattgggaaaatgatttttttgtaaagagtgaaaacatggttttaggattacagacagaaatgtgtcttattgcctaaagaggaaaattagctactatgaaaaccatttttttctgtatttttaaaaagaatgttctgttgtttctctgatttatccctaaagcaaatgacatccatattttctgtttcatgtcatttgtggtttgtttatatgcctgagaatatgaatggaaaggactaaaattagaagctttggtggggtgtcatgtcatggtctggcatctgaaacattttatttttccttatactcggtttactaaagaatataaaaaataatgtatgaagccgagggtttctgaaatgcaagcacagactttatcaaaataggtattaaattataagaacactgataaacgtaggcatgaaacagcttgctgaggctttttcctgccctataaggtaaagtttattatacttgtttttattttggcttaggaaaagcttgtgcatttaatcaaatcacacaatacaaggcatatagaaataactttaattaaaaaactatgtagaagattataatatcattcatgacaaagatttgaatttatttgctgggacaacttgtatttttctggtcttttgttattctttttctttaaaaataaatgtacaagtaaaactaataa

SEQ ID NO: 3896 - DNA, 1574 bp, Cricetulus griseus
ccagccatgctcgccgctgcgggctccctggtggccgccatctgggcagcgctccatctccggactctgctgctagctgctgtcaccttcttgttcctggctgactacctcaaaagccggcgccccaagaactaccctcccgggccgcgacgcctgcccttcgtgggcaacatattgcacatggatttcggacggccgcaccctgacgatccaacagcttgtgaagaaatatgggaatgttatcagtctggattttggaatcatgtcttcagtgattataagcagtatgcctttaatcaaagaagcctttactcacctggatgacaattttatgagtcgccctaaattccctatacaaaaatacgtctttaatgaaaacggattgatcttccagacatggaaggaacaaagaaggttacaccctgatgacactgaggaactttggattaggaaagaagagcttagagcagcgcattcaggaagaagctggacatcttgtggaggccatagcagaggagggaggacagccttttgaccctcactttaagatcaacaatgccgtttccaatatcatttgctccatcacttttggcgagcgttttgagtatcatgacagacaatttcaggagctgctgagattgctggacaaggccatgtacgtcaggttcctcagtgatggtccatttctataacatcttcccatggataatgaaaatatcttcctggacaacaccaaacaggaaatagctacctggagaaaactgaaatcatatgtttctgatgttattgacaatcaccgtaaagactgggaccctaatgagccaagagacttcattgatgctttcctcaaggaaatgacaaagtacccagacaatactacaagtttcaaagaagaaaacctcatctgcagcactctggaccttttcctcgctggaacagagacaacatccaccacactgcgctgggctctgctctacatggccctctaccccagaagtccaagaaaaagtacaggctgaaattgacagagtgattggccaggagaaacagcccagcctggctgaccgagactccatgccctacaccaatgctgttgtccatgaggtacagagaatgggaaatatcatccctctgaatgttcccagggaagtgacagtagacactacattggctggattccacctgccgaaggggtccacactccatatcaatttgacttctctgcacatggaccccaaagaatgggcaaccccagacatcttcaatccagagcactttttggagaatggacaatttaagaagagagaatcttttctgcctttttcaatgggaaagcgagcttgccttggagaacaattggccaggtctgaactctttattttcttcactgctcttgtgcaaaaatttaccttcaagcctccagtcaatgagaagctgagcctgaagtccagaatgggtatcaccatttccccagtgagccaccacctctgcgctgtccctagactgtgatgtcagagacagacagaaaaggagaaaaggaagaactgaggaatgctctgagacactggggccac

SEQ ID NO: 3897 - DNA, 1574 bp, Cricetulus griseus
cttcctgtcggtgatcttcgtgctcgtctgggtcctgcactaccgagaggggcttggctgggacggcggcgcgctcgagtttaactggcacccggtgctcgcggtgaccggcttcgtcttcatccagggcatagccatcatcgtgtacagattgccatggacctggaagtgcagcaagttcctgatgaagtccatccatgccgggttaaacgctgtggctgccgtcctcgccatcatctccgtagtggccgtgtttgattaccacaatgtccgaagtatcccccatatgtacagtctgcacagctgggttggactgacggctgtcatactctatgtccaacagcttgtcctaggctttttgatctttctgcttccatgggctccgctgtctctccgggccgtcgtcatgcccatacatgtatattctggacttctcctcttcggaacagtgattgctacagtcctcatgggagtgacagagaagctgtttttgtcctgaaaaatccttcataccattcattcccaccagagggtgttttcacaaataccctgggccttctgattctggtatttggagccctcatcttctggattgtcaccagaccacagtggaaacgtcccagagaacccggctctatccttcttcagccaaatggaggcgcagagggaatgcaaggcgccatggcaataagctccagccacagtagaacctctctctctctctctctctctctctctctctctctctctctctctctctctctctcttttttcgtttttcgagacagggtttctctgcgtagctttggagcctatcctggccctcactctagagaccaggctgaccttgaactcacagagatccgcctgcctctgcctccagagtgctgggattaaaggcgtggccaccaacgcccggcggcccacagaggctatcagtgcaaggctaattatgtggcactataatagctccattgcaagtattagagcacccctcatttcagccctctattttcttctcaagtgggctaatgtgagggtaatattataggtacttcttttctttcttctccagcttttatgaaaggatgcatagcacaatgtatcggaaagatctttctatttgagactcttcttttaatgggctctttattacaatgataattatacctttatctttcaaaagccgatgtttcctgcctaaagcatctccccccaaaaatatcacattaaaaagtctgcaaagaataggggagaagagagccttgggtatcaattccaaacagtgattgaaacctccccaaataattatagcttgtatcctctacagagattatctggcttggcttaccccataatctaatttcaggaaagaaagctttatttcaacactgatctatgtcaacatgaaagccttctctttcccagagcttggcgagaaattgaatatactatgttgaattaatgtcatcaaaagcatacagctttcctgtgctcctgtcaaacaaagcccaccctccactgcacctttctccccgttagcagtgcggttttcttgatctgtgcacttagaa

SEQ ID NO: 3898 - DNA, 1574 bp, Cricetulus griseus
cccgggatgctgcgcgaagctcggcgctgccgccacatcctccggagctctgggtccaggcgagccgagtcgagccgggccaggaccaagcggagcgctccgacggcacgagcgagcggaacgctgagccatggcgcaccagaccggcatccatgccactgaagagctaaaggaattctttgccaaggcccgggctggctccatccgactcatcaaagttgtcattgaggacgagcagctcgtgctgggtgcctcgcaggagccagtgggacgctgggaccaggactacgaccgtgctgtgctgccgctgctagatgcccaggagccctgctacctcctcttccgccttgactcgcagaatgctcagggtttcgagtggctcttcctggcctggtcacctgataattcacctgtgcggctgaagatgctgtatgcagccacacgagccacagtgaagaaggaatttggaggtggccacatcaaggatgagctcttcgggacagtaaaggacgacctctccttggctgggtaccagaaacatctctcatcctgtgccgcacctgcccccctgacttcggctgagagagagcttcagcagatccgaatcaacgaggtgaagactgagatcagtgtggaaagcaagcaccagacccttcagggcctggccttccccctgcagcccgaggcccagcgggccctccagcaactcaagcagaagacagtcaactatatccagatgaagctggacctggaacgggagaccatcgagctggtccacacagagcccacaagtgtggcccagctgccctcacgggtcccccgagatgccgcccgctaccacttcttcctgtataagcatacccatgagggtgactcccttgaatctgtggtgttcatctactccatgccggggtacaagtgcagcattaaggagcgcatgctctactccagctgcaagagccgcctcctcgactccgtagagcaagacttccagctggagatagctaagaagattgagattggagatggagcagaactgacagccgagttcctctacgatgaggtgcatcccaagcagcacgccttcaagcaggcctttgccaagcccagaggccctgggggcaagcggggccataagcgcctcatccggggccccggtgagaatggagatgacagctagtgtgcctggactgggagcagggccaggcacgtggacttcagggttgccgccctatctctcctgcccccccttcctccccagcctgggctctaaggcattgcttcccgtgggacaggagggcaggtggctgaacacatttgctactttcgagggccattggaccagcacttggtgaccctgccctgtggctgtcccttcctctcctctgtgtgcacagggtagctggggaaccctaccttggcatgaacctagcctccagatctgatgctgtggaccccgctcagtccagaagcctttggccacagagggtggggatggttggcaggggccagatgtcacaggaagggatggttgaacgctgtattttctaaagaaataaaataatttttaaatc

SEQ ID NO: 3899 - DNA, 1574 bp, Cricetulus griseus
gcacgtccagtccacacctgagccccagaagctgtggacagctatccgcaacagggacctcctgtctgtactggaggcctttgccaatggggcaggacttcggacagctgctgccagggcctgatgggcaggcacctggagagcttgccctgcacttggccatcagagtcgccagccgggcttccctgcccctagtggagttccttatccagaatggtggccacttggatgccaagacggtggatggaaacaccgcgctgcactgtgctgcactccacggccagctggactgcctcaagctgctgctgaaagggagggctcccgtgggggcagtaaatgatgctggagagacagctctggacattgccaggaagaaacaacacaagggaggaggatgaggaagaaagtactgtcctgggaagcccccagctcgggactgctggggcaatgggaggctggatatcaacaagacctatgagaccattattgtcccgggaccagccacctctcagagccacaaagaggaccgtcccccacccctgcccgccaaaaactctaggaccacacttccagggcgagcaggacattccagtggagatcgctctgacacccccagtctgaggtcaagagtctcctgaagcctcagagaacccaagcagtccagcgtcttcctcatctagcctcaccagctctgtggaacccggggggctgagcctagccccacctagccctaaagaaggcctccaggagccatcaggcacctcccgacctaggccagaatctgggaccacccctattgaagtgtatctcccagtcaagttcagctcagagagcactcgatcttacagacggggaggtcggagtctggaagacagtccctctgcctggcagcctctgtctagaaggaacattccggtctgcctcacggaaggagacggctcaaagaccggggttctcccgggcaagttctctgcaacttttgcacgactagctccttgctgaccctcatggccacactggaccctgacattcagagctgggacttgagtccacagaactgggagctcaccttcctcatgtccctgccaaggacactggccctccttgttggggctgatgtcctgggccaggcagtcctgaagttagatctgaggctgcctgggctgggttcagttacacagccctcaatccttatcagaccaggactgttctccctacaagggtgggaccacgctggccatcattcaggtccaggcactatcttatagactatttatcagtctagtattttcctttaatgaattccagctttatgtccagacctctgctaggtactgtggatgccacatgaatgaggcaagcatcccacagatgtggccccttgctggaaagctggtctcaagaactgacttggaatgaacagagccagactgcagaggatggctctgggctcaggggtaggacagacacccctggtctcctgtctgatcattacagttgttacagcctagttggaggcagaggcaagcagattcttgagctccacgttcagtgagagaccctgcctcaaaaca

SEQ ID NO: 3900 - DNA, 1574 bp, Cricetulus griseus
gagggtgggcaccgcggcgggctccggcggtcggcgggcttccgctcagggcggctgggctccgcgctgccgccgccgtggcccatgggcagaatcgtctcagaaggccggcaataaaccaaaaagatgtccctatatgatgacctgggagtggagaccagtgactcaaaaaccgaaggctggtccaaaaacttcaagcttctgcagtcccagcttcaggtgaagaaggcagctctcactcaagccaagagtcagcggacaaaacaaagtacagtccttgccccagtcatcgacctaaagcgaggaggctcctcagatgaccggcagattgtagacacaccacctcatgtagcagctgggctgaaggaccctgttcccagtgggttttctgcaggggaagttctgatccccttagctgatgaatatgatcctatgtttcctaatgattatgagaaagtagtgaagcgccagagagaggagcgacagaggcagcgggagctggaaagacagaaggaaatagaagaaagagaaaagaggcgtaaagacaggcatgaagccagcgggttttctaggcgaccagacccagattctgatgaagatgaagattatgagcgagagcggagaaaaagaagtatgggaggagctgccattgccccacctacttctcttgtagagaaagacaaggagttaccccgagattttccttatgaagaggactcaagacctcgatcacagtcttccaaagctgctattcctcccccagtatatgaggagccagatagaccaagatctccaacaggccccagcaactccttccttgctaacatgggtggcacagtggctcataagatcatgcagaaatatggcttccgggaaggccaggggctggggaaacatgagcaagggctaagtactgcactgtcggtggagaagaccagcaagcgtggcggcaagatcattgtgggtgatgcaacggagaagggcgagtctcaggatgcatccaagaagtcggattcaaatccattaactgaaatacttaagtgccctactaaagtggtcctgctgaggaacatggttggtgcaggagaggttgatgaagacttggaagttgaaaccaaggaagaatgtgaaaaatatggcaaagttgggaaatgtgtgatatttgagattcctggtgcccctgatgatgaagcagtgcggatatttttagaatttgagagagttgaatcagcaattaaagctgttgttgatctcaatgggaggtattttggtggacgggtggttaaagcatgtttctacaatttggataaattcagggtcttggatctggcagaacaagtttgattgtaacctaaagtcacctccatgatccttacacgagctgtacactgagcaatgacacaggcgtcagcctccatggctgttggacactgagactcttggatggacttctgagatatatgttgatggatcccttttttattttgtggtttttttaatatagtataaaaatcctttaaaaattaaaaaaaaaaaaaaaaaaaaaaaaaaaaaaaaaaaaaaaaaaaaaaaaa

SEQ ID NO: 3901 - DNA, 1574 bp, Cricetulus griseus
  modified_base (1563)..(1563): a, c, t, g, unknown or other
ggagataccagagtatgaaaattttgcccttttgttacggctggagggaaaactccagagttgggatggcagaattccagcagtgcggaggacactgatgcaaatttgtatgaagttgaagagccctatgacgctccagatggccagctgcaacttgatcctagacatcagccttccagttctgggacaccgaaggaggggcaggatgatctcaatcttggtcttggtgacctgccctctgatgaggaagtcatcaattagttctgatgaagatgatgtcagctccgagtccagtaaaggagagccagacccgatggaagataaacagggtgaagatactgggatgaaaagcaaagttcatcatattgccaaggagatcatgagttcagagaaagtgtttgtggatgtgttaaaacttttgcatattgatttccgggatgctgtagcccatgcatccaggcaacttgggaagcctgtgattgaggaccggatcctgaaccagatcttgtactacctgcctcagctgtatgagctcaaccgggatcttctgaaggaactggaggaaagaatgctgagctggaatgaacaacaaagaattgccgatatcttcgtaaagaaggggccatatttaaaaatgtattccacatacatcaaagaatttgataagaacatagctttgctggatgagcagtgcaagaaaaatccaggatttgctgcggttgttagagaattcgagatgagcccacgatgtgccaacctagccctgaagcactatctgctaaagccagttcagaggatccctcagtacaggctgctgctgacagactatttaaagaaccttctagaagactctgtagatcacagggacacccaagatgccctagctgttgttatagaggtagccaaccatgccaatgacaccatgaagcaaggggacaactttcagaagcttatgcagattcagtacagcttaagtggacaccatgaaattgtgcaacctgggcgggtttttctcaaagaaggcattctgatgaagctgtctcggaaagtcatgcagccccgaatgtttttcctgtttaatgatgccctgctgtatacaacacccatgcagtctgggatgtacaaattgaacaacatgctctcattggctggaatgaaggttagaaaacccacccaagaagcatatcagaatgaattaaagattgaaagtgtggagcgctctttcatcctctcagccagttctgccacagaaagagatgactggctggaggccatatccaggtcaatagaagagtatgccaagaaaaaaatcaccttctgccccagcaggagtcttgatgaggactcagaaaagaaagaggaagttagtcctcttgggtcaaaggctcccatctggattcctgataccagagccaccatgtgtatgatttgcacaagtgaatttactctgacctggagaagacatcactgcagggcctgtggaaagattgtgtgccaagcttgctcatcaaataaatatggcttagattacctgaaaaggcaactggcaaatatctaaaaaanaaaaaaaaaaa

SEQ ID NO: 3902 - DNA, 1573 bp, Cricetulus griseus
gccgggccgagtttccagaggatcgaactgggcgcgcggggtggctgcggcgcaggtctcctggccgagtcccatttctggctgctcatgccactgggactggggcggcggaaaaaggcaccacctctggtggaaaatgaagaggcggagccaggccgcagtggcctgggagtgggggagcctgggcccctgggtggaagcggagcaggggaatcccagatgggcttgcccccacctcccgctgccctccggcctcgcctcgtattccacacccagctggcccacggtagccccacaggccgcatcgagggcttcaccaatgtcaaggagctgtatggcaagatcgctgaggccttccaactgccagctgctgaggtgatgttctgcaccctcaacacccataaagtggatatggacaagctcctgggtggccagatcgggctggaggacttcatctttgctcatgtcaaggggcagcgcaaagaggtggaagtattcaagtctgaggaggcactgggactaaccatcactgacaacggagccggctatgcgttcattaagcgcatcaaggatggcagtgtgattgatcacatccagctcatcagcgtgggtgacatgattgaagccatcaacgggcagagcctgctgggctgtcggcactacgaagttgccaggctcctcaaggagctgccccgaggccgtaccttcaccctcaaactcacagagcctcggaaagcctttgatatgatcagccagcgttcagcgggtggccaccctggctcgggcccacaactgggcactggccgagggaccctcaggctccgatcccggggccctgccacagtggaggatctgccatcggcctttgaggaaaaggccattgagaaggtggatgacttgctagaaagctacatggggatcagagacacagaactggctgccaccatggtggagctgggaaaagacaaaaggaatccagatgaactggcagaggctctggatgaacgacttggggactttgcattcccagatgaattcgtctttgatgtctggggagccattggggatgccaaggtcggccgatactaagactggaactaaatgtggaccttgagattacctgggcttggcctggctggggcctccagaagggctgccacagacaagacccgagcatcctgcttaggcatgtcactcaacggcctggggatggcatgggatggaagtggcctatggtcctggccccactccgatcaccatggtgcccagcctggttgggatccccggccaacccctgccgggtccccacctacctcagtagagtaagcgcatggggatgggccagcacactgggcagccacctctgtccccaacactttccaccatcggctggcaaattgccccttctgtctccctgggccttggttctgtttgggtcatgactttcctatcttactttttttgctttgtttttttcaagacagactcaccatgtagcgctggttgtcctggaactctgtagatcaggctgaccttgaactcacagaaatctgcctgcatctgccttcccagt

SEQ ID NO: 3903 - DNA, 1573 bp, Cricetulus griseus
  modified_base (377)..(377): a, c, t, g, unknown or other
ggaaacacactcaacagctcaccgccccctggctcctggagagttcgatccaaacattgatgtttatgcaattaaatgccatgaaaactcacctagaaaagaggtgtacttcatggccattattgacattcttactcattacgatgcaaaaaaagaaaagctgccccatgctgcaaaaactgttaaacatggcgctggagctgagatctcgaccgtgaacccagaacagtattcaaagcgctttttggactttattggacacatcttgacgtaacctcctgcacagccccagatggacacgagcacgggaaggctggtggtggcttcggcgtaggaaagttaaaaccaaactcgatgaagcactcaccttgcaggancaaacctccttgttacatcttcaagccaagatgactgaaggtgggggtccaggaaagccccttgcttctcttttctcgcctggagactctcattattacacccttgtattgagctgcagagtttcattctgcagaacagatgtagaagttccctgaaagttgcatagtttggggcaataacagctacacctcccactgcaggaagatgtacaaggggttaaaatcctcctgtaaccgaaggcaaatcccagttaataaggtttatgttcgaccattgtttaaagagtggaattttgttatgaattatcccctttaactgaaaccctcagttttactgtttacatggttagaaaaacagggatatttttgaatctaaaaatttaatatacagcatgtgatttttgaagtttacatgtaaagccattttgcagcatagggaacatgtttgttgtgttttgagatatgtcttgcagttgtgtttttgagtgagtgttttgttcaaagtatctagtagacaggctctcacataaaagcaaaaaggattttgttcctcaagatgtgtatttaccaacctaatgatcgatatatgattaaacccaaaaacctgattatgtaagttcattgccctaaaactgtgctggttgtgtttaacaaaaaacttccagcatcaatcttgtatctatccacttcccctttaggaaaggcctcaagttacagaatactacatttgcttagagtattatcggcttacatgctgtgctgaagctgtgcctttaaaacccctgtttaatatgtgagatggtttttgtgggcagttttggaaaggaaaaaatccacctttcattaattacttagaagccaacaagccccctggcaggctgccttcccagtcactttagttcgggcctctccaggtacagctgtgcccaacatgtgtgggctgccttcacagcgtctggaagccagcgtcaacaccatctgactgctttgtactgacctgccacagattcgttagctgatgatgttaactccactgtaacatagttgtacaaatctgtatctgatgcatttaaaataatcaatgctgtatgattcggtttctgggcactgttaattgtggtgtccaatctgtttgagtgttctgatgttctattgtaacctttgatcccaaaacttacaaacccaagatcccaaaa

SEQ ID NO: 3904 - DNA, 1573 bp, Cricetulus griseus
tctttgggatgcctgtcctcagaagtcagagtcacccaggggggccactgtggagaagatggagtggcagctcccaggctcacttcagagttgcaggggttgctgaaaatggaagatgtagccccaggcctttcccccagatggacggaccaggattcatctcagatgaacctctacaaagcgaaatgcaggagaactctggcagcctggttcccagatcaggagatgcatactaagattagggacttgcctccagccgaggaatacacagaacaaaagcctgagcagacactgtctatgaatgtgaggagtgtggcaaagccttcattggaagttcagctctcatcattcatcagagagtacacactggtgagaagccatatgagtgtgaagaatgtggtaaggccttcagtcacagctcagatctcatcaagcaccagagaacccacactggggaaaagccctatgagtgcgatgactgtgggaaaaccttcactcagagctgcagcctccttgaacatcacagaattcacactggggagaagccataccagtgcaatatgtgtcccaaagcctttaggcgtagctcacatctcctgagacatcagaggacccatacaggggataaagatttttttgttccagaaccttactgggaaagtcatagtagggtggaaagccattgggaaaatattgaaactcctgtgtcttaccagtgcaatgattgtgagagaagtttcagtaggattacaagccttattgaacaccaaaaagtacacactggtgagaaaccctttgagtgcaaaacatgtggaaaaggcttcactcggccttcataccttattcaacatcagagaagacacacagggaagaaaacttctgtcacagtgacccctgctgtacattccgaagttggagttcaactgtcattgaactgaagtcacccttgagctgttactgactgcagaagtcataggctgggactttagttaataatgcacatcctcagatattagggatctggttgagactcattatcttccaatgctagaaagtaaccagaggaaaaccattagaatcaaatgggcttcctgactggcaaattgccttcccttggcctgcatctcaggtctcctgagggatgcttatgctttgggggtgttactctgacccttttttaggctaatgagcccttcacaagtgtcagatttggaaatcttatgtcctgctttgtgccttgtatacaggtgctaactaataaacacttattaaatatgctggtgagatttcctgcatagctctgaaaacccattattatctggaagtcttcaccaaggccattttgtatatatcttaaaaaaaaatttaggaaattctgtgagagtgccttaaacagcttctttagcattaagtcattgtgaatgtgccacccatggaattccagtaattatttttttctgtttaattttgttactcttgggaaagaaaaaaaacaaaaacaaaaaaacaaacaaacctttacctactcatgtagtgtgaaaccagtttcagaataaagtgatcaatgtactaa

SEQ ID NO: 3905 - DNA, 1573 bp, Cricetulus griseus
catcgtgcattagcggtcccaaaaagttcaaagtccaagatggcaacactcaaggaccagctgattgtgaatctacttaaggaagaacagaccccccagaacaagattacgattgttggggttggtgctgttggcatggcttgtgccatcagtatcctcatgaaggacttagcagatgagcttgcccttgttgatgtcatggaagacaagctgaagggggaaatgatggatctccagcatggcagccttttcctcagaacaccaaaaattgtctctggcaaagactatagtgtgacagcaaactccaagctggtcattgtcacagcgggggcccgtcagcaagagggagagagccgactcaatctggtccagcgaaacgtgaacatcttcaagttcatcattcccaacgttgtgaaatacagtccagactgcaagctgcttattgtttcaaacccagtggatatcttgacctacgtggcttggaaaataagtggctttcccaaaaaccgagttattgggagtggctgcaatttggattctgctcgattccgttatctgatgggagaaaggttgggtgttcacccactaagctgtcatggatgggtcctaggggagcatggagactccagtgtgcctgtgtggagtggagtgaatgtagctggtgtctccctgaagaatctgaatccagagctgggcactgataccgacaaggagcagtggaatgaggttcacaagcaggtggttgacagtgcctatgaggtgatcaaactgaagggttatacatcctgggccattggtctgtctgtggctgacttggccgagagcataatgaagaatcttaggcgggtgcatcccatttctaccatgattaagggtctctatggaatcaaggatgatgtcttcctcagtgtcccttgtgtcctgggacaaaatggaatctccgatgttgtgaaggtgactctaacttctgaagaggaggcccgcttgaagaagagtgcagatacactatgggggatccagaaagagctgcagttctgaagtcctcagataccctagtgcttcactgtccaggctgcagcagggtttctatggagaccacacacatctatctactcatctgagctgtagttagtgtggttatgttaaggtagcctggagaaatcctcacttcccacagctctaccctgatgctaagtggtacttgtgtagcggtgacctcgttggtgcgacagtcccactgtctccaaaacacactgccaattatctgcaggcttcaattagccgttagcctgtgtctgctctgcaccctttaccaaacttgcctaggccaatgagttcccagttagtcacaacctggctccagtgtgtaagtccatcatgcatatcttgtgcataactgttctaaaggatattattttgtgtattatgtttctgtggtgtactttgaaatattgtataagaaataagatctgcatatggatgatgcaaccaactacccaagtgtcatgccaatgaaaacaccaaataaaccttgaaaaggaaaaaaaaaaaaaaaaaaaaaaaaaaaaaaaaa

SEQ ID NO: 3906 - DNA, 1573 bp, Cricetulus griseus
atcccctgggcccctcccgcctggctggagagaggcaggacaatggacgggtgtattaacgtgaaccacaacacacgcactacccagtgggaggacccacggacccaggggatgattcaggagccagccctgccccccacggatgggagatgaagtacaccagtgagggtgtgcggtactttgtggaccacaatacccgaaccactacctttaacggatcctcgcccagggttcgagtcagggacaaaacaaggctcacctggtgcctacgaccgaagttttcggtggaagtatcaccagttccggttcctctgccactcaaatgccctaccgagccatgtgaagatcagtgtttccagacagacactctttgaggattctttccaacagattatgaacatgaaaccttacgacctgcgccgccggctctacatcatcatgcgtggtgaggagggcctggactacggcggcatcgccagagagtggtttttcctcctgtcccatgaggtgctcaaccctatgtactgtttatttgaatatgctgggaagaacaactactgcctgcagatcaacccagcctcttccatcaaccctgaccacctcacctacttccgctttattggcagattcatcgccatgcccaggctctgtaccatgggaagttcatcgacacaggcttcacccttcctttctacaagcggatgctcaacaagagaccaactctgaaggacctagagtctattgaccctgagttctacaactccattgtctggatcaaagagaacaatgagctgaaggaaggtggtgagagcatccgagttacagaagagaacaaggaagagtacatcatgttgctgactgactggcgattcactcgaggtgtggaagagcagaccaaagcctttctggatggcttcaatgaggtggcccctctggagtggttgcgatattttgatgagaaagagctggagctcatgctctgcggcatgcaggaaatagacatgaacgactggcagaagaatgccatctaccggcactacaccaagagtagcaagcagatccagtggttctggcaggtagtgaaggagatggacaatgaaaagaggatccggctactgcagtttgtcacaggaacctgtcgcctgcctgttggaggatttgctgaactcattgggagcaatggaccccagaagttctgcattgacagagttggcaaggaaacctggctgccccggagccatacatgcttcaaccgtctggatctgccaccctacaagagctatgaacagctgaaagagaagctgctgtatgccatcgaggagactgagggttttggacaggagtagctgagctgtccctcccatgccctccagcacatgtagtcctgagtccttcctgcctgagatgccactggttgcacagcccttgggaggcccctttggatagtggccctgtatgggactgtgctttgatcatgttggtgactgaagagtctggccccaagaggccctgtggcctctttctcctacttgatgatggcagtttggaataaagccccctgtcatctttgact

SEQ ID NO: 3907 - DNA, 1573 bp, Cricetulus griseus
  modified_base (931)..(931): a, c, t, g, unknown or other
cagtactgaagaaactgtctatttcttgatttctctactggtgaaatgttaggccactggccttgccagttgggagagcaaggcaattaattgggctttataccatggctcacaatcctaatatgacccacttgaagattaagcagccagttactgcccttcctcctctttgggtgagatgtgacagttcagatcctgaaggtacctgttggctaggagctgagctcatcacagcaaatgacatcattacaggagttgtcttatatgtggtcacttgtaaagctgataaaaattactctgaagatctggaaaatctaaaaaattcacacaagaaaagacatcacttgtctgctgtaacagccagaggatttgcccagtatgagctctttaagtccactgacttggatgatattgttaccccatcacaaactacagtcactttggatctttcctggagtcctgtggatgagattcttcaaacccctcccttgacttcaactgcagctctgcatatcagagtgcaatcaggagagcccagaagttgtttgagtcatctccaaagggaactgaaatttctccttgttttggctgatggcttgaggactggtataactgaatggcttgaacctctggaaacaaaatctgctgttgaacttgtgcaagaattttctgaatgacttaaataaattggatgaatttgatgattctacaagaaaagacacacaaaaagagaaggtgaaccatgatgcagctgcagttgacaggtctgtgcttatcacagtgcggggggatcttgattttgctgaacagctttggtgcaaaatgagcagcagtgtggtttcatatcaagacttggtgaagtgtttcacattgatcctgcagagtctgcagcgtggtgacatacagccttggctgcacagtgggagtaacngtttactaagtaagctcattcatcagtcttaccatggatccatggacagcgtccctctctctggaactactccacttcaaatgcttttggaaattggtttttttcgtcagtcaagaacttgcatctttgaatcatttggaatatttcatttctccatcagtatctacacaggagcaggttaatcgtattcagaaactccaccatattctagaaatactagtcatctgcatgcttttcattaaatctcagcacgagcttctcttttctttgacacaatcctgcataaaatattacaaacaaaatcctctggatgagcaacacatttttcagttgccagtcagaccagctgctgtaaagaatttgtatcatagacatcaagtgaattttgaagcagaaaagaagcatgatcctgaaggttgtctgaaagatgaaggtggagatgagatcctatctcagccgtggctcctgagaaggagtgttagcagcagggcagcaatgaggatggagaggacgcagactgtgggtaccacaatctctgaagccacacgcatgtgcctaagcaagggctctgaaacggacagagaacattccaccagaagtgaactttgttttgaagcaaaaactaaagaagaggtaccactg

SEQ ID NO: 3908 - DNA, 1572 bp, Cricetulus griseus
tgaagtccgcagatagactccggagttccggagtgccggttgccagcttccggtgccgtagggcgacatggcggtggtcaccttgatcccgacgctggcgcgggtactgtcaaagcacagcctgctgtctcctttgttcagtgtgacatctttcagacgattctacagaggtgacagcccaacagattctcaaaaagacatgattgaaatccccttgcctccatggcaggagagaactgatgaatctatagaaaccaaaagagcacgcctactctatgagagcagaaagagggggatgctggagaactgccttctcctaagcctctttgctaaagaatatctgcacagcatgacagagaagcagctgaacctctacgatcgcctgattaatgagcctagcaatgactgggatatttactactgggccacagaagcaaaaccagccccagaaatatttgaaaatgaagtcatggaactgctgagagagttcaccaaaaacaaaaacaaagaacagagactgcgtgccccagatctggaatatctctttgaaaagcctcgttaagccgtgtgccactgcctgtcatggtggtcagtatatggacagaaactgcttctgatactgattttggcttcctactttcccttaggcacttgagcctctaccaggatgactcattctaacctggaaagagtttcctggccaggggaagaagtggggaaaccagccttcagttacctcacagcactcctacagaggggtgacattaggcctgtctgtagacaagagagttgccttagaaggagtcagtaatacatccatgatcaaaaagccaggatttggggctggacagatggctcagtagttaagagcgctggctggctgctcctccagggaacgcttagttctcagcacatacatggtggctcacaactgtctgtaactccaattccaaaggacagtatagcaccatggttgtgagttcaagctttcccttcattgcttagctgctgaataaactcactggcctaagctttggtttctaaccaaaggtgataatcacttcagtctcaagaaagctaggagctataatatgtaacactgggatggttcccagcacacaggataccataggaagacaggaacctttgcttgtagcctcaccctgagacttagagcctgtcttctaacagattgcctattatcaattgcatgcatacatgcagggcagtttcaactgaaagtcagaaggctgagcctattaaagtaaccacaaagtgccttgccagccagtgaaaactggaaagaaaaaaaaccttggtgacaagtcctttgatggaaaagtataggtctcacttaagcaagaaatgggaatgagacatatagagtagaagcaggaggttacagaaatgctggccctttgcttgagcttctgatgtccctcagggggagtgctaaacaggcagggtttatatatagaaacatctggactttaagaagtgcacaggaattgcagcaccttccctatttatcctgagcccattatacaacaagccccagaacccaagtatgca

SEQ ID NO: 3909 - DNA, 1572 bp, Cricetulus griseus
atgtggagtcggcggcaaggccgtctcagtacgctggcgtgcggggtggaggagctgcggtgccgccggcggggagcggggaggcgagcccgtgcggaaggcgcggagggagcagcagttggtcagcaagaggctgctaagggaagatgccccggaagaagccggaggtcagagtgcagccgtgctccttggggaagccgaggtacagcagttccttcggctagcccaacggggaacagatgaaaaggagagggagaaggctctggtcagccttcgtcgaggcttgcagcaccctgaaacacagcaaacctttatcaggctggagggcagcatgcggacccttgtcgggctcctgaccagcaaccgggccctgttgcagcttgaggcggctcggtgcctacatgagctctctcattctgagcagtctgcagtggcggaggcctgcctgccagccacttcttacctcctcacctacctctctggtcacagctcagaattcatagagctgtgtctgtatacactggggaaccttatcgtggagagtgaggctgtgagaaagcagctcctgccacagggcattgttccggccttggttgcctgcatccagtcccctcatgtggctgtgctggaagcccttggatatgccttgtcccagcttctacagtctaaggaagctccagagaagatcatcccctctcttttggactccagtcttctccagcacatgctacgactgatgcaaccaggcccaaagctgaaccttggggttgctgtggagtttgcctggtgccttcactacatcatttgcagccaggtcaacaatgctatgcttctctcccatggggctctgcctacgttggcaatgctgctgttggacatggctggggctgctcagagaatggatgatgcgggactagagctacttgcatgccctgtgtttcggtgcctgagcaacctgttgactgaagtgccagtggaagccatgggagagcaaatggagctcagagacgagcgaattgtggcagcattatttatccttctccagttcttccttcagaaacagcccaccttgctgtctgagggcctgtggctcctcaacaacctcactgcaaatagtcctactttgtgtacctccttgctttctctggatctgatcgagcccctcttgcagctgttgccactgtcaaatgtgataagtgtgctggtacttacagttctgtgcaatattgtagagaagggtccagcttactgccagcggttgtggccagggcccttgctctcctgcctgctcaatacactggttctctctgacattgaagtagtaggccagagtttggagctgttgcagctgctattcctgtatcagccagaggctgcccaggccttcctgcagcaatcagggttgcaggccctagaaaggcatcaggaggaaacccagcttcgggataggatacttgctctccagcagacagctattcatggatgacctggttgcctaatgtcacccctaacccctgtggtctatttatcccagggtatccagttttgttttagaagctggtagctttttgt

SEQ ID NO: 3910 - DNA, 1572 bp, Cricetulus griseus
ggaggagccatggcgctcagagtcactaggaacacgaaacttaacacagaaaataaggccaaggtcagcatgacaggcgccaagcgtgtgcctgtggcgattgctgcagcctccaagcccgggctgagaccgagaaccgctctaggggatattggtaacaaagtcagcgaacaggcacaggcaagagtgcctctgaaaaaggaactaaaaacctcagttactggaaaagtttcagctaaaatcccaccaccaaaacctcaggagaaggttcctgtgagtgagccagaggtggaacttgctgagcctgaacctgaacctgaacctgttatggaggaaaagctttctcctgaacctatcttggttgataatccctctccaagcccaatggaaacatctggatgtgcccctgcagaagaatacctgtgtcaggctttctctgatgtaattcttgccgtgagcgatgtggatgcagatgatggcgctgatccaaacctctgtagtgaatatgtgaaagacatatatgcttatctcagacagctggaggaagaacaatcagttagaccaagatatctactgggccgtgaagtcactggaaacatgagagccatcctaattgactggctgatacaggttcaaatgaaatttaggctgctgcaagagactatgtacatgactgtttccattattgaccggttcatgcaggataactgtgtacccaagaagatgctgcagctagttggtgtgactgccatgtttattgcaagcaaatatgaagaaatgtaccctccagaaataggtgacttcgcttttgtgactaataatacttacactaagcaccaaatcagacagatggaaatgaagattctaagagttctaaacttcagtttgggtcgccctctgcctctgcacttcctccgtagagcctctaagattggagaggttgacgttgaacagcatactttggccaaatacctcatggagctcactatgttggactatgacatggtgcactttgctccttctcagattgcagctggagctttttgcttagcactgaaaattcttgacaacggtgaatggacaccgaccctgcagcactacctgtcctatactgaagaatcccttctgcctgtcatgcagcacctggctaagaatgtagtcatggtgaaccgtggccttacaaagcacatgactatcaagaacaagtatgcaacatccaagcatgctaagatcagcactctggcacagctgaattgtacactagttcagaatttgtccaaggctgtgtcaaaggcataactcaagtggaccactacactacatcggcaaatgcaattggcaccatgtgccacctgtacatagtatacagtgtttacttgctcttcaataaaggctgttttacttttcatagcttacctcatttgaatgttggttgttctgactctaggataacaagggttgtctaaaacatttaggattatttttgaaactgcttttagtttaacagagaatccaagtaatgtacgtaattgtagcctatatgtttatgtacttccttctttaatgtgtcct

SEQ ID NO: 3911 - DNA, 1571 bp, Cricetulus griseus
gttttatgggcagtggccgagaggaagaagacatgtatatgaacatggtcttggcacactttttacagaaaaacaaagaatatgtcagtattgccagtggaggatttatggccctgcaacagcacctggcggacattaatgtggaggggccagaaaatggatatggccattggattgccagtacctcaggctcaaggagcagcatcagttctgttgatggtgaatcttgtaatggctcaaatgatagaggaatgaagtcccttgtaaataaaatgactgtggctttaaagacaaaatctgttaatgtcagggaaaaggtgatcagtttcattgagaatacatcaactcctgtggacttcagcattggggatgaagaggaatatgacacagatgaaattgacagttcttcaatgtcagatgatgacagaaaagaaatcgtaaacattcagacctggataaacaaaccagacatcaagcatcattttccctgtaaagaagtaaaagaaagtggacatatgtttcccagtcatctgttggttactgcaacacatatgtactgcttaagggagattcttttctcggaaaggactggcttacatccagtctcgacaagcactaaattctgtagttaaaattacatccaaaaaaaagcatcctgagctaattaccttcaagtatgggaacagcagtgcttctgggatagaaatcttggctattgaaaggtatttgattccaaatgcaggagatgctaccagagccataaaacagcaaatcatgaaagtgttggatgctttggaaagttaatgtaaaagaaagttatttaagtgaaattaaggcaaccaagagaaacatgaaatatattcctgactcaatactaatagagggtctaagtgcaaattattgtaatcaatcttgggatgggtacacttttctaaaaatttcttttgcatctttggttttataaaatgatttattataaaggtcagttattaaatgactttgaattaactggccttgtgccctatggaccaagggcacagaatgcagttctgttttgaagagctgttttaatggacatgcatcattttcaggttttaaaacaactgtacacatacatatttgcgaggtcttcactgaaatttagaaatagaattagttgaagagagttaattgctgcaatgagtagtcacatgtgatgagagatccagaaacatcttttggaccatgggatgattttcataaaatctgtttgaaaaatagtaactctaacctgccatgtcataaaatgtaatagatttctcaaagtggttggttgctagaactatctagatgtaccccactagtagccagttgttttaatttgcttaatggaaatcaagtgaataaaagataacacaatgaaaagaactttattctggtatctaaataaaaagtttatttgagtggttgaagacatttgcatgaaattgcacctgtgcagtacttggtatttataatgctcctccaaactgtcgtattgcattttttcctatttttcttgtactaccctctttgaaatgtcctgaagtctc

SEQ ID NO: 3912 - DNA, 1571 bp, Cricetulus griseus
gaggcaccatctcaggagcggaagaacctggctgccattcaagaaggagagaatattttctacttggcagttgatgatattgaaactgataccgagcttctgattggctacctggacagtgatgtggagacaggggaggaggaggagcaacaagctctgaccatgaccaaagaaggcaaagttgaccactctaagggacaatcagcagctgcaagcaaaggtcgcctgggctgtgaagaggactatgcctgtccacagtgtgaatcgagcttttccagtgaggagatccttaatgagcactgtcagaccttgcaccagaaacccacgggggagaaagagttcacgtgcgagagctgtgggaagaagttccccgtgaggcaggccttgcagagacattttgagcaacaccagaaggctggccgaggggatgccaggtttgtgtgtaaagtcgacagctgtgggaagaggctaaaaagcaaggatgccctgaaaagacaaccaggaaaatgtccacactggtgatcctaagaaaaagctcatatgctcagtgtgcaatagaaggtgcacttcattgtcaagcctgcaggagcacaggaagattcatgagatatttgattgtcaagaatgtatgaaaaagtttatttctgctaatcagctgaagcgtcacatgatcactcactcagaaaagcgaccttataactgtgagatctgtaacaaatcattcaagaggcttgatcaagtgggtgcccacaaagtaatccacagtgaagataaaccctatcaatgcaagctttgcggaaagggatttgctcacagaaacgtttacaagaaccacaagaagacccactctgaggagaggccatttcaatgtgatgaatgtaaagccttgttccgtaccccattttctctgcaaagacacctgttaatccacaacagtgaaaggacgttcaagtgtcatcactgtgatgccacatttaaaaggaaggacacgttaaatgttcatgttcaagtggtccatgaaagacacaagaagtaccgatgtgagctctgcaataaggcctttgttacaccatcagtgctcagaagtcataagaaaacacacacaggagaaaaggagaaagtctgcccatattgtggccagaaatttgccagcagtgggaccctgagagttcacatccggagccacacaggtgagcgtccctatcaatgcccttattgtgaaaaaggattcagtaaaaatgatggactgaagatgcatattcgtactcacaccagggagaagccataccagtgctcggagtgtagcaaggccttcagccagaagcggggcctagatgagcacaagaggacacacacaggagaaaagccttttcagtgtgatgtttgtgacttggcttttagcctgaagaaaatgctcatccgacataagatgactcacaatcccaaccgcccgatggcagagtgccatttttgtcataagaagtttacaaggaatgactacctcaaagtgcatatggacaatgtccatggtgtagcggacagctgatggtagctgtcaaggacccaaccat

SEQ ID NO: 3913 - DNA, 1571 bp, Cricetulus griseus
ggataacgagctgaagaagctgcagcagacccaagagtacttcatcatccagtatcaggagagcctgcggatccaagctcagtttgcccagctggcccagctgaacccccaggagcgcatgagccgggagacagccctccagcagaagcaagtgtccctggaggcctggctgcagcgagaggcacagacactgcagcagtaccgtgtggagctggctgaaaagcaccagaaaaccctgcagctgctgaggaagcaacagaccatcatcctggatgacgagctgatccagtggaagaggcggcagcagctggccgggaacgggggtcccccgagggcagcctggacgtgctgcagtcctggtgtgagaagctggctgagctcatctggcagaaccggcagcagatccgcagggctgagcacctgagtccgtgacggaggagaagttcacagtcctatttgagtctcagttcagtgttggcagcaatgagctggtgttccaggtgaagaccctgtccctcccggtggttgtcatcgttcacggcagccaggaccacaatgctactgccactgtactgtgggacaatgccttcgctgagccgggcagggtgccgttcgctgtgcctgacaaggtgctgtggccgcagctgtgtgaggctctcaacatgaaattcaaggcagaagtgcagagcaaccggggcctgaccaaggagaacctagtgttcctggcacagaaactgttcaacagcagcagcagccatctagaggactacaacagcatgtcggtgtcctggtcccagttcaaccgggagaacctgccaggctggaactacactttctggcagtggtttgacggggtgatggaggtgctgaagaaacaccacaagccccactggaatgatggggccatattaggctttgtgaataagcaacaggctcatgacctgctcatcaacaagccagatgggacctttctactgcgctttagcgactcagaaatcggaggcatcaccattgcctggaagtttgactctcctgaccgaaacctctggaatctgaagccattcaccacgagagatttctccatacggtccctggctgaccggctgggggacctgagctacctcatctacgtgttcccagaccgacccaaggatgaggtctttgccaagtactacactcctgtacttgcaaaagctgtagatggatacgtgaagccgcagatcagacaagtggtcccagagtttatcaacgcatctgccgatgctggagccaatgctacctacatggaccaggccccttccccagtcgtgtgtccccagcctcactacaacatgtacccacagaaccctgaccctgccctcgaccaagatggagaatttgacctggatgagaccatggatgttgccagacacgtggaggagctcttacgaaggcccatagacagtctcgactcccgcctctccccacctgctggcctcttcaccgctgccagaggctccctgtcctgaatgctgggattccttgcttctcttggaaaactgccttcgatgtgaagagcccatgccagttgt

SEQ ID NO: 3914 - DNA, 1571 bp, Cricetulus griseus
tgcaccaggctggccagctcacccttacccttgttgaccatcacgtcttacccaaaagtgatgccgctctggaggaggcagtagcagaggtgctggaccatcgaccaattgagcagaaatactgtcctccctgtcatgtttcagttgagcatgtggggtcctgtgctaccctggtggcagagagaatcctacagggggcgccagagatcttggacagacaaactgccttcctactgtatggtaccatcatcctggactgtgtcaacatggatgccaaagttggaaaggcaactctgaaggacagcaaatacgtagaaaagctggaggccctcttcccagatcttcctcagagagaagacatctttgattctctgcaaaaggcaaagtttgacgtctcaggcctgaccactgagcagatgctcagaaaggaccagaagaccgtctgcagacaagacaccaaagtggccatcagtgctgtctacatggatttggaggcctttctgcagcggctggacctcctggaagatctcagtgctttctgccatgagcacagctatgatgccctcgttgccatgactatctttttcaacactcacaatgaaccagtacggcaattagctgttttctgcccccactcggcacttcgaatgacaatctgtggggtcctggaacagtccacctccccacccctgaagctgacccctattccaagcatctctcctgacctccaagcctatcttcaaggcaacacccaggtctctcggaagaagcttctgcctgtgctccaggaagccctgtcagcatattttgactcaacaaagatgccttcagggcagcttggggtagtgggtatgtccagggagcagggagacaaggaattggacagggcaggtagctccattttcggactgagtcaagacgaagaggaccctccgctgccccccacacccatgaacagcttggtggacgagtgccctctggatcaggggctacctaagctttctgcagaggctgtctttgagaagtgcagtcagatctcactgtcccagtctaccagagcctgcccatcaaataagtgaccgtggggcggggaagtgtggagggggtgagtgcccacctcaaatgcatgttttgagatgtttgaccatttcagcaactgtgtctattgctccaggatctggtgtattgttctcataaaactgggagggaaaggaagcagctgctgtaagaatggctttctgcctctccgatccggtctctaccagtcagacaagttttatttaatgttattgtttaatctgcactgatttcccttgttctgtttgtgatgggtatggtgtgataatcactgtcctagcagagcaggactaaaggaatgtagaccagatctgtgtcttcagaaggactgtgagcagagtcagtgtctgttataaaaccagttaactacttgtctacatgaattttttctggttttgttcatgttaaagaattagcctcatgtagcatgtacagggatatacggtgacccagcagggagctttttcccagtgacttgtctgcatgtgtagtct

SEQ ID NO: 3915 - DNA, 1570 bp, Cricetulus griseus
acacttacagaacttggaaaactcagcttttacagctgacaggcatagaaaagaaaattattggaaaactcatcactaaacagcaagttattaaagtaaatggaagtacgactgccatttgtgccacaggccttcggaatttgggcaacacttgacagcaggacggcgaacataccacaccaggagccaaggggacagcaatgtgtctctggtagaagagtttaggaagacactgtgtgctttatggcaaggcagccaaacgtgcgatttagtcctgagtccttgttctacgttgtctggaagatcatgcctaacttcaggggttatcagcagcaagatgcccacgaattcatgcgttacctttggatcacctacacttggaacttcagggtggcttcaatggtgttccccgatcatcgattctgcaggagaattctactctgtctgcaaataacaaatgctgcataaatggagcatcaactgttgtcacagcaatattcggaggaattctccagaatgaggtcaactgcctcatatgtgggacagagtccaggaagtttgatccattcctagatctctccttagatattccaagtcagttcagaagcaagcgctctaagaaccaggaaagcgggcctgtttgctcattacgagattgtctccgaagcttcactgatctagaggaacttgacgagacagagttgtatatgtgccacaagtgcaaaaagaaacaaaagtccacaaagaagttttggattcaaaaacttcccaaggtgctgtgcttgcacttgaaaaggtttcactggacagcgtatttaagaaacaaagttgatacgtatgtagaattcccgctgagaggcctggacatgaagtgctacctactagagccagagaacattggcccagagagctgcctgtatgacctcgccgcagtggtagtgcaccatggctctggggtcggttctggacattacacggcatatgcaactcatgaaggccgctggttccatttcaatgacagtactgtaacagtgaccgatgaggagaccgttgggaaggcaaaggcctacattctattctatgtggagcgtcaggccagagctggatcagataaactttaatacctcctatgatcacgattcatactataccggacaaacatttccaatttccataaatacttgatccaagagttaattttgttatgcacttttaaatttccagtttggggtttagtttggtcagtggtagtgacttattcaatatgggcaccaactaatttttgttgttgttctaccagaaaacctcagcaggcatcttgattggctgctttagttgtaataactcaagttttatatgtagtttccaggtcttagttctgtttgactttttatattaatgttttcagttctcaccaaggcacattgttgccctgtactcccatgctgagagccaccctacctgctgctgcctttcacagtggccaggccagcggctaccatggggatcgtgtgtgcggggcctgtggcccacggtctcacagtgactgctcaggaacgccttctgactg

SEQ ID NO: 3916 - DNA, 1570 bp, Cricetulus griseus
cagatgtgcatcattgagctaaaggacagagaaggccaacccctcttccacctggagcactacattgagggcaagtacatcaagtataattccaactcaggctttgtccgcgatgacaacatccgactgacaccacaggccttcagccacttcacatttgagcgttctggtcatcagctgattgtggtggacatccagggtgtgggtgacctttacactgacccacagatccacactgaaacaggcactgactttggagatggcaacctcggtgtccggggaatggctctcttcttctattctcatgcctgtaaccggatttgcaagagcatgggccttgtgccctttgacctctcacctcaggagcaggccctggtgaatcagagcaccaagctcttgcaatcggccaagaccatcttgagggggacagaggaaaagtgtgggaatccctgcataaagactctctctggcagccggccccccttgctgttccgcctttcagagaactccggggatgagaacatgagtgatgtgacctttgactctctgccttcctccccatcttcggccacacctcatagccagaaattggaccagctccattggccagtgtttggtgacctcgataacatgggccctagagaccatgaccacatggacaatcaccgggactacgagaacagtggggacagtggatacccaagcgagaagcgaagtgacctggatgatcctgagccccgagaacacgatcactccaatggcaaccggaagcctgaatctgatgaagacagcctaggcagctatggacgggtctgtgtggagaagtggaaccttcgaaatccctcccgcctgcacctgccgaggccctcggctgtggccctcgaagtgcaaaggctaaatgatctggaccttgaaaggaaaatcgggaagtctgttttggggaaggtccatctggccatggtaagataccatgagggtgggcgcttctgccagaaggatgaggaatgggaccgagattcagccatcttccatctggagcacgcagctgacctgggagaactggaggccatcgtgggcctgggactcatgtactctcagctgccccaccacatcctggctgatgtctctctgaaggagacagaagagaacaagataaagggctttgattacttactgaaggcggcagaagctggtgataggcagtccatgatcctagtggcccgagcttttgacactggcctaaacctcagcccagacaggtgccaagactggtcagaggccctacattggtacgacacagccctgaagaccactgactgtgacgaaggtggagagtatgatggagtacaggaccagccccgatatgtactgctggccaggcaggctgagatgctgttcactggaggatttgggctggacaagaacccccaaagatcaggagacttgtacacccaggcagctgaggcagcaatggaagccatgaagggccgactagccaaccagtactatgaaaaggcagaagaagcctgggcccagatggaggaataactccccaataagatccctgcca

SEQ ID NO: 3917 - DNA, 1570 bp, Cricetulus griseus
attagaaactttggaccgtcttgattcaagaacatagtgataagtttggaaggaggtccagctacggggaagctcatatgggaacagtaccaacaatgttccagcatcttcctctacagccacagcttccacgcagacccagcactccggaatgtccccatcacccagcaacagttatgatacctccccacagccttgcactaccaatcaaaatgggaggagaacaacgatcgattgttccaacatccaatgggaagatgtcgccatctcgctaccatgtaaacagcatgggtcagaggtcatatagctttgaagcctcagaagaggacctagatgtagatgataaagtaggaggaagttaatgagagggacagcagtgtgataaaagaggaaatcaaagccttcttgccaatcggaggatttcccaagcagttgttgcacaggtaacaggcatcagtcagagccggatctctcattggctgttacagacaggggtcagacctgagtgagcagaagaaaagagcattttaccgatggtatcaacttgagaagacaaaccctggggctacgttaagtatgaggcctgccccaatcccaatagaggaccctgaatggagacaaacacctcccccagtctctgccacacctggaaccttccgactccggcgagggagtagattttacctggagaaaggagtgcctagctgttatggaaagttacttcaatgagaatcaatacccagatgaagcaaagagagaagagattgccaacgcttgcaatgcagtcatacagaagccaggcaaaaagctgtccgacctggaacgagttacctctctgaaagtctataattggttcgctaatagacggaaggagatcaagaggagagccaatatcgaagcagcaatcctggagagtcatgggatagatgacagcacgagccatagtgaccaccaagatcccatctcactagctgtggagatggcagccgtcaaccacactatcgtcttgttctgtgaagatggcatggtgccctcagcctttgcatatactctctcagtattaaaatcccagtaagtaataaccaaccaaccaaacatccctctcccagcccctgaggctaaaaaaatcttgctgctccgtcttagcattccaagaaagtgcttccaggtatttagataaccctcagttctcaaatattaggctctgtgtaaaatcttgggtacctttagattcatgtaacactaggctgtaccccgttcctgccccaagactgacaggatgcaagctgaggtagtggcacaggaccgacagacaccatccgggaagtatccacggagcgcaaggaacactagagccccgcctcagccggagattcattgattcagctgcaataagccgtgcctcctagtcacagcgtggctagactatcctcctttgggtgctgtgctaagaatgtcattggaatcccgagctcagatcttggttaatgttaacatgcctaacacagacatcctttcctctcacaagctgtgtgacttagtagataacatactgccttctgcctttggg

SEQ ID NO: 3918 - DNA, 1569 bp, Cricetulus griseus
caggagggccctgcaggtcttcccagcatgttttccagtgctgctgaacaacaggctttctttggcgcggagcaggctgtgttctggaatagtccagaagatcctgctctcttggaatcaggccctggggactctaaccctcagtctgttgaggacagtagagaccctgcccctggtagaaaactgaactgcccccgaaaacagaagtctcacaggcaggtacaattgggtcaggagtgtggacaaggcctgaaggtgaaaagggacaccagcccatacaaatgttccgaatgccagatcagcttccgctacaagcagcagctgactgcacatatgcagagccacgtgggcagagagtcttactcagccacagagccagaggagagccttaggcccaaaccacggctgaagccacaggccaagaagtcgaagctgcatcagtgtgatgtgtgccacaggagcttcagctgcaaggtcagcctggtgacccaccagcgctgccaccagcaggaaggccccagcaccagtccacatatccaggagagattctcacctaacagcttagttgctctacctggccacatcccttggaggaaaagtcggagttctctcatctgtgggtactgtggcaagagtttcagccacccatctgacctggtgcggcaccagcgcatccacacaggtgagcggccctacagttgtcccgagtgtgagaagagctttgttcagaagcagcacctcctgcagcaccagaaaattcaccagcgggagcggagtgccctggctccagagcatggaaggcccaatggcctgctttaaggttgccagcccctcaccgtccgggggtggagggggttggcatgagtcccccgcagagacactacatagtcaggctgacttcttcctgagaattgtttctgctttgcccccttggctaagcacaaaggctttttctggtgtactgtcacaccacagggactagtggccagttccagggcccatcctagcatttcacacgtcttcccacagttaaatggggccacagaggtatgtggagaattctaggaagtattaccttccttcaatttgtagcctccttgttaataactagtataaataatttaaatgaactgcttaggttgttctaaagacccccttttggagtttagattcttgtttatttttaaaaacatagcttaaaacttgttttctaaattttaagagttgtagaagttgttcctaacctgggaactgagcctaccctccaggagggaatagctatgggctcttttagcccacccacacttaacatagattggagagccaaaacacactgcgtgggttccctcatgtgtttctgcagctctgtgggggcagggaatatggaagactgagcttgattctgttatagcaggtatcacttgaagttgctcagattagactttccagtgtctgtcccagagatggaggaggaaaagcacaggggtttgtctcaggagtgttgagtacctgccccactgtcatttggggagggaggtgagagtgggttcattggtatatgtgaatgta

SEQ ID NO: 3919 - DNA, 1569 bp, Cricetulus griseus
tactactccggaccagagttggtgactggtcctgctgtgacctctggtagcgatggtacccttctctttgctttggaccactcggcctctgcagagatgtggtcagctggtctggatggctgctcgggctcagcacagtaaggtggcccggacacaggctggggaagcagctggaggctggacaggccaggagactttggcagatagtgaccctgagatgtgggagctactgcagagagagaaggacaggcagtgtcgtggcctggagctcatcgcctcagagaacttctgcagccgagctgcgctggaggccctggggtcctgtctgaacaacaagtactcggaaggttaccctggcaagagatattatggaggagcagaagttgtggatgaaatcgagttgctctgccagcgccgggccttggaagcctttgacctggaccctgcacaatggggagtcaatgtgcagccatactctgggtctccagccaatctggctgcttacacagctcttcttcagccccatgatcgaatcatggggttggacctacctgatgggggccacctcactcatggctacatgtctgatgtcagacggatctctgccacatccatcttctttgaatctatgccctataaactcaacccccaaactggcctcattgactacgaccagctggcgttgactgctcggcttttccgaccacggctcatcatagctggtactagtgcctacgcccgtctcattgactatgcccgcatgagagaggtgtgtgatgaggtcaaggcacacctcctggcagacatggcccatatcagtggccttgtggctgccaaggtgatcccgtcacctttcaagtatgcggacattgtcaccaccaccactcacaagactcttcgaggagccaggtcaggactcatcttttatcggaagggagtgcggaccatagaccccaagactggccaagagatcccttacacatttgaggaccgaatcaactttgctgtgttcccatccttacaggggggcccccacaaccatgccattgctgcagtagctgtggccctcaagcaggcctgcacccccatgttccgggagtatgccctacaggtgctgaggaatgctcaggccatggctgatgccctgctaaagagaggctactcactggtgtctggtggcactgacacccacctggtgctggtggacctgcgacccaagggcctggatggagcccgagctgagcgggtgttggagcttgtgtccattacggccaacaagaacacctgtcctggagaccggagtgccattactcccggaggcctgaggcttggtgccccagcactgacttctcggcagttccgtgaggatgacttccgtagggttgttgattttatcgatgaaggagtcaacattggcttggaggtgaagcgcaagactgccaagctccaggatttcaaatccttcctgctcaaagatgcagaaacaagtcaacgtttggccaacctcaggcaacaagtggagcagtttgccagggccttccccatgcctgggtttgatgaacgctgagg

SEQ ID NO: 3920 - DNA, 1569 bp, Cricetulus griseus
gccgggtctgctgtgaggtgaagcccaggttccagagatgtacatgcaagtggagacacgaaccagcacccgcctccatctgacgagggctccaggcatccggtcttggtccctgctggtcggaatattatccactggcctggctgctgcctattatagtggagatagtctgggctggaagctcttctatgtcacaggctgcctgtttgtggctgtacagaacttggaggagttggggaggaagctatttcaacaagagcacgtgggaaggtcatacttaaaaacattcagcctctacaagaagctgctgactctcctaagagcaggccatgaccaagtggtggtcctgctgaaagacatccaggatgtgaatgtggaggaggaaaaggtccgttactttgggaagggctacactgtggtgctccggtttgcaacaggcttctcccatccccttactcagagtgcagtcatgggccgacgcagtgatgtggaagccattgccaaactcatcactagcttcttggaactgcatcgcctggagagcccctcagaacggtcacaaagcagcgacagtgaagccgatggccctggtgatcagagctgacagtgtagagtggctgctggtaaatgtcacccccttctgacatgtctccaactgacttgccaactgtgagcatgcaggcagatcttggacacctgcctatgactccttgggcaattcttgtgtggaccacctgccttttgcttgtttatgcttctacgctttgcagaaccatgggctgatgtgctccacaacccagaaaggctgcatctgtcatgatgcaggtggggggagctacatccagaggagggcagggtctcagaactcagtgccttctccagagtcagatggcagttctggcttaggcagcacagtctggtttggatgagctcacccaagggcatctgaggtttaagacgccagtcttttcttcagcataggcccagtgcctgccttcaagaggccttgccacccaggctattgtatcaggggcttccctgaaggcagctcagaatgctgagtgctgccgactgccctgttcctgcctagaccacttgtctaaggtcccagcagtgttgtagcacagctgttaggaagctctcccaacccagcctggggagaagctgctagtggaggaaaggccacctcttctggcatcctgcagcctttaaaacctgggagctcctttacagaaattgagtcttagcctctcaagccttgaaaagagccttgaggccactttgcctgggctgagcaggagtagttagccagaacctaaacaggtcttctctgaagtgactgctaccagttctgacttggggaacatgatcccttgaacttgctaaagtgagctttttaaatggccaagttagacatttttttttccataaatgaaaagtggaatacagctgttggcttttagcttgttgcctacagacttaaggtactttagacaagggaggagtctctctcttggtgctgtcactctacatgcagattgacaaaaaaaaaaaaaaaaaaaaaaaaaa

SEQ ID NO: 3921 - DNA, 1568 bp, Cricetulus griseus
aacagaaatgcctctacaaggaaatcatgctgacaaactacaataacgtgatttcagtagaacattacttttccaagccaaatgtgatatctcagttagaagaaatagaagacttctggccagtggagagagaaagtcctcaagagacctttccaggatcttctgagccttctctagatgatggaataaaatcctctcctgatgagaatcccttgatgaagatcaaggttgttgaggtccttacactgaacaaggaagtggctggtccccggaatgctcttattcaatccctctatagtgaaagtggagaagacctgcgccctggtgacctcaagccagttcaacaaccaggcacgcatttgactgacagtgaagtcgctcaccagaagttccgccatttccagtatgaagagtcagatgatccccagcaagcagtgtctcagcttcaccggtggctgcagcccagtatacattcaaagaactggatcctggagttgctggtgcttgagcagttcctgagtgcgctgcctgagaagttgcgggtgtgggtagagtcacaccacccagaggactgccaggcagccgtggccctggtggagaatgtaacctcggtgtctaaggaagatgctgtgcctgcttgccataaggaatccactgatcgactgaaagagaaaaacaaggacatggccaccttaccaattactgtaccacctgaggagccagtgaccttccatgatgtggctgtggacttcagtcaggatgagtggcagctactaggaccaatgcagagaaatgagtattgtgatgtgatgctggagaccttgggcaaacttggtctctgtggggtggcagcctacatcgggaaaaacaagagttaactccagaatctcctacttctgtggcagaaccagttcacatcccgaaaccaaaagatttctcaaggaatgatactcagtccactgtctctgaaatgtatctcagaagatgaggtccaaggaaaaccaacaattgcgacagagacaccagccagcaagctcggcagatagtttttataaaaattcacaaggggagccaagtttgccgctgcagtgaatgtggtaaactgttccagaatgctaggtatttctctgtccataaaaagatccacacgggagagaagccttacatgtgtctgacctgtggtaaagcttttgttcagagctcctccctcacccagcactatagaattcacagtggagagagaccatttgagtgttcagagtgtgggagggccttcagtgaccgctcagccgtctctcagcacctgagaactcatactggggctagaccctaccattgtcagcgctgtgggaaagccttccgccagagctcacacctcaccaggcatcagagaactcacactggggagcgcccgtatgtgtgcacccagtgtgggaaggctttcacccagagttcacaccttgttgggcatcagaaaacacacaggataaacttcaagaagcagaccaaatcacagtcctagtgcctttcaaaccactgccttttcagctttggggtgtaccctgcag

SEQ ID NO: 3922 - DNA, 1568 bp, Cricetulus griseus
ggcgagcgggaggcagcgcaggcctagcggtcggccgcttctgagcgttgtctgggcattgcccgtcgccgagccacacgccgtgccggctcgggccggcgcgcgccggtcccggaggcgcaggccgctttcttgaaatcatgaatcctgtttatagccctgggtcttctggggttccctatgcaaatgccaaaggaattggatatccagctggttttcctgtgggctatgcagcagctcctgcctattctcctaacatgtaccctggagcaaatcctaccttccaaacaggctacactcctggtacaccttacaaagtgtcctgttccccaaccagtggagctgtgccaccatactcctcctcccccaacccctaccagaccggccgtgtacccagtgagaagtgcctacccccagcagagcccgtatgcccagcaaggcacgtattatacacagcctctgtatgcagcaccccctattcaccataccacggtggtgcagcccaatggcatgccagcaactgtctaccctgctcccatccctcctcctagaggcagcggggtcaccatgggcatggttgccgggaccacaatggccatgtcagcaggtaccctgctgactgctcattctccaactcctgtagcccctcacccagtcactgttcccacataccgagctccaggaacacccacctacagctatgtgccccctcagtggtgatggccctgcaaattaatatttgaggatggagctgtgcagtcacttcattgagttccacagctggtgctgcaggccttgagcctccaaccaggactttcttcttaatgctctcgacacatagctaaacatgactgcgtcccagcccagcaggtcccagctcgatagtctccaactaactctatgggttgtttaaagcaaatcctgtttgtggactgcctggttcatttgaagaacagaaaccctgtggaataaatgttactacagtgatggtgtgggaagcagcagcttttctgtctggggactgcagtccttatatacgagatgtgagggcctgatgggtatatcaggcagctcccatggcagggcagtgggtgggtctggtgcagactgtgggcagtgtgatagaccagttaggtgagactggggaccggctcccagtagggttattgtggcagctgcaggccccaaggagcctgataggccgtgactgaacagaagaggttcttcttttttaaacttttgtttttaaatactcttttttacacttgttttcttggtactttttttatgcttaagtcagcattgtcttccagtgttaaaggcatcccttgcctcttcattgaacttatgtgtcaatataataggaatgggcagactgtccatcccaagccagttcgattaaatgtaaattcatactgttttaattttttatgcaatctgatgagtagatgagctcagatttaaaagttaaaagcacgtttattgtaacaggaattgttatgtattaatactgcagttttcaataaagattgacttgtgttgcaataaaaaaaaaaaaaaaaaaaaaa

SEQ ID NO: 3923 - DNA, 1568 bp, Cricetulus griseus
caggatgagaacgggataaatagaccagtctgttcctatgttaaacctcttcgagctggacggcttctggatactccgaggcaagcagcacgatttgttaacgtcctgggttacgaacgagcccctgttattggaggaggtgggcaaacaggagcagtggtgcactctgctggcttttctctgtagaaacaagggtgattgtgaagaccatgctaacctgctgtgcagccttcttcttggatatggattggaggcttttgtctgtgttgggaccaaggcaaagggggcacctcactcatgggttatgacttgtgggactgatgggaccatcatgttttgggagagtttaacagggcacaggtacatccacaagcctactaatcctgacggctctccacttgctgaacagcccaaaccattgtacccctatcgaacaattggttgtgttttcaatcatcagatgttcctgggaaactgtcaaccctcggatgcagtagaaacctgcatatttgatttgaatgatgagtccaagtggaaacccatgagtgaagacgcaattaagtctgtgtgtgctccaggggccaccacgtctctccctcccttcccacctctgtgtgcatccacaattgatgcctcagtcacaagcaatgagatcgaaatgcagctgaggcttctagtgtcagaacacagaaaggaccttggcctcactactgtttgggaagaccagctttcctatcttttatcaccagctttggcttcgtatgaatttgagcgaacaacaagcatatctgcaggcaatgaagaatttcaagatgccataaggagggctgtacctgatggccacacatttaaagggttcccaatacattttgtgtatagaaatgcaaggcgtgcatttgccacttgtcttcggtctcctttttgtgaagaaataatctgttgtcgtggagatcaggtgcgactggcagttcgtgttcgagtgtttacctaccctgaatctgcatgtgctgtttggatcatgtttgcttgtaaatatcgctcagtattataggactatacatttcctgggaattattcctttgttttattagaattgtatatgactagctctgtgaaaatttcttaatttaaattcagcctctgactttggatgtcattgctttgtatagaactgactgggtatgttttaaaatatcatgtatgtacttaaaaattaaggataaaaatttgtattgaatttagcataaattaagtgtataataacaaatggtacattctttagatggactcagtagtttaactgtgaatataagatctatttacatcaataagtaaagattttgtctagtgatttaaaccatagttaaatcaaaatggtcattatttttcataaatggaagattattttacacaaattaggagaagttaacttcgtagtagtttatttattacatagatgaaaatatattttgctgaattaccatttttgtggcttactcatgacactagggatatttgagactttcaagaaatttatgtgaggactttgatgtaagaataggaaaaag

SEQ ID NO: 3924 - DNA, 1567 bp, Cricetulus griseus
gctgcgcgccgcgcgctcgcggtcccagaagctgcctcagcggtcgcatggccccaacggacttcctccccgacggctcggaggcccaggccgagcggctgcgccggtgtcgccaggaggctgtggcagctgctggcggaggagcgcgtggagcgcctggggcagcttggtggccgccgagtggagacccgaggagggctttgtgcagttgacgtctcctgcgggggaagttctggcagaccatgggctactcagagcaagggcagcagcggcttcaccccgaagaggccttgtatctgctggagtgtggttctattcagctcttctaccaagacctgccactgtctatccaagaggcctaccagctgctgctgactgaggacaccttgagtttcctacactatcaggtcttcagccacctgaagagactaggctatgtggttcgtcggttccagctaagctctgtcctgtcaccttatgagaagcagcttaacttggacggctatgcccaatgcctggaggacgggactggcaagaggaagaggagttccagctgtcggtctgttaataagaaggctaaggccctgcagaattccctgccacccatgagtctggcagcctccagtccacctgcctgtgaccagaataaccagtacccagagaagccccaggagtcaagccccaggaagggctcaggactctcctttcagattcaggggtcttcagagccttgccctgctctgtctagggaggatgtggggtgtggccaagagaatgacacaatccagaatggagccaagggggctcctaaggcacgctggaactttgagcagatctccttccccaacatggcttcagatagccgccacaccctcctgcctgccccagccccagagctgctcccggccaatgtcattgggcgagggacagatgctgagtcctggtgccaaaagctgaaccagcggaaggagaagctttcccggagagaccgggaccagcaagcatcggtccagcagttccgggaggatgtgaacgcagatcccgaggtgcagggctgctccagctggcgggagtacaaggagctgctgcagaggcgacagttgcagaagagccagccccgccctccacacctttggggccagtctgttactcccttgctcaaccctgataaagcagattccccagccacggtccttcaacacatctctgtgctgcagacaacacaccttcctgatggaggttatgggctgctggagaagtccagaggcttggagatcagcttcgacgtttaccaggctgatgctgtggctacgttccgaaaaaacaaccctggcaaaccctatgtccgaatgtgcgttagtggatttgatgagcctgtcccagacctctgcagcctcaagcggttgacctaccagagtggggatgttcccctcatctttgccctggtggatcatggtgacatctccttctatagcttcagagacttcacactgcccagggatctggagcactgaatacacagctctggggattggccttttctgggggacttggactactctcaggg

SEQ ID NO: 3925 - DNA, 1567 bp, Cricetulus griseus
gtggaaccatcatccggatgcccagatgtttcatggaacaatcacaaaagagcttaccagccatgaagaatggaatcactacaatgaaaatattatagaaaacaagaaggactttgtgtttgtgaagtacaatggcctccacctgaagtccatggagaacctgcagtcatgcatctctctgaaagtgtgtatcttctccaacaacttcatcactgacatacagcccctgcagtgctgtataaagctaatcaaacttgatctccatggaaaccagataaaaattcttccagacagaaatttttggattggactcaagaacctaaaactcctctatctccatgacaatagtttttgcaagctgaagaacatctgtgtattagctgcatgtgcaagccttattggactgaccatgtttgactgccctgtgagtcttaaaaaaggctacaggcatgttcttgtaaacagtatctggcctctcaaagccctggaccaccatgttatatctgatgaagaaatcattcagaactggcatcttccggagagatttaaagcattcaatcccaggctattctttaaattttgcccagcattgataaagggttcaacctatgaggatgaaattaataatatcaaacatgtgatttcaaggattaatgagattttggctcataattcaccagtgttgattattcagaggtggatacgtggtttcatagttaggaaacggttgagtccctattttacacataaaaggcatcatgagaaaatgattagggtacttgaaacaaaatggatctgcataggtagaagaagtgaaagacaaaatattggatgatatcttccttttcaagcctaaatataaaacgggaaggttgcacattggaaacaaaaaagatattgacagaaaaccacaaacaccaagccatcccattcagaaaggtcagaaggagtctaaagctgactctgaggatgaagaaatggacattagttttagggtatctaccttgaagattcctttatattcctctccatcgctcaagtatggttcagtgttgaaggagatgaaaccggactacttctcagactatctgcagccaattcctggcactcatccgaagccaccaattaaaagagagacactagaggagctgaagaaaaggaaagagtttttagcctcacagagggcaggtatgaagctcttcatgtttaatgacctcgataaatatcactcagaccgaaagcaccaagagaagcaagcagaaaaatcagcagtcgtagtcttggcacaggctgcccggtctagggctaggtacagcattcgagagtctttaaggaagaagaccattttggcacagaaactgatggaaagggataacgaggcaatccagaaaggcttacggcaaatttggaaggaaaagcttgcctaccttgaaaaagttagagagcggaaaaccatgtttctagctgaaaaaagctgaacgcacttgaccattctttagtgcagaacaccaacaacgagcggacccttctactcaaaggaatcttccaagtggacaagatgaagaaa

SEQ ID NO: 3926 - DNA, 1567 bp, Cricetulus griseus
ggactcctgacccagaggaggccgcgccatgaagattctcctgttgtgcgtggggctgctgctgacctgggacaatggcatggtcctgggagagcaggaggtctccgacaatgagctcaaggaaatgtccactcaagggagtaggtacattaataaggaaattcaaaatgccgtccagggagtgaaacagataaagaccctcatagaaaaaaccaatgaggagcgcaagtcactgctcaacagtttagaggaagccaagaagaagaaggaggatgctctagatgacaccagggatactgaaatgaagttgaaggcattcccggaagtgtgcaatgagaccatgatggccctctgggaagagtgcaagccctgcctgaagcagacctgcatgaagttctatgcacgtgtctgcagaagcggctctggtctggttggccgccagctggaggagtttctgaaccagagttcacccttctacttctggatgaatggtgaccgcattgactccctgatggagagtgaccgacagcagagccaagtcctagatgccatgcaggacagctttacccgggcatctggaatcatggacatgcttttccaggaccggttcttcacccatgagccccaggacacccactacttctcacccttcggctttccacacaggaggcctcatttcttatatcccaagtcccgcttggtccgtagcctcatccctctctcccactatgggcccccgagcttccacgacatgttccagccattcttagaaatgatacaccaggcacaacaggccatggatgtccagttccacagaccagccttccagttcccggacaagggtttaagagaaggtgaagatgaccgtgcagtgtgcaaggagatccgccacaactccacagggtgcctgaagatgaagggccagtgtgagaaatgccaggagatcttgtctgtggactgttcagccaacaaccctgcgcaggctcacctgcgccaggagctgaatgactccctccagatggctgagaggttgacccagcagtacaacgagctgctccattccctccagaccaagatgctcaacacctcatccctgctggagcagctgaacgaacagttcaattgggtgtcccagctggccaacctcacacagggcgaagaccagtactaccttcgcgtctccacagtgacaacccactctaataactcagaagagccctcccgtgtcactgaggtggtcgtgaagctgtttgactctgaccccatcacagtggtgttaccagaagaagtctccaaggataaccctaaatttatggacacagtggcggaaaaagcgctacaggaataccgcaagaaaagccgagcggaatgagacagaagcattgctttcctgtatgtgggggcctcttggagtgaaccctagagagctccgcatgtctccaggcgagtaggccgggaccccagcagcctctccttcctctggattctgcactctaatgcctgcacttgctgcttctgggaagaacttcccccaccgcaactaatccaataaaagccgccttgtgat

SEQ ID NO: 3927 - DNA, 1567 bp, Cricetulus griseus
ggaaacataagaaccatccgagcttttgggaaggagacgctagaagtggagaaatacagcagccaagtggaccggttgctgcagctagcacggaaggaggccttcgcgagagccggcttctttggagcagctgggctctcgggcaacctgattgtgctgtctgtcctgtacaagggggcctgctgatgggcagcgcccatatgacagtgggcgaactctcctccttcctcatgtacgctttctgggttggattgagcattggaggtctaagttcattctactccgagctgatgaaaggcctgggtgctggtgggcggctctgggagctgctggagagacagccacaactgccttttaatgagggaactgtgttagatgagaaaagctttcagggtgctctggagttcagaaatgtgcacttcacgtacctgctcggccagaagtatctgtgttccaccatctggatctgtcacagcactggttggccccagtggttctggaaaatcaacagttgtctcactcctgctgcggttgtatgaccctgtttctggaactgtcagtcttgatggccacgacattcgtcagctaaaccccaacctggctgagatccaaggttgggacagtcagtcaggagccagtcctgttttcctgctctgtcgcagaaaacattgcctatggtgctgacaacccatcctcagtcacagcccagcaggtggagagggcagcagaagtggccaatgctgcggaattcattcgtagattcccacagggtttcagcactgtggtcggggagaagggcatcctcctgtctggtgggcagaaacaaaggattgcaatagccagggccctgctgaagaaccccaaaattcttctccttgatgaagcaaccagtgcgctggatgctgaaaatgagcatctggtacaggaggcacttgaccggctgatggaaggaagaacagtgttgatcatagctcaccgcctgtccactattaagaatgccaattttgttgctgtccttgaccaaggaaagatcgttgaacatgggacacatgaagagctacttttgaagcccaatgggctttacagaaaactaatgaacaaacagagttttatgtcagtataatggagccactggggcacctacctgggggccacttagggaaagcttgccttgtctgtcccccacatctcagggggtcagagctctggaacaccataggctgcaactgtcaaaaaagtgtgctgtgctcagcactagggcgtatgagagcctgatgcattttgccaaaggaagaagtcccattctgtaaacaggaaagcttctattttttattcacttccttgttttatgacttctcttgaaaagcaaggtacaaataagcaggtattagcaacaaaagtgaattaaaatcaattttacatttgttgaagcatgtattttggaaaaactgaaaaatatgtaattttcagatatattaattatagttttatattttaaatttccattaataaggctgaatctgaatattaaagtttagtactaaactaaaaaaaaaaaaaaaaaaaa

SEQ ID NO: 3928 - DNA, 1567 bp, Cricetulus griseus
agcctggctgccctgcggcgccacgacccctacatcagtcgcatcgtggacgtggccagccaggtggctctgtacactttcaaaacctcactcagtgcgaacagttgaaagcctgtcatggatctggagcagaatcctccccagggacccctgagttcaggagagggcagagaagtagatatcttacagatgctcactaaggccaaagatgagtacactaagtgtaaaacctgttctgagccaaaacagataaccagttcttccgccatttgtgacaaccctaagcttatcaaacctgtcccggtgagacccagtagtagccacaggctacaagaacccccgcccaacaagacctcggaccctgagccccaacacttatctttgacagctctatttgggaaacaagacaaagctccatgtcatgaaactctgaaaccctctgggacattcacccaccaccatcaccaccaccaccaccaccaccaacagcaagagcagcttcccattcatcaaggagttgcatgccccctgtcctatgacaatcccagaaggctctcactccccgtggagaagcaactatgtccagccattcagaaactcatggtcgggagcacggggctgcacccgctgccacagcaccctcaacagtggccctgtgaaagtggcagccccagtcatgcaaggggagttctccctggtcctgtccacctggggtcaccctggaacggtgggactgcacactgtgcacagagcacttgcagaagccacaagctgctagagcaacttcaaggtgcttctggggcagcacataagtttaagccctgtgcacctgccagcccagctgtggccactcagctggctccgtgccaaagcgtggctcactcacagctggtgtatttcagtggcccccttcctcctcccacaccaggacatcagactctcaggaaggagcagtgtgcactgccagcacaagcgctgtccctctccagccaccaggagagcagccccagtgtgcttcctactcaggagctgttgagaaagctccaggtagtacatcaggggcagcagctgcaggcggccccacggccagccttagcagccaggttccccgtgtcagcccatggctcggggacagaaaagcccttggaagcctgggccaacaagacagccagcatggagaaacaagctcctcttcctcagttcacctgtgccccactgagggagactgataatgggctcatgcccctaggaggccaagaacttgctgctgcctcctccagccttcttctgcccctgcagaactgggaatcctccaccatggccagcaggcccctcaccaggctgcagctccaggaagcactgctgaacctcatccagaatgatgacagcttcttaagcataatctatgaagcctatctcttcagtgtgacacaagcagccatgagaaaagccacttaaccaactacgtgagaacaaagactgagaattgatttccaggtccttcctgtgaactgtgtgaccaaacacattcctgcctttttaacaaagtataataatacaaagtaaa

SEQ ID NO: 3929 - DNA, 1566 bp, Cricetulus griseus
  modified_base (1439)..(1439): a, c, t, g, unknown or other
tatggcggtgttggtgcaacaccattggtgctaagaactcctgccagaaactcattggaaggccctggaatgaagagatgctggatacagcgtgcagactggttttgaatgaagtcacccttccaggctctgctcctggggggaaggtggagttcaagagaaccctcatcatcagcttcctcttcaagttctacctggaggtgtcacagggtttgaagaggatggacccaggtcactatcttagcctggcagacaggtatgagagtgctttagaagatcttcattcaaaacattattggagaacattaacccaccagaatgtagacccaaagcagcttcctcaagacccaattgggcgtcccaaccaaccttccatccaacacggctttacgtgggtttggctttcctcaggcagggctggtcaccgaagtctgtatcacagaagttgcagtcaaatgtgggctgtccctgagcaggttcggaccatcaatatgtacacgcacatccataaaaccccctacaagcaggagatcaatgccaaggccctcactgagtgctggagagaatgcatggccaagtcttcctactcaatgaggaaaacagctgtagggaagttcaatgcagagaattcctggaagaagaaggggctggccatgatccccctgaagtttcctgtgggtattggatcagtagccatgggacaggcagccgctctggttcacatttatctcgatggctctgcactggtcactcatggtgggattgagatggggcaaggtgtccacactaaaatgattcaggtggtcagccgcgaattaaagatgccgatgtccagtatccacctgcgtgggacaagcacagaaactgtccccaacacaaatccctctggagggtctgtggtggcagatctcaatgggttggcagtaaaggatgcctgccagactcttctaaaacgccttgaacccatcatcaacaagaatcctcgtggaacttggaaagattgggcgcagactgcttttgaccagagcatcagtctctcggctgttggctatttcaggggttatgagtcggacatagactgggagaaaggggaaggccatccctttgagtattttgtgtatggagctgcctgctcagaggttgaaatagaattgcctgactggggaccacaagactatcagaacggacattgtgatggatgttggacacagtataaacccagcccttagacataggccagattgaaggcgcgtttattcaaggatggactctacaccatagaggaggagagtctgggttgttcctgggatgttcggtattttttgccatccgtgatgcagtgagcgcagcacgagaggagagaggcatatctggaccattgaggctcaacagtccactgactccagagaagatccgaatggcctctgaagataagttcncaaaaatgattccgagagatgaacctggatcctttgttccctggaacatacctgtgtgagccaaatgcaagcttctggagagactggctcagctccactgcagaatgtaactcctggtctgtctgct

SEQ ID NO: 3930 - DNA, 1566 bp, Cricetulus griseus
ctctcctgttatcaaagcagttacaaacttcaagcaggtttctaaagtattggaagaatttgatgttgaagaacagccaagtactgtcctcgaaaaccgttttcccaacattaaggtcatagaatctggagtaaaacagctgaagagtgaggaacattgtatcttcacagaagatggccgtcagcatgcgtataggaagctctgtctgtgtgctggagctaagccaaagttgatctgtgagggaaacccatatgtgttaggaatccgtgataccgacagtgctcaggaatttcagaaacagcttaccaaagccaagagaataatgatcgtcgggaatggtggcattgcgcttgagctggtgtatgagattgaaggctgtgaagtgatttgggccataaaggataaagccattgggaatactttctttgacgcaggcgcagcagaatttttgacttccaagctcatgtctgaaaaatcagaggctaaaattgcacctaaaagaaccatctacacaattgagggagcaagaaaggaaaacagaagcaaagctaaagctgataatgtgggcagtgcccttggacctgactggcatggaggcttggatctgaaaggtccacaagagttctcacacagtattcacatcgaaaccagatgtgaagtaaagaaaatctaccttcaagaggagtttaagattacaaagaaaaagcccttggcttttccaaagcatcaggataagtcagttacacttgataaagaaatgtggcctgtgtatgtggaactaaccaatgggaaaatatatggctgtgatttccttgtcagcgctacaggagtcacaccaaacgttcaaccttttctccatggaaacaattttgatctaggagaggatggcggcctgaaagtggatgaccagatgcgcacgtcacttcctgacatctatgctgctggagacatctgcactgcatgctggcagccaagcccagtctggcagcagatgagactgtggacccaggcacgacagatggggtggtatgcggccaagtgcatggctgcagctagtttgggacaccctatcgacatggatttcagctttgaactctttgctcacgtcacaaaattttttaactataaggttgtactgctgggaaaatacaatgcacaaggcctaggctcagatcatgagttaatgctgaggtgcaccagaggacaagagtatatcaaagtcgtcatgcagaatggacgcatgatgggagctgtcttaattggtgaaactgatttagaggaaacatttgaaaatttaattttaaaccagatggacctttcatcatatggagaggacctcctagatccaaatatcgatatagaggattattttgactgacagaatatcttcaggaatactaagttcaaaataaggaggaaagaaagaaattgggaaaaataacaactgacaccaagtaaatgaccccataagtcgagaatgcagaagccagagtcctggttcagaagaagtcaagaaactcctaggatgaacttagtttattgattaattaacagatgaacattcct

SEQ ID NO: 3931 - DNA, 1566 bp, Cricetulus griseus
agatggcggcgcccacgctgagccgtctctaccgagtgcccctgtcgggggtctggccgcgcgggctgcgcgtggtgcggacgggcgcgcggggaatactggcggcaccgagggcgcggggcctgttcaaggagttcttccctgagagcggcacgaagaccgagctcccggaactcttggaccgccgcagggcgggctcgtcgccccagacggtgtactgcggtttcgaccccacgggcgattcgctgcacgtggggcacctgctgactttgttgggtctgttccacttccagcgagccggccacaacgtgatcgcgctcgtgggaggctccacagccctcctgggggacccccagcggccggagcaaggggcgccaggcgctgagcgccgactgcgtgcaggccaacgcgcgcgccctgcggcaggggctcgagagcctggcggccaaccacgcgcggctcttcgcggacgggcggccctggggcacctttaccgtgctcgacaacgccgcctggttccgggagcagcacctggtggacttcctggcctcagtgggcggccacttccgcatgggcactctgctgagccggctgagcgtgcagagtcgcctcaagagccccgagggcatgagcctggcggagttcttttaccaagtgctccaggcctacgacttctactacctcttccagcgctatggatgccgggtgcagctgggcggatcggatcagctgggcaacatcatgtctggatacgagttcatccacaagttgactggagaagatgtattcggaatcactgtacctctaattacaagtacaactggagcaaagctgggaaagtctgctggcaacgctgtttggctaaacagagagaaaacatcaccgtttgaactttatcagtattttgtcagacagcaagatgattctgtagaaaggtacctgaagctcttcacttttctcccccttcccgagattgatcacattatgcagctgcatgtcaaagagcccgaaaagcggggtgctcagaaacgacttgctgcagaagtgacaaagcttgttcatggacaagaaggtctggatgctgctaaaaggtgtacacaagcactttaccatagcagcatagaggcactggaggtcatgtctgaccaagagttaaaagaattgtttaaagaagcttcattttctgaattagttctcgaccctggaacaagtgttatagatacatgccggaaagcaaatgccattccagatggtccccgagggtatcggatgataacagaaggcggagtcagtataaatcacagacaggtaacaaatcctgagagtgttttagtaattggacaacatattctgaagaatggactctccttacttaaaataggaaaaaagaatttctatattataaaatggctgcagttgtgaaagattttgttcagatttatccatcattcgtcttcaaaacatggagggtcttcaaaaaaagagtggaatatccacaaggccttacaatgtaaatacttttatgtatttttaaataaagttatttaactatgaaaaaaaaaaaaa

SEQ ID NO: 3932 - DNA, 1566 bp, Cricetulus griseus
cattctggagagaaaccatacaagtgtgaagaatgtcacaaagcctttatgtgggaagaccttctctactcattcatacctttctcagcacaaggtagttcactctggagacagaccttacaagtgtgagaagtgtggcaaaatgttttactacccttctcgccttaaggaacatcaaagaattcattctcaagagaatccctacaagtgtgaagtgtgtggcaaagtctttagtgctcacttagaacttgcaacacacctgagtattcattctggataaaaccctgcaggtgtgaaggatgtgggaaagcttttaacttatccatccttacctcagggcaaattcctggaaagaaatcttacccatgtgaggaatgtggcaaaaatgtgttctgtcctccaaacctaaaggtaaagtatattatgaaggtttcatatcattcagctctatgatgaatgtcacagaattcacaagtgggagaatctacaagtgtgcagaatatagccaggtgtttagctgtaatttgtcattgcataagcatgaaagagtaccccagaaatgcaaagaatatggcaaggcctttagctgtttttcttactttaattatcctcagagacttcatactggagagaatctgcacataaaaataatgtgtcacattttaataatatttcaaatattagtcaacaccaaagaattccgtaagcatcactgttcaacttcacacctctgcattttctaaaggaatctcagctgtgtggttacctagatctgactggcttagagatgcgtctatgggatgttggatggatgctgattaattcccagtcccacccttgggtaggtggtcctgggtgaatgagaattctggccaagcagaaatccgagggagcaagccaataagcagaattcttcaatggtttcttctttagttcctgtctcaaggtttctccttgagctcttgccctggctgaactgcttgattaataattcctaaattggagtaaacccttttctctcctaagttgtgtttttagtttatggcatttatcacagcaacagacatcaaagtcagacagcatggacatgcaaaggcttttcagtttctttataccttggttatcatcagtcttcatactggagagaatgtcacaatgttcagctgagaacatctgagtcctatagcagagactccctttgctgtaatctacaaacctattcttttagacaatgtgttttcaaggtatatcagttgattgttctaactatgaatgcatccagaaattgttgccatgttgtcagactgtacttgggtaacctgaatctggattcccgagccatgatctatatgcggtttccccttttgggtcccccaattgtaagtaacccttcccctttggtctgtaagaaaacccaataaattcacttttctcatcaatttggactgtggtgacatcctagaatggtttcttgttgggcccctttgtagtaactaggcatttgttgtgtctagagatagataacataacacatgtcatttcatatatggttaccaaaataaacaa

SEQ ID NO: 3933 - DNA, 1566 bp, Cricetulus griseus
gatgccgctctacgagggcctcgggagcggcggcgagaagacggcggtcgtcatcgacctgggagaagccttcaccaagtgtggatttgcaggagaaactggtccacgatgtataattcctagtgtgataaaaagagctggcatgtccaagccaatcaaagttgttcagtataatatcaatacagaagaattatattcctatttaaaagaattcatccacatactgtatttcaggcatctgttggtgaatcccagagatcgccgggttgtggttattgagtcggtattatgtccttcccacttcagagagacacttactcgtgttcttttcaaatattttgaggttccatctgtcttacttgctccaagtcatctgatggctctcctgacacttgggattaattctgccatggtcctggattgtggatatagggaaagcctggtgttgcctatatatgaaggcatcccagtactgaactgctggggagcactccccttaggaggaaaagctcttcacaaggagttggaaactcaactgttggaacaatgtactgttgacactggtgctgctaaaggacagagccttccctcagtgatgggttcagttccagaaggtatcttagaggatattaaagtgcgaacttgctttgtaagtgatctgaagcgcggactacaaatccaggcggcaaagtttaatatcgatgggaatagtgagcgccgctctccacccccaaatgttgactacccactggatggagagaagattttacatgtgcttggatcaatcagagactcagttgtggaaattctttttgaacaagataatgaagagaaatcagttgccactttaatattggattcccttatgcagtgcccaatagacaccaggaagcaactggcagagaatttggtagtcataggtggcacatctatgttgccaggatttcttcacagattgcttgcagagatacggtatttggtagagaaaccaaaatacaaaaagacacttggcaccaagaccttccgaattcatactccacctgcaaaggctaattgtgtggcctggctgggaggtgctgtttttggagctttgcaagatatacttgggagccgctccgtttcaaaggaatattataatcagacaggccgtatacctgactggtgttctctcaacaacccacctttggaaatgatgtttgacgttgggaaaacgcagccaccgcttatgaaaagagcattttccaccgagaaataaaagtttgagtagattcagctttgctttatttcaaatacttaattagaaataaactgtacaaagtatgtaggatgctttaaaatatatataggtgacttttatgtaacaaagcatttctgtattttctctttgcattaatatttaattgatttcactttgtctcttgtgtggtatggtaaaatagtggatgcctgtgagatacgttgtatttgtatcaataaaatatagttaagctattacgatttataattaactttttttttttttttttttacttttttttttttaattattttatttatttattatat

SEQ ID NO: 3934 - DNA, 1566 bp, Cricetulus griseus
  modified_base (902)..(902): a, c, t, g, unknown or other
tcgaagacgggggcagcgacggcgggcgcgagcccggcggagggcggtgggccccgggcggtgggggcctgcggaggtctaacagcgcccccctgatccacggcctcagcgactcctcgccggttttccaggccgaggcgcccagcgccaggcggaacagcacgacgttcccgagccgccacggcctgctgctcccggcctcgccggtccgcatgcacagcagccgcttgcaccagatcaaacaggaggagggcatggacctgatcaaccgggagacggtccacgagcgcgaggtgcagaccgcaatgcagataagccactcctgggaggaaagtttcagcctgagtgacaacgacgtggagaaatccgcctccccaaagcgcatcgatttcattccggtgtctccagcaccgtcacccacccggggaattgggaagcagtgttttcaccgtccttgcaaagttttgtgagtagcaacggattgcctccaagccctattcccagcccaaccacccggtttactacccggagaagccagagtcccatcaactgcatcagaccaagtgttcttggaccattgaaaagaaaatagtgaaatggaaactgattatcagccaaagagatttttccagggcatcaccaacatgctgtcttctgacgttgcacagctgtcagaccccggtgtgtgtgtatcctccgataccctggatggaaacagcagcagtgccggatcttcctgtaactcaccagcgaaagtcagcactaccaccgactctcctgtgtcgcctgcccaagccacgcccccccctttattcccagtagatgaactttcgtctaagtgattcaccagtcttgagcccccctcccccaatggagagacaaaaacaaaaacaaacaaaaanaaaaaaaaagaatcaagttagagcaagcactgaactttgtcgattaagttgaggctgtttcctatttgactcttccccctttttttggaagttcctgaaatgttattctagagaatttctatgtcaggttcctgcggacgcccttaaattcagtgtagtaatattttcggactttttatcaataagtgtgttgaagcatacattttacgctgctaatatgtctaaatacatatgttatcccttgatatttaaaataattgagagtctctatttatttatgggattattaagttctgatgaaaatataaattgttgaatttcagtttagtaaactgatgttttaaaattccataattcatggcacactaatttttaatgttttcaatgattgctgttttccatctattgaagaacttacctacttacagctttaatgaaaactggtagtcatatcagtccattggttgtctagcttacccaagaatccttggatgtttaatgtcctaggcacaagataggaggggaaataacaaaaggagaaattatagcattttgcagcaaatatttttaagttaagtatataaaagtaaacatttaagaaggacattttctaacaaaactttaatagtaactagtaagtcacaccaacataactacaaaaatg

SEQ ID NO: 3935 - DNA, 1566 bp, Cricetulus griseus
ctcggcttcgcagaggcagtgccgttcctctcggcgctccctccgctggttcagcttcctccgtttcctctgggaccagagaccctggtatatgtaccacctctgaccccgctagagacatgtcgaccccggcccggcggcgcctcatgagggacttcaagaggttacaagaagaccctccagccggagtgagcggggctccgtcggagaacaacataatggtgtggaacgcggtcatttttgggcctgaaggaaccccatttgaggatggaacatttaaacttacaattgaatttactgaagaatatccgaataaaccacctactgttagatttgtctctaagatgttccatcctaatgtctacgcagatggtagtatatgtctggatatacttcagaaccgctggagcccaacctatgatgtatcttccattttaacatccatccagtctctattggatgaacctaatcccaatagtccagcgaacagccaggctgcccagctgtatcaggagaacaagcgggaatatgaaaagcgcgtttctgcaatagtagaacaaagctggcgtgactgttgactcaggaaagagcaagttgaccataagaaaaatgtatattgatgcatttatcaacttcttattcctaattcattacatttactttattaaaacaaaatagctgttgtgctgtttctgtcttcccttgccaattttttcttcccctttctgtcctcctcaaatggaacatcagagataccatttgaaatccaatgtactgtatacctgggttacttgcaaacattactactgcatatgtccctttgttgtatctcatctccaacctccagccagttatgaggttactgtacgttttatagtaaggttttaagatgaactgttatgtatagtcaggtaaccaggatgttatctgtaaaaaaaaatgattgctgtgtttcatcctggccagttcttcccttgtgttcaatttggcaaacaatgtatttagaatatgacctaaagaaaacaggaatgcatccacgtaaacattattttaaaagggaaggaaaattgaaaaatcctatactcaatttgtaagcaatatgaattacaagatggcacttattggtagcaaggagactgctaaaggacccagctaacaaattgaaacaattttaataactgacatacttcactttttgcaagatagtcatagagcaaatccatgtttcagaatcatggccttcagagctgtgtgctttttaaagaggtgtgagaacagactagaagctatcatttttctaagttaagaaaaactgaagatcctctaatatttttaaaggaacagtgttgacctaaataaacatttcttttatgaatcaaggaagtgagcctatctctagctaaacttttctcattcagatcctgagttattgctgcatgctttcagtgttttgagaacctttaatgcccacatctgctaatttttcttgtatatttacacttttaaatatacagtatgggcaaggcttagtaaattgttttgtcttaatattatttaattgttaat

SEQ ID NO: 3936 - DNA, 1565 bp, Cricetulus griseus
ctggaggaggggttccaagtggtggtgactatccggagagaagattttgatgtggaaccagctgactcggaggggaactgccaggacagtttactctttgctgcaaaaaatcaactatttggtccttactgtggcaatgggttccctgggccactaactattgaaacccacagtaacactcttgacattgtctttcaaacggacctaacagagcaaagaaaaggctggaagcttcgttaccatggagacccaatcccttgtcccaaggaaatcactgccaattctgtttgggtgcctgaaaaggcaaaatatgtgtttaaagatgtggtgaagatatcctgtgtggacggatttgaagttgtagagggaaatgttggctcagcattcttctattctacttgtcaaagcaatggacagtggagtaattccagactacaatgtcagcctgtggactgtggtattccggaacccattcagaatggtaaagttgacgatccagaaaacactgtgtttggctctgtcatccagtactcgtgcgaggagccatattactacatggaacatgaagaacacggcggggagtatcgctgcgctgctaatgggagctgggtgaatgacgaactgggcatagagctcccaaaatgtgttccagtctgtggggtacccactgagcccattgcattacagcagaggatatttggaggattccctgcaaagatccagagttttccttggcaagtcttctttgagtccccacgggccggtggggctcttattgacgagtactgggtgttgacagccgctcatgttgtggagggaaactctgacccatctatgtatgtggggaccacatttgtgagaatggaacatctggcgaatgcccagaggctcaccgctgaacgtgtgattattcatccaggctggaagccagcggatgacctagaaacacggacaaattttgacaatgacattgcactggtgcagctgaaagaccccgtgaaaatggggcccactgtctcccccatctgcctgccaggtacctcctcagagtacaacccctcaaagaatgacctgggactgatctcagggtgggccgaacagagaagagaaatattgttccccaactcaaaagggcaaagttacctgtgacctctttagagaagtgccaacaggtgaaaggggagaactccaaagtgagggcggatgactacgttttcaccagcaacatgatctgtgctggagagaaaggtgttgatagctgtggacagtggtggggcttttgctttgcaggtccccaatgtaaaggaccccaaattctatgtggcaggcctagtgtcctgggggaaaaagtgtgggacctatggaatctacacaaaggtaaagaactacatggattggatcgtgaagacgatgcaggagaatagtgtccccagtaaggactaacccatacatacggccagaccctcccaccagtgcatgctctcagacccttatgatagtcccattatctcacaatgatggagagaagatgcaggagtacgattaacacggaacttgattgccaa

SEQ ID NO: 3937 - DNA, 1565 bp, Cricetulus griseus
caaaagaaacacttcaagcaccaagagagagcccgttcctgtggagcactgaagccataaggaatactgttgtgaaaaattagtaacacaatgagggtttggcacatttgcaaacttcctggaagagtcatggggattccagtgcttcggttctccctgggtatcatccttgtgctactggttatagctggagctttgaccaatttgctccccaacatcaaagaagacaagatgctccccctgcgcagggaaatcaagccccagagcacatcagccctggattcttttactcttatcatgcagacatacaacagaacagacctcttactgagactcttgaatcattaccaggcaataccaaacctgcacaaagtgattgtggtgtggaacaacgtgggagagaaggggccggaggagttatggaactctctgggacctcaccctgtccctgtcatcttcaaaccacaaacagcaaacaaaatgaggaatcggctccaggtcttccccgaactggaaaccagcgcaatattaatgatagatgatgacatactcattagttcccaggaccttgcttttggtttctcagtctggcagcaatttcctgaccagattgtaggattcgtacctagaaaacacatctctactccatcaggtgtctacaattacggaaattttgtactgcaggccccagggtctggaagcggtgaccagtactccatggtgctcatcggagtctccttcttcaacagcaaataccttgaactcttccaaaggcagcctgcagccgtccatgcgctgattgacgagacgcaaaactgcgatgatattgtcatgaatttcatcatcagcaagcacacggggaagtcttcgggggtatttgtgaaacctgtaaacatggcccttttggataaagaaaccaatggccattctggaatgtggcaccgggcagagcactttctgcagagatcttattgtataaataagcttgttaatatctacaatggcatgcccttaaaatattccaacattatgatttcccagtttggttttccatatttcaaccatgtaagcaaaatatgaacaggaaacaaacgaaaacaaacccgaaacactgctaggcttttgagtggcttctccatgctgtgctttttgtttttaatgcctgcaggataggaaaaagccatgtaaggagagcttagtctgaaccccatgcagagagccaggaaaattcctggttgccagtgtctttatggcccttctaaccagaattaactttgaccagcgtggttttcaggaagctgtcagtgctggtaattttgttgttaagcctgttgtaactagaaaggtaagttttcatggctgaccagtgtctaattgttttgctttgtttttgtttttgtttttttctgtaagcctacactgcatggatcactaaaatgtgcaacccatgtctctcatatgcaacctatacacagctagaataaaagtgttactgctgtctgtcactgtgtgtgaccatgagaatgtacattatttcttaccttttacagaacgtgtttaagtaa

SEQ ID NO: 3938 - DNA, 1565 bp, Cricetulus griseus
agagggaggtcgtgagctctcggtttggctggcccggaggggagcctcgtggtagaggtgaccggagctgagcatttcagatctgcttagtgaaccggtgtatcacccaccatgctggctgcaaggctcctgtgtctccggacactgccttccagggttttccagcccactttcaccaaggcctccccacttgtgaagaattccatcacgaagaatcaatggctcttaacacccagcagggaatatactaccaagacaagagttaggattcaccgtgggaaaactggccaaggactgaaagaggcagcttttgaaccatcagtggaaaaaatctttaaaattgatcagatgggaaggtggtttgttgctggaggagcagctgttggtcttggagctctgtgctattatggcttgggaatgtctaatgagatcggagctatcgaaaaggctgtaatttggcctcagtatgtgagggatagaattcattctacttacatgtacttatcagggagtattggtttaacagctttgtctgcattggcattagccagaacacctgctgtaatgaacttcatgatgaaaggctcttggatgacaattggtgcaacctttgcagccatgattggagctggagtgctggtacaatcaataccctatcatcggagcccagtccctaagcatctggcttggatgcttcattctggtgtgatgggtgcagtggtggctcctctgacgatcttaggggggcctcttctcctgagagctgcatggtacactgctggtattgtgggaggcctctctgctgtggccatgtgcgcacccagtgagaagtttctgaacatgggagcaccgctgggagtgggcctgggtcttgtctttgtgtcttcagtggggtctatgtttcttccccctaccacagtggctggtgccactctgtactcagtggcagtatatggtggattagttcttttcagtatgttccttctgcatgatacacagcaagtaatcaaacgtgcagaaataacaccaatgtatggagttcaaaagtatgatcccatcaatgcgatgttgagaatctacatggatacattaaatatatttatgcgagttgcaactatgctagcaactggaagcaacagaaagaagtgaagtggccgcttgtgatgtctctgcttactgatgcttgcttgtttattaggagcagatagtcattacagtttgcactagcaaaactcctttaaggtttagaagataacctgtcaccatgcttaaatgttcagtaatgtgatccttcaggcttgccttttcttttagagaataaattcagtagatatcttccaaatatacattttcaactgtcatgtttgggtaatttaaaaatgctttggtgaatgtgagaactaaaaattgttacaagaaaccaagtatttttaattataagataagtaaaatacagcaaatttgtgtgtttttctcagtgtctaattgaaagcatgcttggttttctcatcacagctttgacagctgtcagaaaagcctctttgtggcttatactaagattagga

SEQ ID NO: 3939 - DNA, 1565 bp, Cricetulus griseus
tccggcgggagcagttcggctccttaccatggggacaattcatctctttcgaaagccacagcggtccttttttggaaagttactccaggaatttagacttgtagcagctgaccgcaggtcctggaagatccttctctttggtgcagtcaacgtgctgtgcactggcttcctgctcatgtggtgcagctctacaaacagcatagctttaactgcttatacttacctcactatctttgacctttttagtttaataacatgtttaataagctactgggtaatgatgaggaagcctagccctgcctattcatttgggtttgaacgattagaagtcttggctgtgtttgcttctacggtcttggcacaattgggagccctctttatactaaaagaaagtgcagaacgctttttggatcagcctgagatacacacgggaagattattagttggtacttttgtggctctttctttcaacctgttcacgatgctttctattcggaataaaccttttgcttatgtctctgaagctgctagtacgagctggcttcaagagcatgtggcagaccttagtcgaagcgtgtgtgggattataccaggactcagcagtatcttcctgccccgcatgaatccatttgtcctcattgaccttgctggggcgtttgctctgtgtataacatacatgctgattgaaattaataattattttgctgtagacactgcatctgcaatagccattgccctgatgacatttggcaccatgtatccaatgagtgtgtacagtgggaaagttcttctccagactacaccacctcatgttattggtcagttggacaagctgatcagggaggtatctaccttggatggggtcttagaagtccgaaatgaacacttttggacccttggatttggctcattggctggatcagtacatgtaagaattcgacgcgatgcaaatgagcaaatggtccttgctcatgtgaccaacagattgtatacacttgtgtctactctgactgttcagattttcaaggatgactggatcaggcctgccttactgtctgggcctgttgcatccaatgccctaaacttctcagaccatcacataatcccaatgcctcttctaaagaatgttgatgataggatccctgtcacatcaacacctgccaaacctagcagccctcctccagagttttcatttaatacccccgggaaaaacgtgagcccagttattcttctgaacacacagacaaggccttatggtttgggtcttagtcgtggacacacaccatacagcagtgtgcttggccaaggacttgcagttccaggagttggagcaggccagggattgaggcccaccttcccacatgtaccaagtaggtatggaaacaacaggacaggacagccaagaccttgaaggactttaacttatttttatgaggaatgtcgactccttggttcccagtgcatttagtaatccaatttgcattgactgttaaccatttaagtgtcagattgttgcaggcttgttcatatttcatgaaacctaataaactattatttttgtaaaa

SEQ ID NO: 3940 - DNA, 1564 bp, Cricetulus griseus
gcatgagctttcagccttgtgtccctgtggaccatggggtcccttcctgggtcctggtcctgctgctgggactggggctgtgtaacctccaggccagagctgacagagttctagacccggactttcgggagaactattttgaacaatacatggaccacttcaactttgagagttttggcaacaaaacctttgcccagcggttcctggtgtcagataagttctggaagatgggcaaggggcccattttcttctacacggggaatgagggggacatctggaccttcgctaacaactctggattcatggtggaactggcggcccagcaggaagccctgcttgtctttgccgagcaccggtactacgggaaatcgcttccattcggtttgcagtccacacagcgtgggtatacacagctgctgaccgtggagcaggcactggcggactttgctgtgctgctccaggccctgcggcaggatcttaaggtccaggatattcccaccatagccttcggagggagttatggggggatgctgagcgcctacatgaggatgaagtatccccacctggtggctggggcactggcagccagtgctcctgtggtagctgtcgcaggccttggtgaatcctaccaattcttccgagacgtcacagcggatttttatggccagagtcccaagtgtgcccaggctgtgcgggatgccttccaacagatcagggacttgttcctccaaggagctcacgacaccatcaggaagaattttggtacctgccagtcgctttccagctcaaaggacctgactcagctctttgtgtttgcccggaatgcatttactgtgcttgccatgacggattacccataccctactgagttccttgggaaccttcctgccaaccctgtcaaggtggcctgtgaacggatgctgagtaagggccagaggatcatgggcctacgagcgctagtagggctagtctacaactcctctggcatggagccctgttttgacatctaccggctgtaccaaagctgtgctgaccccactggatgtggcactggttctaatgccaaggcctgggactaccaggcctgtacagagatcaatctgacctttgacagcaacaatgtgacagacatgttccctgtcatcccattctctgatgaactccgccaggaatactgcctacatacatggggcgtgtggccccggccagactggctgcggaccagcttctggggtggcgaccttaaagctgccagcaacataatattctccaacggtgacttagacccctgggcagggggcgggatccggagaaacctgagtacatcaatcatcgctgtcaccatccacgggggagcacatcacctagacctcagagcatctaactcagcagaccctcaatctgtcgtggaggtgcgtaaactggaagctgccctcatccgtgagtgggtagaggcagccagaccaaagcaaccagcaatgcccaggtggcctggacctgagaagcaacactcttccagctaagacacagcatgactcagagatcccttgttttatgtgagcta

SEQ ID NO: 3941 - DNA, 1564 bp, Cricetulus griseus
cgggcgcgtcggccggcgagggagcagcaaaacggccggcggcgggcgccgcgcgggggcgggcgacgcggaggcggcggtggccatggccgaggcgtcgccgcagcccggacggtacttctgtcactgctgctcggtggagatcgtgcctcgcctaccggattacatctgcccaaggtgcgagtctggcttcatcgaggagcttccagaagagaccaggaacacagaaaatggctctgccccctccacagcccccaccgaccagaaccggcagccatttgaaagtgtggaccagcacctgtttacgctgccgcaagggtacagccagtttgctttcggcatctttgacgatagctttgagattcccacgttccctcctggggcacaggccgatgatggcagggaccctgagagccgacgggagagagaacaccagtctaggcatcggtatggggcccggcagccccgtgctcgccttactgcccggcgggccactggccggcatgaaggtgttcccacgctggaagggatcatccagcagctcgtgaatggtatcatctccccggccgctgtacccagcctgggccttggtccctggggcgtcctgcactcgaacccaatggactacgcctggggggccaacggcctggacgccatcatcacacagctcctgaatcagtttgagaacaccggccccccacctgcagacaaggagaagattcaggccctccctacggtccccgtcacagaggagcacgtgggctcagggctggagtgccccgtgtgcaaagacgactacgcgctgggtgagagtgtgcggcagttgccctgtaaccacctgttccatgacagctgcattgtgccctggctagagcagcatgacagctgccctgtctgccgcaagagcctcactggacagaacacggccaccaatcccccaggcctaactggggtggccttctcctcatcctcatcctcatcctcgtccagctcgcccagcaacgagaatgccacaagcaactcctgagtcccacctggccacccatccacccacccccggggctcggtcatcccactcgccccaggtgccctagcaccgccatggccgtggactagaggtgctgccccatggtggccagcagcacctggcgggccccaggctgcgacaggctcggacttggccatggccgctcctgtttggaggcaagcacctgggccccatgtccccagcaggcgcctccagtccgtctttaacctcaccctccaaatgttcaacggcagaagggtttttatgattttaaattattactgctttgaaataaatggacgtttgagccacgtgcggccatgcatgatctgtggaggcagcagaactgtcgccagacccagcccgccacatgccctgggaggccggcccagcacccagccagtgccggcctcgggaccacgagggtgaccagcagacccaggaacaaactgctccagcagacttttttttttttttaagggtaaatgtgtgttatctggaaagctatttaaaataacacctactcaaaaaagcaga

SEQ ID NO: 3942 - DNA, 1564 bp, Cricetulus griseus
gctgccgtcaactgccccaagcgcttgctgaggccgagggagacgtcggggcctgcacctggagagagcctgccgcgctggcccggaggaggggggcgttgccatggcgacagcctctccggcagctgacgggggcgggggcggccctgggaaggagggctggtctcctggccccctgcccctcccttacgctcccttggacctggatgggcccgagctgggggcaacaccctgggcattggggctttccagctctcacagacccttcagcatctccagctgccagtcttggcatcttcgaagtaaggagagttttagatgcctctggatgctcaatgctagcacctttacagactggagcagctcgattttcttcatatttactttcaagagcaagaaaagtgctgggctcccacttattttctccctgtggtgttccggagttctgttccatatccaccagaaagctggcggcccacggctttggcgcgtcaatggcggcaatggtgccctttcctccccagaggtatcactactttttagtgctggactttgaggccacgtgcgacaagccacagattcatcctcaggaaatcattgagttccctatcctgaagttaaatggccgcaccatggaaatcgagtctacctttcacatgtatgtccagcctgtagtccacccacagcttacccccttctgtacagagctcactgggatcattcaagccatggtggatggccagccaaggctgcagcaagtgctggagagggtcgatgagtggatggcgaaggaaggcctcttagatccaaacgtcaagtcaatttttgtcacctgcggagactgggacttgaaagtcatgctcccaggccagtgccattatttaggcttgccagtggcggattacttcaagcagtggattaatctgaaaaaggcttacagcttcgccatgggctgctggcccaagaatggactcctagacatgaacaagggtctcagcctgcagcacataggccggccccacagcggcattgatgactgcaagaacattgccaacatcatgaagacattagcataccgaggtttcatcttcaagcagacatcaaagcccttttgattggcagaggatgggatggggcaggacagggtagctgcttggcccaaaccagaatcctcctctccctcacaagagggaaaaaaggagagtggcacaggtctgcgcccagagtgtccccagttgccctatgggcttgtgccctggttgagggtttggccatttggcccctctggagcagacactttgtgccccacccccctcccactcctcagtctcagtccagtattagcccctgccattatgggcctgggctagggggaacccaggtactcactgccttctccctggtatataggcttctgctgggttcaccaagtctcccctgtgccccctcccatccatagtgcatggtgtgtggtgcccccagggctccaggacagatcaggccccaccttgtatccaccccatccctgctgtgaacgtgccactgaataaagtcggggaaacaa

SEQ ID NO: 3943 - DNA, 1563 bp, Cricetulus griseus
agcgcacgctgaggaggttcggcgtccggggctgctgtgccgagtctcttcgttgccattaaggagcgcggcgtgggaccctagttcgggattcacacctacaccgcagaatgccaggtctaagctgtagattttatcaacacaaattccctgaggtggaagatgtagtgatggtgaatgtaagatccatagctgagatgggagcctatgttagcttgttggaatacaataacattgaaggcatgattcttcttagtgaattatccagaagacgtatccgttctataaacaaactgatccgcattggcagaaatgaatgtgtagttgtcattagagtggacaaagaaaaaggatatattgatttgtcaaaaagaagagtgtctccagaggaagcgattaaatgtgaagacaaattcacaaaatccaaaactgtttatagcattcttcgacatgttgctgaggtattagaatataccaaggatgaacaactggaaagcctgttccagaggactgcctgggtctttgatgacaagtacaagaaacctggatatggtgcttatgatgcctttaagcatgcagtctcagacccatctatcttggatagtttagatttgaatgaaaatgaacgagaagtactcattaacaatatcaatagacgtttgacaccacaagctgtcaaaattcgagcagatattgaagtagcctgctatggttatgagggaattgatgctgtaaaggaagccctgagagccggtttgaattgttctacagaaactatgcccatcaagattaacctaatagctccacccaggtatgtgatgacaacaactacactagagagaacagaaggcctctctgttctcaatcaggctatggcagtcatcaaagagaagattgaggaaaagaggggtgtgttcaatgttcagatggagcccaaagtggtcacagatacagatgagactgaacttacaaggcagatggaacggctggagagagaaaatgcagaagtggatggagatgatgatacagaagagatggaagccaaagctgaagattaaccttgtagaaaacagtccagtttaaggaatacaaagcagcccttcctggctgtaaaccctagacttgaaagttttccagtattgaaaacttcaaagctgaatatttttatttccaagtatttaagtattcaacaaaccagaatcaaaatgccctccttcctgtcagctgtttcacacagaagctttaacacctcaagcatttttaatggagtggcttgatttgaccagagacaaatcttaaagagcaatcctaaaattaggctttcagtttccatttctgatgttcatggattggcattcttatggttcaatgcctccatgagattcaccaggggcacctaagacaaacagtcccaacctttccatataaaatgtattcaagcaaacatcaaataaatgtctgggatatttaacttaggcttcttccttcttgtcaccagttaaacccaatctgaatgctcagaccctaattatctttctatgttagaagtaaaagggtaagtaa

SEQ ID NO: 3944 - DNA, 1563 bp, Cricetulus griseus
gtgagcgagcatttccgtccgccatccctgccggttccgagtacttggtgtttctcttcccagctctctgcaatcatgaaggatgtgccggccttcttacagcagagccagaactccgggccgggccaggccgccgtttggcaccgtttggaggagttgtacacgaagaagttgtggcatcagctcacacttcaggtgcttgatttcgtacaggacccatgctttgcccaaggagatggtctcattaagctttatgaaaacttcatcagtgaatttgaacacagggtaaatcctttgtccctggtagaaataattcttcatgtggttagacagatgactgatcctaatgtggctcttacttttctggaaaagactcgtgagaaggtaaaaagtagtgatgaagcagtgatcttgtgtaaaacagctatcggagctctaaaattaaacatcggggatctacaggctacaaaggaaaccattgaagatgttgaagagatgctcaacaatctccctggtgtgacatcagttcacagtcgtttctatgatctctccagtaaatactatcagacaattggaaaccacgcatcctactataaagacgctctacggtttctgggctgtgttgacattaaggatctgccagtgtcagagcaacaggagagagccttcacattggggcttgctggacttcttggcgagggcgtttttaactttggagagcttctcatgcaccctgtactggagtcactgaggagcactgaccggcagtggctgatcgacactctgtatgctttcaatagtggtgatgtagataggttccagaccctgaagtctgcgtggggccagcagcctgacttagcagccaacgaggcccagcttctgaggaagatccagttattgtgccttatggagatgactttcacacgacctgccaaccacagacaactcacttttgaagaaattgccaaaagtgccaaaatcactgtgaacaaggtggagttgctggtgatgaaggcactctcggtggggttggtgagaggcagcatagacgaggtggacaagcgggttcatatgacctgggtgcagcctcgagtgctggatttgcagcagatcaaggggatgaaggaccgtctggagctgtggtgcactgatgtgaaaagcatggagatgctggtggaacaccaggctcaagacatcctcacctagtgccccatgttctgcagaccctgcttcaccttgcaaggcatttctgtggcccctgaaaccatcagcagagatctgtattgaattgggatggagtttgggatcccgctaagaataggaactgttcttgctataaaagcagagatctttcattgatgggggtttgaatacttgcagaaggctcctgtgttgggtgttttgtagcctgcaaggggtgaaaggggtactcctggcctaggtgatgaggaagagcaagaatgggaatggggtagtctctgtagtctccacccaaattcacttgagtgggccttttccaacattgtctgagaatgcccctataataaatgcctttgctttgtt

SEQ ID NO: 3945 - DNA, 1563 bp, Cricetulus griseus
cctgttctccaagggtagaggaggctgtgacggcggctggaggacgcggcgacggaggatggaggaaggaggcggcggcgtgcggagcctggtccccggagggccgctgttgctggtcctgtgcggtctcctggaggcgtccggcggcggccgagcgctgccccagctcagcgacgacatccccttccgcgtcaactggcccggcaccgagttctctctgcctacatctggagttttatataaagaagataattatgtcatcatgacaactgcacataaagaaaaatacaaatgtatacttcctcttgtgacaagtggggatgaggaagaagaaaaggattacaaaggcccaaatccaagagaacttttggaaccactatttaaacagagcagttgttcctacagaattgaatcttattggacttatgaagtatgtcatggaaaacatattcgacagtaccatgaagaaaaagaaactggccaaaaagtaaatattcatgaatactatcttgggaatatgttggctaagaatcttctgtctgaaaaagaacaagaaacagaagaaaaagaaaagttcagtgagatccccactaaaaatattgaaggtcagatgacaccctactatcctgtgggaatgggaaatggtacaccttgtagtctgaaacagaacagacccagatcaagcactgtgatgtatatatgccatcctgagtctaagcatgaaatcctctcagtagctgaagttacaacttgtgaatatgaagttgtcattttgacaccacttttgtgcagtcatcctaaatacagattcagagcctctcctgtgaatgatatattctgccaatcactgcccggatctccatttaaacccctcacactgagacagttggagcagcaggaagagatactgagggtgccatttaggagaaataaagaggaagatttgacatctgcaaaggaagagagatttccagccatccacaaacctattgctattggctctcagccattgctcaccgttggaacaacccatatatccaagctgacagatgaccagctcataaaggagttccttagtggctcttactgctttcatgggggtgttggttggtggaaatatgaattctgctatggcaaacatgtatatcaatatcatgaggacaaagataatgggaagacttctgtggttgtggggacatggaaccaagaagagcatgttgaatgggctaagaaaaacactgctagatcttatcatcttcaagatgacggcacccagacagtcaggatggtgtcacatttttatggaaatggggatatttgtgatataactgacaaacccagacaagtgaccgtaaaactaaagtgtaaagagtcagattctcctcatgctgttactgtgtatatgctcgagcctcactcctgccagtatattcttggggttgaatctccagtaatctgtaaaatcctagatacagcagatgaaaatggacttctttctctcccaaactaaattaaaattgaagggaagaaagatgattcaaagtccttgcttcctcctgacca

SEQ ID NO: 3946 - DNA, 1562 bp, Cricetulus griseus
aagatccctcggatgaaaatagaaaagaagttccaatcaccattgtctaggagaaactaccttttccctatttgcagaccagacgcctcagatggaaatggtacaacagtggtttgggaatctgcaaatgaatgctcatttgggagaaactaatgagcacaaaaccgataacccaagcagagatttccaggttctgctaatgttcatcctgtaaaccaagctgagtacgacaaagtttactatgactgcacatcatagtaaacctgagattattcaacaagagctggccttccatcctcattctgaacaaagcaagaagaggagtatggagtcaacactgggtcaccagaaaccttccttacgaagcattacatctcctttgattgctcacagattaaaaccaatcagacagaaaaccaaaaaggctgtggtgagcatcctagattcagaggaagtatgtgtggagcttctaaaagaatgtacatctgaaggacatgtgaaggaagttcttcagatatctagtgacgggactatgatcactgtttattacccaaatgatggaagaggctttcctcttgctgataaaccacccttgcctacagacaacatcagtagatacagctttgacaatttaccagaaaaatactggcggaaatatcagtatgcttccagatttattcagctcgtaaggtctaaaactcccaaaatcacttattttacaagatatgctaaatgtattttgatggagaattctcctggtgctgatttcgaggtttggttttatgatggagccaagatacacaaaacagaagatttaattcacatgattgaaaaatctggtaaatcttatactttaaaaaatgaaagtgaaattatgagcttgaaagaggaaatgaaaatatatatggaccatgctaatgagggtcaccgtgtctgcttggcactggaatctgtaatctcagaagaggaaaagagaagcaggagctcttcattcttcccaataattataggaagaaaacctggtaatactagttcacctaaagccttatcaccacctcctgtggacctaagctactcaaagggtgagcaagcatcaacgagcagattgagcatgaatagtgcggcatttccaacacaggcaccactacacaatccttctactgctacagctgaaggacttggccacacagccactgccacaggagcaagtttctcttcttcgagtcttcctaaatcagcacagcttttgaaatctgtttttgtgaaaaatgttggttgggctacacagctaactagtggagctgtgtgggttcagtttaatgatggttcgcagctggttgtccaagcaggggtgtcttccgttagttacacatcaccagatggtcagacaactaggtatggagaaaatgaaaaattaccagaatacatcaaacagaaattacagtgtctctcttccatccttgtgatgttttctaatccaactcctaagtttcattaattcaagtcctttcaggtgtctttatttaataaatgactttttggttggctttcaagtaaagtga

SEQ ID NO: 3947 - DNA, 1562 bp, Cricetulus griseus
gcctccccccttcctccacggccctgccccacgcagctgcagcagatgcatcatccacagcatcaccacgccaccacctcaggcccagcaatcaccagttgctcagaaccaaccaccacaactccaccacagtcacaaagccagcctttggtgtcacaggcacaagccctccctggaccaatgctgtatgctgcccaacagcagctgaaatttgtccgtgctccgatggtggtccagcagccgcaggtgcaaccccaggtgcagcaggtacagccccaggtgcagcagcaggcggcagtgcagacagcacaggctgcccagatggtagctcccggcgtccaggtcagccaaagcagcctcaccatgctgtcttcaccatcaccgggccagcaggtgcagaccccacagtcgatgccccctcccccacagccatccccacaacctggctcacaacccaactccaatgtcagctccggccccgccccatcccccagcagcttcctgccctagtcccctcaccgcagccttctcagagcccagtgacagcacgtaccccgcagaatttcagttgtccccctctccctggaccctttaaacacccctgtaaaccccagctctgtcatgagcccagctggctccagccaggcggaagagcagcagtacctggataagctgaagcagttgtccaagtacatcgagcccctgagacgcatgatcaacaagatcgacaagaatgaagacagaaaaaaggacctgagtaagatgaagagcctgctggacatcctcactgacccctctaagcggtgtcccctgaaaaccctgcagaagtgtgagattgccctggagaaactcaagaatgacatggcagtgcccacacccccaccaccaccagttctcccaaccaaacagcaggacttgtgccagccactcctagatgcagtcctggctaacatccgttcgcctgtcttcaaccattccctgtaccgcacattcgtgccagctatgatggccatccatggcccacctatcgtgtccccagtggtgtgttcccggaagcgcaggtttgaggaggatgagcggcagagcattcccaatgtgctgcaaggtgaagtagccaggttggaccccaagttcctggtgaacttggacccttctcactgtagcaacaacggcactgtccacctgatctgcaagctggatgacaaggacctccctagtgtgccaccactggagatcagtgtgcctgctgactaccctgctcagagcccaatgtggatcgaccatcagtggcagtacgatgccaacccctttctgcagtcagtgcaccagtgcatgacctccaggctgctgcagctccctgacaagcactcagtcacagccctgctcaacacctgggcccagagcatccaccaggcctgcctctcagccgcctagcgaacctgaacttccttctggctacagattttacaccacctaccagacgttactaagcattggcttcttcgagggcctgggttaggttagctttcctgcttttactttactgtcttgggggcctgcca

SEQ ID NO: 3948 - DNA, 1562 bp, Cricetulus griseus
gcggtttagtgtcctccattgttcaggattaagcgagccatgaggggtgacagaggacgtggtcgtggtgggcgctttggttccagaggaggccctggaggagggttcaggccatttgtgccccacatcccttttgatttctatttgtgtgaaatggcttttcctcgggtcaagcccgcacctgatgaaacgtccttcagtgaagccttgctgaagaggaatcaggaccttgcccccaattctgcagagcaggcttctatcctttctttggtgacaaaaataaacaatgtgattgacaacttgattgtggctccagggacatttgaagtgcaaattgaagaagtccgacaggttggatcatataaaaaggggacgatgacgacaggacacaatgtagctgacttggtggtgatactaaagatcctgccaacattggaagctgttgctgccctggggaacaaagtcgtggaaagcctgagagcacaggatccctcagaagttttgaccatgctgactaatgaaactggctttgaaattagttcttctgatgctacggtgaaaattctcattacaacggtgccacccaatctccgaaaactggatccggaactgcatttggacatcaaagtgttgcagagtgccttagcggccatccggcatgcgcgttggtttgaagaaaacgcttctcagtccacggttaaagttctcatcagattgctgaaggacttgaggattcgttttcctggctttgagcctctcacaccctggatccttgaccttcttggacactatgctgtgatgaataaccctaccagacagcctttggccctgaatgtggcatacaggcgttgcttacagattctggctgctggactgtttctgccagggtcagtgggcatcactgacccctgtgagagtggcaacttcagggtacacacagtgatgaccctagaacagcaggatatggtctgctacacagctcagactctggttcgaattctctctcatggaggctttaggaagatccttggccaggagggagatgccagctatcttgcttctgaaatatctacctgggatggagtgattgtgactccttcagaaaaggcttatgagaaaccgcctgagaagaaggaaggagaagaggaggaggagaatacagaagagccacctcaaggagaagaagaagaaagtatggagactcaggagtgaacttcctttactcttttctgcccaaggagagatgagcctcagccagctgccatggggctttatatggtggcatttctgtggcatagggagatggaaggaaggaaaacaaactgtaaagaaaagtgcctgccattccactgttgatagcggctaagcagcttaaagtctcccatttgtgactgtatatgccctccgtccatggaatgaaccagaatgccacactttcccaatatttaaacataaccactcccaatcagtactctctgttgaaatgttgtaaactgtcaagtgtctgggtaatttttttttttttttctaagaaaaatgattaaagtacttcctagcaaggg

SEQ ID NO: 3949 - DNA, 1562 bp, Cricetulus griseus
ccagcagggattcagccggatcaacatttaccacaacactgccagcaacaccttcagagtagtcgggggtcaagctacaggatcagcaggttgtgatcaattattcaatcgtgaaagggctgaagtacaatcaggcaacacccaccttccaccagtggcgagatgcccgtcaggtctatggcttaaactttgcaagtaaggaagaggcaaccactttctccaacgcgatgctctttgccctgaacatcatgaattcccaagaaggaggcccctccacacagcgtcaggtgcagaatggcccctctcctgaggagatggacatccagagaagacaagtaatggagcagcaacaacaccgccaagagtctctggagagaagagtctctgccacagggcccctcctcccacctgggcatccttcagtggcagccagcgccaccctctcatgtagtggacctccacccccacctccacccccagttccacctccacccacaggggctacgcccccgcccccgccccctctgccagctggaggagcccagggggccaaccacgatgagagctctgcttcaggactggctgctgccctggctggagccaagctgaggagggtacagcggccagaagatgcttctgcaggctccagtcctagtgggacttcaaagtccgatgccaaccgggcaagcagcgggggaggtggaggaggcctcatggaagagatgaacaaactgctggccaagaggagaaaagcagcctcccagacagacaagcccgctgacagaaaggaagatgagagccaaatggaagatcctagtacctccccatctccagggacccgagccaccagccagccacctaattcctcagaggctggccgaaagccctgggaacggagcaactctgtggagaaaccagtgtcctcgttgctgtccagggtgaagcctgctgggagtgtaaatgacgtgggcctggatgccttagatttggaccgcatgaagcaggagatcctggaggaggtggttcgagagctccacaaggtaaaagaggagatcattgatgccatcagacaggagctaagtgggatcagcaccacgtaagatggcgccatccctggaggatcgcaaggagccgcgctggccccagcacacagcgagcctgcagaagctgggatgtacttaagtctcaacctgtgattccatattaaaatgaggaaacaaacttcaactactggatttttagcgtatctgacacaaaacaccgggtctattcttttttgtattttatatttgcttatttaagtgtacatttctttggtttatagagagaacaccccaaaatcacctgctttattagatggcttccaagttttctcgtaggtggcactgttagctcctcagctggcagtgagcagctgggtgcagcgtggcctttccatgccacagagctgtcagaatgcagctcagccccagcagccacagtgtttcagtctgtccacgcagtgcgtgttcgtccacacgataataaacggttcactgtccaacaaaaaaaaaaaaaaaaaa

SEQ ID NO: 3950 - DNA, 1562 bp, Cricetulus griseus
ttctggctgtgaaaattactcgagaaaggaaggctttttattggctctggcaccattgacatgcttcctgatccaatactgagtaaggcttctagtaaaacagaagacagtgaccaaagggaagataatagtctgcctacctttaaaactgcaaaagaacaattatgggcagatcaaaaaaaaaagagccaccaatcccagcatgtatcaaaatcttcatatggtggtgtgaaaaagtctttgggagcagggaaatcgagaggaatatttggaaagtttgttcctcctgtatctaaggaagatggagatgagcagaatgaaagagtgaagtacaagcctactagggcagagtcaacagaaacagcacatgccattgatgaccgtctgaagaatgtggagccaaggatgattgaacttattacaaatgaaattatggaccatgggcctccagtacattgggaagatattgccggagtagaatatgccaaagccacaataaaggaaattgttgtgtggcccatgatgaggccagatatctttactggattacgagggccccctaaaggaattctgctctttggccctccagggactggtaaaactctgattggcaaatgcattgctagtcagtctggagcaacattcttcagcatctctgcttcatctttgacttctaagtgggtaggtgagggggagaaaatggtccgtgcattgtttgctgttgcaaggtgtcagcagccagctgtgatatttattgatgaaattgattctttattgtctcaaagaggagatggtgaacatgaatcttctagaaggattaaaacagaatttttagttcagttagatggagcaaccacatcttctgaagaccgcattttagtggtgggagccacaaatcggccccaagagattgatgaggctgcccggagaagattggtgaaaaggctttatattccccttccagaagcttcagccaggaaacagatagtagttaatctcatgtccaaggaactgtgttgcctcagagatgaagaaattgaactggtggtgcagcagtctgatgggtttctggagcagatatgacacagctttgcagagaggcttctcttggtcctattcgcagtttgcacactgctgacatcgctaccataagcccagatcaagttcgaccaatagcttatattgattttgaaaatgcttttagaactgtgagacctagtgtgtccccaaaagacttagagctttatgaaaactggaacaaaacatttggttgtggaaagtgaacacagcaattgaaaggagaagctggcatctaattccagtccttttacccttagcataggaagattggggtgtgctacttgtattgttgtggagtatagcctgaattccatgcctcagattagaatggtaacaggttaattactgattgatatattagtatgttgtatttgccttccagttattatgtgacatataagcttatttaaatagaatgaccttttatttctgagttcaaattagaactttagttttgtaataataaacttggctagtgtagt

SEQ ID NO: 3951 - DNA, 1562 bp, Cricetulus griseus
ggcgtgggaagcgggcgagcatggctgcgccctgctggctcgccctgccggtggctgcgctggccgccgtgatgctctggtcccccggcggctccgccgctggtcacatcgaggaccaagcagaacaattctttagaagcggccataccaacaactgggctgttttggtgtgcacatcgagattctggtttaattaccgacatgtggcaaatactctttctgtctatagaagcgtcaagagactaggtattcctgacagccacattgtcctgatgcttgctgatgacatggcatgcaatgcccgaaaccccaagccagccacggtgttcagccacaagaacatggagctcaatgtgtacggagatgatgtagaagtggactacaggagctatgaggtaactgtggagaactttttgcgggtgttaaccgggagggtgccacccagcactcctcgctccaagcgccttctttctgatgacagaagcaatattctcatttatatgacaggtcatgggggaaatggtttcttgaaattccaagattctgaagaaatcaccaacatagaacttgcggatgcttttgagcagatgtggcagaaaagacgctacaatgagctgctgtttattatcgacacctgccaaggcgcgtccatgtatgagcggttttactcccctaacatcatggccttggctagtagccaagtgggagaggactcgctgtcgcatcagccagatcctgcaattggagtccatcttatggacaggtatacattttatgtcttggagtttttggaagagattaatccagctagccagactaatatgaaggacctttttcaagtttgtcccaaaagtctctgtgtatctactcctggacatcgtactgacctttttcagagagaccctaaacatgtcctgataaccgatttctttggaagtgtgcggaaagtggaaatcacaacagagacgatcagtctgcaacaggcttcaccggtcgtggagagcagcaacgaggaacacgagatggtggaggagcccatagaccctctcaagtacgccgagcagctcccggtggctcagataatacaccagaaaccgaagccaaaagattggcaccctcctggtggcttcattctgggattgtggtctctcatcgtcatggtcttctttaagacctacggcatcaagcatatgaagttcatcttttaggcccaaggatgtcggaagcagagcagatggaagattgcagccttggatgaaagcataggtttttatatatttttaaatgggttcattttgtgtaaatttgggaagaaattaggaaaaactaattttaatgaacttttgactttatcatttaaaatattgttaatgcacttattttattgcccattaaatgtgtttttcattgtttgtgcgtgtgtgttatagaaactgtgggacaatgacattggaacataataattgatttttttatcctcttttcattgtaaaagtaagaattgtggaagtgttaattaccactaaagaataaaaactttaaaaaaaaaaaaaaaaaaaaaa

SEQ ID NO: 3952 - DNA, 1562 bp, Cricetulus griseus
  modified_base (278)..(278): a, c, t, g, unknown or other
  modified_base (517)..(517): a, c, t, g, unknown or other
gagggggagctgaagaccctggatctgacctagaggctttgtttcaagacttcaaagactgtgactttttttagcaaaacttacactagattccccaaatcctgtgacagtttttaatcttctccatccaatcttccagagacatgctcatgaacaagataccaaaatgcatgaagtttataaagggaatattattcccaaattgaataaaacactctgaagatgtctgctgccactgatgtgtgggcggtgtattctccagttttggatagactatnaagggatgaaaagtgaaaggacgaccaataagctttgtagactcctttcctctgtccatctggatttgccaacaacaagatatgcagagttacagaaagaactccagacttgtgatcaagtgtctcttaatacctcacaaagtgagtccagtgatttggctggccgaatgaagcggaagaaaactcttgaaggagtattatagtacagagtctgagccgttgacaaatggtggtcaganaccggcatcagaaacctttctacagttttcctcttcgtcttcagatgcagatgttcatgtcctggtgcgtgttcataaacatgtcagcatgcagatcaatcactaccagtatctgctgctgcttttcatacacgagtcgctcgttctgctttcggaaacgcaccttcaaatgctttagctggtaaaggcagtggacctatagagtcaatcttcagagctgaagattttccttcctgaagtaccttcagttcctgagaaccttgaagacagtaaggaggtccccacagccagatcacttaaatctcagccgtccttaagcgtaaaacctaaggagcgttgccccacccaccccagctccactctgtgttccttacaagaacatgaaaaggagcacctctcaggtctcgctggatgccatctcactggacagcatggtattggaagagcagttggagagtgatggaagtgatagtcatgtgttgttgggaaaagcaattaaaaggaactcaaatacaaattgccagagcccagcagagagtgtgaacaccaatgcaaatatgcagaattgtggggaagcctctcctgatgccatcagtactaactcagaattaccttggaaaccgtccagttggttctgaccagaaagctgtaatttcatctttagtacggagtttctaacatcttctcttttgaatattcaaaattttttggaagatgaaactgttgcaactgtaatgccaatgaagatacaagtttccaatacaaagataaatttaaaagatgacagtccccggagtagcacagtgtctctgcagccaagtcctgtgactgtgcatattgatcatcttgtggtggagaggaatgatgatggctctttccacatcagagattctcacatgtttaacactggaactgatttccaagacgataccaatgccaaccatgattcagtggtgctgaccagtggaaagtgtgacgtgaggaagcaacacagtgtcacccaggccactcagacaagtccagaggtcccttggccttctcagtc

SEQ ID NO: 3953 - DNA, 1562 bp, Cricetulus griseus
gagggagtgaagaaaaagacctctctgatgtcacagttgtaccaaagattgacacgccacggttgtccagctttctccgggcagcgtgccaggtggttgctgttttgcttgaagaggaccgtttgaccgctggacccagctggaatccccgggctcaagacaaagctctgagcatcagtgacagctcctcccaactgaacacgaacctgccgttccttcagggtaggaaagtcttctgtttgcatgcctctcgtgttcagagacagactgtggtctctgttcatgacttacctgaagagccatttgccccgtctctggacagccggcacctcctctgtgtgtgggatatttggcagccttcagggccccagaaggttctgatatgtgagtcaaaggtcacatgttgctgctttagccctggaaaaagcatttctgctgtttgcgggaacagagcatggttctgtggtgctttgggacctacgagaagactccaggatacacaactatgtgagactgagcaactgtctctgggccttcaggaccccaacgttttcctaccgatggagttctcatgtcagtgaaccaccgaagtacctcttcaagccatcgagccggtcgtcacatctgcctacaaaaaacagagcttggtgctctcacccttttcttctcaagaagaaatggcaggcttgtcatttcacatcgcctccctggacgagagcggcattctcaatgtgtgggtggttgttgaattaccaaaggcagatatctcaggttcaatgagtgatttaggtctgatacctggagggaggatcaaattggtgcacagtactgtgatccagttgggcaacagtatttcccataaagatagtgaattctggggggtccgcacaaacattaagtgtcaaatttctgccttcggatcctaatcactttgttgttggcaccgatatgggacttataaagcacagtaccagacaagattggagagtgtctcccaaggtgttcaaacctcagcaacttgttgccagacctataaaagttcacgtgatcgatttttcaccatttgaagaaacagtattcctggctggctgttcggatggaagcatcaggttgcaccagctggcgtctgagaggccagtcatgcagtgggacagcagcactggtggccgctctgtgatgagcctgcagtggtccccaacaaggcctactgtgttcttggtccaggatgatgcatccaggatccatgtctgggacctgcttgagaatgacctgggtcctgtggctcagcagtccatctttccagacaggcttgtggccatgaccgtcatgggggatccggagaaggccagcggtagctctgtggccctggtgttggccagggtctctggcacagttgacatccagtacctgaagaggcggtggactaccccagtggcggcagatgagcacagccagctgcacgtgcttcttcggaaatgagggtgtactgtcaggagaatgacaagcgcctaagcttgatttcaggacgcctcccttgacctccgtgtccatgtgactgtgtg

SEQ ID NO: 3954 - DNA, 1562 bp, Cricetulus griseus
  modified_base (799)..(799): a, c, t, g, unknown or other
  modified_base (1546)..(1546): a, c, t, g, unknown or other
ttagtgtgagtggtcactgtagatcccgggaacctcggtggccttagtccttcaggtggatcagcgtgcgacatgggaaagaaaaccaagaggacagctgacagttcttcttccgaggatgaggaggagtatgtggtggaaaaggtgttagacagacgcatggttaaggggcaagtggagtatctgttgaagtggaaaggcttttctgaggagcacaatacttgggaacctgagaagaacttggattgtcctgaactaatttctgagtttatgaaaaagtataagaagatgaaggagggtgaaaacaacaagcccagggagaagtcagaaggaaacaagaggaaatccagtttctctaatagtgctgatgatataaaatctaaaaaaaagagagagcagagcaatgatatcgctcgaggctttgagagaggactggaaccagaaaagatcattggggcaacagattcctgtggtgacttaatgttcttaatgaaatggaaagacacagatgaagccgacctggttctggcaaaagaagctaatgtgaaatgtccacaaattgtgatagcattttatgaagagagactgacgtggcatgcatatccagaagatgcggaaaacaaagagaaagaaagcacgaagagctaaaaggagggggtggtctctgtcatttctctttgtatataatacgtccaccttcctgcctcctcccttctcccatccctttcattcctacacatccataaaaacatgtgcttatcactgtgctccaaagagtcatgctggtctttcttttttnttttattaagtaatttatatctactttatgtgcatttaacagtcggttggttgccctcatctggctgcagtgaggtgactgaaagtaaaatgttacaatggacactgactgtgccagcctccccacttggtcttaaggctgatcttgggcaagtctttcctttcaatgcctcggttccccatctgtcaaatggggtgataacactgacctacctcatggggtgttgtgtgaggcattacagatgagagctgatgactcctttggagttgcctgtggaggatgccttgagtcaacattttagctgtcactgagctgtttccaagtttggaagcacttagtgaccttggtgtagtttctcgccccccacccctaaaagcacaaggtcctggctcccctggaggcccacactccagttctgttaggtgtactctgctcctaataggggtctctggaggatggggaaggaacagtctcatgtcctgccaagtagtagccagcagttgcctttccccttcctgctggccacattcccaccttctcacagaataggctttcagagactgtagaggctgggtttcctcagcattgtgccattctgagtaggaagcaggtcataccttgtagccaggtgtctgaatggaagtaagacattgaatctctgtgggcctttttggttggggggggcgggttagttgcgtttcttggttttattcagccaaactcgtctgtttttgatttcttaaaggntaagtggtctatatat

SEQ ID NO: 3955 - DNA, 1561 bp, Cricetulus griseus
  modified_base (930)..(930): a, c, t, g, unknown or other
acctgcactactggatcggaaaggaggccagcgcagagacccatggggccacagtcacctttgtgcagcgcctacaggaggatctgggagaccagatggtgctgcaccgagagtcacagggccatgagtctgactgcttccacagctacttccacccgggagtcatctacaggaagggaggccgagcctctgctctcaagcacacggagaccaacgcgtacaatgtccagcgactgttccacatcaggggaaggaagcatgtgtctgccactgaggtggccctgtcctggaacagctccgtctctaccatgtcagcgagaagggaatggacctgatagtccaagaattggcgacccgcccactgacccaggacctcctgcaagatgaaggctgctatctcctggaccagggtggcttcaagatttacatgtggcagggacgaaagtccagcccccaggacaagaaggctgggttcagcagggctgtgggcttcatccaggccaagggctacccaaaccacaccaacgtggaggtggtgaatgacggtgcagagtccaccgccttccagcagttgttccagacgtggtcgaaggagctagatgggaaaaaacccagagggaaaaataaactgatgcaggccaaactggacataggcaagctgcacacccagcctgagctagcagcccagctcagaatggtggatgacggctctgggaaggtggaggtatggtgagcccccccacttcctagccatcttccaggggcagctggtggtcttccaggggagtgcaggcaatggagggaagaggctgccaatttccaccacaaggctgttccacatgcaaggggccgatagccacaacacccaaaccatggaggtgccggcccgtgcttcctccctcgcctccagtgacatcttctttctgatcncaaaaaaacagcggctacctctggtttgggaaggggctggtaatggtgaccagcgtgagatggcgcggaaggtggtcactgtcttcacgggacataacatggaaaccgtgctggagggccaggagcctccccacttctgggaagccctcggaggccgggccccctatcccagcaacaagaggcttcctgaggagctctccagcatccaggcccgactatttgagtgctccagcccttcaggctgcctggtcctcacagaaatggtgttcttcagccaagaggacttggacaagtatgacatcatgttactagacacctgtcaggaggcctccagggattcccaggacagcccagagaatgatccagagctgggccttggcgtggatggcaagaaccccagcaaaagccccagcagtcactgcagcagctcagtggtcaatgggagcctgccccgggaaaggctggtacaccaggccgtggaggacctgccacagggtgtggaccctgcctgcaaggagttctatctctcagactctgactttcaagacatcttcgggaaatccaaggaggagttctacagcatggccaagtggaagcagctgcaagaaaaaagagactgggcctcttctga

SEQ ID NO: 3956 - DNA, 1561 bp, Cricetulus griseus
gtgtaatatggcgaagacctacgattacctgttcaagctgctgctgatcggggactcgggggtggggaagacctgtgtcctgttccgcttctccgaggacgccttcaactccacgttcatctccaccataggaattgactttaaaattaggaccatagagcttgatggcaagaggattaaactgcagatatgggacacagcaggccaggagcggtttcggacgatcacgacagcctactacaggggtgccatgggtatcatgctggtctacgacatcaccaatgagaaatccttcgacaacatccggaattggattcggaacattgaagagcatgcctctgcagatgtggagaagatgatactggggaataagtgtgatgtgaatgacaagagacaagtatccaaggagcggggagaaaagctggcacttgactatgggatcaagttcatggagaccagtgcgaaggccaacatcaatgtggagaatgcgtttttcactctcgccagggatatcaaagcaaaaatggacaaaaaattggaagggaacagcccacagggaagcagccacggggtcaagatcacagtggagcagcagaagaggaccagcttcttccggtgcagcctcctgtgaggacaaggtcaccgccatcctgagcctggctcagcccagctgactgtgcctgccccgggcgagcctccacctccactgctcggatacagccgcccggacacaattgagaaattgattattttagtaaccttctgatcttttccaccttcagagatggaacgagttagaattttgctgttttcctgtgtcatctgccagtcaggcctgtccatcccttgtcatattgccatcgatggagagaggtggggtgggagcattgtagccaccattcccagccttctgtcctgcccctctaccatagaagtgaggccagcagcggtgcccaacctgcctggccccataccccgagcaccgccacaagagccactgcaggccaagcctgacacctgccttcatctgttctcagttttggacaagtggcaaagaaccatgtcccctgtctccttacatgtcaaaccaaagggaagcacaaactaaggaaaatccatgtagaggattttggaagaagtggacggctctcatggccactgcaggatgggagtctgtggtccagcactgaggggactcaccaccactcacccacaaccactgtcactgggccacctgcctcaatggcaccaaaaccgcctccccgctcttctcatcctctggctggctccaatcggacgttccttttctagctgagatgattttttatttttccagattcctaacaccatgaaatgattccgtctttgattttctagcagcatacccaggtgatcaggaaccagcgtgactgccctggccacacaggggcacctggtccctgagacccagacaggcattccacggcacagtgctgccctacagtctccatgctgctgtcagtccaagctgtcagcatcaaaatcttcccttttttgaaattaaaaccaacgtaccagacaa

SEQ ID NO: 3957 - DNA, 1561 bp, Cricetulus griseus
ctcaaagcagtcaaaggctacttcactttaagacagcctgttgtcttgtggaagaaatggaccagttgcctgtgcatagcatcaaatgtgtgccactttatcatccttaccagaagtgtagctgtagtttagtggtagctgcaagaggctcctatgtgttctggtgtcttcttctgatctcaaaggcaggtctgaatgttcacaattcgcacgtcacaggccttcactcactgcccatcgtctccatgactgcagacaagcagaatggaacggtgtacacctgttctagtgatgggaaggtgaggcagttgattcccattttcacagatgttgcattgaaatttgaacaccagctgattaaactctcagatgtatttggctccgtgaggactcatggcattgcagtgagcccctgtggtgcttatctggccatcatcaccactgagggcatgatcaatggcctccatcctgtgaacaagaactaccaggtccagtttgttactcttaagacctttgaagaggcagctgctcagcttttggagtcttcagttcagaatctctttaagcaggtggacttgattgacttagtccgctggaaaattttaaaagataaacatatccctcagtttttacatgaagctttaggaaaaaaagattgaaagcagtggggtaacctattttggcgttttaagctttttcttctaaggattttgtaccagtcaatgcaaaaatccccttcagaggccttatggaaacccactcacgaggactcaaaaatcttactggttgactcacctgggatgggtgatggtgaggatgaacagcaagaggaaggcacttccaagcaggggactaaggctggcctgcaggagaggagcaaagagggtgacacagaggagccccctgaagactcactcactgccatgggagacaccggaggccgtgaacccatagaggagaagcttctcgagatccaagggaagattgaagctgtggagatgcacctgaccagggagcacatgaagcgggtcctaggagaagtgtacctgcacacctggatcacggagaacaccagtatacccaccaggggactctgtaactttttgatgtctgatgaggagtatgatgacagaacagctcgggtcctgattggacatatctccaagaagatgaataagcagaccttccccgagcactgcagtctgtgtaaggaggtcttaccattcacggatcgcaagcaggcagtttgttccaatgggcacatctggctccggtgctttctaacctaccagtcctgccagagcttgatataccgacggtgtctgctccatgacagcattgcccggcaccctgctccagaagatcctgactggattaagaggttgctgcagagcccttgccctttctgtgattctcctgtcttctgagtgtcagtgaggaagatggaggaacatggactcggctatagaaagtgccctggagcctgaggagctgtgtgctggaggaagcctggcacaggacggtggggagacactcttctgactggaagaagggaggtcat

SEQ ID NO: 3958 - DNA, 1561 bp, Cricetulus griseus
atttgtcctgaccggcagttgcgtcgctatgcagtgctggaggccagaggcccaagaggccatccaggagctgcttgctgtgctgtccccgttcaccaattcgaaagagcagcagcctggagaggccaaggacccacggggggccaggttccagtgtctgcggtgcagctgtgagttcaagccagaggagcccaggttgggactggagaatgaggagggctggaagcctctgtttcaaaacccagaatctcctgttgtgtgtccaaactgtgggagtgaccatgtggttctcttggccatgtctggggaaatccctagtagagagcagagccagggagacctggatgttgaggtgttcagtgactcagaggaggagttccagtgctgtaccaaggtgccagtggcattagcaggccacatgggggagtttctgtgccttgtggttgtgtctgaccgtaggctttatctgttgaaggtgacaggggccatctgcgggcctcctgcgagctggctccagcccaccctggccattcctctgcaggatctgagtggcatggagcttggccttgcaggccagagccttcggctagagtgggcagctgggacaggcagctgtgtactgctgccccgagatgccaggcattgccgtgccttccttgaggagctcactggtgtcttgcagtcttgcctcgcacccagaggaactgcatcagtgccacggaggaggaagtgaccccgcagcatcggctctggccgttgctgggaaaagagacttccgcagaggttccccagtttttctaccttcggaccttcctggctgaaggttcctctacctttcccgtgtccctgttgctgacgctgtcgacactgtacctattagatgaagaccctgcagggtcccaggcagaattcccactcgcagtggtgtctggggaagcctctgagcaggacccctcctcttggggccaggtccttccatgcaggtcagggagcagcaaccactcagcagtctgagctctgtgctagtctgtatcgaacaagccctttggacttgcggctgatcttctatgttggccactggctagtgaggccccaaatgacccacagcttaagagaaggacaagagaaatgaactggccctttggctgatctgtctagtagagcaggctcagtggtcagtgaaaacgtttctccagcactttctctcaggtataagtaaagttgtttccatgcttggtgtcatgggtggtacacagaaatgtcacccataaagcctgctatccctgaatctcttcctggaagcacccttgtttgcactatgaaacctgtctccaggcctgctctggcaaagtaggactactgactcggatacgcccagtcctcaagcaggttgagacctatcatgtggccttgcatgggatcactgacagtcaaagagctggacctcttcagactttttgttggatttctttttgagacagggtctcactgtgtaacctgctagccgggaactcactctgtagactaggctggcttgactcctagagatctgcctgcctct

SEQ ID NO: 3959 - DNA, 1561 bp, Cricetulus griseus
  modified_base (14)..(14): a, c, t, g, unknown or other
cagacaccaccacncccaacagcaacagcagctccaggttacttgttcagcacaaactgttcaggttgctgaagttgagccacagtcacaaccacagccttcaccagaacttttgcttccaaattctttgaagccagaagaagggcttgaagtatggaaaaactgggctcagaccaagaatgctgaactagagaaggatgctcagaacagattggcccccattgggaggcgacagttgctacgattccaagaagatctaatctcctctgctgtggctgaattgaattatggcctctgtttaatgacacgggaagctcgaaatggagaaggtgaaccctatgacccagatgtactctactacattttcttgtgtatacaaaagtacctttttgaaaatggaagagtagatgacatattttctgatctttactatgttcgtttcactgagtggttacatgaagttctgaaggatgtacagcccagagtcactccacttggctatgtcctgcccagccacgtgactgaagagatgctgtgggaatgcaagcagcttggggcacactccccttccacactgctgaccacactcatgttcttcaacaccaagtacttcctgttgaagacagtagatcagcacatgaagctggctttctccaaggttcttcgacagacaaagaagaacccctcaaaatcctaaggataaaagcacgagtatccgctatctgaaggccctcgggatccatcagactggccagaaagttacagatgacatgtatgcagaacagacagagaatccagagaatccattgaggtgtcccatcaagctatacgatttctacctcttcaaatgcccccagagtgtgaaaggccgaaatgacaccttttatctgacacctgagccggtggtggctcccaacagcccaatttggtactcagtccagcctatcagcagagagcagatgggacaaatgctgacccggatcttggttatacgggaaattcaagaagccattgccgtggccagcgcaaccaccatgcactgaggtgcctcagccacagcaaacgaatccaggaaaaccagacagacttttacactaaagaagaggcctccattttttctttttaattttagttatgatgcttttcaggctacttctgttaaaaatgtaaaagacaatgttggggctttgcatcttcatagacctgaacagaccccttggttcatggggctctctctgggttttctgagagccagatgttctaggaagtggctggctttttctttctctttttttcttttgtctggggcatggggaaagaggcttggactgttgggacaagtatgggcccttccctttctcaaggaaaatggagctgctgatgatgctcagacataagcttagcatcttaatgaaagaaaatgaggggaacttcaattatgattttattaaagacaatttctattccaccctcctttatgacaagtgacatagatattaaagttgtgcctgacggaactcttgtaacatacacttgtgtatcatataaagataccactctt

SEQ ID NO: 3960 - DNA, 1561 bp, Cricetulus griseus
gcatgctgggagtgtgtgtgcgctctcggctgcagcaggtgaagcagagcacaaggagcggtgagcatcttgtgtcctcatagtcgtcgtgggccggctttgccccggtgtagccaggctgtcctgcgagaggatttgagttggtcgaaatgagcaatcgtaaaaccaagggtaacagtgcagtacatccagaatgtctttcacaggtacaaagaattttacgtgaaagattttgtcatcagagtccacatagtaatttatttggagtgcaagtacaatacaagcatttaattgagctactcaaaagaactgctatcaatggagaaagtaattctgtacttattgttggaccaagaggatcaggaaaaaccatgttaataaatcatgctttgaaagaactcatggaaataagagaagtgagtgaaaatgtgttacaagttcatctaaacggactgatgcagataaatgataaaattgctcttacggagatcacaagacaattaaatctagaaaatgtagttggagataaagtttttggaagctttgctgaaaacctttcatttcttctggaagctttaaaaaaaggtaaccgtgctaacagttgcccagtgatcttcatactggatgaatttgatctttttgctcatcagaaaaaccagacactcctttataatctttttgacatttctcaatctgcacagacaccagtagcagttattggtcttacatgtagattggatattctggaactcttggaaaaaagagtgaagtcacggttttctcaccgacagatacatttaatgaattcatttgattttccacaatatatgaaaatatttaaagaacaattatctctacctgaagaattcccaaataaagtttttgctgaaaggtggaatgagaatactcagtctctctcagaagactcaactgtgcgtgaagttctacagaaacttttcaatgtcaacaaaagcttacggtcgttacatatgctgttgatgcttgctttaaatcgagtaacagtatcacacccatttatgacttcagcagatctaatggaggcacagcatttgtgtagcttggattctaaagcaagtattatacatgggctatcagtcttggaaatctgtcttataatagcaatgaaacatttaaatgacatctatgaagaagagccctttaattttcaaatggtctataatgagtttcagaaatttattcaaagaaaggcccattctgtttataactttgagaagcctgtggtcatgaaggcatttgagcatttacaacaactggaattaataaaaccaatggaaagaacttcagtcaattcacagagagaataccagctagtgaaactacttttggataatactcaaattatgaatgccctacagaagtactccaactgccctacagacgtcaggcagtgggcaacatcctcactaagttggctgtgaacattttaagtacatttctgtaaagaactaaaagctactgccctctatctaacaagatatgttattacattcctttgtttataaatattgtttatgagaaa

SEQ ID NO: 3961 - DNA, 1560 bp, Cricetulus griseus
tccctggacttcctggattacaagtccaactcggagccattctttatgatgatctccactccggcgccccactcaccctggacagctgcacctcagtaccagaaggagttccagaatgtctttgcaccaagaaacaagaacttcaacatccatgggacgaacaagcactggctaattaggcaagccaagactccaatgacgaactcttcaatccagttcttagatgatgcgttcagaaggaggtggcaaactctgctctcggttgatgaccttgtggagaaaactggtaaagagattggatggcaccggtgaactggacaacacatacatcttctatacctccgacaatggctaccatacaggacagttctctttgccaatagacaaaaggcaactgtaatgagtttgatatcaaagttccactgttggttcgagggcctgggatcaaaccaaaccagacaagcaagatgctggtctcgaatattgacttgggccccacaatcttggaccttgccggctatgacctgaataagacacagatggatggggtatccttactgcccattctgaaaggggccagtaacttaacctggaggtcagatgtcctggtggaatatcaaggagaaggccgtaacgtcaccgacccgacctgtccttccttgagtcctggagtgtctcaatgtttccctgactgtgtgtgtgaagatgcttacaacaatacctatgcttgtgtgaggacgctgtcgtcactgtggaacctacagtattgtgagtttgacgaccaggaggtgttcgtagaagtctataacataactgcagatccagaccaaatcaccaacattgctaaaactatagatccagagcttctgggaaaaatgaactatcggttgatgatgctgcagtcctgttctgggccaacctgccgaactccaggggtttttgaccctggatacaggtttgacctgcgtctcatgttcagcaatcatggcagcatcagaacgagaaggttctcgaagcaccctctgtagcagcctctgcagttggatccttgcacacccctttctcatgaagtggttgtagtaggagcccacgcctagaagagctctggcctggctgtttcaagtcttgtttgaaaaataacccggtcagctgacttccagtactgtgaatccaaccctgtgtcagaagtggctgaccctgtctcttccttcagatgacaaccaacactcctgaggtctttgtcctctccatgtcccttcatcttgggtgggcacagtgtgtgatgatctcccacgtggtcaagtctgaatctgtataactgttgagataaatggcaatactttaagggcgcagtgagtgatcttagctttacacagcctctgttcagctttaaacacttgggacccacagcttgaagtcactttagggatcccagaggccatgttggggtaatagccatggagttcattcctttacctcatgtgaccccaacaacttcggtgatactgagagacaaacaggcaatggaatggacacctctgctgtggctgctttagaggg

SEQ ID NO: 3962 - DNA, 1560 bp, Cricetulus griseus
gggatggcgagtcagcgagtgttcccactttcctgtgtggtgcagcagtatgcctgggggaagataggctccaacagtgaagtggcatgcctgctggctagcagtgacccactggcccagatctcagaggacaagccttatgcagagctgtggatggggacacacccccggggagatgccaggatcattgacaacagtatttcccagaataccttaggccagtggattgctgacaaccagaactgcttaggcacaaaggtcaaagacacctttaatggcaagctgcccttcctcttcaaagtgctctctgtggaaacagctctgtctatccaggcacaccctaacaaggagctggcagcaaagctgcatatccaggcaccacagcactaccctgatgccaaccacaagccagaaatggccattgccctcacctccttccagggcttgtgtggtttccggccagtggaggagattgtgaccttcctgaagaaggtgcctgagttccagtccctggttggagaggatgccacggaacagctgaagcagagcatgagtggggatcctgcagcaatggcctctgctttgaggaactgcttctcccacctgatgaagagtgagaagaaggtggtggtggaacagcttaacctgttggtgaaacggatctcccagcaagtatctgctggaaacagcatggatgacatctgcgggaagctcttgctgcagctgcaccagcagtacccaggtgatattggatgtttcgccatctacttcctgaacctgctcaccttaaagccgggggaagccatgtttctggaggccaatgtgccccatgcctacctgaagggagactgtgtggagtgcatggcatgctcagacaatactgttcgtgctggcctgacacccaaattcattgatgtgccaaccctatgtgaaatgctcaactacacacctagccccagcaaggacaggctgtttaccccaacacggagtcaagatgacccctatctctctatctatgaccctcctgtgccagacttcactgttatgaagatggaggtccctggctctgtcactgaatacaagatcttggcactagactctgccagcatccttctgatagtccaagggtcagtgacagctaccacacccacagttcaaggagaaatccctttgcagcgtggtggagtgctcttcattggggctaatgagagtgtctcactgaagctttctttgcccacggatctgctgatattccgggcctgctgtctgctgtagagaccagtcttcccaccctctctgcccatcacctatatgctggccagttccacctttcaggcccagcccaacccctgtccctattgtgcactttttggtgcatgctggaatagtagaatagagagcttggcattagtgactccagagcatgcctaggttagaccatcttcaggatgaggggtctgtgtcaagactgaggcctgcactccactgtactctctcaacactccttgctacctctgagccagatgtgtctattcaggaggcaacaactctgccccagct

SEQ ID NO: 3963 - DNA, 1560 bp, Cricetulus griseus
cagttacttcagatctaccactgttagatacttcctgccacccatcctagtagtagctcttgggaaggagttacagccaacaacagccaaaccgtctcccaccccaactcctgtggttgccctttccatcatgccgaagaataaaggtaaaggaggcaaaaacaggcgcagaggcaaaaatgaaaatgaatctgaaaaaagagagttggtgtttaaagaagatggccaagagtatgcgcaggtgatcaaaatgctgggaaatggacggttggaagcaatgtgtttcgatggtgtgagaaggctatgtcacatcagaggaaagttgagaaaaaaggtttggataaatacatcagacattatattgattggtctgcgagactatcaagataacaaagctgatgtaatcttgaagtataatgcagatgaagcgagaagtctgaaggcatatggagaacttccagaacatgctaaaatcaatgaaacggacacatttggtccaggggatgatgatgaaatccagtttgatgatattggagatgatgatgaagacattgatgatatctaagctgaactaagcatgttacattccaagttttctgaagatagttctacatacttgggatcttgaccttcggctgttaagtaaaacttcttttagcatgagtatgacttgttaaagcagattgatgtattttaaattttaaggtattatatttctttgaaaaccaaagatgttgagttatcttaaatgttaacactttgttcttctagatgtaattgaacttaggggtacagcagtatacactattgagactgcctttccatctgtgtgttttgcgtcagcggttctgcgaggtgaacatcatgggccgaagtgtgcccctagttcccacacatctgcttcaggccccatgtcctagtcatctggctgtgctttgagacttgagtcagatttacagataatgtaagtctgcatttggagtcagatagaatgcagctgtttttgtatttatggagccatgccattttatgctttgcatgttctatacactcattatagcctttatgttgttgctgcccataaataggcttttcacagtgcagtttttaaattacatggctagcagttttgagttttaaaaattagtcattgcagaaattaaatgcttaggtgataatcaattgtcttgactttagaaatacaatagttgacaatgtttatatgtaatttttacttttctaatgcatacccaaaaatagaaaatgaaaattgaaagagaaatatgttttgatacttgcgtagagaaattttcaaagaaggtggatgttgatagcacataacatttttttactttgcaaagtaggttgggtaaaaaaaatcattttcaaaaagttagctactgtattgaagctttgagtaatttaatgctatagataggttaaagttaattacataattgtataaatgaagttttccttaaactaagcttaggttaaaaggaaaggagtcacagcttaatgaaaaggcagtttctattttctgaatggaggagtccagaa

SEQ ID NO: 3964 - DNA, 1560 bp, Cricetulus griseus
cgtggaggagcaggcagcatggggcagtcggggcggtcccggcaccagaagcgcgcgcgcgcccaggcccagctccgcaacctcgaggcctacgccgcacagccgcactcgttcgtgttcacgcgaggccgggcggggcgcagcgtccagcagctcagccaggatgtgcggcgggtcatggagccgctcaccgccacccgcctgcaggttcgaaagaagaactcactgaaggactgtgtggcagtagctggccccctcggtgtcacgcacttccttatcttgagcaaaacagacagcagtgtgtatttgaagctgatgcgcctcccgggaggcccgactttgaccttccagatcaacaagtacacactggtacgagacgttgtctcttccctgcggcgacaccggatgcacgagcagcagtttaaccacccacccctcctggtgctcaacagttttagcccccagggcatgcacatcaagctcatggccaccatgttccagaacctgttcccatccatcaacgtgcacacggtgaacctgaacaccattaagcgctgcctccttattaactacaacccggactcccaagagctggacttccgacactacagcatcaaagtggtgcctgtgggtgcaagccggggcatgaaaaagctcctacaggagaagtttcccaacatgagccgactgcaggacatcagtgagctgctggccacgggtgcggggctgtcggagagtgaggcggaaccagatggtgagcacaatatcacagaactgccccaggctgtggctggccgtggcaacatgcaggcccagcagagtgccatcagacttacagagattgggccccggatgacactacagctcattaagatccaagaaggtgttgggaatggcaatgtcctcttccacagttttgtgcacaagactgaggaggaactgcaggccatcttggcagcaaaggaggagaaactacagctcaaggcacagcgtcagaaccagcaggctgagaacttagaacgcaagcgggaacttcgagaagcccacaagaagaagagcctggcaggcatgaagcgagcccggacaaggacagatggcgacagtgatgccgaggaccctggggcacctctagaggcggtgggggcagggcggctggaggaagaggaggaggatgacgctgagtattttcgccaagctgtgggcgaggagcctgatgaagacatgttccccagagtggccaagcggagacggcagggaggtcctccaggcaagaaacagcaagagaagaaacagaggcctgtttcaggcagaggtcaaggtggcaactggcggcctccaaaaccaaagggtagatcccaaggagtcaagaccaagctgggacccagagccacacgccgcaacctggggcagccatcaagaagaacctgatcctgcttggcagtggatggaccatggatgccccacattggggcttgggagctgccctgggctccagtgcagcctggtttcctttcataaaggaactacccagttctcacctccaataaacctcaacatggt

SEQ ID NO: 3965 - DNA, 1560 bp, Cricetulus griseus
  modified_base (1498)..(1498): a, c, t, g, unknown or other
  modified_base (1502)..(1502): a, c, t, g, unknown or other
agacgacagggtagtagtgacactgtctaggccctgtccgacctcaggatctcaacctttgtttagactctagctaccttggctctgccaccccaggcagcagtagccaccctcctgtcattgccaccgctgttgtgaccctcaaggctgcgaatctgacgtatatgccctcatccagcggctctgcccgctccctcaattgtggatgcagcagtactagctgctgtacggtgacaacctacgacaaggatcaccaggcccagactcaagccattgccgctggcactgccaccaccgccataggaacctcgaccacctgccctgctaaccagatggtcaacaacaatgagaacacaggctctttaagtccatcgggtggggtgggcagccctgtgtcagggactcccaagcagctagccagcatcaaaatcatctaccccaatgacctggcgaagaagatgaccaaatgcagcaagagtcacctgtccagccagggtcctgtcattattgactgcaggcctttcatggagtacaataagagtcatatccaaggagctgtccacattaactgtgccgataagatcagccggcggaggctgcagcagggcaagatcactgtcttagacttgatttcctgtagggaaggcaaagactctttcaagaggatcttttccaaagaaattatagtttatgatgagaataccaatgagccgagccgagtgatgccgtcccagccacttcacatagtcctggagtccctgaagagagaaggcaaagaacccgtggtgttgaaagggggactcagtagttttaaacagaaccatgaaaacctctgtgacaactccctccagctccaagagtgccgtgaggtggggggcgccgcatctgcggcctcgagcatgctacctcagtctgtccccaccacccctgacatcgagaacgcagagctgacgcccatcctgcccttcctgttccttggcaacgagcaggatgctcaggacctagacaccatgcagaggctcaacatcggctacgtcatgaacgtcaccactcatctcccgctgtaccactacgagaaaggcctcttcaactacaagaggctgcctgccactgatagcaacaagcagaacctgcggcagtacttcgaagaggcctttgagttcattgaggaagcgcatcagtgtggcaagggcctcctcattcactgccaggcgggcgtgtcccgttctgccaccatcgtcatcgcctacttgatgaagcacacgcggatgaccatgactgatgcttacaaattcgtcaaaggcaaacgaccaattatttccccaaacctcaacttcatggggcagttgctggaatttgaggaagacctaaacaatggtgtgacaccacggatccttacaccaaagctgatgggcatggagacggttgtgtgacagcaggcacaatggaaggggccctggctgtgttcggagatgaactggagtgaaggaactttttntttntttgtttgtttgtccccttttatttgtctattcaaaacaaaacaaaaaaaaaaacaaa

SEQ ID NO: 3966 - DNA, 1560 bp, Cricetulus griseus
tggagcgtggaaactacccggtcaaaggatgctgagtcccgagcgcctagctctaccggactacgagtatctggctcagcgacatgtcctcacgtacatggaggatgcggtgtgccagctgctggagaacaaggaagatattggccagtatggcattgcccggttcttcactgaatattttaacagtgtatgccaaggaactcacattctctttcgggaattcagctttatacaagccacacctcacaatagggcatcatttttacgggccttctggagatgcttccgaactgtaggcaagaacggtgacttgctgaccatgagggagtaccactgtctgctgcagttactgtgcccagatttcccactggaactcactcagaaggcggccaggatcgtgctcatggatgatgccatggactgcttgatgtctttttcagatttcctttttgccttccagatccagttttattattcagaatttctggacagtgtggctgccatctatcaggatttgctgtcagggaagaaccccaataccgtgattgtgccaacatcctcgagtgggcagcatcgtcaacgaccggccttgggtgacgccggtgtgctggatggagtggaggcagcgctgttctatcagcgcctggaaaacctgtgtgaccgccacaaatacagctgcccgcccccggcccttgtcagagagatcctgagcaatgtccagaggctgactttctatgggttccttgtagccctttcaaagcatcatggaatcaaccaagcactgggagctttgcctgacaaaggagacttgatgcatgacccagccatggatgaggagctggaaaggctgctggtccaggtcccaggcctggtcaactccatcattgccacttctgaggccagctgcctgccctcccgaacccctccccgggttggttccccatggaaacccctccatcgctcccgcaaattggatgcagagagcgatggctccactgaagagacagacgagtctgagacttgaatctgaagggtcccatctgtggcctgtaccttgctcctacccaccctgcttttgctgccctcaccagacttctccagcatcactgtgccgccctctgctggagagatgggtgaatgaataacagccctccagcccaattgagtgatcccagaaatctcgtaactcatgctctcgcttcagccttttgttggcagtgctgcttatgctttaagtacggtgtcttctcagccagccatgatcctcctcgtgagggtcattttccacaacagctcccatagaggaacatgaattagtaatgcagggtcttcatggtcaagggtgactcctgagagcacgtgctgggaagactatcaactgtggccttctgctggagaaatcagccactagctggaataagagggaggatgggcaagaatttcactttcaaaatcggcttcaagtttgtaatagtcaaatctgtgaaatgaataaagtcccttgtctctggtaagcaatgagtctaaagccagtaggctaaggggaggtaaaagggaaaa

SEQ ID NO: 3967 - DNA, 1559 bp, Cricetulus griseus
cactgtgcacccaccatgagtcttgacatccagtgtgagcagctgagtgatgccaggtggacagagctccttcccctgatccagcaataccaagtggtcaggttggatgactgtggtctcactgaggtgcggtgcaaagacatcagctcagccattcagtccaaccccaccctaacagagctcagcctatgcaccaatgagctgggggaccctggcgtgtgcctggtactccagggcctgcagaatcccacctgtaagatccagaagctaagcctgcagaattgcagcttgaccgaggctggctgtagggtcctgcctgatgtgctacgttctttacctaccctgcgggagctacatctcagtgataatcctctgggagatgcaggtctgaagctgctctgtgaaggacttctggacccccaatgccgccttgagaagcttcagttggaatactgtaacctcacagctaccagttgcgagcctctggcttcagtatttagggtgaaacccaacttcaaggagatagtgttgagcaacaacgacctccatgaggctggtgtccagatgctgtgccagggcttgaaggactctgcctgtcaactggagtcactcaagctggagaactgtggtatcacatcagccaactgcaaggatctgtgcgatgtcgtggcctccaaagcctcactacagcaactggacctgggcagcaacaagctgggtaatgcaggcattgccgcactgtgctcaggactgctgctccccagctgtaggatcagaactctgtggttgtgggagtgtgatatcactgcagagggctgcaaggacctgtgccgtgtcctcaggaccaagcagagcctgaaggaactcagcctggctggaaatgagctgagagatgaaggtgcccagctgctgtgtgaaagtctgctggagcctggctgtcagctggagtcactgtggataaagacctgtagcctcacagctgcctgttgttcccacatatgctcggtgttgaccaagaaccgttctctgctggagctgcaaatgagcagcaacccactgggggacttgggagtcctggagctttgcaaggccctgggccagccagacactgttctgcgtgtgctttggctgggggactgcgatgtgaccgacaatggttgcagcagccttgccacagtcctgctgcacaaccgcagtctacgggaactggacctcagtaacaactgcatgggggactcaggtgtcctgcgactggtggagagcgtcagacagcccagctgtgcccttcagcagctagtcctgtatgacatttactggacggaggaggtagaagaccagctgcgggccctggaggaggaaaggccatccttgagggtcatctcctgagatgtgcacctctggacacacgacattaatgcagccccaggatgtctggctctgggtgtcctagtgttgactggggataagcagtgtaatctaattacagcagagaacttgagacactttataactattaaaacacaatgaaggcaaaaaaaaaaaaaaaaaaaaaaaaaaaa

SEQ ID NO: 3968 - DNA, 1559 bp, Cricetulus griseus
tgtgcctcagtgaatgccatggcctgggagtgccctgcccagctgctctcacctgcaaagccagacttaatatggcaagtacaggatgccaagcccacagctgccccaggaggacatcagcctggcctcccagtctgcactgagcagctgcctctgatccctaggccaagcagaaggaactgttgacagcctgaagggctgaacatgttgcctaaggcagtaaagcgaagtgagcctaggaacacaagttcaacggctgataataaaccaaccgagcgaatagccacagtgtcgcctactcctgtcacatcgaccacagggacctgggcagccagcctgaactctaccaaagtgacagcagagatgacaacacaccagacaaacacaagcattccaacaaccagagatggcactacagacagtgtgacctccagaactcttgcactacctacattgtcaagcccctcatctctgggaaactctacccatcaccactgctggactttcctctctcagcacaccacgtgcagaagtgccaagtacaaatgccagcataccaccaccaacagctacggtggcaacagtggccccacataccatgactgttgctgcaggcaccatgaacacaagcggtcccacaagtactctgagtcctgccaaaagcacacctccaaacacatccaccatgaacaccatacccacctcaggtacccagatacaaggtaccaccattcaggtgacaacagagcagccagtgcgtagcacagcaaatagattaacacctagtccttcaaataccaccctggagcccaccaccacccagatacaaaccaaggagccaactgccagcacagtgccagtgtctcctaccaaccccacccctgaagtggcagccacatccccgaccacacagccaagccctacattatctacacaggggaccgttggaccaggcatacccctgacaacagagcgggtggaaaccaaagccacagctggtactgcctctgctgggctaacacccaggagctctggggaccctaaggtgcaaaccacagactcctgtcagctcagcacccaaggtcagtacctggtggtcaccactgaacccctcactccatccttggtgaacaaaatgttacttttggcggtgctcgttcttggggtgaccctcttcatcgcagtcctggtgatgtttgccctgcaagcctatgagagctacaagaagaaggactacacacaggtggactacctgatcaatggcatgtatgctgactctgagatgtgagggaggccagcctcctccatggccttctattgcctcagaccaaaccaagtgcttccagatctttttggttgcaatctcagaactatgccagatgcttagacaaacttaaattgctatcagatcaactccatgatcgtgagagagctgccttttcatatttatttttctaaacgatcacatatgcaggagtggccagggtcgagggggcctggcccacttggctctcgatgtgtgaaatcttgaccagaattaaaagcagtgaccgctctcc

SEQ ID NO: 3969 - DNA, 1558 bp, Cricetulus griseus
agctggtccgtaagatctcgtccccttcgccgccccgaggggtgcactactcgattggccatggacgatacgctgttccagttgaagttcacagcaaagcagctagagaaactagcgaagaaggcagagaaggactccaaggctgagcaggccaaagtaaagaaggcccttcagcagaaaaatgtggaatgtgcccgtgtgtatgctgaaaatgccatccgcaagaagaatgaaggtgtaaactggctccggatggcatcccgtgtggatgcagtagcctccaaggtgcaaacagctgtgaccatgaagggggtgaccaagaacatggcacaggtgaccaaggctctggacaaagcgctgagtgccatggatcttcagaaggtgtctgcagtgatggataggtttgagcagcaggtgcagaacctggatgtgcacacatcggtaatggaggattctgtgagctctgccaccacgctgaccacacctcaggagcaggtagacagcctcattgtacagattgctgaggaaaatggcttggaggtcttagaccagctcagtcagcttccagagggcgcttctgccgtgggcgaaagctctgtgcgcagccaggaggaccagctgtctcggaggttggctgccctgagaaattagcatgccctgggcaggtgctgtctcccttgttctgtgatgtactggagtcttctgcctcactctgcgctcaactttctccaacccctcatagctgccttggctcttctccaacctgtcaggctgggcgccttagaactgagccttaggttgggcagtgggcctctgtcctggtattgaatttgcacaagtgtgtaggtgactcatgtgacttgtgggccacagctggaagatggcaagctctgttttgtcctctgcctatgtgaattgacagacagggtttggccagaagatgtgtggacttcagcccagtgctttggggccttcagatcacaacgaacgcacacctgctgcttgccgtggccagtgagggtcagagccactcctttgccaggcagctcttggaagcctttcccccatctctgcagacaggaaattctgttgtgtgacagccctgagtaggttcctgtggacttttgtgcatcagaaatgtccagtgccaacactgaccagggcctttgcaagatggttactctcctccatcttcccagggttgagctcttggctaccactgtcagctggctgagtctacctgggcttgctgtccctcagctcccttccccagctcacaggaacagaactggcaccaatctcaagtccaggtgttccctccctagagatcctcacccttcctcagcagctgcctctggaaggtcttcgggctgcttgggctgagcggtctgcctgatgggctgctgttttattttctgtctcctgaagtttactcatgttcttaaaactcctggtgattttgttcttttgccaaagtagaaagcacacagcagatggggtgtgtttgtcccagccttcttcacaagctgagcagtacagtactgcctacagggttaca

SEQ ID NO: 3970 - DNA, 1558 bp, Cricetulus griseus
gagcgcgatcctaaccgagtcatgtggctggaacttctcctggcctcagtgctgggccttgtcatctactggtttgtctcccgggacaaggaggaaaccttaccacttgaagatggctggtggggcccagggtcgaagccctcagccagagaagatgagagcatccgacctttcaaggtggaaacatcagatgaggagatcaaggacttacaccacaggatcgatgggttccgggcatccccgcctttggagggcagccgcttccactatggcttcaactccagctacctgaagaaagtggtgtcctactggaggaacgagtttgactggaggaagcaggtggagaccctcaaccagtaccctcacttcaagaccaagattgaagggctggacatccacttcatccacgtgaagcctccccagctgccctcaggccgcaccccaaagcccttgctgatggtgcacggctggcctggctccttctatgagttttacaagatcatcccgctgctgactgaccccaaggcccatggcctgagtgacgagcatgtgtttgaagtcatctgtccctccattcctggctatggcttctcagaggcatccagcaagaaaggcttcaatacggtggccactgctaggatcttctacaagctgatgtcacggctgggcttccagaaattctacattcaaggcggggactggggctccctcatctgcaccaacatggcccagctggttcccaaccacgtgaaaggcctgcacttgaacatggcttttatctcaagaagtctctacaccctgacccctctcctgggcccgcgtttcgggagatttctcggctacactgagagggatatcgagctgttgtaccccttcaaggagaaggttttctacagcatcatgagggagagtggctacctacacatccaggccaccaagccagacaccgtgggctgtgctctgaatgactcacccgtgggcctggctgcctacatcttagaaaagttctctacttggaccaagtcagaataccgtgacctggaggacggaggcctagagaggaagttctccctggaagatctgctgactaacatcatgatctactggacaacaggaaccattgtctcctcccagcgcttctacaaggagaacatgggccagggcatcatggtccataggcatgagaggatgaaggtctttgtgcccactggctattctgccttcccttcagagatactgcatgctccagaaaagtgggtgaaggtcaagtaccccaagctcatctcctattcctacatggaacgtgggggccactttgctgcctttgaagagcccaagcttctagcccaggacatccgcaagttcgtgtccctggctgagctgcagtgatgtcgctagctacccacatggctttagcagcagccctggttcctcctcagtcatgctgaggggagatgccccactgcacacctgtgttaagctacatggctttgatgataaatgggtttatttctaaaaaaaaaaaaaaaaaaaaaaaaaaaaaaaaaaaaaaaaaaaa

SEQ ID NO: 3971 - DNA, 1558 bp, Cricetulus griseus
aagctcttgagtcgaagtcaccacctcgcggatgacccggtttgtagctgctggttcaagtgatctcacctgtccaacgctatggcctggaccaagtaccagctgttcctggccgggctcatgctggtcaccggctccatcaacacgctttcagcaaagtgggccgacaacttcagagctgaaggctgtggaggaagcaaggagcacaacttcgaacatcccttcctccaggcagtgggcatgttcctgggagagttttcgtgcctcgctgccttctacctgctccagtgcagagccacaagacaatccgactccagtgtagagccgcatcagaccttcaacgccctactcttcttgcccccagccctgtgtgacatgactggaaccagcctcatgtacgtggccctgaacatgaccagtgcctcaagcttccagatgcttcggggtgcagtgatcatcttcacaggcctgttctcagtggccttcctcaaccggaggctggcactaagccagtgggtgggcatcctggccaccattgtgggactggtggtggttggcctcgctgacctcctgagcaagcatgacagtcaacacaagctcagcgaagtcatcacaggtgatttgttgatcatcatggcccagatcatcgttgccatccagatggtgctagaggagaagtttgtctacaaacacaatgtccacccgctcagggcagtgggcattgagggcttctttggctttgtgaccctctcgctgctcctcgtgcccatgtactacatcccagctgactcctttagtgggaaccctcgtgggatgctggaggatgcactggatgccttctgccaggtgggccgacagcccctgattgccctggctctgctgggcaacatcagcagcattgccttcttcaactttgcggggatcagtgtcaccaaggaactgagtgccaccacccgcatggtgctagacagcttacgcaccgtggtcatctgggccttgagccttgcactgggctgggagaccttccacccactgcagatccttggtttcttcatcctcctcatgggcactgccctctacaatggactgcaccatccactgctagcctgcctgtccaggagctggcatcccccaacccaagagggtgagcaagagagactgttgggtgacagccggactcctatcaatgatgccagctaagcccatggtgggggtctctgctgctaccagatgactgaggccatgcagactggtgggctatgagtgccctgtccccaaggcctcaccccacccctccctattgacccctttgggcaactgctgccagagaggatggcagaacaccaggtcttctcttattcctgaagcctataatgttgggacacagcctccacagacctgggtatggcatccactctcagccctccgagttcttcctgcaaaaatgtgaacttgaatggcaggaattataaccctaatatttctgtgtaatacactaacttgttacagtagattatctagcttttttgtttttgtttgtttgttttgttttgttttg

SEQ ID NO: 3972 - DNA, 1557 bp, Cricetulus griseus
gggaaaggggctggcccggaagaaggagaaaccctgaaaagaaaacagcaacaagccgagcggctgtgacagaggggaacaagatggcggcgccaaaggggaagctttgggtccaggcccagctggggctcccgccgctgctgctgctgaccatggcgctggccggaggctcggggactgcagcggccgaagcgtttgactcggtcctgggggacacggcgtcctgtcaccgggcctgtcagctgacctaccccttgcacacctaccctaaggaagaggagttatatgcatgtcagagaggttgcaggctgttttcaatttgccagtttgtggatgatggaattgatttaaatcggaccaaattggaatgtgaatctgcatgcacagaagcatattcccaacctgatgagcaatatgcttgccatcttggctgccaggatcagttgccatttgctgaattgagacaagaacaactcatgtccctgatgccaagaatgcatctccttttccctctaactctggtgaggtcgttctggagtgacatgatggactctgcacagagcttcataacctcatcatggaccttttatcttcaggctgatgatggaaaaatagttatattccagtctaaaccagaaattcagtatgcaccacagttggagcaggagcctacaaacttgcgagaaccatctttaagcaaaatgtcctatctacaaatgagaaattcacaagcacacaggaactaccttgaagatgaagaaagtgatagctttttaagatgcctatctcttaactctgggtggattttaaccacaacgcttgtcctctcggtgatggtgttgctttggatctgttgcgcagctgttgctacagccgtggaacaatatgttccccctgagaagctgagcatctatggtgacttggaatttatgaatgaacaaaagctgagcagatacccagcttcttctcttgtggttgttagatctcaaactgaagatcacgaggaagccgggcctctgcccaccaaggtgaatcttgctcattcagaaatctaagcttttttaaagaagtgtcattgacacataaacttccattcctcatagagctttttaaaatggtttcattggacataggccttaagaaatcactatttgaaatgcaaataaagttgttcaactctgtctgtgaagactttatttgctgtgactttacctgtatttttctagtcatttaagacacggacattgggttgtatttttattttactaatatcagtaggtattttgttagttgcattagctttggttttcttctgtcttagccaaattctatgagctgatcattgtcttccccacctcctgccgtaccctgcagtcatcttacttaataagccgaatgcttaggatgtgatgcctctgcctagaaatggcctccaaatgtgtactccaaatatagcagaaaatgttatttaatgacactacattttcaattgtattgaattgaaatcattaaactttatttgaataattatgtattgaaaaaaaaaaaaaaaaaaaa

SEQ ID NO: 3973 - DNA, 1557 bp, Cricetulus griseus
ccctatgagcgacggcttctcatcatggcggaccctagagataaggcgcttcaagactaccgcaagaagctgctagagcacaaggagattgacggccgtcttaaggagctaagggaacagttaaaagaacttaccaagcagtatgaaaagtctgaaaatgatctgaaggcactacaaagtgttgggcagattgtgggtgaagtgcttaaacagttaaccgaagagaaattcattgttaaagcaacaaatggaccaagatatgtagtaggttgtcgtcgtcagcttgataaaagtaagctgaagccaggaacaagagttgctttggatatgactacactaactataatgaggtatttgccaagagaggtggatcctttggtttacaacatgtctcatgaggaccctggaaatgtttcttattctgagattggagggttgtcagagcagattcgggagttacgagaggtaatagaattacctcttacaaacccagaattattccagcgtgtaggaataatacctccaaaaggctgtttgctgtatggaccaccaggcactgggaaaacacttttggcacgagctgttgctagtcagctggactgcaacttcctaaaggttgtatctagttctattgtagacaagtacattggtgaaagtgctcgtttgattagagaaatgtttaattatgccagggaccaccagccatgcatcatttttatggatgaaatagatgctattggtggccgtcggttttctgagggtacatcagctgacagagagattcagagaactttaatggagttactaaatcaaatggatggttttgatactctgcatagagttaaaatgatcatggctacaaacagaccagatacactggatcctgctttgcttcgtccaggaagattagatagaaaaatacatattgatttaccaaatgaacaagcaagattagatatattgaaaatccatgcaggccctattacaaagcacggtgaaatagattatgaagcaattgtaaagctttcagatggctttaatggagcagacctgagaaatgtgtgtactgaagcaggtatgtttgccattcgtgcggatcatgattttgtagttcaggaagacttcatgaaagcagtcagaaaagtggctgactctaagaagctggagtccaaactggactacaaacctgtgtaatttactatcagggttttgatggctgcatgacagacattggattaatataaaaataaagttaaggagactaatgtatgtattggcagtgatctcattaaaagtgaataaacatgtatgagcaacataatagtatgtaatttagtaattcttttaaaattgatacaaaagaaagttgtatgttaatgttgaatttattgcagcaatatttacaaaagacatattgaagcttttcatatttgctttgtgagcattttgtacaacattcaaatggtttgagatagtacgggagagcatttactatgacttattttgtactttgtgttcctcatcctggaaaaatggaataaaatgttttagttgtcc

SEQ ID NO: 3974 - DNA, 1557 bp, Cricetulus griseus
caaacttttaagtagcttgcttatgaggataggaaaaggcaggaagctaatgtctgtctcaaagacacaggacagctgtttgctcatcaaacctcaactgtgtgtgcaacagaagaacatggctcaagaaactaatcacagccaagcacctatgctttgctccactggttgcggattttatggaaaccctcgtacaaatggcatgtgttcagtatgctataaagaacatcttcaaagacagaacagtagcagtggtagaataagcccacctgcagcttctgtcagcagtctgtcggaatccttaccagtacagtgcacagacggcagtgtcgcaggcgctcagtcagcactagagtctacgtcctcatctcttcaaccaggccctgtatcaaatcagtcacttttatcagaatctgtagcaccttcccaagtggacagtacatctgtggacaaagcagtatccgagacagaagacctgcaaggacccagagcagagggccttgttcctcttgaatgtgatcctccatcttcagtatcagatacaacacagcagccatccgaagagcaaagcaagtctcttgaaaaaccaaaacaaaaaaagaatcgctgtttcatgtgcaggaagaaagtaggacttactgggtttgaatgccggtgtggaaatgtttactgtggtgtgcaccgatactcagatgtacacaattgctcttacaattacaaagctgatgctgctgagaaaatcagaaaagaaaatccagtagttgttggcgaaaagatccagaagatttgaactcctgctggaatacaaaatcctttgaccatctgcaaactaaaaattgacttgaggttttttttcctagtccttgggaatgtagagcaccgtatcttgcatagacctttgaatcatgcatgtcatcagaagaatagatttttgtttttgttttgaaaatgactctgaacatttatttccattgcagtttctgtggctgaaaagaagtattatccttttaagatcattttaattttagttgagtgcagagggcttttataacaaatgtggagaaattctctggagggctgtggtttttccagtattaaacatgcatgtgttgatcttgcagtttatttctcattgtgtatgtatatatagcttttctctgcagcacgattcccctttgataatgcccttctgggcacaactagttatcagtaactgaatgtatcttaatcactatggctgcttctgttttgttttgtttttcattaacagaggttatacatatgttagcatatagtttctttgcacccattatttatgtctgaatcatttgttacaggagaatatgtgctgatgagattctaaatttatgggaatttcctttttttttttttttaagtcaagggaaagagaagctgaatgcatttcactgctgactgcaagtttctttcagattattgttcattggtctgtgtgtgcacaatataaaggatgatctgaagtcattgtgctgtatttatgtttattcaccagtctttgattaaaataaaaaagaaaac

SEQ ID NO: 3975 - DNA, 1557 bp, Cricetulus griseus
ggcagggaatgaatgggttttggccgattgctggtgaggctggactcgggcattgaggcgtgagcggcggggcgagcagagcgtcatggaggacgacgcgccggtgatctatggcctggagttccaggcacgtgctctaacacctcaaactgcagaaacagatgccattcgcttcttggttgggacacagtctcttaaatatgataatcagatccacatcatagattttgatgatgaaaataacattataaataaaaatgtcctccttcatcaagcgggtgagatctggcatatcagtgccagcccagcagataaaggcgtgcttgccacctgctacaacaaaacttcagacagccgagtccaggcatgtgctgctgtgtggaggatgcccaaggaattagaatccggcagccacgagtcccccgacgaccctgcaagcactgcgcagaccctggagctgctctgtcaccttgacaacggggctcacggcaatgtggcctgtgtcgtgtgggagccgatgggggatgggaagaaggtcatttctctggctgacagccgcatcctgctgtgggacctccaggctagctcaagccaggctgtgctggccagctcagcagctctggaaggaaggggacagctgaggttcaccgcggggcggtggagcccacaccacaactgcacccaggtggccacagcaagtgacaccacccttcgaggctgggacacacggagcatgagccagatatactgcatagagaatgctcatgggcagctggtgcgtgacctcgacttcaaccccaacaagcagtattacctcgccagctgcggagacgactgcaaggtgaagttctgggacacacggaatgtcaccgagcctgtgaagaccctggaggagcactcccactgggtgtggagcgtccgctacaaccactctcacgaccagctggtcctcactggcagcagcgacagcagagtcatcctgtccaatatggtctctatctcctcagagccatttggccacctggtggacgatgatgacgtcagcgacccagaggagcaccacactgagaagagtaaggaacccctgcaggacaacgttatcgccacctatgaggaacacgaggacagcgtgtatgctgtggattgggcctcagctgacccatggctatttgcttccctgagttacgacgggaggctggttatcaacagagtccccagggcactgaagtaccacatactgctctagtggcccgtggcactgctggttggtacttggcaggttctcagaaatctgcaggtatgaggtaattccctttgcagactgatgcctccatgggtgagccaaccttgcttctacaggaactctaagggacatgtgtggagcttctgccagaagctcatctgaagctatcagcacagtgcctgactcgggagggaaccgtgctggacaggcctgccttgtggcatgaattgatggtggcccagtctcttcttggtgtctgttcactgttctaagggtgttgggagtttaacatttcatgagtgtctttccacctt

SEQ ID NO: 3976 - DNA, 1556 bp, Cricetulus griseus
ggcagcagtggtggtggcagtggcagctgcagcagcagcgctgcgaggaccgtgtggtgcagcgtttggagcaggacttcaaggtgacgctgcagcagcagaattcactggagcaatgggcagcctggctggacggcgttgtgagccaggttctcaagccctaccagggtagttccggcttccccaaggccgccaagctcttcctcctcaagtggtccttctacagctccatggtaatccgggacctgaccctgcgcagcgctgccagcttcggctccttccaccttatccggctgctctatgatgagtacatgtactatctgattgagcaccgcgtggcccaggccaagggcgagaccccaatcgcagtcatgggagagtttgcaaacctgaccacctcgctgaatcccttggaccctgacaaagacgaggaggaagaggaggaggaggagagtgaggatgacctgccacaagacatctccctggccgccggcagcgagtctcctgcgctgggcccagaagccctggagccacctgcgaagctggcacggagcgacacacgtggcctcttcgtgcaggccctgccctcgagctaagcctaagacatccctgccccctctcgcccacccaagctgccgctgctcagcttctgtggcttctctgtcccccttccagcccacgccagagctggagagggtccctgtgacagggaaggttgggggagccccccctcacatggagccggtacaatcatgggctgggctgggcagaaccgaagctgcaaacattgatacaaagacgtgccttaaggaacctgcccaggtgtccctctctttcctgccccagctcatagccctgttcccccacaacccaagggcagcaggtcagcacctcccctgcgaactgttaacttattctgctccctggctttgcacagcctgccccactgtcagcagcagcagccccactgctcccctttcatggtataagtgcaattaaagctgtgggtgttgcaccttctccagagctgggttctcctggccccacagcccagagaggggcatattgtgaaggccccccctccccggcctccagcttccaaagaggagcatccggctagctgcagggccaggtgctccagacctgaggccgcgccctgcgccttctgccctatcagcttgtgactgaaacctgcacccagagatgcttctcctcgtgccgtgcccccaagtaactattgtgtgattagtgagtgccgcttcaacggggttttttcccaaccatcatggccttatccgttcccgttttctcagtgtcttcgttctgtgatagatgtttatggaacaacaacaaaaaacaaaaaaagaaaatactggcctattgtatagaaatcactattttgtgtgctccgcgtgctacagcttttgggtatggtcctgcacattccccatggggcctcccttcccagtggtgaaagtatccacgcgcgtggtagtttagtgtgctgttttctacctttttgtagttcttttcttaaaactaataaatactgctgt

SEQ ID NO: 3977 - DNA, 1556 bp, Cricetulus griseus
gctggtgataacgtcccaggctcgtcagcctcctccgacactgaggaggacgcgcttcctgccaacaagtgcaagaaggagatcatggtggggccccagttccaagctgacctcaatatcctgcacttgaaccggcattgtgacaagatttatgaaaatgaagaccagctgctgtggagccccagcgtgctcccagagcgggaggtggaggagttcttgtacagggcagtgaagcggaggtggcaggagatggccggcccccagattccagagggcgaggtggttaaagacagtgaacaggcgctgtacgagctggtgaagtgtaatttcaacgtggaggaggccctgcgcaggctgaggttcaatgtaaaggtgatccgagacggactctgcgcctggagcgaggaggagtgcaggaactttgaacatggcttccgtgttcatgggaagaacttccacctgatccaggctaacaaggtgaggagctgcctcttgtgtccagccctgtggatctgagcgaggacactgcagagcccatggccccggcacaggtggccttgtcggtcactgaatttggactcattggcattggggatgtgaatcccttcctgactgggccaccccaccatgcccagcctccacattgcgttcagagcctttgtcacagtgcaacgtgatgacctgttgacccccggtcatctgtgggcgtgagtgctcagaatggacacggcagcactgccaggcctgcctgtcagtcttcctgacctctcccacgcaggcctgtgtggtgcctcctctgcttcagatcatgatgggactcagtgaagtggccagggccacacagaccccagacctcagcatccagcaccgccacagccccaggctgcttctgtgccgccgagccaacctggcagctgggcttggagagggcccatcccaacatggagccagccattgtccctcagccagcagaggctgggcaggcagtgctgcctgggactttgggcaggactcatcccgcaccagcagcctctgcccgggcaccctccacaggccagctctttccccaccgcagcgggcttgtggcccccagcctctgctttgcgtgggaccttggggcacagagccatatacctcgcccttgttggccaccctttctcggccctcaccgtctccacttcaggaaaagccgcactttataccccaactgcctcctgcccgcacccccaccctgcaccgaggtggggcttcagcagcctggtgggtgaggagcaggtggtccactaccttcctccccatccccttggggcatcttggggtacagctctggaagcaccaccctgccacgccccctgttcctgagggtctcatttctttggaggctcctagcaggatggctgggtccgtcttgtccttggcctccctcgtttattatgttggtgtttacaattcggagtggggtctctgggcaggcagctggacactgtgatgcgagactgcctttgcccaatgctattttatttattaaattgatttgaagcccaaaaaaaaaaaaa

SEQ ID NO: 3978 - DNA, 1556 bp, Cricetulus griseus
ggaggcccagcaccgggcccagcaagctagagccagttccagaggaaggactgtgtcttgatgtccacacactggaggagctgcaccgtcatggggtacccccaactgatgacagccccaagtataactactctcttcaacccaatggggattatgaatttggcctctgtgaggcccaggtgctacagctgtattcagaggacgggacagctgtggcctctgtgggggcaggccagcgctgcggcctcctgttggacagaaccaacttctacgctgaacaggggggccaggcttcagaccgtggctaccttgttcgcacagggcagcaggatgtgttgttccctgtggcccgggcacaggtctgtgggggcttcatcctgcatgaagccgtggccaccgagtgcttacaggtgggggagcaagtgcagctgtatgtggatgaggcctggcgaatgggatgcatggtgaagcacacggccacccacctgctgagctgggcacttcgtaagaccctcggacccaccactgagcaacggggctcccatctcaaccctgagcggctgcgctttgatgtggccacccaggccccactgaccacagagcagctccggacagtagagagctacgtgcaggaggctgtgaggcaggataaggccgtgtatatggaggaggtgcccctggctcacactgcccatgtccccggccttcgctcactagatgaggtgtacccagaccctgtgcgggtagtgtcagtgggcgttcctgtggcccatgcactggcaccggactcccaggccgcactgcagacgtcggtggagctctgctgtgggacgcacctgctgcgcactggggccatgggggacctggtgatcatcgggggccggcagctggtcaagggcatcactcgcctgctggccatcaccggggagcaggcccagcaggcccgagagctgggccagagcctgtctcaggaggtggaagcagccagggagcgactaagtcggggcagccaggacctgcaggaggctcatcagctatctaaggacataggacgtctcactgaggtcatagactctgctctgatgccccagtggcagcggcaggagctacagaccacactgaagatgctacagcgccgtgccaacactgccatccggaaactggagaagggccaggctgcagagaaatcccaggagttgttgaaacgtcactcagaggggcctctgattgtggacactgtctctgttgagtccctctcagcgctggtaaaggttgtgcggcagctgtgtgaaaaggcccccagcatgtcagtgctactactcagcccccagccctctggcagtgtactgtgcgcctgtcaggtgtcccaggctgccatgcccacattgacagcagaagcctgggcactggccgtgtgcagccacatgggaggcaaggcttggggctctcgagtgatagcccaggggactggacacactgctgacctggaggctgccctcgggacagcccgagcttatgcactcaaccagctctgacagagccgggctcctgaagct

SEQ ID NO: 3979 - DNA, 1555 bp, Cricetulus griseus
ttctgccagggattttgggagagccaattggaactcagggagagatacgggcctctgtgtgggtactatcttggccgtcggatgtatattgtcatttctgagccagccatgatcaagcaggtgttggttgagaacttcactaacttttccaacagaatggcctcaggtctggaacccaagcctgtagcagacagcatcctgtttttacgagacaaaaggtgggaagaagtcagaggtgccttgatgtctgcattcagtcctgaaaagttgaatgagatgacgcctctcatcagccaagcctgtgaacatctcctgagtcacttaaagctctatgcagcatccagagacacattcgacatccagaggtgttactgctgttacaccacaaatgtggtggccagtgtggcctttggcacccaggtggactcccagaacactccggaagatccctttgtgcaacactgccgtcaattctttgccttgcgtatccccaggcctctcctggctttaatcttatcatttccatccataatggtcccattggcccggattctgcccaataagaaccgagatgaactgaatggcttttttaacaaactcattaggaacgtgattgccttacgggaccagcaagcagcagaagagaggcggagagacttcttgcagatggtgctggatgcccggcactccacaagctctgtgggtgtggaagactttgacatggtcaaagaagccctgtcctctagcgagtgtccagtgaaccctccccaaagaggccagcctgcatccatgcctgagcctttaaccacggatgaaattgtgggccaggccttcctcttcctcatcgctggccaagagatcatcactaacacactctccttcatcacgtacctgctggccacccaccctgactgccaggagaggcttctggaggaggtggacctcttcgtggagaaacacccagcccctgggtactgcagcctgcaggaaggcctgccctatctggacatggtgattgcagagaccctgaggatgtacccaccagctttcagattcacacgggaggcagcccaagactgtgaggtgctgggacagtacatccccgcaggtgcagtgctggaggtagccgtgggtgccctacaccatgacccagagcactggccacaccctgagacctttgaccctgaaaggttcacagcagaggcccggcttcagcgggggcccttcacatacctgcccttcggagctggccccaggagctgcctcggggtgcggctggggctgatggtggtcaaactgacactactccaggtcctacacaaattccgctttgaagccagctctgagactcaggttccacttcagctagaatccaaatctgccctaagtcccaaaaatggagtctacatcaagattgtgtctcgttgacagaaggcaagtgaaaaaacaaacaacagaacaccttgtgatgatgacatctacagatgtttggaggacacccaggattcaaacaaaaacctgttgtggaaatggagatctttaaagaaatatatat

SEQ ID NO: 3980 - DNA, 1555 bp, Cricetulus griseus
cagatgggcatgctggttttcatcattagtggacttgtcattctggcctactgctcccaggccagcaatgagaggacctaccgaggaggtgggtatgggccgtgtgtggcaagctgacaggcgtgctgtgtgaggtagccatcgcagtctacaccttcggcacctgcatcgccttcctcatcatcattggggaccagcaggacaagattatagctgtgatggcaaaggaacctgaaggggccagcagcagcccctggtacacagaccgcaagttcaccatcagcctcactgccttcctcttcatcctgcccctgtccatcccccagggagatcggcttccagaaatatgccagtttcctgagcgttgtgggcacctggtatgtcaccgccattataatcatcaaatacatctggccagataaagagatgcgcccaggggacatcctgaccagaccagcttcctggatggctgtgttcaatgccatgcccaccatctgctttggatttcagtgccacgtgagcagtgtacctgtcttcaatagcatgcggcggccagaaataaagacctggggtggagtggtgacagctgccatggtcatagctctggctgtctacatgggaacaggcatctgtggcttcctgactttcggagctgctgtggatccagatgtgctccggtcctacccgtcagaggacgtggctgtggccgttgcccgagccttcatcatcctgagcgtgctcacctcctaccccatcttgcacttctgtgggcgggccgtggtggaaggcctgtggctgcgatacaaggggatgccagtggaggaggatgtgggacgggagcggcggcgccgggtcctgcagacgctagtatggttcctgctcaccctgctgcttgcactctttatccctgacatcggcaaggtcatctcggtcatcggaggcctggcagcctgcttcatcttcatcttcccagggctatgcctcattcaagccaaactgtcagagatggaagaggtcaaaccagcaagctggtgggcactggtcagttatggagtccttctggtcaccctgggagccttcatctttggccaaaccacagccaatgccatctttgttgacctcttggcatgaacactgccttccagaaaacatgtcaccaagaaccatctctcagagctgtgaagctaccccaagtcccacatcctgttccagctggtgacatcaggacacatttttccatggacagtcatgggacagaatcagcctcaaatctgtggacagctccccacccagctgccttccatccctcaccccttatcctctctcttttctttccttcatgggtgggttttgttatttgtcaaggggaagggatggctccaaaccctgtcacatcagcttgcccagcttcatacatctgtcaggcctggcctcagtgcctgggaatcccactgagttatacctatctcaggtgaggtcaggctggacactttgtactgtgcctaccttagcctctcacctacccctgctcacttttgcaagtcccaagtacaga

SEQ ID NO: 3981 - DNA, 1554 bp, Cricetulus griseus
tcttgcctgagtctagagtgggcttcagctcccaacttccgcccaccttcagcctgttctcctggcacagctgcctgcttggggtggcctcctgcctgctaatgatgttcctcatcagccctggggctgccggagggtcccttcttctcatgggcctgctttctgctcttctcaccgcacgaggaggacccagcagctggggctatgtcagccaagccttgcttttccaccaggtgcggaagtacttgctccgtctggatgtccgcaaggagcacgtgaagttctggaggccccagctgttgctcctggtgggaaaccctcggggtgccctgcctctgctacggctggccaaccagctaaagaaggggggactctatgtgttgggccatgtcactctgggagaccttgcagagagggcgggtcgcctgccctgagcacgctgttccctccacctcgggctcctgggagccccagggctctcagtccccaggactacgtggccacagtggcagatgctctcaagatgaacaagaatgtggttctcgcccgggcttgtggggctttgcccccggagcggctaagccgggggtccagcagcagcgctcagctacatcacgtggacgtgtggcccttgaacctgctgcggccccggggtgggcctggctacgtggacgtctgtggccttttcctgttgcagatggctaccatcttaagcatggtgcctgcgtggcacagtgcccggctccggatcttcctgtgcctggggcctagggaggctcctggggcagcggagggcaggctgcgggctctgttgagtcaactcaggatccgggcagaggtgcaagaggtggtgtggggtgaaggggccgagactggggagcatgaagaagaggaaggggactttgtgaatggtggtcgaggagatgaagaggccgaggctctggcttgcagtgccaacgccctggtgcgtgcccagcaggggcgaggcgcggcaggaggccctggggggcctgaaggaagggatgggggaggagggacctgctactgccctcaccttcctgtacctgcctcgaccgcctgccgatcctgcccgctaccccagatacctggcgctgctggaaaccctgagccgggacctgggccccacccttcttgttcatggagtcactccagtcacctgcactgatctctgaagcctgttgagacagggttgcatagagggcccaggcccattctgaacaatggacccccagtggactctgcccttcggatgatgttttaaggggaccatggtctcctttggatgggggggacgtagacactaattttgggtggctgttcccatagtcctgggaggacattgtggccctgcccttggcctgcctccacttccttcattggtgccttgaccagaggggctggtctcttctgcgactctaggctacctcagtgtccccatcctggccacagacgcaccgcctccctctccccacttccttgggtggtgatgtttgtgccgaaacactaaaaaaaacaaaaaaaaaaaaaaaaaaa

SEQ ID NO: 3982 - DNA, 1554 bp, Cricetulus griseus
cccgaccccgacccgcgtgtgcagcttccgcataggcgctcgctcggacccagtgcatcataattgaggaaaaatgatggaagaaagtggaatagagacaactccacctggaacccctcccctgaaccctgcaggcctggctgccactaccataccctccacggaagttcacttagctgcaaccagttccttctcatctcccaatgtgtccaggatggagtccttgccaccacatgcgtattctacacctcagccatccctgccccctgtgcagccgtcagcaccgcctccttttgtgccaatgtcgatgtctccagctccctcggttcccctgagtggcacttcaatgcccccctctgtgtcttcatcacctggcactgccttcagcagcccacctctatcccacttcccacctgcaacttccgcctccggtgcttttttatctgcaccacctgcaggtcctcctatatcggggttttctgttggtacagcttatgatatcacgaggggccacgctgggagagcaccccagacacctttgatgccatcgttttctgcacctccagtcacaggtattttgccagcccccatcactcaacaagccagtatgacttcgctggcacagggacctggaaccacgtcagccattactttcccagaggaacaggaagatcctagaattactagaagccaggatgatgcacctactggtgggatctggggttttatcaagggtgtggctgggaatcctatggtgagatctgtgcttgataagaccaagcattcagtagagagcatgattacgacgctggaccctggcatggctccatacatcaaatctggaggtgaactggatattgttgtaacctcaaataaagaagtgaaagtggctgctgtccgagatgccttccaggaggtctttggcttagctgtggttgtggggaagctggacagtccaatattgccccacagccagtaggctatgcagcgggattaaagggtgcccaggaacggatagatagcctgcggaggtctggcactatccacgagaaacaaactgctgtgtcagtagaaaacttcatcgctgagctgctgcctgacaaatggtttgacatcggctgcttggtggttgaagaccctgtgcatggcatccgcctggaagcctttactcaagccacaccagtgcctttggaatttgtgcagcaggcacaaagcctgaccccccaggactacaatctgaggtggtcaggccttttggtgacagtgggtgaagtcctggaaaagagcttactaaacgtcagccggactgattggcaccttgctttcactggcatgtctcgccgacagatgatctacagtgcagccaaggctgtggcaggcatgtacaagcagcgcctgccacccaggcccatgtgaaaccagctgctgtgaaatggagacctgctgtcacctttggctctgtgttagaggagactggatagcttcagagaatccaacagcttttacaattttcctacaggctgcagtcctttctcctgttcagcttctgctgct

SEQ ID NO: 3983 - DNA, 1553 bp, Cricetulus griseus
tcagatagtagttcagcactttagtgaagaacattacatcttttactttgcaggagaaactccagaacaagcagaggactggatgaaaggtctgcaagcattttgcagtttacgaaaaagtagtccggggacatctaataaacgccttcgtcaggtcagcagccttgttttacatattgaagaagcccacaaactcccagtaaaacactttactaatccatattgtaacatctacttgaatagcgtccaagtagcaaaaaactcatgcaagggaggggcaaaaacccagtatggtcagaggagtttgtctttgatgatcttcctcctgatatcaataaatttgaaatcacactcagtaataaaacaaagaaaagcaaagatccagatatcttatttatgcgttgccagttgagcaggttacaaaaggcatgccacagatgaatggtttcttctcagctcccatataccactaaagggcattgaaccaggatccctgcgtgttcgagcacgatactctataggaaaaaatcatagccagaagaagagtacagtgaatttaaagagcttatactacaaaaggaacttcatgtagtctatgctttatcacatgtatgtggacaagaccgaacactactagccagcatcctactgaagatttttcttcatgaaaagcttgaatcgttgttgttatgcacactaaatgacagagagataagtatggaagatgaagccactaccctatttcgagctacaacacttgctagtaccttgatggagcagtatatgaaagccactgccacacaatttgttcaccatgctttgaaagactccattttaaagataatggaaagcaaacagtcatgtgagttaagtccatcaaagttagaaaagaatgaagatgtgaacactaatttagcacacctattgaacatactttcagagcttgtggagaaaatattcagttcagcgtaagtggcctacaaataacaccatgagaacaagagttgttagtggttttgttttcttcggcttatctgccctgctatcctgagtcctcggatgtttaatatcatttcagattccccatctcctattgctgcaagaacactgacattagtggctaaagtctgtgcagaatttagcaaatcttgtggaatttggagctaaggaaccttatatggaaggtgtcaatccatttatcaaaagcaataaacatcgcatgatcatgttttagatgaacttgggaatgtacctgaacttccggacactaccgaacattctagaactgacctgtctcgtgacttagcagccctgcatgagatttgttgtagctcattcagatgaactgagaacactcagtaatgagcgtggtgcacaacagcatgtactgaaaaagcttttggctataacagaactgcttcaacagaaacaaaaaccagtatacaaaaaccaatgatgtcaggtagcagcctggtgtgttctgcatggattcagcacgcgcaacatggtaattcacatcactatgtctttgctcttgccaaaaaaaaacaaaa

SEQ ID NO: 3984 - DNA, 1552 bp, Cricetulus griseus
gtcatatgtgatgagggacacaggcttaaaaactctgagaatcagacttaccaggccctggacagcttgaataccagtcgtcgggtgctcatctctgggacccccatccaaaatgacttgcttgaatatttcagcttggtgcacttcgttaattcaggcattttgggaactgcccaggagttcaagaagcattttgagctgccaattttgaggagtcgagatgcagctgccagcgaggcagacaggcagctaggggaggaacgtcttcgagagctcatcagtatagtgaataggtgcctgatacggagaacatcagatatcctctctaaatatctgccagtgaagattgagcaggtggtttgttgtaggctgacaccccttcaaactgagttatataagagatttctgagacaggctaagcctgaagaagaatttgcgtgaaggcaagatgagcgtgtcttccctgtcttctatcacctctctaaagaagctatgtaaccatccagccctaatctatgacaagtgtgtgtcaggggaagatggctttgaggatactttggatatcttcccacctggttatacttctaaagctgtagaaccacagctttcaggtaaaatgctggtccttgattacattctggccatgactcgaagccgcagcagtgataaagttgtgctggtgtctaattatactcaaacgttggatctctttgaaaagctgtgccgagctcgaaggtacttgtatgttcgcctggatggtacaatgtccattaagaagcgagccaaggttgtggagcgcttcaatagtccatcgagtcccgattttgtcttcatgctgagcagcaaagctgggggctgtggacttaatctcattggtgctaaccggctggtcatgtttgatcctgactggaacccagccaatgatgaacaagctatggcccgagtctggcgtgatggtcaaaagaagacctgctatatttaccgactgctatctgctggaaccatagaagagaagatctttcagcggcagagccataagaaggcactgagcagctgtgtggttgatgaggagcaagatgtagagagacatttctctcttggcgagctcaaagagctgtttaccctggatgaagctagcctcagcgacacacatgacaggctgcattgccgccgttgtgtaaacagacgccaggtctggccaccccctgacggttctgactgtacttcagatctggctcagtggaaccatagcacagataaacggggactccaggatgaggtactccaggctgcctgggatgcttcacctacagccatcaccttcgtcttccatcatcgttctcatgaggagcagcggggtctccactgatagccagatagccagctggtctggatgtagtggttaaaggaaggatatagggaaagggggttctctgcttcatgaggctctgctcagttttgttctctgggagaaaatcatcaagaagggctgcatgatgtttgcccaaaatttattttataagaaaaactttttggtttaaaaaaaaaaaag

SEQ ID NO: 3985 - DNA, 1552 bp, Cricetulus griseus
ttgggccggtgaagggagagtcttttcggcgctgaggactggcgctgaggaggcggcggtggctcctggggcgtttgagcgggctcactcgagcccgcgggccgacgcggactcaggcccagccggcggaaccgccccggactccccgcgggcttttctagccgccatggaggacggtgtctacgagcccccagacttgactccggaggagcgcatggagctagagaacatccgacggcgtaagcaggagctgctggtggagatccagcgcctgcgagaggagctgagtgaagctatgagtgaggtggagggtctggaggccaatgagggcagtaagaccttgcagcggaaccggaagatggcaatgggcaggaagaagttcaacatggaccccaagaaggggatccaattcttggtagaacacgaacttctgcagaacacacctgaggaaattgcccgcttcctgtacaagggtgaggggctgaacaagacagccattggggattacctcggggaaagggaagagctaaacctatctgtgctccatgcttttgtggatttgcatgagttcaccgaccttaatctggtgcaggccctgcggcaattcctatggagctttcgcctccctggagaggctcagaaaattgaccggatgatggaggcctttgcccagcgatactgcctgtgtaaccctggggtcttccagtctacagacacctgctacgtgttgtcctttgccgtgatcatgctgaacaccagccttcataatcccaacgtcagggacaagccaggcctggagcgctttgtggccatgaaccggggcatcaatgaaggcggagacctgcctgaggatctgctcaggaacctctacgacagcatccggaatgagcccttcaagatccctgaggatgatgggaatgatctcacccacaccttcttcaacccagaccgtgaaggctggcttctaaagctggggggccgggtgaagacttggaagcggcgctggttcatccttacagataactgcctctactactttgagtacactacggacaaggagccccgagggatcatccccctagagaacctgagcatccgggaggtggatgatcctcggaagccgaactgctttgagctttacattcccaacaataagggacagctcatcaaagcctgcaaaaccgaggcggatggtcgggtagtggaggggaaccacatggtatacagaatctcagcacccacccaggaggagaaagatgaatggatcaagtccatccaggctgctgtaagtgtggaccccttctatgaaatgctggcagcaagaaagaagcggatttctgtgaaaaagaagcaggaacaaccctgacccctgtccccaactccattatttattttggagctgccccgcctgggtggcaggacccctgggccctggggctatggatcctggttggttccccatttggaaaatcaccacctctagctcctgtctccttatttgtaattaacatgttggtaatcttattaattatttaaaccctcgcgcctagca

SEQ ID NO: 3986 - DNA, 1552 bp, Cricetulus griseus
tcctctcgctcttcgctgagtctttcaggcccttggactgaggaaacgtctacaccgtgatgggaggcggagacctgaacctaaagaagagctggcacccgcagacccttcgaaatgtggagaaagtgtggaaggcagagcagaaacatgaggctgagcggaaaaagattgaggagctgcagcgagagctccgagaggagagagctcgggaagagatgcagcgctatgctgaggatgtatgttttgagaagatggaggaaaaggaagcaggctgttcttctgagacaggactcctcccaggctctatctttgccccatcaggtgccaattcccttcttgacatggccagcaaaatccgggaagaccctctcttcattatcaggaagaaagaggaggagaaaaaaagagaggtactgaacaatcctgtgaaaatgaagaaaatcaaagagttgttgcaaatgagtctaagaaaaaaggagaagaagaaaaagaaggagaagaaaaagaagcacaagaaacacaaacacagaagctccagtagtgatggttccagcagcgaggaggagcacagtcagggcaggtctcaaaagaagatggcaaattcctttcctgttttgtccaaagtccctggatatggtttacaggtgagggactctgaccgtaaccagggcctgcagggttctctgatggccgaacaaaggggtgtgaagaaccattcccgctcaagaagctcctcccaaggaagagaggtcccgggacaggaggtctcgatccccaggaagacggtcacggtccccaaggcccagcaaaccgcatgcctccaaggtaaacaggaaagagagagatagcccatcacctaaaaaggaggtctatcagaggcggcattcgtctggatacaccagaaagctatcagcagaggagctagagcggaaacggcaggagatgatggaaaacgccaagtggagggaggaggagaggctcaacaccctcaagaggcacgccaaggatccagggaggctgctgactccttagaattctctttataagagttcgaatggcttcttctacagatgaaatatcaccactgttcaaagtgccccttgtccattgactcctgaaacatggtacattctttaaaaaccaatgtgacttgatttgggaccctcaggaactttggctggatgcactgtgggatctgactgtgttttaatggatgggcactaggctgtcctggaaggcttggtagcttgccacaccttttccctctcacctgaatgaatggatcataccttccggagatctctccccacagccactcagacagactctgcttactgggacaaatgaacattgactttataaagtagactttgtgacagaatagccaagtgtcaggaagagtcaagatttttgagacagggtttctctgtgtagatattggagcctgtcctggaactcgctctggagaccaggctggccttgaactcacagagatctgcctgcctctgcctcccgagtgctgggattaaaggcatgcgccaccactggccgg

SEQ ID NO: 3987 - DNA, 1552 bp, Cricetulus griseus
tggcttctacagaaatgaaggatgttttggttccctgcttgaaggctggccatgtgggggttgtgtctgttgagttcatcgctccaaccttagaaggaacatatacttcgcattggcgtctttcccacaaaggccagcagtttgggcctcgggtctggtgcagtatcatagtggatcctttcccctcttctgagagcctcgataacattcaaaggggcctggtgagctcaagcaaagctgatgacttcacctgtgagcaagaggaagcttttcttctagctgaagaagaggttccattgagtgaagtgacaaagcagacagaaggaacaggaaccagtaccccacagaagacacagagtgtcgccagtgagagagaactgtacattccatctgtggaccttctgactgcccaggacctgctgtcctttgagctgctggatataaacattgtccaagaattggagagagtgccccacaacacccctgtggatatgactccctgcatgtctcctctgccacatgacagtcctttaatagagaagccaggcttggggcagatacaggaagagagtgaaggggcgggatttaaagcacttcctgattccaccatatcaacaaagaggaaggccgaggccactgcttcagtggaagaaacggaggaagacctgagtgggacccagtttgtgtgtgagaagttcagagtcagtcttctgcttcctctgaagattatatcatcatcctgcctgagtgctttgataccagccgccccctgggggactccatgtacagctctgcactctcacagccaggcctggagcgaggggctgaaagcgaacctgggatcgaggctgggcaggagccaactgaggctgaagagagactccctgcaggggagagccagccacaggcacagagcatcagtgacatcctcacaacctcacagactctggacacagtgcccctagtccctgaggtggtaggacttccaccaccactgtccaggagctcccctagtgcacagcacgggtccccaggagtggattcaccagcctattttctgggccaccagtcactgcacagcccattgtttctgaagatcagacagcagccctgatggcccatctctttgaaatgggattctgcgacaggcagctgaatctaaggctgctgagaaaacacaattacaatatcctccaggttgtgacagagctccttcacatcaacaacaacgactggtacagccaccgctactgaggactgatttgtattaaataactgcctgctgctcagagatgacctttattctgtcattgaggtgtgggtggaagcccttgcttgttttttaatctgatgaatctatatcgaggtcactgaattgtcaaaacaatatctgttactagtattttttggaacaaatcaaagaccagaacttaaattctcatttttgaaatgggatgagtagtagaaacagttttcagctgatgtggacagaattccctccactgcagtctgtagaagtgggcaacttggactcccggagactacttttcct

SEQ ID NO: 3988 - DNA, 1552 bp, Cricetulus griseus
acagacttaatcctcccacttggcgaccctcagggtaggaaggggactgagacacagcctgggtatggccaccgccgcgtgcgagcctgcggctagacccagcctgacctccatttcgtccggggaactccgcagcctgtggacctgcgactgcgaactggccctgttgcccctgtcgcagctgctccgcctacagcctggtgtcttccagctgcgtggtgagcagctcgtggtgcccgggcccggggaacccgcggacatgcgagggggcttcaacgtcttcggggacggcctcgtgaacttcgacgggcaactctatcgccttagcaactacatcaagagatatgtggagctgaccagctactctgattacaaagactacagggaaacgatcttgagcaagcccatgctattcttcattaacgtgcagaccaagaaggacacctcaaaagaaaggacctatgcatttcttgtgaacacaaggcaccccaagataagaagacagatagagcaagggatggacatggccatctcctctgtgatcggagaaagctacaggcttcagttcgatttccaggaagtagtgaggaatttcttccttccgggaactaaagtgctgaatggagagaatttgagtttcgcctacgaattcaaggcagatgccctgtttgatttcctttactggtttgggctcagcaattccactgtaaaagtgcaaggaaaggttctcaacttgacaagcatgaacccagaaaagaaagaaaccattaagttatttctggagaaaatgagcgagccattaatccggaggagcagtttctctgaccgcaaatttagtgtcacatctagaggttcaatagatgatgtctttaactgcaacctgtcacccagatcatcagttacggagccactgttggcagaattatcatttccaagtgttctggaatctgaagagtcatccagccaatttatctgattggtctgaacagtctagctggaggtctgtagcagacagcgggttgaaggggtaagaggagggagggaggtgggggcacttccattcctttgccagtctctggtcctccaaagctctataaaaggtccttttccccatttccctgggcatggtgccctggctggcccagtgcagctgcctcccatcagggttatggttataggatggaagggctttgtccctatggcacaaggtgccattgacattgaacacttctctgaagaatgccatggagttttgggaggaagaaaaggaagtttgtgtataggatggaagtgctgcttcatcacaggaggataaatacattattaagttcagtaaaaagaaaaataataaagaatccgagtcagctctccaacagtggaaataaaccattgatgcatagctagaattaaactcttctccaaggaaataaaagctctattcataagattgacaattttcttttgaaactgaattgagaaaatagtcagtagcacccccaggaagggactggagatctgggacattaatttcatcattaaggtttcttagttg

SEQ ID NO: 3989 - DNA, 1551 bp, Cricetulus griseus
gggatggagacggaactgtcgtgcggtatgccttttatgccgtcctcgctttccggccgctgtttccgtacggctgtccccttaccccctcccttgtctccctggcggcttactttgcggcagcaccgacagccccaccccctttctctgcggaatcaccatggcggctgggaccctgtacacatatcctgaaaactggagagccttcaaggccctcatcgctgctcagtacagcggggctcaggtccgcgtgctctccgcaccaccccacttccactttggccaaaccaaccgcacccctgaatttctcagaaagtttcctgctggcaaggtcccagcatttgagggggacgacggattctgtgtgtttgagagcaatgccattgcccattacgtaagcaatgaggaccttcgtggaagtactccagaggcagcggctcaggtggtgcagtgggtgagctttgctgacagtgacatcgttcctccagccagtacctgggtgttccccaccttgggcatcatgcaccacaacaaacaggccactgaaaatgcaaaagaggaggtgaagcgaatcctggggctgctggacactcatttgaagacaaggacttttttggtgggtgagcgagtgaccctggctgatatcacagttgtctgcacccttctgtggctctacaagcaggtcttagagccttcttttcgtcaggccttccccaataccaaccgatggttccttacctgcattaaccagccccagttcagggcggtcttgggggaggtgaagctgtgtgagaagatggcccagtttgatgctaaaaagtttgcagagagccagcctaaaaaagaaactccaaggaaagaaaagggttcacgagaagagaaacagaagccccaggctgagcggaaagaagaaaaaaaggcagctgccccagctcctgaggaggagatggacgagtgtgagcaggcacttgctgctgagcccaaggccaaggacccctttgctcacctgcccaagagtaccttcgtgttggatgagtttaagcggaagtactccaatgaggacacagtgtctgtggcgctgccatatttttgggagcactttgataaggatggctggtccctgtggtatgctgagtaccgcttccctgaagagctcacccagactttcatgagttgcaacctcatcactgggatgttccagcgattggacaaactgaggaagaatgcctttgctagtgtcatcctctttggaaccaacaatagcagctccatttctggcgtttgggtcttccgaggccaagaacttgcctttccgctgagtccagattggcaggtggactacgagtcgtatacatggcggaaactggatcctggtagcgaggagacccagaccttggttcgagagtacttttcctgggagggggccttccagcatgtgggcaaaaacttcaatcaaggcaagatcttcaagtgaacatgtcttgccatcacctagctgcctgcacctaccctgcaagggagatgggggtcattaaaggaaactgaacattg

SEQ ID NO: 3990 - DNA, 1551 bp, Cricetulus griseus
tgtgtgacttctgtcttggggccacagagtgagggcagtgaagtcttgtctgacctgcatggtgaattactgtgaagagcacctacggccacaaccagagaacagcagactgcacagccaccagctgacggaacctgcaagaccgggatctgcggacctgccctgcccaccacagccctctggttgccttctgccacacacaccagcagtgcatctgccaggcatgtagcgagggtgagcacaggggccacaacactgtgtccctggatgcagcccgcaggaacaaagaggctgaccttcggtagcatgcagttggacctggtggtggctgaagagaagtttggggaactccttgcggctgtgaggaaggcccaggccgacgtcatgcttttcttagaggagaaagaacagactgcactgaatcaggtcaatggcatcaagacccacctggagtacaggagcgtcgagatggagaaaagcaagcaggagctggagaagttggccaccgtcagcaacactgtgctcttcctggaggagtactgcaagtttaagaagatggaagattctgcttccccagtgtttacatagggctgaaggataaactctcaggcatccgcaaggtcatcacagactcaaccctgcacttaatccaatgacatcagaactcaagtgtctgctgttgtccagcgcaagtataggacctcaaaacctgatcccagaacccgggatgagtttctccaatatgcatgtgacatcacatttgacccagacacggcacatagataccttcgcctgcaggaggacaaccgcaaggtcaccaacaccacgccctcgggagcacccctacccggaccttcccagcaggtttttgcactggcggcaggtgttgtcccaacagagtctgtacctgcacaggtattattttgaggtggagatcactggaggaggcacctacgttggcttgacttgtaaaggcattgaccgtaaaggggaggaacgaaacagctgcatttctggaaacaacttctcctggagcattcactggaacggaaaggagttcacagcctggcacagtgacacagagaccccactcaaggctggccctttccggaggctcgggatctacatcaacttcccaggaggaaccctttccttctatggtgtggagtatgacaccatgactctgatacacaagtttgactgcaagttctcagagccagtctatgctgccttctggctgtctaagaaagaaaacgccatccggattgtggatctgggagaggagcctgagaagcctgcttcgttcacagcagaggctacaccctagattctaggatctacctcccagactttgctagttgtggcaactggaatgcagatggtattttaaggtagacagaaatatctgctgcagacagttggttctggaaactgtgtgagtcctgaacgaactttctcgcctgcttatcattacagttcttgtgcaaatgcagaaactctaaggtactcaagcctctcccttttttttttttgtctcacatttaatttaca

SEQ ID NO: 3991 - DNA, 1551 bp, Cricetulus griseus
cggagcagggggcgcttttcggttccccgtccttttgtcccagtagtggggcctactaggccgccgggacatcccgggtctcaagtaggcctagtctgcgggcaagggcgtcccaaaggcgggaggcgccatgtctctggttgcttatgccagcagcgatgagagtgagccggatgaaccggagcccggagccggagccggaggaagaggatgtggcggctcctatgcccgggcccgctttaggaggcctgttcgcttctctccccgcacccaagggtccggccttgctgcccccgcccccccagatgctggccccagcctttcccccgccactgttgcttcccccgcccacccgggagaccccccaggcctgccagcctcctccacctctgcccttcggcctggcgcttcccgccacctgcaggagtgagcccagctgaagctgccggagttggggaggggctggggctgccatcgccccaaggccctggtctcaccacaaccaccactccatcaccctctgccatcaaggctgctgccaagagtgctgccctgcaggtgacaaagcaaatcacacaggaggatgacgacagtgatgaggaagttgctcctgagaactttttctccctccctgacaaggctgagccacctggagttgagccataccccttaccctgtccccactgttcctgaagagctgcctccaggcacagaaccagagccagctttccaggacgatgcggccaatgctccccttgagtttaagatggcagcagggtcaagtggggccccctggatgccaaagcccggggatgactacagctacaatcagttttccacatatggcgatgccaatgccgctggtgcttattatcaggattattacagtggtggctactatcctgcaccggacccggctctggtccctccccaggaaattgccccagatgcctccttcattgatgatgaagcatttaagcggctgcagggcaagaggaaccgagggagggaggaaattaactttgtggagatcaaaggtgatgaccaactcagtggggctcagcagtggatgaccaagtcattgacagaagaaaaaaccatgaagtccttcagcaaaaagaaaggtgagcagccaactggccagcagaggaggaaacaccagatcacgtatctgattcatcaggctaaggagcgggagctgggagctgaagaacacttggtcaagaaaacaagctcagtcgccggcagacccaagccaaatacggattctagggctcaggaactgctggcccaggatttcctgtcggcctcgttggcccagcccccagcttcacctccaggaccccagctgctctaagtccaggacctctaccttgaggacccagcccctcacctctgggagaaggaacatatttttcttaacaagttagaaaatccagctcctttctgcgctggggctggagagactcgagtgctgcctgaaggctctgagttcttggtttgggagttatgctgtctagaaaaaaaaaaaaaaaaaaaaaaaaaaaaaaa

SEQ ID NO: 3992 - DNA, 1550 bp, Cricetulus griseus
tcctggaggcggactcacactgcttctccccgggactccttggtagtctgctagtgggaggtcctcgtcaccctctcttaactcagacctcgcggaccgcttcctagacaacatgcgtgagtgcatctccatccacgttggccaggctggtgtccagatcggcaatgcctgctgggagctctactgcctggaacatggcatccagcctgatggccagatgccaagtgacaagaccatcgggggaggagatgactccttcaacaccttcttcagtgagacaggcgctggcaagcatgtgccccgggctgtgttcgtagacctggaacccacagtcatcgatgaagttcgcactggtacctaccgccagctcttccaccctgagcagctcatcacaggcaaggaagatgctgccaataactatgcccgtggccactacaccatcggcaaggagatcattgatcttgtcttggacagaattcgtaagctggctgaccagtgcacgaggtcttcagggcttcttggttttccacagctttggtgggggaactggctctgggttcacctccctgctgatggagcggctctctgtcgattatggaaagaagtccaagctggagttctccatctacccagccccccaggtttccactgctgtggttgagccctacaactccattctcaccacccacaccaccctggagcactctgattgtgccttcatggtagacaacgaggccatctatgacatctgtcgtagaaacctcgacattgagcgccccacctacactaaccttaaccgcctcattagccagattgtgtcttccatcactgcttccctcagatttgatggagccctgaatgttgacctgacagaattccagaccaacctggtaccctaccctcgcatccatttccctctggccacatatgcccctgtcatctctgctgagaaagcctaccatgagcagcttacagtagcagagatcaccaatgcttgctttgagccagccaaccagatggtgaaatgtgaccctcgccatggtaaatacatggcttgctgcctgctgtaccgtggggatgtggttcccaaagatgtcaatgctgccattgctaccatcaagaccaagcgtaccatccagtttgtggactggtgtcccactggcttcaaggttggcattaattaccagcctcccactgtggtacctggtggagacctggctaaggtccagagagctgtgtgcatgctgagcaacaccacagccatcgctgaggcctgggctcgcctagatcacaagtttgatctgatgtatgccaagcgtgcctttgtgcactggtacgtgggtgagggcatggaggagggggagttctctgaggcccgtgaggacatggctgccctagagaaggattatgaggaagttggggcagacagtgctgaaggagatgatgagggtgaagaatattagcccatgtgctgcaattttacacttcattgtcttgtgtttgtctttgtatgtatatgactgtcttacactatcaataaaggtgtttcc

SEQ ID NO: 3993 - DNA, 1550 bp, Cricetulus griseus
ccacaatgataaaagccacagcgagatctgctcctgacagacaggaagaaatcagtagactggtgaaaagtaacagcatggtgggtggacctgacccatacctgaaggaatttgggattgttgtccacaatgagatgacggagctcacaggcagggtgcttccagctccgatgctgcagtatggaggccggaataaaacagtagccacaccaaccaggtgtctgggacatgcgaggaaagcagttttatgctggcattgaaattaaagtttgggcagtggcttgttttgcgcctcagaaacaatgtaggaaagatttaacttaaagagtttcactgaccagcttcgtaaaatactccaaggatgcaggaatgcccatccagggtcgagccatgtttctgcaagtatgcacaaggtgcagacagtgtggagcccatgtttaaacatctgaaaatgacatatgtgggcctgcagctaatagtggttatcttgcctggaaagacaccagtatatgcggaagtgaaacgtgttggagatacccttttaggtatggccacacagtgtgtccaggtcaaaaatgttgtgaagacctcaccccaaaccctttccaacctttgcctgaagataaacgcaaagcatagtaccatcacacatccatcggagtttgacttttacctctgtagtcatgcaggaattcagggaaccagccgtccttcacattaccaggtcttgtgggatgacaactgtttcactgcagatgaacttcagctactgacttaccagctctgtcacacctacgtgaggtgcacacgctctgtctccattcctgcccctgcatattatgcccggctggtagcatttcgggcaaggtaccatttggtggataaagatcatgacagtgcggaaggcagtcacgtggacagagcaacggccgggaccctcaggccttggctaaggctgtgcagatccaccatgatacccagcacactatgtattttgcctgagagtcttggaaaagaactcaaccaatttaggcatcctcattctgactttgccactgtacatgcctttaaggtgcattaattttttgaaagttttacatattactttcactgctttatcttactgatctcttcaggcctgtgctgtggagtgcaaactgcccggcaattgcactatatttggctgcagattcaaacagggcagttctcttacttggctggcttttgtgaatatgtgacataaacagatgtggtttgtgtcacagggacagataacactgccatgtaaaaagtgttctccctatttggaaaaaacattagcttttagtatttttccaagttttcaaaagtgcccattttatgctgctgtgtggtttgttaaatgtaaatgatttttaaactttctcatagaaagttaactttggcaataagctatttgccgtttttctgggaaagattttcttttcccttgctattgacatactcatattctttctgtgtctactggctgaaaatgtttgtgtttgttcatcttactaatggtatggttt

SEQ ID NO: 3994 - DNA, 1550 bp, Cricetulus griseus
gagcttcagtgggccgaggaacttcgggacaagtacctgcaagagatggaagatctgcggctcaaacaccgaacgctgctgaaggactgtgacctctataagcaccgcatggccactgtgctggcccagctggaggagattgagaagagcgggctggggccatggtgcgaagggtgctatctgggcctggttcagccaggacagaacagaaagagccaagggcagaaggcactggcctggaggggtcaggcctggaagctgaggcccagcagaggaccttgccctggaaccagggctctacactccccttcctgctggactcaaaggcctgtcagtccttccatgaggccctggatgcctgggcaaaaggatcaggtacagagcccttctacattcgagccaacctctccctgcctgagcgggcagatccccatgccctttgtgtaaaagcccaagagatcctgcggctggtggacgcagcacacaagcggaggcaggaatggttctgcactcgggtggacccccttaccttacgggacctggaccggggcactgtgcccaattaccagagagcgcagcagcttctagaagttcaggaaaaatgcctgctctccagcagacaccgaagccctcgaagcaacctgaagaagcgtgctctagggttggtgaggcccaagcctgcagggggcgctgcaggagactcagcagaacagctgccggcagagctctgttcagagctagagcgaagccttaaaccctacagcttggtgcgtccactactggtgtctgccctgcggcctgtggtgctcctgcctgagtgcctggcaccccggctcatccgcaacttgctggatctgcctagctccagactggacttccaagtgtgccctgcagaaagtttctctggagaggaacagtgcacatcctcagctcccggagcccccaaggcctggccttccaccccagggctgggcaacaggatccgagccatccaggagtctgttgggaagaagcactgtctgttggagctgggtgcacggggtgtgaaggagttggtgcagagtgaagtctaccccatcgtcatccatgtggaggtgactgagaagaatgtccgtgagatcaggggcctgttgggccggccaggctggcgggattcagagctgcttcgtcagtgccggggctcagaacagtggctctggggattgccatgttcctgggtacaggtgcctgcccatgcgtggggccacgcagaggagctggccaaggtggtgcgtggccgtatcttgcaggaacaggctcgccttgtgtgggtggagcgaggcagcagccgaggaggctgcggcagcagcagtgaggcctgaggacccatcctatgcccaggcctcttccagccactatccagacctcttccttctgatgcctgggcctcctccatccagtgcctggacgctccccatttgtgcctgggcttcccctcttccttctgatgcctgggcctcctccatccagtgcctggacgctcctcatagaaaaaaaaaaaaaaaaaaaaa

SEQ ID NO: 3995 - DNA, 1550 bp, Cricetulus griseus
ggcggcgcgggggtctgcgggaacgcggctcgggcccagcagttctcagcggagccgccgccgccattgccgcctcgctcggtgagctccgctccgctccgctcgcccagccgggcctccgccggccgccggcaccatgggccagtgcggcatcacctcctccaagaccgtgctggtcttcctcaacctcatcttctggggggcagctggtattctctgctatgtgggagcctatgtcttcattacttatgacgactatgaccacttctttgaggacgtgtacacgctcttccctgcggtggtgatcatagctgtaggagccctgctttttattattggcctaattggctgctgtgctacaatccgggagagtcgatgtggactcgccacctttgtcttcatcctgctcttggtttttgtcacagaagttgttgttgtggttttgggatacgtgtacagagcaaaggtggagaatgaagttgatcgaagcattcagaaagtatataagacctacaatgggaccaaccctgatgctgccagccgtgctattgactatgtacagagacagttgcactgttgtggaattcataactattcagactgggaaaatacagattggttcaaagaaacaaaaaaccagagtgttcctcttagctgctgcagagagactgccaaaagctgcaatggcagcctggccaacccctccgacctctacgctgagggatgtgaggctctggttgtgaagaagctacaagagatcctgatgcatgttatctgggcagcattggctttcgcagccattcagctgctgggcatgctgtgtgcatgcatcgtgttgtgcagacggagtagagaccctgcctatgagctcctcatcacaggtggaacctacgcgtagcggacagcgcaagcctgagctgatttttagtgtccttgttctgatttggaaggtgaattgagcaggcctacagcagttgactcctgagttcatctagtcaaagcacacatacactggtgttggacagcagcttggcagttcatgtacccacctcctatggctttcttacccttgttgttgctgactctctgtagtgcggtagaactaaaggagggtgtgggcctctttctgtcgcctctgaggagtaatgggacaatgttgtatcactgggcccttttcagtgtccttttaaagaatatatactatagtacaataacatagcaattgtacaaaatggctaacatagattttagaatcacacagtgtgtctttgttcatcttcaaaatcagagactgatctttgaaactagtggtttttaatcaaagctggctttataggaggactataatgtatgcactactgttttaaagcaattagtgtgaatgtgtgagtttctgtgtgattgaacccattcatcatcagtcttaaactcattagagataatgtacccatgtagactagcaaaatagtatgtagatgtgatctcagctgtaaatagaaaaatttaattcaataaactctgtatcagccctaaaaaaaaaaaaaaaaaaa

SEQ ID NO: 3996 - DNA, 1550 bp, Cricetulus griseus
ccccgtgcatttctgtcgcgctggtccggcggctctgagttttgaaggtgacagcgggacgtgacccgcctgggtcccgcgatgctagcggcacggcagcttctcggtggatcgcttcccgtgcgggtatttgtgcgtttcagcagcggcacgacagcacctaagaaaacctcatttggttcgctgaaggatgaagaccggatcttcaccaacctgtatggccgccatgactggaggctgaaaggtgcccagagtcggggtgactggtacaagacaaaggagatactgctgaaagggcctgactggatcttgggtgagatcaaggcatctggtttacggggccgtggtggtgctggcttccccactggcctcaaatggagcttcatgaataaaccctcagatggcaggcccaagtatctggtggtgaatgctgacgagggggagccaggaacttgtaaggaccgagagatcatgcgccatgaccctcataagctggtggagggctgcctggtaggaggccgggccatgggtgcccgggctgcctacatctacatccgaggagaattctacaatgaggcctccaatctgcaggtagctatccgagaggcctatgaagcaggtctgattggcaagaatgcctgtggctctgactatgattttgacgtgtttgtggtgcgcggggctggggcctacatctgtggagaggagacagcactcattgagtccattgagggcaagcagggaaagccacgcctgaagccaccctttccagcagatgtgggagtgtttggatgccccacaactgtggccaatgtggagacagtggctgtgtctcccaccatctgccgtcgtggtggctcctggtttgctggctttggccgagaacgaaactcaggtaccaaactgttcaacatctctggccatgtcaacaacccctgcactgtggaggaggagatgtctgtgccactgaaggagctaattgagaagcatgctggtggtgtcataggtggctgggacaacctccttgctgtgattcctggtggctcatccactccgctgatccctaggtctgtgtgtgagacagtgttgatggactttgatgcactggtgcaggcccagacaggcctgggcacagctgcggtgattgtcatggattgctcgacagacattgtgaaagccatcgctcgtctcattgagttctataagcatgagagctgtggccagtgtaccccatgccgtgagggcgtcgactggatgaacaaagtgatggctcgctttgtgaagggggatgcccggccagctgagatcgactccctctgggagatcagcaagcagatagagggccacaccatttgtgctctgggtgatggggcagcctggccagtacagggtctgatccgacacttccggccagtgcttgaggagcgaatgcaacagttcgcagagcagcaccaggcccagcattcaggcttctgagcctgtaccttggcctgataattttacatccttttgggaagctggacaataaacaagtgctacccactctccaa

SEQ ID NO: 3997 - DNA, 1550 bp, Cricetulus griseus
acgtcgcgcccgctcccgccatctttcgccgcttcctctctcaggggctgtcgccgcgtcctgagtcgctgccgagccccggggccgctgcgccgcgccgaccgccgccgccatgaacatcttccggctgactggggacctgtcccacctggcggccatcgtcatcctactgctgaagatctggaagacgcgctcctgtgcgggcatttctgggaaaagccagcttctgtttgcactggtcttcacaactcgatacctggatctttttacttcattcatttcactatataatacatctatgaagcttatctacattgcctgctcctatgccacggtgtacctgatctacatgaaatttaaggccacctatgatggaaatcacgatacctttcgagtggaatttctggtggttcccgtgggaggcctctcatttctagtcaatcatgacttctctcctcttgagattttatggaccttctccatctacctggagtcagtggccatccttccacagctctttatgatcagcaagactggcgaggctgagaccatcaccacccactacctcttcttcctgggcctctaccgtgctctgtacctcgtcaattggatctggcgcttttacttcgagggtttctttgacctcattgctgtggtggctggtgtcgtccagaccattctctactgcgacttcttttacttatacattacaaaagtactcaagggaaagaagctcagtctgccagcgtaagtgccaaagaccatcagcagcctctgtccttcagggtgctcagacaggattctcaccacagcgcaggtgcgggatgctcagtgcggagaagcagagatggctccttctgtcacagccgctccctggtggctcttcggggatgcggaggaagggaccaggaggctcagtccactgcatcctgccttatcttttttattactatgtacaaagagttttttacacaaagaaacttaatgctgtgttaataaattcaatgtgtagatgaattggggcagttccaaaagtgacaattttgtacagagtaagtacaaaccttttttattttttgaaacttcgatgagatggtcgattcttgtgtctacaatgaaattatactcctcgacacttggtagattattcaaacaactgtcaaatttccatgatatttattttatttcatttttttccacacccggaggctctgagcctcctgccttctgaatggaaatgtggacagggtgggtgtgagggctattttggacaggactctactcctctgagaaatggaacacaaatggctacctgtcacttttagtcacaaattccaaggatcactacaaccatgtcagattcaaatggtctttttcatagcgcttttggtgataaaatgattgacaatctttttaattggcagcaccaattatccattccttacattctttttaggttttttgttttaaacttgggctcttgcatgacctatcttgtgttaacctacctaaataaacattttattaaacagaaaaaaaaaaaaaaaaaa

SEQ ID NO: 3998 - DNA, 1550 bp, Cricetulus griseus
  modified_base (151)..(151): a, c, t, g, unknown or other
tttaaatgatttctatgagttggaactacagcatggttctggagtcgtgggctggagcattccagccaccaaaggcattgtaccttctccaagagaatcccatactgctattatatattgtaaaaaagactctgggagtcctaagatgtangtttttggtggaatgtgtggtgctcgcttggatgacctatggcagcttgatttagaaacaatgtcatggtcaaaaccagaaactaaggggacagtaccacttccacgaagccttcatacagccagtgttataggaaacaagatgtacatttttggtggatgggttcctcacaagggggaaaatactgagaattcaccccatgattgtgaatggagatgcaccagctcattttcttacctaaatctggatacagcagaatggaccactctagtatcagattctcaggaagataaaaaaaattcaaggccaagaccaagagctggacactgtgctgttgcaattggcactagattatatttttggagtggaagagatggctacaaaaaagcacttaatagtcaagtttgctgcaaggatctttggtatcttgatactgagaaaccgccagcaccatcacaagtccagttgatcaaagctactaccaactctttccatgtcaagtgggatgaagtgccgacggttgaaggctatcttttgcagttgaatactgacttgccataccaagctaaaaactagaacacacagccatgaagggaacttcagtgaaaagcaaaccagatttcagagcaacagattctaatgctggtttacattcacctttggcacctaatgcttctaataataacagttgtgtgacggatatgctgtggaagaatgaagttgatgaaatatgtgctctgcctgcaactaagatcagccgtgtagaggtgcatgttgcatcaacgccattttctaaagagacaccttcaaatccagtggccattttgaaaacagaacaacaatggtgcgatgtgggaatttttaaaacaataccgctttggtgagccagttttatttgctaccaaaaggaaacaaagtatgtcaaaggcaggaaatgcagatgtacctgactacagtttacttaagaaacaggatcttgtcccaggaacagtatataaattcagagttgctgcaatcaatggttgtggaataggccctttcagcaaaatcagtgaatttaaaacatgtatccctggttttcctggagctccttctacagtccgaatttccaagaatgtcgaaggcatccacctttcctgggagcctccaacttcaccgtctggaaatattttggaatactcagcgtacttggctatccgcacagcacaggtgcaagataatccaagccagcttgtgttcatgagaatttactgtggtcttaaaacctcgtgtacagtgacttctgggcagcttgcaaacgcgcatatagattacacatccagacctgccattgtattcaggatatcagcaaagaatgaaaagggttatggaccagccactcaagttcgatggcttcaag

SEQ ID NO: 3999 - DNA, 1549 bp, Cricetulus griseus
  modified_base (101)..(101): a, c, t, g, unknown or other
aaacagagaagccagctgtctgttttaccaggcaatcacaaagaagttaaaaatatgtgaagaggaaactggttccacctccatccaggcagcagacagcncagccgtgaatgggcagcatcacacccatgtctgccgtgtacagagcctacatacactaagccttgcccacccatctaccccttccatcttccctctggcctctcttcccaatgtggggtcaggattctgggacttagctctggaccagtcacctgtctccatttccttttatacagactttgagacttgcatcagcacagtaaacagcagcactctccctccctgaggccctgggcagggatttaaagatctccacaggtggctgtgaagaagctcttgagctgggcattggccctggagcaggaggctgtatattctctcttggcccccactggacccttggaaggagaggcccctgagccatcgtgaaccagcagactcccaaaggaggcactgtgggcctccagctgaggaggattttcctgtagacactaccattatgcagcagctcccagaacacctttgtgaactgaagagagaccagcatggcccacacagacacctcttgagggggagcagagtgagcctgctcctcccaggaggttttgtttggatttgcattccaggccatgggaaggggtcttgagggcactgggagcagtggagtgtaagggtggccccttcctctttccgttaatgtcagtctctttagctgggccacctgttcagcctgctctacacaggtcccctgcatgcccctctttcccttttcctcccatggagatagtatttctgtcccatcctgttttggcccagacccagactaaccaataccaataataaacatttcatagatgagcacttcataggctgggcttttgaggtggaacctcacttctgccagtggttccaagctctgggtttgttgggactctcctggagagggaccagagaggcttagaatgccacatgagaggaatcacctgaggctgggataaagatctcaggacatgggcatggagcaaagaatgcttgtggggttcagcacaattgctcattcactgggatgctgaacctgttttctgtctggacacatcctgtcttggtcctgggggttggggtggggaagatactgtaaggaaaccggttagtcaatgttgtcttaatattgttgacaattctgtaaagttcctttttatgactatttctgtttaagctatttcacctttcgttttgaaatccttcccttttaaggagaaaatgtgacattgtgaaaatgcttgtaagaaagcccctcctccccttttcctttaaatgacaaatctaggtgattaaggttgtgaatttttattttcgctttgtttttaatgagcatttgtctttcagaataggattgtgtgataatgtttaaatggcgaaaacaaaacatgattttgtgcaattaacaaagctactgcaagaaaaagaaaataaaacatttcttggtaacaacaaaaaaaaaaaaaaa

SEQ ID NO: 4000 - DNA, 1549 bp, Cricetulus griseus
gctttcttaagatggccgcggctcaggacggatgtggcttagattctgctgctggaaacgggcgccggatccatctagggattcctgaagcggtgtttgtggaagatgtagattctttcatgaagcagcctgggaatgagactgcagatacagtgttaaagaagctggatgaacaatatcagaagtataagtttatggaactcaaccttgctcaaaaaaaaaggaggctgaaaggccagattcctgaaattaaacagactttggaaattctaaaatacatgcagaagaaaaaggagtctaccaattcaatggagaccagattcttactggcagataacctgtactgcaaagcttcggttccgcctactgataaagtgtgcctgtggttgggggctaatgtaatgcttgaatatgatattgatgaagctcaggcattgttggaaaagaatttatcaactgccacaaagaatctggattctcttgaggaagaccttgactttcttcgagatcagtttactactacagaagtcaatatggccagggtttataattgggacgtaaaaagaagaaacaaggatgattctaccaagaataaagcttaacattggcaattaaaaatgtggttcaggtttccaaacatgttaaataagccagtgtttatccttaaagattgagtgttttttttttcacagcaagaataattaaaactttaaaaacaccattttatttattttatgaaaacaaaaattactttcaaatattttatgcaattaacagtatttttttcatatttccctgcaaagtaatgctgctttcattttattttatctgttataagacaactcttaactgaaatggccgaaaactgtgaggaatgctatggaggctactgaatgctgggtaccagcacagtttgcacaattttttctttattgattgatattactcttgcgtgatgtggtaaaccttttagaggcaagaaagaccaacagttcaatatttgtaaacttgtttttctttagtacttgtagaacattatcatcctttgttgctgttgtattctgtaaatggggctttatgcatttctgcttaaccagtagcttttatgacactctaaccttttcagaaagtgattatttaattttctacacagtttgagggctgttcacatatatagacccccaaataaatgcactgtgtctttgcaatgccagtataagggagatttgatcaatgtgagagagtactacccattcaaaactttaagctaaggtaattttatattatgtaacagttctccaaagcaccttgaacaggtatattaatataaatataaatctgcagtgattgaaaagagttgtaagcttttttatttgtgattaaaattgcataggactgttaaaatctctggaaagcctttggtactgtgacagaagtacttggtgatatagattctggtaaaaacacatgcatgttattctatctccatgtagtaaaaagtatacttgtaccacgttttgtatttgaatttcatgttattaaaacagtg

SEQ ID NO: 4001 - DNA, 1549 bp, Cricetulus griseus
gtggccgccccctgctcctcggcctcccggctgcgccgcagcgtcagcttcgctcggcttcagcagcggtctccgctccccggcgtcccgggcccggtcgcctgccgccgcacgcccggcctaggccgcagccccgggcccgcgtcgcaccgccccctatgggccccggctgaggcgccgccgccggccgcggagccccgatgctggcccggaggaagccggtgctaccggcgctcaccatcaaccccgccatcgccgagggcccgtcccccaccagcgagggcgcctccgaggcgaacctggtggacctgcagaagaagctagaggaattggacctggatgagcagcaaaggaagcgactggaggccttccttacccagaaggccaaggtcggggaactcaaggacgatgactttgaaaggatctcagagctgggagctggcaatggtggtgtggtcactaaggcccagcataagccgtcaggcctcatcatggccagaaagctgatccatctggagatcaaaccagccgtccgcaaccagatcatccgggagctgcaggtgctgcatgagtgcaactcaccctacattgtgggcttctatggggctttctacagtgatggcgagatcagcatctgcatggagcacatggatggtggctcactggaccaggtgctcaaggaggccaagcggatccctgaggacatcttggggaaggtcagcattgcggtactccgaggcctggcatacctccgtgagaagcaccagatcatgcacagagatgtgaagccctccaacatcctggtgaactgtcgcggtgagatcaagctgtgtgacttcggggtgagcggccagctgattgactccatggccaattcatttgtgggaacacgctcctatatgtctccagagcggctacagggcacgcattactctgtgcagtcggacatctggagcatgggactgtcgctggtggagctggccatcgggaggtaccccatccccccacctgatgccaaggaactagaggccagctttggccggcctgtggtcgatggcgcagacggagagccccatagtgtctcgccgaggcccaggccgcctggacgccccatcagcggtcatgggatggacagccgacctgccatggccatctttgagctgctggactacattgtgaatgagccacctcccaagctgcccagtggtgtgttcagctcggacttccaggagtttgtgaataaatgcctcattaagaacccggcagagcgagcggatctgaagatgctgatgaaccacgccttcatcaagcactccgagggggaggaggtggacttcgcaggctggctgtgccgaaccctgcggctgaagcagcccagcacacccacgcgcactgcagtgtgacagccatcgcccaatagcctctgtccttgttcctgtcggcaccgtggctgcccctggggatggtgaagctgtgttgtggcaggggacctgcttccgtgcgtttgcaaaaccaaacaaaatggagaaagagaaaaaaaaaaaaaaag

SEQ ID NO: 4002 - DNA, 1549 bp, Cricetulus griseus
acaaccaggcacgcatttgactgacagtgaagtcgctcaccagaagttccgccatttccagtatgaagagtcagatgatccccagcaagcagtgtctcagcttcgggagctgtgtcaccggtggctgcagcccagtatacattcaaagaactggatcctggagttgctggtgcttgagcagttcctgagtgcgctgctgagaagttgcgggtgtggggtagagtcacaccacccagaggactgccaggcagctgaggagccagtgaccttccatgatgtggctgtggacttcagtcaggatgagtggcagctactaggaccaatgcagagaaatgagtattgtgatgtgatgctggagaccttgggcaacttggtctctgtggggtggcagcctacatcgggaaaacaagagttaactccagaatctcctacttctgtggcagaaccagttcacatcccgaaaccaaaagatttctcaaggaatgatactcagtccactgtctctgaatgtatctcagaagatgaggtccaaggaatccattccataaaatcaaatcaggtagagactatacaggaaacaggcctccctgtggacctctctgaaagctccacttctcaggagacaaagtaacctgcacacaagccagtgctcagttgatgcagttcttcctaggaaagaatcacctgatgggggctgaggtaggaagatccagggacaggaactgttccttgacacaggcttcacctgtaagaattctccagaaaggctgtgtgggtggtaaagtccagggaaggaggaattccttgaaacatggaagagctaaccagaagggttctaacagtgggagagttgaggaaattagtacttcttcaaaacacgctcccctatataaaaattcgcccgaagccctgggaaagagggaaagacagggaaatcaacacttcaattaaatacagtccccatgtgaaaggttaccagagggatccccagggggccactgcaaggaaagccaacaattgcgacagagacaccagccagcaagctcggcagatactttttataaaaattcacaaggggagccaagtttgccgctgcagtgaatgtggtaaactattccagaatgctaggtatttctctgtccataaaaagatccacacgggagagaagccttacatgtgtactgtctgcggtaaagcttttgttcagagctcctccctcacccagcattatagaattcacagtggagagagaccatttgagtgttcagagtgtgggagggccttcagtgaccgctcagccatctctcagcacctgagaactcatactggggctagaccctaccattgtcagcgctgtgggaaagccttccgccagagctcacacctcaccaggcatcagagaactcacactggggagcgcccgtatgtgtgcacccagtgtgggaaggctttcacccagagttcacaccttgttgggcatcagaaaacacatacaggataaacttcaagaagcagaccaaatcacagtcctagtgcctttcaaaccact

SEQ ID NO: 4003 - DNA, 1549 bp, Cricetulus griseus
gccagcggccaccagcatcccgggcatccttccctctgtgcgcgcatcgcgtacctataccgcaaccctcgctgtcgggcaccctatctggatcgctcctgttgcaaagccaccatgcctatcactcggatgcgaatgagaccctggctagagatgcagattaattccaatcaaattccagggctgatctggattaataaagaagagatgatcttccagatcccatggaagcatgctgccaagcacggctgggacatcaacaaggatgcctgtctgttccggagctgggccattcacacaggccgatacaaaataggggaaaaagaaccagatcccaagacgtggaaggcaaaatttccgttgtgccatgaactccctgccagacattgaggaagtgaaggaccagagcaggaacaagggcagctcggctgtcagcaggtctgccccaccggaccttaccccagctctgtcaccatgtgttgtcagcagcagtctccctgagtggcacatgcagatggacattgtgccagacagtaccaacgatctgtataacttgcaggtgtctgaagctctttgagcagtctgagtggcagccgacaaacgtggatggcaagggatacttgctcaatgaaccaggagcccaaccctcttctgtctatggagagtttagctgcaaggaggaaccagagattgacagccctggaggggactttggaatgggcatacaacatgtcttcacggatctgaagaatatggactccatctggatggacaccttgctgccccccactgtcaggctatcctctattcaagctattccttgtggaccatagtttgggtccctgacccgttcttgctcttctgaatgagcaaggtctggtgtcatggtggctgtaatacagaaaagctagactgctgtgggtcccttgacatggcaaagcatagccccactgccaagcgggaagagaccaccctccttgggtcagtggactctcagggcttggaatgccaggatctgagtttttcttgtgaggtgaagctggccctgactcctgggaagatggagttggggttctggaggttgctgtgaggtgggagacagggacaggagtcatcctctagctctttaaagccttgctgcctggagagggtcttgctggctgtgcactgggagacaattgcactaagtgagtcctattcccaaagaattgctgcccttcccagccgagccctgggatggtttcaaagccagtgaaatgtgaaggaaaaaaatggagtcctgtgaggctgggctcccttagcctcagaggagctctgcctcgctacctgctctccagctgtagggctcaggaaaaaaaaatggcactttctctgtggaccttgccacataactgatcagaggtgtacactaacatttctccccaagtcttggccttctcgtttatttatacagtgccttgcctggtgcccactgtctcctcaggccttggcagtcctcagcaggcccaggggagaggggttgtgagcgatttggcgtgactttgactat

SEQ ID NO: 4004 - DNA, 1549 bp, Cricetulus griseus
gtgctgagatggttgcgatcctgctgctcctctgtcttcccttcatcttctgcctggccacaccaagaatcaggaaaatgctgtcttgtgggatgtgtacatctaatgtccagcttcctgggaaggtagccatagtcaccggtgctaacacaggcattgggaaggagactgctaaagacctggcccaaagaggagcccgtgtgtatttagcttgccgggatgtgcagaaaggggaacaggtggctagcgagatccaagccaccacagggaataatcaggtcttggtaaggaaactggacctagctgataccaagtctattcgagcctttgccaaagacttcttagctgaggaaaagcacctccacatcctaatcaacaatgcaggagtgatgatgtgcccctactccaagactgcagatggctttgagatgcacattggagtcaaccacttgggtcacttcctcttgacccatttgctgctaggaaaactgagggactcggccccatcaagggtggtcaatgtgtcctccttggcacatcatctgggaaggatccacttccataacctgcaaggggagaagttctacagtgcaggtcttgcctattgtcacagcaagttagccaacattctcttcactcaggaactggccaggaggctgaaaggctctggagtgacaacatattctgtccaccctggcacagtccattctgatttgattcggcactcgtcatttatgaaatggctgtggcaacttttcttccttttcatcaagacccctcaacagggagctcagacgagcctgtactgtgccttaacagaaggtcttgagaccctaagtggcagtcacttcagcgattgccacttggcatgggtctctagccaaggtcgtaatgagacagtagccaggcggctgtgggatgtcagctgtgacctactgggcctccctctggattggtaagtagtggtttggactcaaaagaagattggatgagatgatgattgtccttcaaagtggccaaaaccttgagcacaaagagcagaacttggagccttgcctgcttggtatctatccagttaaatctcagtacattgccgggtgcctctaaacaccttaagtttgtaccaacttactttgttcctgctcctgccaacatttctagtggtttcatggactagatagaggaccttcatatgacctctgcagctcctgttttcctttggaaagctactcctagggaaatggaaaccctaggattggtgcattgcaatgtggattagatgtagctcctcccaaccaacaaagctttccttgaagagctccattgcaacctcagttgaaccccagaagtccagtgacctggctcaagagcaggcctttgtggccccaacatctgaatacttagaggaaagtcttcactaaatctgtcagtctgaagtgtttactactgaaacacttttccatgtccagaccacagatgagcttccttctctatgaagtttgtggaatttgaagggcagaaataaaaataaagctaaactgtcattttc

SEQ ID NO: 4005 - DNA, 1549 bp, Cricetulus griseus
agcagccacagagagctgcttctgagccagagtccccactggatgccttttatgtctacaaagagcacccctttattgtgaccctgaaggaggaccagattgaaacccttaaacagcagttaggaatctcggttcaaggacaggaagttgccaggcccattattgactttgagcactgtggcttccctgagaccttaaatcagaacttgaagaaatcgggctatgaagtgccaactcccatccagatgcagatgatccctgtggggcttctggggagagacattctggccagtgcagacaccggctccggaaaaacagctgcttttctccttcctgttatcatccgagctttgctggaggataaaactccatcggcactcattcttacgccaacaagagaattagccatccagatagagagacaagccaaggagttgatgagtggtctgccacgcatgaagacagtgcttcttgtgggaggcttacctttacccccacagctccatcgcttacgacagcacgtgaaggttatcatagcaacccctggacgacttctggatataataaaacagagttccgtatcactcagtggcataaaaattgtggtagtagatgaagctgacaccatgctaaagatgggctttcaacagcaagtgcttgatgttttggaaaacactcctggtgagcgtcagaccattttggtttctgccacgattccaggcagcatagaacagttcgcagatcagcttctgcataaccctgtaaggattatcactggcgacaagaacctgccctgccccagcgtgcggcagatcatcctatgggtggaagacccaggcaaaaagaagaagttatttgaaatcctaaatgacaagaagctctttaagcctccagtactagtgtttgtggactgcaaactgggagcagatctgttgagtgaagcagttcagaaaatcacaggtctaaacagcacatccatccactcagagaagtctcaagtggaaaggagagacatactgaagggattactggaaggagactatgaggtcgtggtgagcacgggggtcctgggccgaggcctggacttggtcaacgtcaagctggttgtgaattttgatatgccttcaagcatggatgagtatgttcatcaggttggcagagtggggagacttggtcaaaacggaactgcaattactttcataaataacaactctaaaaggctcttctgggatgttgccaaaagagtgaagcccacaggatccattctccccccacagctgctgaattccccttaccttcatgagcagaagagaaaggaacaagagaaagacaaacaggcacagaacaacctggtcacaggggctaacctcatggacattattaggaaacacgaaagaagcaattcacaaaaataacctggtatgccacttccagtagattttattatatgttatcagtaaaatttttaataactactgtatgattaaataaaaatgtacaaggaacagatgaatttttaagacctttttaaatttaataaaatttgtac

SEQ ID NO: 4006 - DNA, 1548 bp, Cricetulus griseus
ggctggccagggcgtttccgttgcacggagccgctgagattattgccctgtctctcggcgagcgcatcgttcccgttcttgcccgtagcctgcgctctgcggtctcgccccggctcattcctgaccaacagcgtcatggcccaggttctcagaggcaccgtgactgccttccctggatttgatagcagggctgatgcagaaactcttcggaaggccatgaaaggcttgggtactgatgaggagagcatcctgaccctgcttacatctcgaagcaatgctcagcgccaggaaattgccgaggagtttaagacactgtttggcaaggaccttctggatgacctgaaatcagaactgactggaaagtttgagaagttaattgtggctctgatgaagccttctcggctctatgatgcctatgagctcaagcacgctctgaagggagctgggaccaatgaaaaagtactgacagaaattattgcttcaaggacacctgaagaactaagggtcataaaacaagtttatgaagaagaatatggttccagcctggaagatgacgtggtgggggatacctcggggtactaccagaggatgttggtagtcctccttcaggcaaatagagaccctgatactgcaattgatgatgctcaagttgaactggatgctcaggccttgttccaggctggagagctgaagtgggggacagatgaagagaagtttatcaccatctttggaacacgcagcgtgtctcatctgagaagagtgtttgacaagtacatgacgatatcgggatttcagattgaggagaccatagaccgagagacttcagggaacttggagcagttgctcctggctgtggtgaagtctattcggagcatacctgcctaccttgcagagaccctctactatgccatgaagggtgctggtaccgatgatcataccctcatcagagtcgtggtgtcgaggagcgagattgatctgtataacatcaggaaggagtttaggaagaacttcgctacctctctgtattctatgatcaagggtgacacatctggagactataagaaaaccctgctgctgctctgcggaggagaagatgactgaggctggctgcctggagtgctctgggcctgccgcctccatcagcttccttcagcacatgcagccgtgcttgtattctgcctgcggatgccttactctcactagtatgctaacatccaaaagtgtcacagatgacagtagtggcacaccccttccttgatctccctgttgacattagtgtcttcatttgtctctaagtctaatgtctgagttatcaatactgtctataaagagatcagattgctctttataacctttttttaaagcttcatttttattaagttaataaccatattacctggatcggaaccttagccgtgaaattgtgaactcctggaaatgctgccaatcaagcttactgctctatcagacctgcaaaattatgatagttgtatcaaaaagatgaatgacaaataaacattcctttccctctgaaaaaaaaaaaaaaaa

SEQ ID NO: 4007 - DNA, 1548 bp, Cricetulus griseus
ggagggctagcccgcatcacccagggccagcccctggagtggcctttggttcccaggtcactctgaggaacgtcttcggcaaacccttgccttgctggcttcattcccacaagaacacctaccctatgatatatgagaacggccgtggcagctcccaccagcagcaggtgacctgttaccccttcaaagacatcaataactggtggatcataaaggaccctgggagacatcagctggtggtaaacaaccctcccaggcctgtacgccatggagacattgtacagcttgttcacggcatgaccacccgcctccttaacacgcatgatgttgcagccccactgagtcctcactctcaagaagtctcctgctacatcgactataacatctccatgcctgctcagaacctctggaggctggacattgtgaacagagagtccagccgggatacctggaagaccatcttgtcggaagtgcgcttcatgcatgtgaacacgtctgccatcttgaagctgagcggggctcacctccctgactggggatttcggcagttggaggtggttggggagaagtcacgaggccaccacgagagcatggtgtggaatgtggaggaacaccggtatggcacaagccaagagcagaaggagagggagctggagctgcattcacctactcaggttgatattaacaggaacctcagcttcatggccagattctcggaactacagtggaagatgctgacactgaagaatgaggattctgaacacaagtacagctccaccccgctggagtgggtcaccctggacaccaacatcgcctactggctacatcccaggaccagtgctcagatccacttgcttggaaacatcgtgatctgggcttcagctagccttgccacagtggcctacaccctactcttcttctggtacctgctccgccgacgaggagcatgctggctggagccctatgtactggcggctggcgctcaactacctgcccttcttcctgatggagaggattctcttcctttaccactacctgccggcactcaccttccagatcctgctgctgccaattgtcctgcagcatgtcagcgaccacctgtgcaggtcccagctgcagaggaatgtcttcagtgccctggttgtagcctggtattcctctgcatgccatgtgtccaacatgctgcgtccactaacttatggggacacgtcactctcaccaggagaacttcgggcccttcgctggaaagacacctgggacattctgatcaggaagtactagagaacaagatgtgtttgtctcccaccagcagaggccgcagcaggcagggactggctgggtccagtaaggactccagggattaattgtggtttcacctgaggatccctgtccatggatttctcatttgaagagatttattcctcctcacacagtgaagaatataccctgccatagcctcacccaggaagcctgactctgacccagccagtgtttgagctgacaggaaccacaaaggcaggcaggagcacccagccagcaatggagtgg

SEQ ID NO: 4008 - DNA, 1547 bp, Cricetulus griseus
tttcagaggtccttgttgaacttgcttagcagtgaagaggaagattttaacagtaaagaggccttgctgctcatcacgattctctcctccttgtccaggctgatagaacccacctctccacagtttgtgcaggtgttatcctggacgtctaagatttgcaaggaatacagccgggaggatacctcattctgcaagagtttgatgaacctattcttcagcctgcatgtcttatataagagtcctgtcaccctgcttcgtgacttgtcccaggatatccatgggcagctgggagacatagaccaggatgtagagatagagaagacagaccactatgcaatggtgaatttgagaacagctgcccctactgtctgtttgcttgtcctgagtcaggctgagaaagtcctagaagaagtagactggttaatcaaccaagattaagagctcagtgaaaccaagaaaccctatcagataaaatggctccagatgcctcttctcaagcagtcccaccaaatcttctcatcgagaaagccatcgtcatgcagctgggaacactggttacattcttccatgaattagtgcagacagccctgccatcaggcagctgcgtggacaccttattgaaggacctgtccaaaatatacagcaccctaacagcatttgtcaaatactatctccaggtgtgtcagagcgccagaggaattccaaacactgtggaaaagctggtgaagctgtccggctctcatctgacccccatgtgttactctttcatttcttatgtacaaaataaggggaatgacaacccaaagtgcacagagaaggagaaggctgcaggcgccagcacaatcatggccaaagttcttcgggaaaccaagccaatccccaaccttgtctttgccattgaacagtatgaaaagtttctaatccagctatctaaaaagtccaaggtaaacctgatgcagcacatgaagctaagtacttctcgggacttcaagatcaaaggcagcatcctagacatggttcttcgagaggatgaagatgaaaatgaggagggcgctgcaccagcacacagagagcaggacagagaaccagccacaaagaaaagaaagatatgcctgagttaatgtgacctgtggggcatctgctttgttttgtgccgacagtaccccttctcatacagcctgcactgatgttggcatcctggttctgaacccaccaaactgtgccttcagttagaaggactcttctgggcaggtcctgctacagaaaaatggctgcctaggcccttttgcaaaaagcacatctgaaagcctgagtttaggaacctgcaccacttcaatgaagctccacaggagcaaatacagagcctccagatggagctagggtccaggctggcttcgtttttccaaggagcctttggtgagttcaattatctggtaaatatccagtgcttcacctgcaagacagtgggaatcggttaggatgcctcctgaagaactatgactgtgctcagaaatgagagtatgaatgttaagaaaagacagtgggtg

SEQ ID NO: 4009 - DNA, 1547 bp, Cricetulus griseus
acttttttcgattttggatgaaatgggtcttacgacagatgactggaaagtgtgaattgcagcgaatttttgacacctatggaggtgctcagaggacgtacaggatagaaaattcattggcatattccaagagtaaggtcctccagaatgcaacacaagtttccgagagtgaactggacagatgtgtagcggacataatgaaggcaaagaacatctgtcctgagaaggacaccagttttcagatctgtatgaggacgtgcttactgcagataactggctataagcagctctaccacgatgtagaaaatgtgaggaaaaaaccctatgactctggcaatgtgcagcacgagaaactgcttctcaagctttggaatcttctgatgcctacgaaaaagttgaaggcccggatctccaagcaatgggcagacattggtttccaaggtgatgatcccaaaacagacttcagaggcatgggcatactcggactaatcaatcttgtgtatttcagtgagaattacaccagtgaagctcatcagattctttcccgttcaaatcaccccaaattagggtattcttatgcaatagttggaatcaatcttacagagatggcttatagcttactgaagagcgaagccctgaagcttcacctctacaactttgttcctgggataccaacaatggaacactttcaccagttttattgttacctggtctatgaatttgacaagttttggcttgaagaagaaccagaaagcatcatgtacttcaacttgaaatacttcagaactctatttaagaaagctagtggacaatcagtgtatgtttacagttgtttgtacactgttctccacaagttccacacccttccaaagagcccttcagcagtcacgtgaactccagtttggaacttgggacttagcctgttagtttaaaagtatgaatcaggtatatttatatttagccagttgattaaaatgtgcacgaatctcatttttatgtgttgtagctctcaagctggtgtcattttcaaaatttcaaaattctccaagattattgttcagtctggaaatggcttttgaatgtgctttgtctcttttattctaggcagatgggcaccaggtgagtgctaaggctttctctctgtctctggcacttgtcagggtgtccttaccataaagcaggggcagtgtggctctatcagagagggtgaagaatcatggcttccttatgtatatctctgatgactgattttgttgaggaaaaagttttaaatgtagcataggttggactcaacaaccacattaactttgatagggtggttctatgtttttgttaaattacttacaaatatgtaagcagtcttgctccctagagggaaagtactggttggtaacttaaatttttgtctatcttgcatcaaacctttgagtttcaagtaaaagcaatagtgtgagatgtgctgttccttttgtttgtgatgttaagtgaagaaaaataaaaacacggcagaaaactgttgcaaagccttcctgtggatgcttgggctg

SEQ ID NO: 4010 - DNA, 1547 bp, Cricetulus griseus
atgaagctgacagtgatcgacaccccaggctttggagaccacatcaacaatgaaaactgctggcagcctatcatgaagttcatcaatgaccagtacgagaagtacctgcaggaggaggtcagcgtcaacaggaagaagccggatccctgacacgcgagtccactgctgcctctacttcatccccgccaccggccactcgcttaggcccctggacattgaattcatgaagcgtctaagcaaggtggtcaacattgtccccgtcatcgccaaggctgacacgcttaccctggaggagagggtttacttcaaacaacggattactgcagacctactgtccaatggcattgatgtgtacccccagaaggagtttgatgaggattcagaggaccggctggtgaatgagaagttccgggagatgatcccatttgctgtggtgggcagtgaccatgagtatcaagtcaatggcaagaggatcctgggaaggaagacaaagtggggtaccattgaagttgagaacaccactcactgtgaatttgcctaccttcgggatctcctcattaggacacacatgcagaacataaaagacatcactagcagcatccacttcgaagcctaccgtgtgaaacgcctcaacgagggcaacagcgccatggccaacggggttgaggagaaggatccagaagcccaggagatgtagacgccatcccgcccctggaccccacccccaaatcttctcatcctccctggcccacctacccacctaccctgtcttattttatatagtcgtctccatttgtcacccgcccctttctctttccacactctgcccagtaacaagggagggcttatcttccaagtgtgctcttattggctgcagcagcagggtgggcgggactacatcctgtgcttgcctctgtgccgccctcagctgcctgctccccaaggaagctaaagacatccacaaccaaagctgccaatcacttagacatagtgacaaccatgccccttagccaggcctcctcatcttctctcagagagaactgttgggaccatccatgcacagctgaccaaagccaagccctttctgtttgcccaccattcttgtcctgtctctgggaggagtttggtgagtgtagacagcttggaccagcttggggaaggtgtctctacagaccctgggctagcttgcagcctagaagtgcggtgggaggggggggatgcacagatgtggggtgctcgtggtttccctgtattgggtgtctactcccccacccaagcgtggaaggcccctcaacgagccctgtagccgaacagttcgcttgccagcttgccaagttcttttgccaaaaatcaggactttgaaggaaatcttcagcatgctggacccccgggcaccttggccttccccagccccagtgtccctggggactcagcagcagcccagtgtcatcagggtgacatgtgcctctgtaaccagccactgaaaactgttcgtctcaccaggctgttccactcggcctttcactgggggcctcttgggggggggg

SEQ ID NO: 4011 - DNA, 1547 bp, Cricetulus griseus
gtaaaaacatgccttggagtgtggttgaggcttccacgcagttaggcccatccaccaaggtcttgcatggtctctacaacaaagtcagccagtttccagaactcaccagtcacactatgcgctttaacgccttcatcctcggcctgctcaacatccggtccctggagttctggtttaatcacctgtataaccatgaagatatcatccagacccactaccagccctggggcttcctgcgtgccgctcacacagtgtgccctggcctctttgaggagctgctgttgctgctgcagccattagccctgctgcccttcaaccttgacttgctgtttcagcaccggctgctgcagagtgggcagcagcagaggcagcacaaggaactgctgcgtgtgtcccaggacctgctgctgtctgcacactcaacattgcagttggccagagcccgaggccaggagggccctggagacgcggacagggtggccaactggggagcgggtgaagggtgtgggtgcctcagaaggtggagaagaggatgaggaagacagggaagaggcggatgaggttgtggggagctcagagcatagcaggtggacccgaggaggccaggctggctggtggtaccagctcatgcagagctcccaggtctaacatcgatggcactgctgagggctccagattccctcgcagtagcagcagtggcagtggcagtggcagtgagaaaaagaaaggggtaggcagtggggggccttcccaggctccaccaccaagggaaggtgtagtagagggggctgaggcctgccctgctcctgaggaggcccttagccaagaaaggggctggcctttctggatggggagcccccctgactctgtgctagctgagctgaggcgtagtcgagagagggaaggacctgttgccccaccaacggaaaatgaagaaaggacggcagagcccgcaccagggggcatcaagtggggacacctctttggttcccgaaaagctcagcgggaagcccggcccacaaacaggctgccttcagattggctgagcctggacaagtctgtgttccagctagtagcacagacgatgggggcccgtcgggagcccgagcccagggagaacctacaagagtcacactctccagccctgtcctccaaacctccatgcgaggtgcaggctctatgccaccatctggccacaggccctggacaactcagcttccacaaaggagatatcctgcgggtgctgggaccagccggaggagactggctgcgctgtagccgcggccctgacactggcttggtacctctggcctatgtgacactgaccccaactccaagttcaccacctggaagcagccaaaactgaggccttgtgcatgctggtggcctcagggaccctcatataccccgagactcagagcctaagagtccttcccaagcccttaggcttggctacaaaaagtagactgagagctggggccatgtatccctgtgctggcacctgctccccgtgctcagtattcagtactcctcctcaactgtcccag

SEQ ID NO: 4012 - DNA, 1547 bp, Cricetulus griseus
ttggatgatatgagacgactcatagacttaggggtggggctggcgccatattcagcagtggagaaagctatggcccacctacaagaactgcttacagtgtcagagcactgggatgacaaagccaaaagtcttctcagagcaagaccacggcattctttgagtagccttgctacagcagtaaaggaaatggaagagattcctgcctatctgcccaatggtgcagttctgaaagattcagtgcagagagccagagactggcttcgagatgtagatgcactgcaggcaggaggacgtgtgccagtgttagacacgctcgtcgaacttgttgcaaggggtcatctatcccagtacacctgaattcttaccaagattggaattactagtagctgaagttcaagcatggaaagaatgtgcttctaaaacattcttgactgagaattcaccatattctttgttagaggtgctttgtccgaggtgtgatattggccttttgggatttggaaaaggaagcagagaaagttgaaggcaactcttggggaagctcgcctaagagagatggaagctttgcagtctctcagacttgccaatgaagggaaattgctgtcatctgtccaagatgtagaaatgaaagtctgtctgtgccagaagactccagccactcccatgatccagtgtgaactctgcagagatgctttccacactagttgtgtggcagtaccggctttgtcctcattgtcgaaggtcagagaagcctccattagagaaaattctgcccctgctagcctccctacagcgtatacgagttcgtcttcctgagggggatgcacttcgctatatgattgaaagaaccgtgaactggcaacatagagctcagcagctactttcttcagggaatctaaaatttgtgcaagaccaagtgggctctggactgtttagcagatggcaagcctcagcaggacaggcatcagagacaaacaaggtgtctcaacctcctggtaccacatccttttcattgcctgaggactgtgacaacagaagctcgttttcacattctcccggacagagttgtgttcccctccatggtgtgagtccagaagtgaatgaattgttaatggaagcccagttgctccaggtatcccttcctgaaattcaggaactttatcagactttacttacaaagccaaactctgctcagcaaactgaccgaagctcacctgttagagccagtagtgaaaagaatgattgccttcgagggaaacgagatggagtcaacagtcttgaaagaaaattgaagagacgcccagaaagagaaggccttcccagtgaacggtgggatcgagttaaaaaatgcggaccccccaaaagtttttttttttttaagtgtgtgtatcaaatgttgcagtttatattgtggaataataaatccttggtcctattgtaacactagactgcagcttcttctgcccctccaccttgtgggcctacagaaccagagggcttgcttgcctttgcttctccccaggcaggctgcagcagaagtgtgtttg

SEQ ID NO: 4013 - DNA, 1546 bp, Cricetulus griseus
gagtgcctgctcattgtgcccccgggttatgacgacccccaataaaggaaacaaggccttgaaggtgaagcgggagccgggtgagaatggcaccagcctgactgatgaggagctggtgaccatgtcggttcgagagctgaaccagcacctgagaggcctgtccaaggaagagatcatccagctgaagcagcgccggcgcacacttaagaaccgcggctacgcagccagctgcagagtgaagcgtgtgacccagaaggaggagctggagaagcagaaggcggagctgcagcaggaagtggagaagctggcctccgaaaacgccagcatgaagctggagcttgacgccctgcgctccaagtatgaggccctgcagaactttgccaggaccgtggcccgcagccctgtggccccagctcggggtccccttgctgctggcctggggcctttggtccctggcaaggtggctgccaccagcgtcattacaatagtaaagtccaaaacagatgctcggtcataggactcaccgtgcagtggccaggcagtctttaggggccactgagtgcgtggcaaagttggcagccctgtccctcttcctttcctgttccctttcttccccctccctttcccctttccttccctgcaaagcacaacctgcacccaggggcgttgggctgagcccctatcatccttgtcgtcacgcgtgtgttttgtacgttgggattggtcagttcaacagtgatgttgggttgcccctaacccctttgtaccaaggccatgcaggctaggagtccagagtgggcactgcaggaatggacaagagtgcactgggcttaggtctgccctttctctctggtggtctgcaggccctacaggctgccagtctgcagtgggacttgggagctttctcttcagattccagtgggcctctcagcttgatcccgaaggaagagatgggctctgccctgaaaagtggttatgtcttgaaggctctggatgggtaggccaccagcctgggcactggggcagaaaccatggtgctggagcctggcacagtgcactggataagaccaaatcgccggttctaagtgtgggtgggaggcgtgtcagtgtgtcctgcgatgggtccggtgtcactgtttacatgacctatttgtgtggttatatagccctttatttaaaagagaagttccttttacgaagttattaaattatatgtttaagagctaaaagaaaaaaaaaagctgcagagtatttataaaattgtcttaaaaaaaaaaaaagaaaaagaaacccaacatttgaccatataaatggaaaagggaagaaagtatagtataaactttgctaggtttaaaaaaaaaaaaaatccctttcttgtaaacttggggacagctctgtggctgttggagtttagtttttatacacagagttatcagacattacttataaaacttagtttaaaaaaaaaaaaaaaaaaaaaaaaaaaaaaaaaaaaaaaaaaaaaaaaaaaaaaaaaaaaaaaaaaaaaaaaaaaaaaaaaaaaaaa

SEQ ID NO: 4014 - DNA, 1545 bp, Cricetulus griseus
ggggacgcgcggctcgccgccatggacgacaaggcgttcaccaaggagctggaccagtgggtggagcagctgaacgagtgtaagcagctgaacgagaaccaagtgcggacgctgtgcgagaaggctaaggaaattttaacaaaagaatcaaatgtacaagaggttcgctgtcctgttactgtttgtggagatgtgcatggccaattccatgaccttatggaactcttcagaattggtggaaaatcaccagataccaactatctattcatgggtgactacgtagacagaggttattattctgtggagactgtgactcttcttgtagcattaaaggtgcgctatccagagcgtattacaatattgagaggaaatcatgaaagccggcagatcacccaagtctatggcttttatgatgaatgtctacgaaagtatggaaatgccaacgtatggaaatactttacagatctctttgattatcttccacttacagctttagtagatggacagatattctgcctccatggtggcctctctccatccatagatacactggatcatataagagccctggatcgtttacaagaagttccacatgagggcccaatgtgtgatctcttatggtcagatccagatgaccgtggcggatggggcatttcaccacgtggtgctggctacacctttggacaagatatttctgaaacatttaaccatgccaacggtctcacactggtgtctcgagctcaccagcttgtgatggaaggatataattggtgccatgatcggaatgtggttaccatttttagtgcacccaattactgctaccgctgtgggaaccaggctgctatcatggaattagatgacactttaaaatattcttttcttcagtttgacccagcacctcgtcgtggagagcctcatgtgacccggcgtaccccagactacttcctgtaaattcttccccaggacctttctttgtatgtggaagtatacctggctttttaatatatatatatatatatatatatttaaaaacaagtcatctgtgtgtttctgtaacaaattgtgatatgtcttgacattaaactacatcatggaccaaacgtgccatactaatgatgagcgtttagcacaatttgagactgaacttactacactgtgttctagatcagtctgcctgctgtgttgtaggaaccattcttcttggctggttaagcaaaaaggggtcactgactgcttcatctcctttgcacttggaaatttagttacagtgtttaactggcatggattaatagagtcggagttttatttttaagatttcacaacctgacttccacttaattcattaccctgtattttattgaaatgtgtaactaactgaagaagagattcttgggagtatgttgtcataacattaaagagatttcctttcatttaaactaaattactgtttgatgttgatctgcattatttctgtatatttgtcatgacagtgcttgcatcctatttggtgtactgaacaaataaactttccaatttaaacaaaaa

SEQ ID NO: 4015 - DNA, 1545 bp, Cricetulus griseus
caggactgctgagctacctggtgttcaacatcatccccaccctggctgacatcattattggcatcatctacttcagcatgttcttcaatgcctggtttggcctcattgtgttcctgtgcatgagtctttacctcatcctgactattgtggtcacggagtggagagccaagtttcgccgtgatatgaacacacaggaaaatgtcaccaaggcacgagcagtggactcgctgctcaactttgagacggtgaaatactacaatgctgagggttatgaagtagaccgctacagagaggccatcgtcaagtatcagggtttggagtggaagtcaaatgcttcactggttgtattgaatcagacccagaacttggtgattgggcttgggctcctggctggctccttactttgtgcatacttcgtcagtgagcagaagctgcaggttggggactttgtgctttttggcacttacatcactcaactgtacatgcctctcaactggtttggcacctactacaggatgatccagactaatttcattgacatggagaacatgtttgacttgctgaaagaggaaacggaagtaaaggatgttcctggagcagggccccttcattttcataagggccaaattgaatttgaaaatgtacacttcagctacactgatgggcgggagactttacaggatgtgtccttcactgtgatgcctggacagacggtggctctggtggggccatctggggctgggaagagcacaattttacgcctgctgtttcgcttctatgacatcagctctggctgcatccgagtagatgggcaggacatttcacaggtgacacagatctctctccggtctcacattggagttgtgccccaggacactgtgctcttcaatgacaccattgccaacaatatccgctatggtcgtgtcacagctggggacagtgaggtagaggctgctgctcaggctgcaggcattcatgatgccatcctgtctttccctgaagggtatgagacacaggtaggagagcggggactaaagctaagtggtggtgagaagcagcgagttgccattgcccgcaccattcttaaggctccagacatcattctgctggacgaggcaacatcagcactggatacatctaacgagcgagccatccaggcctctctggccaaagtctgcaccaaccgcaccaccctcgtagtagcacacaggctctcaactgtggtcaatgctgaccaaattctcgtcatcaaggacggctacatcatagagagaggaaggcacgaagctctgttatcccgaggtggtgtgtacgctgagatgtggcagctgcagcagcaaggacaagaaactgtctctgaagactctaaccctcaggacacagcacagtgacaaaagtgacctttcccttctaaaagctaactcaggagaaaaagatgtgctccctctctggcctatttcatcctgctataggagtttggtgctcgctattgtaagagaaaggggccttccagaaagcactgtaaggaataaatggactgtgcaa

SEQ ID NO: 4016 - DNA, 1545 bp, Cricetulus griseus
cagagctttgctccctgtaatcagtctgtgctaccccagcattccaagtgtgcacagttggacttgcctggaaagggttttgaaccacccctgcaccccaatacttctaacttaggagattttgtcacttgtttacaagttcccgaaaaccaaagacatggaataaatccacagtcaaccatggtcactcctcagacatactatgctggggccatgtccatgtaccagtgccagccaggacctcagcacatccctgtggaccaggtgcaatacaaccctgcaattccaggcctcccaggcatttcaaacaagttccagaaccagggagtgttaaatgaaacgtattcgtccgaaacctccataatgataccagaaggccaccatgtaacacacacaaggcagccatgtccactaagctgcagggaagggaagtggagtttgtttagctctttggttaaattaagtaaagcactcatttcattatgtataaattgtctttaaaaactatgttaggtctgcaatccttgttgttatattgactttataaatttcacttcttatactagtggaagctattggtttttctcatatttgaggagtgttaagattgaagttgccatgtttggtacaaggtattttaatgaatgaaatgaatggtgcattgtataaatataacgaacaaaataaatctgtaaaatattttcagttttcatttaggaatagtccttacatcatctgcatatttttcagtgtatctcattaagaaatcagataatgaattggggcttttgagctggtattaagataaagataaatgtgacttgttgacctccatccctttcacaggggtcaccaaagaccatcagaaaacacatatacttacattacaattcataacagcagctaaattatagttatgaagtagcaacaaactaattgtatggtttggggtcaccacaacatgaggaattgtattaaaagggtcacagcattagtaaggttgaggaccactgaaatactggctcttttctttttcttttagaaaactaatgtatgtaaacatggcttcaggtaaaaagatatcccaattttatgcattttcagtcaaaattctttaagaataaacattgaaaaatgactgtctaaaacatttcacaatttgcttccagcatgaggtatcactaaggatttaaactactttggacatagtaagtatggtggcatttaattacatacttataagactaaaagttttaaaagcaatattgtgtatttttacctatataaaataactaaaacgtctaagaataataaaatcacattaaactgaatatgcatttgtctgtattgctaaatgcccaacagaaggaacgaccaaagcactgctggactgaggaattacttttagatgaaattcacatctaaggctatgtgtatgtgtgagtggagttcttcctctccaggtgttgtttcttacatacatgaacacttaccaatatgtcattgtagtaacctttcagttgttactatgcacaagctagcttg

SEQ ID NO: 4017 - DNA, 1545 bp, Cricetulus griseus
gcatcatggtgcaggaatttgtctacctaggagcaattgacatgtacctgcgcaagcgtggccacctggtgccagccagctggaagctgcaggtgatcaagcagctagcctatgccctcaactatttggaggacaaaggcctccctcacggcaacgtgtcagcgcggaaggtgctcctggctcgcgaggggatggatgggagtccacctttcatcaaactgagtgaccctggcgtcagccccacggtgctgagcctagaaatgctcaccgacaggatcccctgggtggcccccgagtgtctgcaggaagcccggacgcttggcttggaagccgacaagtggggctttggcgccaccgtgtgggaggttttcagcgggggacccaggcacatcacctcgctggagcccgccaagaagctgaagttctacgaggaccaggggcagctaccggccccaagtggacggagctggccgggctcatcgcgcagtgcatggcctacggaccccggccggcggccctccttccgtgccatccctcacgggacctcaaccggcctcattacatcagattatgagctcctctcagacccaacacccggcacgcctgacgtccccgagatgagctgtgcagtggcgcccagctctacgcctgccaggacccccacaaatctttgaggagaggcaccttaagtacatctctctgctgggcaagggcaacttcggcagcgtggagctgtgccgctatgaccctctaggggacaatacaggacccctggtggcggtgaagcagctacagcacagcgggccagaccagcagagggacttccagcgggagattcagatcctcaaggcgctgcacagcgacttcatcgtcaaataccggggagtcagctacggtccgggtcgccagagcctgcggctggtgatggagtacctgcccagcggctgcctgcgggacttcctgcagcgccaccgcgcgcgcctgcacaccggccgcctgctgctgtttgcctggcagatctgcaagggcatggagtacctgggcgcgcgccgctgtgtgcaccgcgacctggctgcacgaaacatcctggtggagagcgaggcgcatgtgaagatcgcggacttcggcctcgccaagctgctgccgctcggaaaggactactacgtggtccgcgagccgggacagagccccatcttctggtacgccccagaatccttgtccgacaacatcttctcccgccagtctgatgtgtggagctttggcgtggtgctgtacgagctcttcacctacagcgacaagagctgcagcccttctgccgagttcctgcgcatgctgggccctgagcgtgatgggccggctctctgccgcctcctggagctgctggccgagggccgccgcctcccgccgcctgcagcctgccccatggaggttcaggagctcatgcagctgtgctgggctcccagcccgcaagaccggccggccttcagcgccctgagcccgcagctggacgctctgtggcgtggaagccctggatagcagccaggg

SEQ ID NO: 4018 - DNA, 1545 bp, Cricetulus griseus
  modified_base (1521)..(1521): a, c, t, g, unknown or other
  modified_base (1530)..(1530): a, c, t, g, unknown or other
cgcgcctgaggcggacgcaacggggccgggggcggcggcagcagtagtggcggcggcggcggcggcgcgggtgggcgccgcggctggcccgagtggatggagttggaggggcggagtgcaggcggtgtggcgggaggaccggctgctgggcccgggcggagccccggggagtcggcgctgctggacgggtggctgcagcggggcgtgggccggggggccggcggcggggaggcgggggcttgtcagcccccagtacggcaggatccggagtccggcccggagtacgaggcgctgccggctggagccactgtcaccacgcacatggtggcgggcgccgtggcagggatcctggagcactgcgtgatgtacccggtcgactgcgtcaagacccggatgcagagtctacagcctgacccagctgcccgctatcgaaacgtgttggaggctctctggagaattataagaacagagggcctgtggaggcccatgcgggggctgaatgtcacagcaacaggcgcggggcctgcccacgccctctattttgcctgctacgaaaagttaaaaagacattgagtgatgtaatccacccagggggcaatagccatattgccaatggtgcagccggatgtgtggccacgttacttcatgatgcagccatgaatccagcggaagtggtcaagcagaggatgcagatgtacaactcaccgtaccaccgggtgacagactgtgtacgggcagtgtggcaaaatgaaggggccggggccttttaccgcagctacacgacccagctgaccatgaatgtccccttccaagccatccacttcatgacctatgagttcctgcaggagcactttaacccccagagacgctacaaccccagctcccacgtgctctccggagcctgcgcaggagcagtagctgccgctgccacaaccccactggacgtttgcaaaacactgctcaacacccaggagtccctggctttgaactcaaacattacaggacatatcacaggcatggctagtgccttcaggacggtttatcaagtaggcggggtgactgcctacttccgaggggtgcaggctagagtaatttaccagatcccctccacggccatcgcatggtctgtgtatgaattcttcaaatacctaatcacaaagcgacaagaagagtggagggcaggcaagtgaagaagggacactgaggggaccagggtcccacagccctgctgttcctgccccctcagcacctttgtctcctggcatgatccagttgctactggagttggacgagaggagagcgctttctccaggctctagttggctaacactagttcttgccaacgtctgttaccaccatcgtctttccttctgggcccgcagtgagttcagcaaagcctgcctcagtacctcgatgacctacatcctggacctggcggcctgctctagatacagagggataagcagcgcattcccttggttcccaattaaaaaaaaaaaaactttaaaaaaaaaaaaaaanaaaaaaaanaaaaaaaaataaaaa

SEQ ID NO: 4019 - DNA, 1545 bp, Cricetulus griseus
tgaggaggaggaggagaaatgttattgggaactggttttgggaaggagatgacactagttatgatcctaatcctaaacctgtgttcagaatagttaaacctcaaccagtggatgaaattaatgagaaaataggccaaaggactggtctgaggttaccatttggcccaaagctcctgctgtaactccagcagtgttaggttatacttctcaggactcatctgagtcaaggccttcttcctttattgttctggcctcaaatgaagaaaaagcttcaaaaacagcctgtactaagaatactcgatcaggcctgcagcctatacctgagtatccatttggttctgatccttgcatccagaccttagatgaaattagacaacaaatcaagatcagagaaatgaatggcatcaagccgtttgcttgcccttgcaaagtggagtgctatttggattctccagaatttgaaaagcttgttaacatacttaagtcaactaccgatcccctcattcataaaatagcacagatagcaatgggtttacataaagttcatccatttgcccgggaattcattaatgaagtgggtgtggtgacacttattgaaagcctgctcagtttttcttccccagaaactagaaaaaagactgttattactctgaattcttctggggatgacagacaacacaaagttgaatttcatgtgaagcatatgtgtaaagaaaccgtgtctttccccttgaactcacctggccagcaatctggattaaagataatagggcagctaactacagagtctgtccatcactacattgttgccagttacttttcagagcttttccatttgctgtcccagggaaatcgtaagactagaaatcttgttttgaaagtatttttgaatatgtccgaaaatccaaaggcagctagagatatgatcaatatgaaggcattagcagcattaaaactcatctttaaccaaaaagaggcgaaagcaaatcttgttagtgctgtggccatctttattaacataaaggaacatattagaaagggctcaattgtagtagttgatcacttgagttacagtactcttactgccatattccgtgaagttaaagggattattgaaagaatgtaaaatgatccagaaatgaaagagaacactgaacagtgtccaaattctgattggctatacattcccaaagagttttgcatactattttggtaataactgctcacacattttgtcttaacatcttttacaaattattacctgtggcaggttctagctcaaatctaaaacattttttggtgtattaaatgaatattaaatattgagataaacaagtttgtcgatttctatcttatctagattagcagatttttaacataattttacgtaaggaaattgtgatccagctgtcagaagtacagtgtcttgatgattgataatctgcttagatctgtttgtggctccaggtagcaaagaagaaactactggtcttgtaatctagttaaaaaataaggtgtaacaaaaataaaaataattgataggta

SEQ ID NO: 4020 - DNA, 1545 bp, Cricetulus griseus
tgttagaggaaagagctaagtgagagcgcgcgctctacctaccgacagtgagcagagccgccgccgcccgagccctcagccggcaccgcgccccacctgcccagcccccagcccagcagcccagcccggggagccggccagcttggggttcggtcccgggggaggggaggtttcggggagtaccggggcggggagcttgagccaaggggagggggccgcgggttttcatgcgcccagcatgagctcctacttcgtcaaccccctgttctccaaatacaaaggcggcgagtccctggaaccggcctattacgactgccggttccctcagagcgtgggcaggagccatgcgctggtgtatgggcccggaggctcggcgcccggcttccagcacgcctcgcaccatgtccaagacttcttccaccacggcacctccggcatctccaactcgggctaccagcagaacccgtgctcgctaagctgccacggagacgcctccaaattctatggctacgaggcgctccctagacagtccctttatggggctcagcaagaggcgagcgtggtgcaatatcccgactgtaaatcctccgccaacactaacagtagcgaaggacaaggccacttaaatcagaactcgtctcccagcctcatgtttccatggatgagaccccacgctcctgggcggcgcagtggacgacaaacttacagccggtatcagaccttggaactagagaaggagtttctctttaatccttatttgacacgaaagcgccggattgaagtctctcacgccctgggactgaccgaaagacaagtgaagatatggttccagaatcggaggatgaagtggaaaaaggagaacaacaaggataaactgcctggggcccgagatgaggagaaggtggaggaagaagggaatgaggaagaggagaaagaagaagaggaaaaggaagaaaataaggactagcaaaaaagagagagagacccccccccagcaactcccttgaagtttcgttttatggtagcagataaattgagaagtttacgactgtcatttgcttttatagagaatagaatgacactcacaactctaactacctgtcagatacttgcagctctacttttattacctttggaccccccctctttatttgtttggggcgccgggggggggagactgagacacagggaaaagttctgtcccactccatggccagcacacactcacttgtccttgcttctcccttctgagcccttcctgaattttaaggtctaagccttcacacacacacacacacacacacacacacacacacacacacacacacacacacgcaatggtctctaaaatcctacctattcatgccatagtcacttgggcccaagccttccttgccttgtccttgctgtttgatttctgttcttttgggccggcttcctctgagctgtgttagtgtttgtgctcagaaatcaccataatcatgatagtatactgataaaaactttaatatactacctaaagggaacctgcaataatattggggg

SEQ ID NO: 4021 - DNA, 1544 bp, Cricetulus griseus
gacagctgcgacaagcgcgcacgtagagtcgggcctggcggagagaggtctccagccctgagggcaccttctgcaaaaatgtctgcggatcctttatccagcaaagccctgaaggtcaagcgtgagctgagcgagaacacgccgcacctgtcggatgaggcgctgatggggttgtcggtgcgcgagctgaaccggaacctgcgcggtctgtcggcggaggaggtgacacggctgaagcagcggcgtcgcacactcaagaaccgtggctatgcggccagctgccgtgtgaagcgcgtgtgccagaaggaggagctgcagaagcagaagtccgagctggagcgcgaggtggacaagctggcgcgcgagaacgccgccatgcgcctggagctcgacgcgctgcgcggcaagtgtgaggcgctgcagggcttcgcgcgctcggtggccgccgcccgcgggcccaccgcactggtggcgcctgccagcgtcattaccatcgtcaagtcgacaccaggcccctcccccgctcccggaccccgccccctgcctcttagtacccgccccttcccccggcaacgcccctccgactcgactcccttcccaaagtgcctgagtgcctcctgctccgggtttctctgcctgccactgctacccagtgtggtgacttcacattcctttcctgggctctttttaactcttgcagacccccagactgggacctgatggccctagggaggggcaactttgctaagttgcggggagggcgttgggtcctgggtttccttgggctgaaagtccttctcagagtggaaggaggtggtgtagagatggcccggagaagagctggcaggagaggcttttggattgtaccagtatgtccttccgaccttcccaggaccttaggacctgggtgtgaccttgtggggctgccctgctgggaagcagaactcgtaggagggcctctggcctgggagacctttgtctgtgggtggggaaagaagctgaaggagagagaaggtgacacaatgggatgaggtgaggagctggccagccagagaagggacaatggggatgacctctgtggtagtggagagagagacactacggtcctgatgcagggaatttagtaaaagggggtcccttgggattaaggcttctaatttggtcctgagtatctgtggtagtgtgggactgaccattggtcccctgggaagtctggccctagcacctcccctatactgtatacagctgaacccttgcactcttatttattgcacgaatctaagttattctaaccagccagagcccagcttctcttcccagggaaatatgtgggccctgagctggactttatattttatatctacaaataaatcacatttaatcttatatttagggaaagctggatagcaacaacagcaaggttttttaaaaaaaaaattacccagctcccagagttatttattttctgatttaaagtgagccagttatcttccttgagtattttgtagactttctgaataaagtcgagctctcttttcccacaa

SEQ ID NO: 4022 - DNA, 1544 bp, Cricetulus griseus
tgtgttataaatgtgtggtctgtggaaaggtgtgtgaagattcgggggtcatgcgtttacacatgagccggttttcatggaggaggggcaggtggcaatgcaggatttgtgaagatatgtttgattcccaggaatgtgtaaaacagcactgcatgtccttgacaagtcaccagtttcataggtacagctgtgcccattgcagaaagacttttcataaaatagaaactttgtaccgacattgccaggatgagcatgacaatgagatcaaggttaagtacttctgtgggctttgtgatcttatttttaacaaggaagaagcatttctgagtcattataaggatcaccacagcacagattatgtgtttgtgtcagaaaaaaactaaaacctcaaattaaaactgaggatgatttaaaataatagagactagtgatttgtaagctgtggttgtcatgagagttacatctgtaacgtcaacagaaaggaagattacgacagatgtcttcagatcatgctagataaaggtcaagtgcatggaagagaagacagtgacgagggacagcagtatgtgatcaagtgtggcgtctgcaccacagcgtttcagaatgccgagagtgctcagcagcacttccacagaaagcatggcgcctgccagaaacccggtgggactaatggtggatctgacagaggaagcatgggcaagttgctgccagtgtgtcacatgctgagaaaaacccaaagcagacaaactatcagaaacattcagacgtggagaaaggagctgagcatgacgccagctgccagaatatagaggaggaagttgagcttccagatgtggactacctgcgaaccatgactcatatagtctttgtagattttgataactggtcgaacttttttggtcatctacctgggcaccttaatcaaggaacgtttatttggggctttcaaggaggaaacaccaattggaagcccccactcagctgtaaggtctataattacttgaacaggattggatgcttctttcttcatcctcgctgtagtaaaagaaaagatgctgctgattttgccatatgtatgcatgctggccgactagatgaacaactgcccaagcaaattcccttcactatcctctcaggagaccaaggttttctggaactagagaatcaatttaagaagactcagcggccagctcatatactgaaccctcaccacttagaaggagacatgatgtgtgccttgttaaatagcatatctgatactaccaaagaatgtgacagtgatgacagcactggtgtgaaaggcactccagtagaggagctcagatccacagaggatgtggaattagaagaagctattagaagaagtcttgaggaaatgtaattaaagttattaccacacaacatcaagtggccttgaagagactcaggaaaaggaattcttgatttttgttttctaaaaggaaaccagaaatctactaggataaatgtatctaaaaacatgttttattctttcctatgttcggaatcttgtatttgctttgtat

SEQ ID NO: 4023 - DNA, 1544 bp, Cricetulus griseus
gcggcggcgcggcctcggcctgtgtgactggcggcgcccgcgcagcctcgggctggaaagggtgcaagatgaccaacgaagaacctcttcctaaaaaggtccgtctgagtgaaacagacttcaaagttatggcacgggatgagttaattctaagatggaaacaatatgaagcatatgttcaagctttggagggaaaatacacagatcttaattcaaatgatgtgactggcttaagggaatctgaagaaaaattaaagcagcaacagcaggagtctgcacgaagggaaaacattctggtcatgcgattagcaaccaaggaacaagaaatgcaagagtgtactactcaaatccagtacctcaagcaagtccagcagccgagtgtcgcccaactgagatcaacaatggtagacccagcgatcaacttgtttttcctaaaaatgaaaggtgaactggaacagactaaagacaaactggaacaagcccaaaatgaactgagtgcctggaagtttacgcctgataggtaaacaaatcatactccccagtcaagacttccctgacagtcccacctcgagaaagctgtggtgggacagccaagtactcgtttccactccaagactcagactttttgagccaaaaaagccacattcttatactgtccagcttgtaatggttaatgtaaaacttacaggtgaaccttgtgtttcagcttctctcttccccttccccttgcttcagaggcctgatgccgtcggactattccgaagaagaggccacctccgaaaaattccccttctagaacatgtagacattttgagaaatgtttctgtttgaagaaaatagaggggaaacagaagtcttaagtctgtggcacactgtgtcttcagacagtttggaggattgaaaacctagaggttttaaatcatgaattgaacatgtaaaattccactaaaatgtaaaaatggaatatgcatcgctcttaaccttgagcatagtgacttagagacactgtacatcagttatgccaataagactgtggacttcatgactgttgaactactgggtcaaaactcaaatgaggtgaattttgcctttaaagggtttacgtgctaagaaccaacttctaatagccatgagacaatcaagtcatagctaccagtacaagtagtgcatatatttatccattagctctgagctctatattacataatggagccttaaatctatgtggtttttatcaatggtttgttctttgaatggttgtggaaactgtagataatctttaccgaggactgtacaaacgtgaaggtgtggtctcacacttcaggtttaaactgtttgaagcattataagcattcatttcacaactagattgtataaggtattggctgtgatgagactgccgttatttagtaaaccctcatctcattcagcaggcacatgttaaacagcattgtcgttggtgttaaatgggggaatgtgttccttcattgtatttgggccttttgtatcgaattcttgatattaaattaaatgtgccttagaaa

SEQ ID NO: 4024 - DNA, 1544 bp, Cricetulus griseus
  modified_base (292)..(292): a, c, t, g, unknown or other
ggattaaaaacaagcaatccttttcatcatgatcaactagatcggatatttagtgtcatggggtttcctgcagataaagactgggaagatattagaaaaatgccagagtacccaacacttcaaaaagactttagaagaacaacatatgccaacagtagcctcataaagtacatggagaaaacacaaaggtcaaaacctgacagcaaggtgttcctcctgcttcagaaactcctcaccatggatcccacgaagaggatcacctcagagccagccacagcagcagaacccacancagcagcccaccagcccccccaccagcagacagcagcccaacaccaggccctccaccacagcagagcagtgccaaaccaatgggactgcagggggagctgccgccgccgccgccggtgctggagcagggctgcagcacagccaggactccagcctgaatcaggtgcctccaaacaagaagccccggattgggccttctggtgcaagctcaggcgggcctgttatgccgtcagattatcagcactccagttcccgcctgaattaccaaagcagcgttcaggggtcttcccagtcccagagcacactaggctatgcctcatctcaacagagtacacagtaccacccttctcaccagacccaccggtactgacaggttttattcatgttcaaagtatgtattatgtatgcataattttgctgttgttactgagacttaacgctgtcaaggatctttttattgcactgaatgctttcttttgcccctaggagaaaacttaataattgtgcctaaaaactatgggcagatagtgtaaagtagatgaggtgaatatttgcatttccatgatctacgaattagaggggagttcttttttagctacttttaaggaatccctcaccctccagagtcaagaggaaatgtaaaggtgtagagctcccattgtagtgcagggggcaagaacatctacgttctgatgctactagcagcaccagccttgttttctaatgtttcttgagctagaaaaagtagccaattgttgtatatgcaaactatatgcatttttaaaaactattcttgtgaacttatctacctggttatgatactctggggtccatattcaagtaaaataagatttttgaagccagtatacattttgcactattgatgtgatactgtagccagccaggaccatactgagttcagcataataatgcttttaagtagtaataaaggttgtatggtgatgaaggtccttttgtttacttctgaacccacttggacaactatgcttctgaatttatagtaaacagtgttatgggaagcaggtatgaggctgaccactagaggagaaagccagtgagtaaccgtcactaaaggcatctatgcatatttgaaatgttcacagcagccttcaacagcaactgggtggcccttgcaaacagagcacattctaccaagtggttgtaggaaatcacagaaaataagctctgttcttgcccttgagtgagctcacatttaataaaagacattagcc

SEQ ID NO: 4025 - DNA, 1543 bp, Cricetulus griseus
caggtgtgagagctctcgctgtgccccaagccggacggtccgggcttctgaagctggcaggagacaagtggggaacaagctcaatcaggggttaagaggaaattgagttggactcctgcctgatccctcactgtggcaggatgaatgtgggggtggcacacagcgaagtaaaccccaacactcgagtgatgaatagccggggcatctggctggcctacatcgtcttggtaggactgctgcatgtggttctgctcagcatccctttcttcagcattcctgttgtctggaccctgaccaacgtcatccataacttggcaatgtatatcttcctacatacagtgaaaggaacaccctttgagacccctgaccaaggaaaggctcgacttttgacacattgggagcagatggactatggactacaattcacctcctcccgaaagttccttagcatctctcctattgtactctacctgctggccagcttctataccaaatacgacgctgcgcatttcatcatcaacactgcctcactgctcagcgtactgctgcctaagctgccccaattccatggggtccgtctctttggaatcaacaaatactaaaaaatgggttgagagctcttcaggcactgagggaaggcactggaacaaagagacataatggttttcccttctccaaactatcttctgtatcttggaagcctgagaaataggacaaacctaactaaactccaagaaggaagaagttggaaaatggggttcctgagcccagccttaatagggtcgagattctctgaatcaggaaagttagatgaggttaaggggccacaccactctcctctacagcaagaagccatccacgcttggcagcttgtctggtgattatgtttttccatgtcttccaaacataccaccttcaagttctgttttgctgtatattttccttaaataagtttgccagttatatatttatagaaagataattccctggctttaaatagatatatacatacaaatatgaacaaacttaaaaaaatacaaacccttggctcacaagggggcctctgggaacccctctatgcttccccctcacccaagggcacagggcataagtctgctttttaaaaattaattaattttggccatccttgcaacaacaagcctgaagtcaggtggtttcccataaagtgaaagtcagaggaaaaattcagtttccactctgaattctgtatctccaaaattagggctacatgctttttcttttaactagtacatcagggtaaaggggaaggaacccctgaaatgggttaagaaataagatacactcatttaaaaagggtgagtttcatttgctctgaaagcaaatgataagataaaggcatacagaacccagaaaatgcccagttcccacacctcaggaacgcactgactggactagatccagaccctacgttctttgctctcgccacctcctatttctttggtattgtcagaagacaagatacagttcctaggtgttgggaaggagggagtataggtcatgg

SEQ ID NO: 4026 - DNA, 1543 bp, Cricetulus griseus
  modified_base (1508)..(1508): a, c, t, g, unknown or other
  modified_base (1517)..(1517): a, c, t, g, unknown or other
ccatcttcaagagaagctcctgttcctgctggcccacggatggggaggtgggcccttgacttggcctttgtgtggaaggcagtgctgacgctgggcctggtcctcctctactactgcttctctataggcatcaccttctacaacaaatggctgacaaagagcttccactttcccctcttcatgaccatgctgcacctggccgtgatcttcctcttctcagccctgtccagggcgctggttcagtgctccagccacagggcccgcgtggtgctcagctggactgattacctcaggagagtggcccccacagcactggcaacagcacttgatgtgggcttgtccaactggagctttctttacatcactgtgtcactgtacacaatgaccaaatcatctgccgtgctcttcatcctgatcttctctctgatcttcaagctggaggagctgcgtgcagccctggtcctggtggtccttctcatcgctgggggcctcttcatgtttacctataagtccacacagttcaacgtggagggctttgccttagtgctgggggcgtcgttcatcggtggcatccgctggacccttacacagatgcttctgcagaaagctgacctgggccttcagaaccctatcgacaccatgttccacctgcagccgctcatgtttctgggtctcttcccgctctttgccgtatttgaaggtctccatttgtccacctcagagaaaatcttccgcttccaagatgcagggctgctcctgcgggttcttgggagcctcttccttggcgggattctagcctttggtctgggcttctctgagttcctccttgtgtccagaacatccagcctcactctctccatcgccggcatctttaaggaagtctgcaccctgctgttggcggctcacctgctgggtgatcagatcagcctcctgaactggctgggctttgccctctgcctctctggcatctccctgcatgtggccctcaaggccctgcattccagaggtgatggtggccctaagctcccgaagggcctgggccccagcgctgacctcgagctgctgctccagagcagccagcgggaggaagaagacgatgattattttgtgacctaggggcaacaatgaccagtccgggagcagcagaagcaggccgcactgctgggaggctcctgctctttcctgtggtgcttggtccaaaaagtgaatgacaggctcaccaggagctgaactggcagtgaagggagccggtgacctcttctccactgtcactctggctctgagaggcagataaatttgacgtgtggtagatctcaggttattgggttcagactgcagggcctctggaaggagtcacggagagactgggcctcatcacctggaccgcagcttcctcagagagtagatttatttatagttgaagtaatgatttcctcctccactgcccagtgttgcctgaggcatgagcacaaggcaagccctggggcctggcctctcctgaaaaaaanaaaaaaaanaaaaaaaaaaaaaaaaaaaaaaaaaa

SEQ ID NO: 4027 - DNA, 1543 bp, Cricetulus griseus
ggaagatggcgccgcaaagagagagggtctctatgctgcctcggctccagttgttggtgctgctgttcctgccgctgctgctcgtgccccagcccgtcgccggccatggcggcaagtactcccgggagaagaacgagcccgagatggccgccaagcgcgagcccggggaggagttccgcatggagaagttgaaccagctatgggagaaggcccagcggcttcatctgtctcctgtgaagttggccgagctccattctgacctgaagatacaagagagggacgaactcaactggaagaaactgaaggtggaaggcttggacaaggatggggagaaagaagcaaaactggtccacaacctcaatgtcatcttggccaggtacggactggatgggaggaaggacacccagatggtgcacagcaactcactcaatgaagacacccaggatgagctgggggaccccaggctggaaaagctgtggcacaaggcaaagacatcagggaaattctccagtgaagaactggacaagctatggcgggagtttctgcaccacaaagagaagatccacgagtacaatgtgctgctagacacactaagcagagctgaagaaggttatgagaaccttctcagtccctctgacatgaaccacctcaaaagtgacgccctgagcagcaagcacagtgagctgaaggacagactgcggagtatcaaccagggcctagaccgcctgaggaaggtcagccaccagggctacagtcctaccactgagtttgaagagccccgagtgatagatctgtgggatctggcccagactgccaacttcaccgagaaggaactggagtcattccgggaggagctgaagcactttgaggccaaaattgaaaagcataaccactaccagaagcagctggagatttcccaccagaagctgaagcatgtggagagcatcggggaccccgagcacatcagccgcaacaaggagaaatatgtgctgctggaggagaagaccaaggagctaggctacaaggtgaagaagcatctgcaggacctgtccagcagggtctcaagagctcagcacaatgagctctgaggaccaggaaccaccagtagcagtccagagaggctcctgaggacactgggagctgtcaacatttcatctgcatgtgtagacctgtggtaaccggtgtggctgaccacagtgacgtggcaaggaggatccgtgaacacaccagtatgatactgccatggttggcaaggacttcttttctttcaagcaagtgtggctgtcaccatcctggttgagagccttggttacagctaccagtgaaatatgactgttctccatgctgcagcagcacagtttacactgaaattacataaatctgctgtcactggaaatgttatgtccagagtccttaaatacatggcggaattttgagccctcagcagtgtctgaggcccagagaagtgcctgttgctagagtctcagctctacctctccagttctgccgaataaactatattgtaaagcaaaaaaaaaaaaaa

SEQ ID NO: 4028 - DNA, 1543 bp, Cricetulus griseus
ctggctcgccgggggtctccgggcccgaggacgctgcgtgggcgcccagaacccgaggagaagtttcgccgcggagaagcgagtgcggaacctcctgtatgaacacgcgcgcgagggctacagcgagcttccgtccttggacatggagtcggtgtgcgcatgcccggaagccacggcgcgcgccctggagctccgcaagggggagctgcggccggccgacctgcctgcgatcatctccacgtggcaggagttgaggcagcttcgggagcagatccggagcctggagggacgagaagaaggctgtgacagaggcagtgcgggccctggtggtaaaccaagacaacgaccaagtgcagaaggaccctcgatatcagggtctgcgggcccgaggccgggaaatccggaaacaactcacaccattgtaccccagagagacccagctggaggaggagttctaccagcaggcactgagattgcccaaccaaacccacccagacacgcctgttggggatgagagccaggctagagtgctccgtgtagtgggagacaagccggttttctccttccgaccccggggccacctggaaattggcgagaaactggacattatccgacagaagcgcctgtcccacgtgtctggacaccggtcctattacctgcgaggggctggggccctcttacagcacggcctggtcaactttaccctcagcaagcttatcaacaggggcttcacccccatgacgattccagaccttcttcgaggagccgtgtttgaaggctgtggaatgacaccaaacgccaacccatcccaaatttacaatatcgacccctcccgattcaaagatctcaacctggctgggacagcggaggtggggctggcaggatacttcatggaccactctgtggctttcagggacctgccagtcaggatggtctgtgccagcacctgctaccgggccgagacggacaccgggaaggagccttgggggttgtaccgagttcatcacttcactaaagttgagatgtttggggtgacagcccctgggctggagcagagctcgcagctgctggatgagttcctgtccctgcaggtggagatcttgactgagctgggcttgcacttccgggtgctggacatgcccacccaggagctgggccttcccgcctatcgcaagttcgacattgaggcctggatgcctggccgaggcggatacggagaggtcaccagtgcctccaactgcacggacttccagagccgccgtctgtatatcatgtttgagtcggagactggggagctgcagttcacacacacggtgaatgccacggcttgtgctgttccccgagtcctcattgctcttctggagagcaatcagcaaaaggatggttccgtccttgtgcctgctgtcctccagccctacgtaggcactgaccggatcacagcccccacccatgtgcctctccagtacatcggccccaaccagccccagaagcccaggctccctggcccgcctgctgccagctgacaactgtctgctctagaggc

SEQ ID NO: 4029 - DNA, 1543 bp, Cricetulus griseus
  modified_base (349)..(349): a, c, t, g, unknown or other
  modified_base (374)..(374): a, c, t, g, unknown or other
gtcttattcagaacggacattcgtgccacaaggttgcagtagtgagagaagataaattggaagcagtgaagtccaagctagctgtgactgccagcgtccatgtgtacagcatccagaaagctatgctaaaggacagtgggcctctgttcaataccgactatgacatccttaaaagcaatttgcagaactgcagcaagtttagtgccatacagtgtgctgctgcggtccccagagctcctgcagagtcctcagcttctagaaagtttgagcaatcaaatcttcaggcagcaagtgtgacacaagccagtgaactgaccaccaatggccatggtccacctgcctccaaacnggcttcccagcagcccaaagattanggaatgtttgcatcttcagctgggggcaaagcaccaggaaaggggaatgtgatgagcaacttttttggaaaagctgctatgaataaacttgaaccaaagctggcagctcccacagctctgaagaaatccagcaggaaggcagagcctgtgaagatgcagcagaggaaaaaaaatgggggaagcgagtagacttatctgatgaggaagcaaaggaaaccgaaaacctgaagaaaaagaggagaagaatcaagctccctcagtccgatagcagtgaagatgaagtcttcccagactctcctgagatgtatgaagcagagtcaccatctccacctcctcctgcatctccacctcctgattctatgcctaaaactgagccccctcctgtcaagagttcaagtggagaaaacaaaagaaaacgaaagcgtgtactgaaatctaaaacctttgtggatgaagagggctgcatagtgactgaaaaagtctacgagagtgaatcgtgcacagacagtgaagaggagagtaagatgaaggtgacatcagtacacagaccccctgctgctactgtgagaaaggagcccaaggaagaacgaaagggccccaagaaagggaccactgctctgggcaaagccaacagacaagtgtccattactggcttcttccagaagaagtaaatgctgtccctggcaggacttggagtggtcacagagaagaccaacaagcatagactgtcacttactgtgtaagttcgcctagttcctgccttacctgtatcaaaacgctgctctgccatcgtgtgacacttgtactattctggtttttttcaaccaaaagggagtcacctagaagcaggaggcagaagatttaaaagctgttacattataatgagtttataaatataaagcacaatctttgacccgcctaggagaattcatttgagaattacctgctgggctccactcacctatacgccattttcctattatggtcctctgtattctgtgaacttgtgtgatgacagttgttttttatttcatgaattctactggatgtggtcaccacttcttactctcctgtccatactgccacacttctcgtcccctgacgcccacaaatcttgttttctagttaaatgttttaaatgttcgtcagatgaaaagctaaaactgaaa

SEQ ID NO: 4030 - DNA, 1542 bp, Cricetulus griseus
agatgtgcctcatccagtctgtcccacgttgagtctgaagcccacccaccacggcacccgccatgtctcaaatgctgcacatcgagatccccaactttgggaacacagtgcttggctgtctgaatgagcagcgcctgctgggcctctactgtgatgtgtccattgtggtcaagggccaggccttcaaggcccaccgtgcagtcctggccgccagcagcctctatttccgagacctcttcagtggtaatagcaagagtgcattcgagttgccaggcactgtgccgcccgcctgcttccagcagattctgtctttctgctacacaggcaagctcaccatggcggccagtgagcagctcgtggtcatgtacacggcaggcttcctgcagatccagcacattgtagagcggggcacagacctcatgttcaaggtgagtacattaaggccacaggaaactatgcagtgcaagagaagccagagccggtgcccctggaaagccgctcctgtgtcctcatccgtcgagacctggtggcactgcctgccagcctcatcagccagattgggtaccgctgccacccaaagctctactcggagggtgatcctggagagaaactggagcttgtagcaggttccggggtctacatcacacgtggccagctcatgaactgccacctgtgcgcaggggtgaagcacaaggtcctgctgcggaggctgctggccaccttctttgacaggaacaacaactggccaatagctccactggacagccgagtcctgaatgctgtgaaattgtactgtcagaacttcgcccccagcttcaaggagagcgagatgaacgtgatcgctgcagacatgtgtaccaatgctcgccgtgtccgaaagcgctggctgcccaagatcaagtccatgctgccagagggtgtggagatgtaccgtaccgtcatgggtgcctcagccgccagcctgcccctggaccctgagttcccacctgctgcttcacaggtgtttgagcagcgcatctatgctgagcagcgacgaagtgatgcagccaccattgtggctctgagaactgatgctgtgaacgtcgatctgagcacctcagccaaccctgcctttgaggctagtgaggaggtggatggggcaggctcggttatccaggaggtggctgcccctgagccactgcctgctgatggcgtgtgtgtgtgtgtgtgtgtgtgtgtgtgtgtgtgtgcatgtgtgacagagaaaaaaaaaaaaaaaaaaagaaaaaaaaaaagttgacttgaatgctctgggtggctgtgggtacaaggagaacattcgtcccttcagtgggatgtttggagaaaaggacctaagagaggattgttttgaaggcactgtctaggggttaaagtagcatcataactcatgactgttagaaaataagttaataaaatcagttgctcccctacctctaaggagggcttcacagaaccactgagctagagcagatgccacatcttggcttccttttgttttggagaggaggaggcctttgtttt

SEQ ID NO: 4031 - DNA, 1542 bp, Cricetulus griseus
  modified_base (1509)..(1509): a, c, t, g, unknown or other
agcaaaaacaatggacctcaagttcaacaattccaggaagtatgtctccatcactgtgccctccaaaacccagacaatgtcaacacacatcaagtcagttgacgacattgtggtgctgggcataaacctcagcaagtttaacaagctcacacagtttttcatatgtgttgctggagtttttgtattttacctaatttatggatacttacaggagttgatattttcaatggaaggctttaagccctatggctggtaccttaccttagtgcaatttgcattctactcaatatttggcctaatagaacttcagctcattcaggacaaaaggagaagaataccaggaaaaacctacatgataatagcttttctaactgtgggtactatgggcttatcaaacacttccttgggctacctgaattaccccacccaagtcatcttcaagtgctgcaaaactgattcctgttatgctaggaggagtttttattcaaggaaagcgttacaaccttgcagatgtgtctgctgcagtatgcatgagccttggcctgatctggtttaccctggctgacagcacgattgcaccaaattttaatctgacaggtgtgatgctcatctccctggctctgtgtgcagatgctgtcattgggaacgttcaggagaaagctatgaaactacacagtgcttccaactctgagatggttttgtattcatactcgatcggttttgtatacattttgttgggattgtcgtgcactagtggactaggccctgcagtggcattttgttcaaagaaccctgttcgaacctatggctacgccttcctcttttccctcactggatactttggaatctcatttgttctggccctgattaaaatctttggtgctcttcttgctgtaacagtgacaacaggaagaaaagcaatgaccatagtcctttcgtttatattctttgctaaaccattcacatttcagtatgtatggtctggtttgttagttgtgcttggcatatttctcaatgtttacagcaaaaatatggataaaataagattgccatcggtgtacaatctgataaacaaagccatggatgtgaaaaaggcaaggacgttggcacagactgtgtaggcactgaggcagtctatttaaaatagaattctaagggaataatcattcatcaattgactttccaaaggattgtgatgaaaaccaaaggatctgaaggctgctgtccacacccaggacatgtttcaataaaggcagtatgaaggaaagcacttcctagcagtgtcctgaacatttcactggaaatgaccgtgttgcaagactgattgggaatccctccaacatgcagctcgggctgtgtagtagggcactattttgtttccattccgttttggtggtgttatttaaattgcttctctgttataagagtggaccaatgatttaaagtctagagaaaatagcattcatttataaataaaattatcctgtgattttttttaagatgtttaanaaatttgttattgaagaaaatggagatgggatg

SEQ ID NO: 4032 - DNA, 1542 bp, Cricetulus griseus
tttgtggtgacgttggatgaagtggagctgatccattttgagagggtccagtttcacctgaagaactttgatatggtgattgtctacaaggattacagcaagaaagtcacaatgatcaatgccattccagttgcctctctagaccccatcaaggagtggttgaattcttgtgacctaaaatacacagaaggagtacagtccctcaactggactaaaattatgaagaccattgttgatgaccccgagggcttctttgaacaaggtggctggtctttcctggaacctgagggtgagggaagtgatgccgaggatggagactctgagtctgagatcgaagatgagacttttaatccttctgaggatgactatgaagaggaagaagaggacagtgatgaagattattcatcagaagcagaagaatcagactattccaaggagtctctgggcagtgaagaagagagcgggaaggactgggatgagctagaagaagaagctcgaaaagcggaccgtgaaagccgttacgaggaagaagaagaacagagtcgaagtatgagccggaagaggaaggcatctgtacatagttcaggccgtggctcaaaccgtggttccagacacagctctgcaccccccaagaaaaagagaaagtaatatgaaccgtggtcctctgctctaatctctctgcagacaactcctaaaaatccgacatgacatagaaactgtttttccttttggttttgttgaagttttgccgtttgtgtttatgggtttgggggccatttgtgcggaccaagctactcggggaattccaggcccaccaggacatgtgccagtggccccgtttcagatggctggcaagggaggtgatgttgaagggcaggaggcccctcccactcgataccgtttgttttcatctgacaacctatctttggtatttcaaagctgaattaccaagacagtggtaaactgaccattagctatttctacaattcttttttctttgcatttttatttttcatggatggctttttgagacagtctagtctctgtaaaccaggctggcctcaaacttgtaatcctcttgctctgcctcccaagtgctgggattacaggcctgagccaccacacttagctggagcatgtttctggccccacaggttcagccctccttccgtccctttaagttccagatctgaagttctcaagaaaggttcttgggctctgcgatgattgtgatcttgacaagaagagaagcgggaaggaggccacacccacaaggctggactctgcttctcctgcctttcctttctctgcagcatcttgtgttggtcacttctgatgatcagctttgaagaactgggggactttatcttgccgtcctccctgcagcttctctacatccacctgtcccactttgcctcctctgctgtgactttaagagaaggggcttctcagattttatgtttgtttttgttttctctccttagcagtaggacttgattattttgaatttttggaagtaactaaaagataaataaactaggg

SEQ ID NO: 4033 - DNA, 1542 bp, Cricetulus griseus
ccgcctagggagaagagcaaacatggcctcaccgaggtggctctggtgtgtgtgtgcgaccgcggcggtggcactgctgctcatgtccagggttccctcggcctccgcccaaagaaagaaggagatggtgttgtctgagaaggttagtcagctgatggaatggaccaataaaagacctgtaataagaatgaatggagacaagttccgtcgcctcgttaaagctccaccaagaaattactctgttatcgtcatgttcactgctctccaacttcatagacagtgtgtcgtttgcaagcaagccgatgaagaattccagattctggcaaattcttggcgatactccagtgcatttaccaacaggatattttttgccatggtggattttgatgaaggttctgatgtatttcaaatgctaaacatgaattcagctccaactttcatcaactttcctccaaaaggaaaacccaaaagggctgatacatatgagttgcaggtgcgagggttttcagctgaacagattgcccggtggatcgcagacagaactgatgtcaatattagagtaattagacctccaaattatgctggacccttaatgttgggattgcttctggctgttgtcggtggacttgtgtatcttcgaagaagcaatatggaattcctctttaataaaactggatgggcatttgcagctttgtgttttgtacttgctatgacatctggtcaaatgtggaaccatataagaggaccaccatatgctcataagaatccccatacaggacatgtgaactatatccatggaagcagtcaagctcagtttgtagctgaaacgcacattgttctactgttcaatggtggggttaccttaggtatggtgcttttatgtgaagctgctacctctggcatggatattgggaagcgaaggatgatgtgtgtggctggaattggacttgttgtgttattcttcagttggatgctctctatctttcgatcaaaataccatggctatccatacagctttctgatgagttaaagaggatttcagagacacatctgaaaatggaccatgtagcctttggaagatacatctgtcttcttctgtacctttcctactgaaatcagagctacatatgcctcttttacacattaaaaagtacctctaacaacaagactatgatttctgcatgagtgtgctctaactaccttgtacatggaaagatttctgattcattctgtttctagttttatttaaagtggcccttctctaataataataatctgttgctaaaactcagtataacttataaatggtctcagatgtttgtgtaagttagttagacattgttgttgatctcacttttacctaacagaaaaataagctgagttgtattcatggaaaggactctcttagaatgagaaaagaaaatcatgaaatactgatttgttgcctatggatagaaatgaaacatttttccaggcttgttgcagacacaggctgatctttgtaagtctgtggccagcctgggctacatagtgagaccctgt

SEQ ID NO: 4034 - DNA, 1542 bp, Cricetulus griseus
aatttttattttctcatcattttccttgtacaggtcacagtggacacaccaaccagcccagttactagtggacttccacttttctttgttataactgttacagcaatcaaacagggatatgaagattggcttagacacagagctgataatgaagttaacaaaaagcattgtttacattattgaaaatgcaaaacgagtgagaaaagaaagtgaaaaaatcaaggttggtgatgtagtagaagtacaggcagatgaaacctttccctgtgatcttattcttctgtcatcctgcacaactgatggaacctgttatgtcactacagccagtcttgatggtgaatctaattgcaagacacattatgcagtccgagataccattgcactgtgtacagccgaatccattgataacctccgagcaaacaattgaatgtgaacagcctcagcctgacctctacaagtttgtggcaatcagtatctcacaactaatagaggcaaaaatggccttacaagatagagaagaaaaactggaaaagatttttgatgagattgagacaaacatgaatttaattggagccactgctgtggaagacaagctgcaagatcaggctgcagagaccattgaagctctgcatgcagctggcttgaaagtctgggtgcttactggagacaagatggaaacagccaaatccacctgttatgcctgccgccttttccaaaccaatactgagctcttagaactgaccacaaaaaccattgaagaaactgaaaggaaagaagatcgattacatgaattgttactagaatatcgtaagaagttgctgagtgattttcctaaaaacactagaagccttaaaaaagcatggacagaacatcaggaatatggattaatcattgatggctccacattgtcactcatactaaattctagtcaagactctagtgcaaacaacctgagattctcctaatagtagtaaagaatgtacgaagaagaactgccaggaatctgaatcttgaactgcccatattgttgtcctacaagcatattgactctgattgcagctaaagaaagaaagcatgaaggaacagctacaaaagatattaactcaggatactcaatatgcaacaaaaatcactctcatgtatagggttcagaataaatgtccattaaaataccaaataactcttgtaaccatttacagttatagtaagtagccactatggttaaagttaagaattatatgaaaagttttaaagtaagcatacttataattctggatttagatagcaaaaatgtaattatgaaatggatgcgcttttaacccattgactttgtgaatggatttaaatataatagtataaagtagaagtcctgcaatggcaatgaacagattttgctaatacagtgttactttttgcctggcaaaagacataggctgtttgtgtcacatttctcattcctgctaaatgattatcttatttttctaaatacaaaagaaatacttgaaaatacactttggtctaataaaaaaaaaaaaaaaaaaa

SEQ ID NO: 4035 - DNA, 1542 bp, Cricetulus griseus
aaaaaagatattgaccatgaaacagtggttgaagagcagatcattggagagaactcacctcctgattattctgaatatatgacaggcaagaaactccctcctggagggattcctggcattgacctctcagaccctaagcaactggcagaatttgctagaatgaagccaaggaaaattaaagaagatgatgctccaagaacaatagcttgccctcataaaggctgcacaaagatgttcagggataactctgctatgagaaagcacctgcacacccacggccccagagtccacgtctgtgcagagtgtggcaaagcgttcgttgagagctcaaagctaaaacgacaccagctggttcatactggagagaagccctttcagtgcacattcgaaggctgtgggaagcgcttttcactggacttcaatctgcgcacgcacgtgcgcatccatacgggagacaggccctatgtgtgccccttcgacggctgtaacaagaagtttgctcagtcaactaacctgaaatctcacatcttaacacatgctaaagccaaaaacaaccagtgaacagaagagagaagaacttctcgaccacgggaagcatcttcaggagtatgattgggaataaatatgcctctcctttgtatattatttctaggaagaattttaaaaatgaatcctacacacctaagggacatgttttgataaagtagtaaaaatttaaaaaatactttaataagatgacattgctaagatgctctatcttgctctgtaatctcgtttcaaaaacaaggtgtttttgtaaagtatggtcccaacaggaggacagctcatgaacttcgcatcaaaagacaattctttatacaacagtgctaaaaatgggacttcttttcacattcttataaatatgaagctcacctgttgcttacaatttttttaattttgtattttccaagtgtgcatattgtacactttttggggatatgcttagtaatgctgtgtgatttttctggaggttgataactttgcttgcggtagattttctttaaaagaatgggcagttacatgcatacttcaaaagtattttcctgtacaaaaaaaaagttatataggttttgtttgctatcttaattttggttgtattctttgatgttaacacattttgtataattgtatcgtatagctgtattgaatcatgtagtatcaaatattagatgtgatttaatagtgttaatcaatttaaacccattttagtcacttttttttccccaaaaaatactgccagatgctgatgttcagtgtaatttctttgcctgttcagttacagaaagtggtgctcagttgtagaatgtattgtaccttttaacacctgatgtgtacatcccatgtaacagaaagggcaacaataaaatagcgatcctaaagaaagattatggcagaaagagatctgtaagcacagccttattttcttctgttgtccagaatacttataattcttgagcctcccagaaattggaagctaaataaagcaactcgagtttaccttta

SEQ ID NO: 4036 - DNA, 1541 bp, Cricetulus griseus
  modified_base (334)..(334): a, c, t, g, unknown or other
ctttttgtccaaacttacccttgccttctctgcccagaccaagacttccaaagccaagaaggatcaagaaggtggagaagaaaagaaatctgtacaaaagaaaaaagtaaaagagctaaaagtattggactcaaagacagcccagaatctctccatctttttgggctccttccgaatgccctatcaagagattaagagtgttatcctggaggtgaatgaggctgttctcacggaatctatgatccagaacctcattaaacagatgccagaaccagagcaattaaaaatgctttctgaactgaaggacgagtatgatgatctggctgagtcagancagtttggcgtggtggagtttctgctgagaacttaacagaagaacttagatcagatgaagaaacagatcgctgacgtggaacgtgatgttcagaatttcccagctgccacagacgaaaaggacaagttttgttgagaaaatgactagttttgtgaaagatgcacaagagcagtataacaagctacggatgatgcactccaacatggagactctatataaggagctaggtgactacttcatctttgaccctaaaaaattgtctgtggaagaattctttatggatctgcacaactttaggaatatgtttttgcaagcagtcaaggagaatcagaagcgccgggaaacagaagaaaagatgcggagagcaaaactagccaaggagaaggcagaaaaggagcgactggagaagcagcagaagcgagagcagctcatagacatgaatgcagagggagatgagacaggagtgatggacagtcttctagaagctctgcagtcaggggcagcattccgacgaaagagagggccccgtcaagtcaacaggaaagctgggtgtgcagtcacatctctgctagcctcggagctgaccaaggatgatgccatgtctgctggtcctgctaaggtgcccaagaaaagtgaaggagtccccacaatccttgaggaagccaaggagctggttggccgtgcaagctaagctgggctctaaggccattgctgctcctaagtgaagcccagactgcctacctgcagcatgtgcctaaatggtcatgcagtggccactccaccacctgaccctgcctttgtgtctggcctgctgctgtctgaacatcacatacagcttcagctgcctggaggccagaaggaaagggcagtgcaggggtggcctgagcccagcccagccacccctggctgtgtggtattaccaaagcagggtccgtgtttgctgccttaaccctgtctcctccatgttatccagaggtcctggtctcagacaaaacccagcctgctttctcagccccactttctagtgggccttcccctaggtcaatcttgctggatttgtgcttttcttttgtggtttctctggccctgagaatagcatgggacttatgaacctctgggctagatccttttactgctgtcacctctgcttttcctcctggcagttatttattactagtgctgtggcattgggagctgtgtctgcaaa

SEQ ID NO: 4037 - DNA, 1541 bp, Cricetulus griseus
gcccttcaggcctgcgtggtacggctacaggaggcgcgggcgcagcagtccaggcagctggaggaacggcaggcggaaaacgcggcgcagagagaagcctaccaggcactgctagaacaagctgcgcaccaggaggccgcactgcgtaggctgcaggaggaggcacgggacctgctggagcggcttgtgcagcgtaaagcgcgtgccgccgcggagtgcaatctgcgtaatgagcgcagagagagggccaaccaagctcgggtgtcccaggagctgaagagagctgctaagcggactgtgagcatcagcgagattccaaacactctagaagatgggaccagggacaagactgtgcctctagctcctggcgatactcctgagttcctggagagtgagacttgtgagaagtggaaaaggcctttcaggtctgcctcggccacctctctgacactgtcccgctgtgtggatgtggtgaaggggctgctggacttcaagaagaggagaggtcactcagttgggggtgcccctgagcatcggtaccaaagcatccctgtgtgtgtatctgcccagattcctacccaggctcaggatgtcttggatgcccatctctctgaggtcaatgctgtttgttttggccccaacagcagcctcctggccactggaggggctgaccggctcatccatctctggaatgtcgtgggaggtcgcctggaggccaaccagaccctcgaaggagctggtggcagcatcaccagcatggattttgacccctcgggctcccaggttttggcaggtacttacaaccaggctgcccagctctggaaggtcggggagacacagtccaaggaaacactgtctggacacaaggacaaagtgacagctgccaaattcaagctaacaaggcaccaggcaagtgactgggagtcgagaccggactgtgaaggaatgggacctaggccgcgcctactgttccaggaccatcaatgtactttcctactgtaatgacgtggtgtgtggagaccacatcatcatcagtggccacaatgaccagaagatccggttctgggacagcaggggcccccactgcatccaggtcatccctgtacagggccgggttacctccctgagcctcagccatgaccagctgcatctgcttagctgctcccgagacaatacactcaaggtcatcgacctgcgaatcaacaatatccgacaggtgttcagggcggatggcttcaagtgcagctctgactggaccaaagctgtgttcagccctgacagaagctatgcactggcaggctcctcagatggagccctgtacatctgggatgtggacactgggaaactggagagcagtctacagggaccccactgcgctgctgtcaatgctgtggcctggtgcttctctggaaaccatgttgtgagtgtggaccaaggcaggaaggtggtgctctggcactagagacacagtttccctgtgtggattggaacactcttctgaagccagaagccagagaacagctgtcctctgataggactcc

SEQ ID NO: 4038 - DNA, 1541 bp, Cricetulus griseus
  modified_base (1538)..(1538): a, c, t, g, unknown or other
gacctggcagtggtgacaggagtggccatccaggcagggattgatggaggctcttggcctctccaagtcagtgctttagaaattcccaataagcacttacagaaaaccaatttcaactgacctctgagggagtgctgctaactgtgaccttgtctagtgattttgatgctctccattgtgaaggctcctccggaaaagagtacatgagattgttcacacatgagcctgaggacatttagacaggaatcttttacataatgtttcattttagaattgaatatgaccagatgggtcatgtttgtgtttggagaactctcatagtatttctaaagtcacagagttgaggttcgacgcttctctggattctggaagtaggttaccatttgcacttactattctggaagcagtaaatagtgccaacaataagcccccacttttactgaattttattggtagggactgataattctttacttggttatcacatgtaacttaatttggtttatacttgaaggactgttgatgtcaggtatttacattggctgggaggtagcagtattattaaactgcatagatagtgttcatcaactgccatataaattgtactttcaaaaattcacttttaattggttatattctcttaatttatagatattactgtctttaatagaccaaattttcttcctaaaatagctacagatttattcagctctttcctgccagctagtagaaattcctggtttatattatagttcctttatattcaatgtgtcattctctgctagtattttccctagttcttcttggtaagaaatgttacctaatcttgacattgatatagtttatttaaaaggtacaagtgcatcctgactgggaccatttgttgacatctgaattcatttactataaaatgagccttttagttgtacagttggctactgtttttttttttaaatatgtgactttaaaaatactaaataataagtaatttattttgaatccatgtttggtagtgtgttttcactcaaaccactaacaacagataccactgtgtataatatgaactcaatatgacagttactgtatagaacagattgtgcctcttaaatatgtgtgtacaggtgattcatattttgctgtaaacacataccattttgcagttttgtttttaaattgtttattttccacccacgactggggtgaagtatatttttaatgtatatacatccagaaaaagatagagctgatgcgatgtgtacaggctttttaacaagtggtctaattccagcagtgtcacatcttcctgcattttttccacatatttctaattttagaagagctagttcttctatgagcattttctttggaactctggtgaataagctgttgcttctaactagtggagtggaacgctgacttaatccacacagctaatctgcataccacccccacccaactgtaatctttctgttgacagttaatacttcataattttctaataaagtttatgtcgatcttttggacaaaaaaaaaaaaanaaa

SEQ ID NO: 4039 - DNA, 1540 bp, Cricetulus griseus
gcagaactagaaactgcggtgcaaaggaaggtggagtttgagaggaaagccatgcacattgttgagcagcttttggaagagaacatcacagaggaattcctaaaggagtgtgggatgttcatcactccggctcactacagcgatgtcgtggacgagcggtccatcatcaaactctgtggctatcctttatgtcagaagaagctcggagtcatccctaaacagaagtatagaatttctactaaaaccaataaagtctatgatattactgaaagaaagtctttctgcagcaacctttgttacagagcatctaaattttttgaaacacaaattcccaaaactccagtatgggttcgagaggaagaaaggcctcctgattttcagctgctgaaggaaggacaaagtggctgctctggagaagtagtgcagtttttcaaagacgccattacagcagcagatattgatggtcctggtgcctgtgaaggaaagaaagaagatgtctcagatttcttcacccggcccactgtatgaaggactgcacaccttagcagttcctgacaacaggcgcagtgtgccagaggtcactcttgtggggattagcaagaaaagtgctgagcatttcaggaccaaatttgccaaatctaaccaaggttccaagtcagcctccggcccggtgcaggtatgtcctgaggttgcaaaggcaaacttacttcgagttctaaagaacaccttgactgaatggaagacagaagaaacactgacgtttttgtatggccaagattgtgcctctgtgtgcctgaaaccatcctcggcccctgtacctgatgaagaactcgatgaagatgacataagctgtgaggcaggtagttgtggtcctgcccagagccagcctcagaacaaccttgatgacacactaccagtcagaggctcaggtacggccattaagccagtgcccacctatgagagcttgaaaaaagaaactgaaatgctgaacctgagggtcagggagttctacagaggacactatatcttaaatgaagaaatgaccaagttgcaggacccaggagagaatgtgtttcggcatgatcccagcttcccactgattgattcaagttcccagaaccagattagaaaacggatagtccttgaaaaattgagcaaagtattgcctggacttttgggtcctcttcagattacaataggcgatgtttactctgaacttaaaaaccttgtgcaaactttcagattgtcaaatcgaaacatcatacacaagcctgtggaatggactttaatcgctgtggtgttgctgacattattgacaccagttcttggcattcagaagcattctccgaaaaatgtggtatttacacagtttatagccaccctgctgacagaactgcatttaaaatgtgaagatcttgaaaatttaaccatcatatttagaaccagctgctaagaagcatgatataattcaggaagatagaagatgaattctactcaccatatctggaattttagccagtgaggatccatgagtgactga

SEQ ID NO: 4040 - DNA, 1540 bp, Cricetulus griseus
gggcggagctgcaagggtacttagtggtgcgctccagaggccaggagcggctcggttcggctcggcggctgcaggcccaggctgtagcgctgcgctcggtgggtgcaggatccagcttccagaatgtggtggtccttgattccgctctcttgcctgctggcactggcaagtgcccacaacaagccttccttccacccactgtcggatgacctgattaactatatcaacaaacggaatacgacatggcaggctggacgcaacttccacaatgttgacataagctatctgaagaggctgtgtggtaccatcatgggtggacccaagctgcctgaaagggttgcgttcgctgaggacatggagctacctgaaaactttgatgcccgggaacagtggtccaactgcccaactatcaaacagattagagaccaggggtcctgcggctcttgttgggcatttggggctgtgggagccatgtctgaccgactctgcatccacaccaatggccatgtcaatgtggaggtgtctgctgaggacctgcttacctgctgtggtagccagtgtggggatggctgtaacggtggctatccctctggagcatggaacttctggataaaaaaaggcctggtttctggtggactctacaattcccatgtaggctgcttaccatacaccatacctccctgtgagcaccatgtcaatggctcccggccccagtgcactggagaaggagacactcctaagtgtaccaagagctgtgaggctggctattccccatcctacaaagaagataagcactacgggtacacttcctacagcgtgtctaacaatgagaaagagatcatggcggaaatctacaaaaatggcccagtggagggtgccttcactgtgttttcagacttcttgacttacaaatcaggagtatacaagcatgaggctggtgacataatgggtggtcacgccatccgcatcctgggctggggagtagagaacagcgtcccctactggctggtagccaactcttggaatgttgactggggtgataatggcctctttaaaatccttagaggagaagaccactgtggaattgaatcagaaattgtagctggaatccctcgcactgacctgtactggggaaggttctaatgttctgtgacctggttggccagtccttagggagtttatccctgcatttagctaccgaggctgggagtgaggcaaacaggacagtctttgaattcatctaagatgcacgaagctttcagcaaggcttgagcaactggacaagagctacctgccatcagagctgtcttccaagtgctctttttacctgactccctcccagtctattccatggcagtgatcacagcctgcatcctagcctccccctagactagtgctgtttgtagtgcctgctgctgctgctgtggctctgcctgccacccccatccccaaaaacgtctttatgttgtagagtcaccgcttcaccctgtcaatttaacaaggaatgactgtgccaataaaccaattctccctctgcttg

SEQ ID NO: 4041 - DNA, 1540 bp, Cricetulus griseus
gaagacaactgaaaactgtaaggccgaaacgagccctgcactcgattctgaatgcggccatcatgatcagtgtcatggttgtcatgaccatcctcctgtggttctttataatacaggtgctacaaggtcatccatgccttggcttattgtttctatctctgttgttgtcttgttctttttttctattcatttacttgggggaagtgtttaagacctacaatgttgctgtggactacattacagttgcactcctgatctggaactttggtgtggtggggatgattgccattcactggaaaggcccacttcgactgcagcaggcgtatctcattatgatcagtgccctgatggccctggtctttatcaagtacctccctgaatggaccgcatggctcatcttggctgtaatttcagtatatgatttggtggctgttttgtgccccaaaggtccacttcgtatgctggttgaaacagctcaagaaagaaacgaaactctctttccagctctgatctattcctcaacaatggtatggttggtgaatatggctgaaggagacccagaagcccaaagaagggtacccaaaaaccccaagtacaatgcacaaagagcagagagggagagacaggactctagtactgggaacgatgatggtggcttcagtgaggagtgggaagcccagagggacagtcacctggggcctcatcgctccactcctgagtcaagagctgctgtccaggaactttccagcagtatcctaaccaatgaagacccggaggaaaggggagtaaaactcggattgggagatttcattttctacagtgttctggttggtaaagcttcagcaaccgccagtggagactggaacacaaccatagcctgctttgtagccatattaattggcctgtgccttacgttactactactcgccatcttcaagaaggcgctgccagctctccccatctccatcacctttgggctggttttctactttgccacagactatctcgtgcagccctttatggaccagcttgcattccatcaattttacatctaacatacctgcagttagaacccatggatgtttcttctttgatcattaaaaacagcacttccaccttccacaccatgttggaaataaagcatgtactagctgaatcctgcactgtccaggggttctgtgaggaggtgacctgggcccaggcctcactcttaggctcttttgctgcccgcttgtaagttttaaataaggacatcacccccacatagaccccctcctgtcacatccgtggctctgatcatttttgttcttaagcactgacactcatcatctgtggttgccatttcttcccaaggccagtctggatgtatatgggtttgcttaatcctgagagtcataacctcaggttccaaagtttataatttctagaaatgatggaactatcgatcaacagtcccctgtgagcgttaagtaagttctgggtttccacagtctcatttttagacatacttgcaagcttacttttgcccagatgctttcct

SEQ ID NO: 4042 - DNA, 1539 bp, Cricetulus griseus
cggaattctaccagcatcaggccctactgcctcctgagcaggaaactctcaagttcctggttctggaaaccccgttataggtgtgtcaatctgtctatcaaggacatcctggaacccaatgctccagaaccagaacctgaatgctgtggccgcttctgtgtctctgatgccgttgatgggaacattcagggccgtgtggcgctggaaagcacaggacaggggaagatttctggtgcggctgcaatgtctggcagttgcagtgcctccataaacatgtgtttactgcgtgtgactcagaacacctggaatgtcatgcaacatgagaggcagctgcagacgcctgaacacaaaattctggaacagcttcggagtcgtggagacgatgtgtttgtggtgacagaggtgctgcagacagaggaggatgttcaggtcacccagaccctaagcaaaggagggcttaggccagtttgcactgcctggagctgtatgcttgcagggtgaaggaaagggctacctaaaccagaagaagatggtgaccattcctgcaggcagcatccttgcattccgggtggcccagttgctcattgaccctaaatgggatatccttctcatccctaatgaaaagaagcggacctttgagctacccccgtcaagccacagaagagaggatggccagaggcagcatgcctttaacctgcttgccacactacgatccatgggtgaacggctcaagctcctgacggatggaacccatgaggaacaggtgactagagaggacttccaaggcctgcgtacagaagtggaggctgcttccacagaactggggcacttagaaatggagttaagacaacagctactaatggacattggaagaattttacatgaccaacccagcatggaagtcttggaggcctcactggagcagggtctgtgccatggtagacagatggaacctctggatggcccagcaggcagcatcctcgaatatctggtacttccctcaggagaactcgtgccagaacttgctgcccctatcttctacctgctgggagcactgactgtgctgagtgaaacccagcagcagctgctggctaaggctctggagacaacggtgctgtcaaagcagctggagctggtggagcatatcttggagcagagcaccccatggcaggagcagagatttgtgtccctggctcccaggctctgtgggaacagctgggatgaggaggctcccacctgggtcttgctagaagaatgtggcctaacactgcaggtggacaccccccaggtgcactgggaaccaaaatctcagggccccacatgtgcactctatgcttccctggccctattgtcaagtctaagccagaaaccttgctagcctgcatgcctcccttcccccaacatcatcctgtcctaccctctagccagggcaggatcttacctagcaaaacctctaggaaaaccaagagcctaactcaaccgcagggctagaatgaagtgaggcaggcccaggagttagggaaaattcaaataaatgta

SEQ ID NO: 4043 - DNA, 1539 bp, Cricetulus griseus
  modified_base (1241)..(1241): a, c, t, g, unknown or other
cggagatgcggcatccaaacgaactcactgtcctgattgggatagcagagaaagctggggccatgaaagctacagtggaagccacaagcggaagaggagatcgcacagtagtacacaagagaacaggcattgtaaaccacatcatcagtttaaagattctgattgtcactatttagaagcaagatgcttgaatggaagagattatcgggaccggagatacattgatgagtacagaaatgactactgcgaaggatatgttccaagacattaccatagagacattgaaagcagttaccggatccactgcagtaaatcctcagtccgaagcaggaggagcagccctaaaaggaagcgtaatagacactgtgcaagtcatcagtcacattcgaagagccaccgaaggaaaagatccaggagtatagaggatgatgaggagggtcacctgatctgtcaaagtggagacgttctaagagcaagatatgaaatcgtggacactttaggtgaaggggcctttggcaaagttgtagagtgcattgaccatggcatggatggcttacatgtagcagtgaaaattgtgaaaaatgtaggccgttaccgggaggcagctcgatctgaaatccaagtactggagcacttgaacagtacagaccccaacagtgtcttccgatgtgtccagatgctagaatggtttgatcatcatggtcatgtttgtattgtgtttgagctgctgggacttagtacctatgattttattaaagaaaatagctttctgccatttcaaattgatcacataagacaaatggcttatcagatctgccagtctataaatttttacatcataataaattaactcatacggatctaaaacctgaaaatattttatttgtgaagtctgactatgtagtcaagtacaattctaaaatgaaacgagatgagcgcacattgaaaaacacagatatcaaagttgttgactttggaagtgcaacatatgatgatgaacatcatagtacattggtgtccacacggcactacagagctccagaggtcattttggctttaggttggtctcagccttgtgatgtttggagcataggctgcattctgattgagtattaccttgggttcacagtcttccagactcatgatagtaaggagcacctggcaatgatggagcggatattacggacccatcccagcacacatgataccaaaagacaaggaaacggagtattccacataancagctagattgggaaacattctaatatttttgtaaacattaaattattttgtacagttaagtgtaaatactgtatgttttgtatcaatagcataaactaccttgttaagtatggtgttgtataatgaatgcaatatgagttaaaatgaattttcccttttgatgttaattgccatttttaaaaggcctttggaataccctttgtgtccagtgattaatgtgattggtcttgtcttttgtacatgaaggttgactctgaagtgattcttttttttcccttgagtaaaaggaaatcttga

SEQ ID NO: 4044 - DNA, 1539 bp, Cricetulus griseus
tctgcagccgctccgcagtcgccgccgccatgagggagatcgtgcacctgcaggctgggcagtgcggcaaccagattggcgccaagttctgggaggtgatcagcgacgagcatggcattgatcccaccggcacgtaccacggagatagcgacctccagctggagcgtatcaacgtgtactacaacgaggctaccggtggcaagtatgtgcctcgtgccgtgctcgtggacttggagcccggcaccatggactcagtgcgctccgggcccttcgggcagatcttcagaccagataacttcgtattcggtcagagtggggctgggaacaactgggccaaggggcactacacagaaggcgcagagctggttgactcagtgttggacgttgtgaggaaggaagctgagagctgtgactgcctgcagggcttccagctgacccactccctgggtggggggactgggtctgggatgggtactctccttatcagcaagatccgagaggagtaccctgacagaatcatgaacaccttcagtgtggtaccttcccccaaggtgtcggacacagtggttgagccctacaatgccaccctttcagtacaccagcttgttgaaaacacagatgagacctattgcattgataacgaagcactctatgacatctgtttcagaaccctaaagctgaccacacccacttatggtgacctgaaccatctagtgtctgccaccatgagtggggtaaccacatgcctgcgattccctggccagctaaatgctgacctgagaaagctggctgtaaatatggtgcccttccctcgcttgcacttcttcatgcctggctttgctcccttgaccagccggggcagccagcagtaccgtgccctgacagttcctgagctcacccagcagatgtttgatgccaagaacatgatggctgcctgtgatccccgccatgggcgctacttgacagtggctgccgtgttccggggccgcatgtctatgaaggaggtggacgaacagatgcttaatgtccaaaacaagaacagcagctactttgttgagtggattcccaacaatgtgaaaacagctgtctgtgacattccacctcggggcctaaaaatgtctgccaccttcatcggcaacagcacggcaattcaggagctgttcaaacgcatctcagagcagttcacagccatgttccgacgcaaggccttcctgcactggtacacgggtgagggcatggatgagatggagttcaccgaggctgagagcaacatgaacgacctggtgtccgagtatcagcagtaccaagacgccacggctgaggaggagggagagtttgaggaggaggcagaagaggaggtggcctagagctgttttaagcagcctaaagcatgggagcagtgtgaactctttattcattcacagcctgtctgctagccatgtccactgtgcatttgctgtcctgtcctgacatcacttgtacagataccaccattaaagcaattcatagagaaaaaaaaaaaaaaaaaaaaaaaaaaaa

SEQ ID NO: 4045 - DNA, 1539 bp, Cricetulus griseus
tgaattttccaaagttctgctgggacagagtgagcggcttatcagaagagttaatagcttcaagactggtgcctcttctgcttaaccagttggtgtttgctgagccagtggctgttaagagttttcttccctatctccttggccctaaaaaagagaatgcaccaggggagactccttgcttgctttcgccagcactgttccagtcgtgattcctgtgcttctccaattgttcgaggtccatgaggagcatgtacggatggtgttactatcccacatcgatgcctatgtgaagcactttactcaggaccaactgaagaaagtcatcttgccacaggtattactgggccttcgtgataccagcaattccattgtggcaattactcttcgtagcctggcggtgctggtatctctactcggaaagcacatacaggaagagtattacaatactcttttacagacaggtgatcagttttctcactctgtgaaattccctatgaatggaatctcagatgtgaaaaacacctcagaagacaaagggaacttcccagcaagttctagtaagcctgaagagtggcctgactggagtgagcctgaggagcctgagcaccaaactgccaatcttcagataaggccccaagcaccctgtgatggagctgagtcccagcacaccaacctgaatgcagaggaggagtcctgggatgactgtgagtccggtgttggtaccgaagtgaactctgtggctggagcctctgctgccacgcctgttacctcagaggagcagaagcacactgcagctttgcttcctctcactcaggagtctaagcctttgaaacccagtccttcctcaaagaccaatcatatgcagcgtggggaagtcaaaccaccagaagtgtcccaggaaagaccccttaaggttcggtcagaacttggtttaggagaagagttcaccatacaagtaaaaagaagccagtacaagatcctgagttagactggtttgcagatatggtcccagaaattaagccttcaggtactttccttattttgcctgaactaaggacagaagtgatggtccctaacaaagataacatctcaccagtgatgcagttttcctcaaaatttgctgcaccagaaatgactgagggagaggcagaaggctgggaagaagagctaacctgggaagataacaactggtgataagaaagagcttaaacttcaggaataattctaaaggaagtaatacctcaaagcaagctgcatggatgtaaaaccacaaagcagcctgtgttccccgtaccagaagctcttttgcagtctgtgccaactcaaaaatgagaccaatctcaagttgctgactaagccctgggtggcagaaggctctcggtgccggattctaggaggaagagcctgtgtgcacttgaccaaggccagtttcccatgcaaagtaagtagctaaagaagtgcttttttccaggacaattctggaagtaaagaaaaaattcaagctggtaagcttaaacttgtgccatttctttaaaagag

SEQ ID NO: 4046 - DNA, 1539 bp, Cricetulus griseus
ggattttgtgttgaagaacctggggggtcctggggagggggctgctggtcccagagaggaatctctcccttcggcacctcccttggctaatggcagccaacccccacaaggtctgcccgctagcccagctgaccctacccggacatttgcctggcttcctggggctccaggggtccgggtattgagtctgggtcccgctccagaaccccccaaacctgctacatccaagatcatccttgtcaacaagctaggccaagtatttgtgaagatggctggggagggtgaccctgtcacacccccagtaaagcagccacctctgccccctatcattcccccaacggcccccgcctcctggactctgcccccaggacccctgctcagtgtgttacagggatcagtggcagtggggtcagccgtgtacggatgaagacgcccacagtgcgaggggttctggacttgaacaatactggggagcctgctggggaggaaagccctgggccccttcaggaccggtgccctttgctgccacttccagaaggtcctgcccgggcccttgatggcccctcagacctgctttttgagtcgcagtggcatcactattcaggtgaggcctcaagctctgaggaggagccctccatcccccagaggacaaagaaaccaggttcccaaacgagctggtccgcacctgcgcttgagatcagcagtgatgatggcttcagtgtgaggccgagagcttggagggggcagtggagaactctgattgagaaagtgcaagaggctcgagggcatgctcggctcaggcatctctccttagtggaatgagtggagctacagatcagcgatccacgggagaggcctgttctgtaagcgcaacatcgacgccggggagatggtcattgagtactctggcatttgtcattcgctctgtgctgactgacaagcgggagaaattctatgatggaaagggtatcgggtgctacatgttccgcatggatgactttgacgtggtggacgccaccatgcacggcaatgctgcccgcttcatcaaccactcgtgtgagcccaactgcttctctcgcgtcatccatgtggaaggccagaaacacattgtcatctttgccctgcgacgcatcctgcgaggtgaggagctcacctatgactacaagtttcccattgaggatgccagcaacaagctgccctgcaactgtggcgccaagcgctgccgtcgcttccttaactgaggcgtggccgccccagattgctcatgtgcccgctgccatctcaccctggcctgtggctccctagtctctcagtgtctcactccgagcctcctgttggtggtggatatgggcctgtagggggcagagccctgcctccagcctgccccccgccatcgcctcctccctgccctggggacccaggatgtagatattgtacaaaggtttctaagtcccttcttttctatgctacttttttatttaagagggtggggtcccaggtgggaatccccccccacaataaagtctgtcaatgtttgga

SEQ ID NO: 4047 - DNA, 1539 bp, Cricetulus griseus
gatgaggggcgcgatggagcaggagccagaggtgctgctgcaagaagcccgcgagaacgtggaggcggcgcagagctaccggcgggagctgggccagcggctgcaggggctgcgggaggcgcagaggcagataaaggagagtgcttcacagacaagagatgtcctcaaacaacattttagtgatttaaaaaggaacccttggaaaagctgttggatgagcgactggtgacccttttgcaagaggtggacaccattgaacaggagaccatcaaaaccattagaatgactgccagaagctcatagagcatggagttagcaccgctgatgacctggtccgagaaggtgagatcgccattcttggtggtaaagaagaacagaatgacaaattgtggaactttaccaaaaaggcctcacatattcagttggacagcttaccagaagtgcctttactagttgatgtaccctgtttgtcggctcagttggatgattccattcttaacatagtgaaagaccacatttttaagcatggaacagtagcttcccgcccaccagtacagattgaagaattaatagagaaacctggaggcatcatagtacggtggtgtaaggtggatgatgattttacagcccaagattacaggctccagttccgtaaatgcactgcaaatcattttgaagatgtgtatgtagggtctgacactgaattcatagtgttgcacatagaccccaatgttgattatcaattcagagtctgcgcccgaggagatggccggcaagagtggagtccttggagtgttccccagacaggtcactccacattggtgcctcatgagtggacacctggctttgagggatacagtctgagcagtcgaagaaatatagcactccggaatgatgctgagtcctcgggtgtgctctactccagtgctccaacctacttctgtgggcagacattaacattcagggttgaaactgtgggacagccagatagacgagacagtataggagtgtgtgcagaaaagcagaatggctgtgactctctgcagcgggaccaagctgtgtgcatcagcaccaatggtgcagtttttgtcaatggcaaagaaatgactaatcagttgcctgcagtaacctccggatccactgtcacatttgacatcgaagctgtgactctaggaactgctaacaacagtgaaggtggaaatgccaagctccgagtaaccatcagctccagtaacagggaggtggtgtttgattggctgcttgaccagtcctgtggctctctttacttcggatgctcgtttttctatcctggatggaaagtgctggtgttttagcattttgagggcttggccttgatttgagggtttggtttctgtcctcagactagcttagttgtatctgactttcaaaaggtgagcttacctcttggaccaccagaaatggaaagtattgccgggtttgcattgtaatatttcagtaagaagtgagttgagtgaggtgaacaaaactatagttcagttttgtttttagtataaatat

SEQ ID NO: 4048 - DNA, 1538 bp, Cricetulus griseus
ggacccaaactggtgcccttctttaaggccacctgtgtgtattttgtgctctggcttccctcatccagcccatcgtgggtcagtgcccttattaagtgcctgcccatcttctgcctctggcttttccttctggcccatggcatcaggttcctgctggtccaccccagtgcctccctcatctttgtggggctcgtcttctctgctgtgggtgatgccttcctcatctggcaggaccacggctactttgagtatggtctcctgatgtttgctgtgacacacatactctatgcctcggcctttggcatgcggccactggctctccggacaggtctggtgattggagtgctgtcaggcctgtgctatgctctactttacccagggctgtcaggtgccttcacctacttggtaggggtctatgtggcccttatcagcttcatgggctggagagctatggcagggttgcggctggttggggcagcctggcgatggacggagctggcggctggcagcggtgcactgcttttcatcatctcagacctgaccatcgctctcaacaagttctgctttcctgtgccctactctcgggcactcatcatgtccacttactatgctgctcagatgctcattgccctgtctgctgtcgagagccgggagccagtggaagactatagactgagcaaggccaactgaagggactggggtctgctcacctttctcctggggctggggcccagactttggaaatgtgcaggagctggatcagcaggcacctcctgagaaagtggcagactggctcggtaagctggaggcactcccgggaaagctggttgtccaggatgatgctgagagctcaaagaggcagcctcgtatccttcgcctaagtcaaagtagacctcttgcaccccatcagggctgtcaaagccctcctggaaggtgatggtgcttgttgacatggaagagtgtgactatctcttatgcctaggaccaatggcaatgccaggctcatcctctcccactttttctctcccaagatgacccaggaccagggcttgaagctccttccccaggtttcctcttgggaagattggttgaaagtggagtgttgttttcctttgtctagccttgttacttcaaaagtctcagtcttcaagtagtgaatggatgtctatctatgagaacttccttggtctggaaatttgagggtgccaaggttttagattggtcctgtttcacaggttgagctcaggcttcaaccatctccctcagactctgtccgcaaggctaaggtaaaccatgccaaaggaaggggctggtctctagctgtatgtctttgtcctgctgtctgtaactgacttaaagggatgggcctcagagagctcctgaagggtgcttaacctagctcagagcgtgggggccctaccctagcacaccaacaacagtgctttctacctcgccctgggagtgagatctaaatgacactttggggtcttaagacgtaaggcacagtcaatgcaaggggaggtaaggcgtggggtaac

SEQ ID NO: 4049 - DNA, 1538 bp, Cricetulus griseus
agattgacatggtgcatcgtagcagccgcgaaggagtcttccttgatgcatctcggcgcattcttgaagcacctcagcatggactggagaggcggcacttggaagcaaatcagaaggagttgcaagcccatgctgaccagatcaccgagatggcagcagtgatgagaaaagctattgaaattgatgaacagcagggttgcaaggaacaggagcgaatatttcaacttgaacaagaaaacaaaggcttgagagagattcttcagataactcgagagtcctttctgaacctacgaaaggatgatgcatcagagagtacatctttgtctgcattagtgaccaacagtgacctgagtctgaggaagagctgagtggctttctgcatactatacctagttcccatgacttgtagatagccgttatccatgacttgcttgagtgtgtgcagtaccatctcaggaaggaaagagaaggaatactactttctaagaaagactgccatatatagacacatttagtaggttaaactactttgacagaaaatgttttggttctgggttaacagtgaaactgccctcctctctacttgctgcttaaggataggagacagttcactagtggacagttgacatagttaatgtaacaagatgggtatggtcctctccaagtaaatctggaattcctttgtttttatttaagaaattactcttcaaatccttaaaaagtagattcatgttccaaaaacaaagttctggatccgagtctatgttccatttggctcttataacctgtgaggttttccctacaacctgtgactcagaaaagggcaatgagtgagggcccacagacattttcctttgtatttaaaaaaaaagcttttgaaggccacaagatacagaagtgtgctttaacaccaattgaaacctacattgtgtcttactaactatgtagtgatcagaataaagggataaaagattgtgaaatgattaaaaatatacttgtgtgtcgagtgcatattaaaattagcacaaatagaaagttctacttttgagtatatcatttgttaaatattgctttgctttgtaatttgacatgcagtttcatgtattggcaaaattcaaaggacttttcacttgagaaattttcagtctgaagtttgaggtgagtggggtcccagggctgttaggaaagggccagtgccctagatgttagacagttcacattcggaggccttaattttttatacataagtgaatttatttttaagattttcctattggtttttggagagtactccttaatttaatggtacatttgttcatgtagttttatcccaggccggaattttaaaaaggaaggctgcactgttgagacaagtcagagacaatgcattgagcagctctattgtaaaatgttatttgagaagtgattatttttgtaaaaaagtatttatcctttgtcttgagtataattttaagtttgtaagtactgaaatacatttgctttgtttttagcaagttttccacccatccccaccccca

SEQ ID NO: 4050 - DNA, 1537 bp, Cricetulus griseus
cagcactgatcattgaccccaagatgccacgagtgcctggccaccacaatggtgtcaccatccctgccccacccctggatgtgctgaagatcggtgagcacatgcagaccaagtctgaggagaagctgttccttgttttgtttttcgacaataagagaagctggcagtggcttcccaagtccaagatggttcctcttggtgttgatgagaccattgacaagctgaaaatgatggaagggaggaactctagcatccggaaggccgtgcggattgcatttgatcgagccatgaatcatctgagccgggtccatggggagccagccagtgacctcagtgacattgactgaggtggcttccagcaaaaggcagtgaccaaagccacagccatccggaagcgttgtccatagtgttgataagctgtacatgtttgtatattgttcagaacttaacttattctgattttctaggtgtagttctttaattctttttccccagggagggggaggtttcacttccaagttttctatgaaaccatcttatcttggcgctttgcaagtggggcaggcgtgttccgagcagtgcggtgtgggtgtcccactggtggcgccggggccgctctttacacagagtaccgcttattttaataagacgggatgtaaatttacaatgacaaatgtgtattttaagaaagaaaatgacattattttgaatggtactttgtgcaaagagggaataaatttatgctgtgtgcatcacttgcaaatcaccaaaaaatgtcccgccagctgctgccgggcagggcccgttctcatcgtcctgcctgccctgagtctcctgttcctccctgactcctgcaggcgtgcctcccagcgggttatttattgtagaaagtgtactcatttgctttataatgaaaaataaatttgcaaaggtatattgatatgcatttttatacaggcacataaaaattcaactttggtgtgggagcagaatgtgttgcgtggttatatacatgactggcccgtgtgtactttgattttgtaacttgtaatcttttgtttacaatgagggactttctgtaacttgttttaatttagaacactttggtagcaatagacctttggatacatttttgtatggtacatgtgatgtatatagaattagtactttatttttatttttaagaggtaaagcattatgttagggggaaaaaggcagggtgggtttccaaatttgcatttttatattaaaaataaagtgaagatttggacagtgtggccctctcattcctgcatctctaggagactgggtgagctgtagcctgaggtacaggagggcatggggccttgagtgggtggtgtgaccaggtagatgacacacttgatcttaacaattgacttgggatggcattatttattattttgcctaatcatatttttattttaaagctaaatagttactaaaaattttaaatgtttaagtctacatgtttgtaatatctccatagaaacttgaaaataaaaagtcttcctttggt

SEQ ID NO: 4051 - DNA, 1537 bp, Cricetulus griseus
tggaactggtccggcacaaggtgcggcagatcgcagagctgagccagcgggtggaggctctagagcaggatcgagagcgcctggcgcatgagtccggcctgctggagcaacaggtgcaggcacttcagcagcatgtgcagctactgatggataagaaccaggccaagcagcaggtcatctgcaagctctcccagaagctcaccgaagaccttgcccagccgacttcctgagctgctgcagcagctgatccaggaggcactgcagtgggaagcaggagaggcctcagacagcatggagctaagacctatcagtgagtatgatgcttacggcttcctgacggtgccggactatgaggtggaagacctgaaactgctggccaagatccaggccttggaggtgcgatcccaccacctgctagccctcgagactgtggagcgcccactacgggagcgctgggctgccctgactgagctcgtgccctcagccgaactcaagcagctgctccgggcaggtgtgccccgtgagcaccgtccacgtgtctggaggtggctggtccaccgccatgtccagcacctgtactctccaggctgctaccaggagcttctggcccgtggccagacatgccagcacccggctgcccgccagatcgagctggacctcaaccggaccttccccaccaacaagcacttcacctgccccacctccagcttccccgatgagctccgccgagtgctcctggccttctctgccccgactcactgcacacctgaggcagcaccacatagacctctctcttatcaccttcaactggttcctcgtggtctttgccgactctctcatcagtgacatcctcttgcaagtctgggatgccttcctgtatgaagggacaaaggtggtgttccgatatgccctggccatcttcaagtacaatgaggaggagatccctgcggctgcaggacagcctggagatctaaccaatatctacgtttctttaccaagaccaacttgcgacagccggaagctcatgagcatcgccttcaatgacatgaacccctttcccatgaagcagctgcggcagctgcgggcagtccaccgggagcggctggaagccgaactgcgggagctagaactgctgaaagccgaatacttgcagagacgggcatccaggggcagagcagtgcccgagagctgtgtcagcgaggacgaaggggaaggcgatggctgacctgccactctgctccccaaagcctttgttcgctttgctggcaggagcacagactacaggcatgggccagaggtctgtgtgaccctggagaaggcccttctcctctctgggtcttagtctcccagccttgccagcctgtatcacaataccactgagcactttatcttgtagggaggcaagagtacatcctgggtcacctggagcattctctgaggcatggctgtttccgtttggtttgggtttggtcttttgagaccaggtttcatggagctcaggctagcctcaaactcatcaccatgctcatggggacta

SEQ ID NO: 4052 - DNA, 1537 bp, Cricetulus griseus
  modified_base (918)..(918): a, c, t, g, unknown or other
cccgggattgaccttgcctcattatccttatggagatggtaaccgtactgtgccacaggagcaactgtacgaccacaagatgatgcatgggcttctggtgcttatggtatggggacccgttacccctggccttcagctgcaccctcagcaccatctgggaatctctacatgacagaaagtgcttcaccctggcctggcaacagttctcctcagcaacctccttcaccaccaccccaacaacccaaggatccctcgtactcctataaccagtcgggccaaagcgtgaaccggcacagctttccgtgcagtgtccatcagtatgagtcttcaggagcaatgaacaatgataattcagtacctttttggattctcaagtccaatacagtgctgacgcctcagttgtatggtaatgctgccagtgaccatgccagcaatccagttcagagtaataatctccctgaagagtgtttttcttcaggtgaaggtacacctccaagtattaaaaaaatcatacatgtgctggaaaaggttcagtatcttgagcaagaagtagaagagtttgtaggaaaaaagacagacaaagcatactggcttctggaagagatgctgacaaaggaacttttagaactagattctgttgaaactggaggccaggactccgtccgtcaggccagaaaagaggctgtctgtaagatccaggccatactggagaaattagacggttttcagatcactgaacataacaaggaaactggaattatcagtattaccaagtagacccactcctgaagaaatccatgggcatctctaggctgcttcttatcagcaggagggaaatagactttatgtaacaggttatcaaaacataatccgagacaagcaggctgttttgatgcatctagactgtcacatttttgngcattgtgactgcatatacttcatgtgttatctgcagtcacaaatgtaatattatctacttcttggtacattttgtagtaatatgtttaaaataatcaaatactggcagccagataaatgggcagttctgaacaaattcataccctttcaccacttgaatctattgtagtgtgtagtgagctcctgaagtcaatcatttctctctgttttgtgtagcatgttatgttagagatcttcccacttctgcttttcatgactatgcaactgtcctgtttctgcttagaatttgcctctcctgtctcctggcagatcttgcttgtggcatttactactgtaggtgttcaaatggtgtatttttctatttctttcatttcttctatatttaataactggaattcttctggaaggaagaactgtggattctggatttatatttttaattatatcaagatattgaagataggtacgaactcagaacttaaagatataaaccatgataattgattgcaaatggccagtatcaaagaaaaaagcaatgttagtgacctgtctttgaaaatataatgaatttaagaatgaaaataataatttatgatttgtaaaatttgtttgacttttg

SEQ ID NO: 4053 - DNA, 1537 bp, Cricetulus griseus
agtgaaaatcacagtgctgttcatgagtggaatccatgcttctggacgaggatttttggcttcgtactcagttatagataaacgagatttaatcacttgtttggataatataactaaattttgggaacctgaattctaacagcgtcatctgtgctggagtggactgaccacatggggcaggagaacagctggaaggaccggagaaggccaggctgagaaacctgggcctccctgggctgcttttgccactgatgagcatcagtggctgcaaatcgacctgaataaggagaagaaaataacaggtattgtaaccactggatctaccatggtagaacacaattactatgtgtctgcctatagagttctgtacagtgacgatgggcagagatggactgtgtatagagagcctggtatggagcaggacaagatatttcaaggaaacaaagattatcacaaggatgttcgtaataactttttgccaccaattattgcacgtttcattagagtgaaccctgtccaatggcaacagaaaattgccatgaaagtggaactcctcggatgtcagtttactctcaaaggccgtcttccaaagcttactcagcctcctggggacttacaacacactcctctccaggactgacagttgctcctcctcgggccgggctcagtacgacaccccgaaaggcgggaagccagccgctgccccagaggaactggtgtaccaggtaccacagagcacccaggaagtagcaggagcaggaggggatgagaagtgtgatgtttttaaagaaatcctttgacggtggtgctgctttttacaaagcatccatttaaagcacatggcttttttcatttgtagtggtagtaatagtagaatgtattacgtatctgtcactgaagtggttaggggaatgtggtgaccgaggtacaagaaactacttatcttgtcatcttgctttaaaggtgttactgtgtggcacatttacagcttgcctgttacatttcaaacatcctgtttgttactactgtaaaacactatttttaatacagaaaaactccctatcatgcacttcaaagaaacctagaaaattacatgtctgatacagagactttggaagacaatcaaagtaaaaatagtgaaaaggagttgttaattctaccttttggttttgaacttgaagtccctaaactgcaaaatctagtgagttggatggttcgagtgtgtttaggttaactgtggcaccaatttttatttagtccagcttgtgtgtagtttctcttgttttccatttttggcactaggaatggtaaaaataaaacatgtattgaaatacagaggaagtgaaaatggcttgagtgtcagttatattctcccagaatgtattttcttacctcggcatgtactgtagtcacttgatatctgtatatgttgctagaatttaggctgtttaaaatagtaagattctaatgtgttttaataaattatatgtgtgtcttgctcagattatttggattaaataaaacaccgttgacatca

SEQ ID NO: 4054 - DNA, 1537 bp, Cricetulus griseus
ttgaagcgccgcggcgaagggaaaatggaaacaattttggagcagcaacggcgctatcatgaggagaaagaacggctcatggatgtcatggccaaagagatgctcactaagaagtccacgctccgggaccagatcaattctgatcaccgcacgcgggccatgcaagatagatacatggaggtcagtgggaacttgagggatttgtatgatgataaagatggacttcgaaaagaggaactcaatgctatttcaggacccaatgagtttgctgaattctataacagactcaagcagataaaggaatttcatcggaaacacccaaatgagatctgtgtgccaatgtcagtggaatttgaggagctcctgaaggctcgagaaaatccaagtgaagaggcacaaaacctggtggagttcacagatgaagagggttatggtcgttaccttgatcttcatgactgctaccttaagtacattaacctgaaggcgtctgagaagctggattacatcacttacttgtccatctttgaccagttatttgacattcctaaagaaagaaagaatgcagagtataagagatacctggaaatgctgctggagtacctccaggattacacagatagagtgaagccccttcaggatcagaatgaactctttgggaagattcagaccgactttgagaagaagtgggataatggtacctttcctggatggccgaaagagacgagcagtgccctgacccatgctggagcccatcttgatctctctgcattctcctcctgggaggagttggcatccctgggtctggacaggttgaaatctgcactgttggctttaggcctgaaatgtggtgggaccctagaagagcgagctcagaggctgttcagcaccaaaggaaagtccttggagtcactcgacacttctctgtttgccaaaaatcccaaatcaaagggtacaaaaagagacactgagaggaacaaagatattgctttcctggaagctcagatctatgaatacgtggagattctaggggaacagcgacagctcactcatgaaaatgtacagcgcaagcaagccaggacaggagaagagcgagaggaggaggaggaggagcagatcagtgagagcgaaagtgaagacgaagagaatgagatcatttacaaccccaaaaacctgcccctgggctgggacggcaaacccatcccctactggctgtataagcttcatggcctgaacatcaactacaactgtgagatttgtggaaactacacctaccgagggccgaaggccttccagaggcactttgctgaatggcgtcatgctcatggcatgaggtgtttgggcatcccaaacactgcccactttgcaaatgtgacacagattgaagatgctgtctccttgtgggccaagctgaaactgcagaaggcttcagaacgatggcagcccgacaccgaggaagaatatgaagactccagtggcaatgttgtgaacaagaagacatacgaggatctgaaaagacaaggactgctctagtggtcgg

SEQ ID NO: 4055 - DNA, 1536 bp, Cricetulus griseus
tatcttgagctgggcgatttgagcgggaggtgctactcttctaccagcatcatggtgttctacttcaccagcagcagtgttaactcatctacatacactatatacatgggaaaggataaatatgaaaatgaagatctgataaagtatggctggcctgaagatatttggtttcacgtggacaaactctcttcagctcatgtataccttcgattacaaaagggagagaagatagaagacattccaaaggaggttctgatggactgtgcccaccttgtgaaggccaatagcattcaaggatgcaagatgaacaacattaatgtggtgtatacgccatggtctaacctgaagaagacagctgacatggatgtggggcagataggctttcacaggcagaaggatgtaaaaattgtgaccgtggagaagaaagtgaatgaaatcttgaaccgattagaaaagaccaaattggagaagtttcctgacctagcagcagagaaagaaagccgagaccgagaagagaggaatgagaaaaaagcccagattcaggaaatgaaaaggagagagaaagaagaaatgaagaagaaacgggaaatggatgaacttaggagctactcgtcactaatgaaagttgagaacatgtcctcaaatcaagatggtaacgattctgatgagttcatgtgagctgagcaaaggaccctgggaagacgtgaatgtacaggctatcacagatcttttgatttcacctatgttctgaattacagaaaccaaccaaccaaaattctaccttcattctacatagacatcattcattttggagctttttttaagtcattctttttacccatgaaaagaacagatgtgtaatatagttgaacttgaagacaacttataactttaggaaaagaataatatttttggcagaacatatttcagtacctcatgaaggctggctgcctttgttcttgagatagacatttgagcagaccaactctggaaagtgcttctgtggctgtggtctgtcctggaaacagatgccacgaaatgtgtttcctatttctaaaatatctctgcttctgttaagatagatacatttttagtacagtgtttaagggaaccccagtagagacacagcaaacagtgagagaggagagagcaaagccttcagggaagtggcatgcagatccgtattttagcataccacaaagtgaccacagcagtgggtgctaagccagcagaaatgatttcttcagcaaatgtaccagctgtcatcactgaagtatgggcaaaaccagaaaactggtgacccctggtactccaagatgagtatgaactgacctggaaaattccctgaagcattaactcattagccacattgaaaggggtatggaagcccgccaccacgagggaggggtgtgtgtgtgtgtgtgtgtgtgtgtgtgtgtgtgtgtgtgtgtgtgtgtgtgtgtgtgtgtgtgtgtgtgatttagactggagttctgtgatttaaaaaaaaatataataaagtatcatttttatcag

SEQ ID NO: 4056 - DNA, 1536 bp, Cricetulus griseus
tcgcggctggagtgaggaatcgctctgtggagcagcggagctaccgcgctgcttccacagctgctgaggaggggagcatgtctgcaactcgagccaagaaagtgaagatggccaccaaatcgtgccccgagtgcgaccaacagattcctgttgcatgtaaatcatgtccctgtggttacatatttattagcagaaaactactaaatgacaaaacattcagagaaatcaccatcttctacagaaaacaagcacgaggccaagaggaggcggacagagagagttaggagagagaagataaattactacagtaataaagaatttagaaaacagaaagagatctcgaagtaacagccattcagatcatatcagacgaggaagaggaagacctaaaagtacagactagaccaaaaaacatgaggaagaaagagaaaaacaggaaaaggaaattgacatctatgctaacctctctgatgaaaaggctttcgtgttttcagtcgccttggcagaaataaatagaaaaattatcaatcaaagacttattctctgatatttgtctgcaaagtgtgttgacacttacttcaggattacatcagcaaattctcaaaaacagttctggactctcaggcgcattctgactgtatgaatgagggccattgattgttttttctctgttacttagtcgggtgccacactttgggagcaaagctgtgggtttagactttgctgggatttccttgtttaccaaggattattatcagtgttttgtgttgggatataactaaatgtatttacaaaaacaaacaaacaaaaaagccccccaaacctggatggatatttacagactgaaggagtagagtgaaggcagaaatatgaaaactagggcaattaaaatgcttcagagttttcaggcttgcatcagagatgcaatattttaagtactgtcaagagagtgacttttaaatatatatatatatatttcaggctttcatcattaacagattacatatatacaatccattgacttttaataaattggtaattgatattttattgaatggagaattacgaatatagattattctgtcttcaattgaccttttttcttggccactattttaatgatttaaggtaggagttatattttcagaaactttctagacagtttggaaatttggtgctatatgaagaaaagcatttaaggctgtatcatatttcagatataaacaccttgttttcatgaatgtttatttattggttttaaaaaaaaacttttgttatcaagatggtgcctgttaacctaaacacaagatatatttattacatgcaaaatatttcttagctacttgtaaacagtgatgttttgtctgaatgaatgttcatttatacataattctggtaattatttaaactgttacttcatcctggaaaaaaataaaccttaatattgaaagcaagtagattaagtagtgtggtatagctttttgtcatagtgaagtttatacagtattttagccagtttttccagtgttaaaccat

SEQ ID NO: 4057 - DNA, 1535 bp, Cricetulus griseus
gtgctagagaggttcctttgtgtctggcttgtgtggacccttccaggaagtgaagtcgtggaatcccgagccttagtcaggcagtcccagactcgggatttgggcgtgatcactaatgggcaaaagggtttgggctcctgaggaaaacctgccagttagacgtggctgagcctcagtgcccctcagaactggagaaagagaagagcatgacgaggaagagggggctgtctagagaacactgtggtgcttgggaccgccctcatggcctggttggtttacacaacatcggacagacctgttgccttaattccttgattcaggtgctgatgatgaatgaggacttccggaaaatactgaagaggataacggtgcctcggggaccagaagagcagaagaggagtgtcccttttcagttgcttttattgctggaaaagatgcaggacagtcggcagaaagcagtgctgcccatggagctggcttactgcctccagaagtacaacgtgtccttgtatgtccagcatgacgccgctcatctctaccttataatttggaacctgactaaggaccagatcactgacgtggacttggcagagcggctgcaggctctgttcacaatctggacgaaggagtccctgatttgtttggactgtgctgcagagagcagcagaagcagtaggctgctcaccctctctcttcctctttttgatatggactcaaagcccctgaaaacactggaggatgccctgcgctgtttcttccagaccaaagagttagcgagcccagacaagtgcttctgtgacaactgtggggagaagacacccaggaaacaggttttgaagctgactcatctgccccaaaccctgaccatacacctcatgagattctccaccaggaactcacggacagagaagatctgccactcagtgtatttccctcagtgcttggatttcagtcaggttctggcaactgaggaagaactcggtgataccaaggaacagcctgaagtacattatgaactctttgctgtgattgcccatgtggggatggctgactttggtcattactgtgcctacattcggaatcctgtggatggaaagtggttctgcttcaacgactcccatgtttgttgggtgacctgggaggatgtccagtgcacctatggaaatcacagatatcgctggcgggaaactgcttatctcttggtttacatgaagattggatcctgatggatatactcacaccttctgggaatgatggactcttattttcctttcccatacctatgtttgctgcatagtcaattagaattataatttaaaagaaatatctaaactttatttataagcaaaagttaatattgctatggcttgtctcctaaaagctcacacacaggacgtgtggtccttagcatggcaatgtttagatggtagaccttaaagacacaggacacagtaggaggtaattggtccatgggatcgctctcttctgcgcactaatagttcttttcctgtttttctaccacactgtgatgcaaa

SEQ ID NO: 4058 - DNA, 1535 bp, Cricetulus griseus
accaagcatgtcttgttccacaccatttaagatgagattagttcatttggaccttaaaggagcaccaccaaaggtttcgtatttctctgaggtttttcccctgttccatgcactgggtgcaaatggcctcctcattgagtatgaagacatgtttccctatgagggtcacctgaggctgctgagggccaagcatgcatacagccactctgaggttactgagatcctgcgcctggccagactcagtgagctggaggttgttcccttggtgcagacattcggacacatggagtttgtgctaaagcatgcagcttttgtacatctccgtgaagtggctctcttccccaacaccctgaaccctcacgaagctgagtctctggcattggtaaaagacatgattgaccagattctggagctacacaggggtgtccggtggctccacattggctgtgatgaggtctactacttgggtgagggagagacctcaaaacagtggctacagcagaaacagaacagccacgcaaaattgtgtctgtctcacatgcaggcggtagccagccatgtggtgtcacagcaccccggcacaacacccttggtgtgggacgacatgctacgggacatcccccaggaacagctacaagcatctggggtgcctcaactggtggagcctgtgctctgggactatggagctgacctggatgtccacagcaaaatcttcctcatgggaaagtaccaggagtgtggcttccagaggctgtgggctgccagtgccttcaagggggccacaggggctagtcaggcgctaccccctgttgagcatcacattagaaaccatgagcagtggctacaagtggcaggccgtgggccagtggatagtctgcaaggaatcatcttgaccggctggcagaggtacgaccatttctctgtgttgtgtgagctgctccctgtgggaatcccatccctggctgcctgtctacagtcacttgtacacggcggctttggtgacgacgttaagctgagagtgcagcacttccttggggtttcaagcctggaaaccatggatcctgtgagtgagggagctggctccttccctggcagtgacatccatgccctcgtcacacaaattagtctccacctgcacagctctgtggatatacttctggaaaggaacaggtttgtcactggctggttcagcccctaccatcgcaggaggaagtatattcacccagttatgatccagcacatacagcccgaggcactcagccttctgaacaggtggagcaacctcgtgcagcagttggaggcagcacttcagctgactttctacccggacaccgtagaggagtggctggaggagaatgtgctcccgagtatgcagcgactgcagggtctactgcaggacctgggcgaggcagccgccccacggccaccacccgccagcccaggctgggacacaggtcagaacccctgagggggggctggagccctggatatctgcctgggtagcacccagattcctgcctcagggcccagccatg

SEQ ID NO: 4059 - DNA, 1534 bp, Cricetulus griseus
tctgccgccatggcctgcagacctagaagcccaccccggtatgggagccgccacgacgccggtgaaaacccgcggtcccctgcgagatggagcctcggacggaagcgcagagcggacggaagggaccggaagcccgaggactccgaggaaagcgagcgccagattgcagaccgtcgacctgaaagctttacgactcctgaaggccctaagccccgttctagatgttctgactgggcaagtgcagttgaagaagatgaaatgaggaccagagttaacaaagagattgcaagatacaagagaaagcttctcataaatgactttggaagagagagaaaatcatcatcaggaagttctgattcaaaggagtctatgtcctcagtgccagctgatgtggagacagatgaaagtgtcttgatgagaagacagaagcagatcaactatgggaagaacactattgcctatgatcgatatattaaagaggtccccagacacctgcgacaacctggaatccatcccaggactcccaacaaatttaagaagtatagtcgtcggtcatgggatcaacagatcaaactctggaaggtggctctgcatttttgggatcctcctgctgaagaaggatgtgatttacaagaaatacaacctgtagaccttggggaaatggagacagaattcacagaaagcagctctgaatcccagacgagttcacaggataactttgatatgtatgctggcacacccaccaaagttagacatgtagactgccaagtggaggacgagtttgatttggatgcttgtttaactgaacccttgaaagacttctctgccatgagttaaatgccaccttgtggcaactctggggaatatttggctctgcctggccatcttggaaggctggctaagcatgagctgctgtttgtatttgttttttcctttaagagtttattttctcatgataaattgtttttcttgccttattttatgtatggtgagtgttacacatgttttgaattgtaaatgaagctaaataacttgagatttcagttgccacttttcagatgggttggcagtggattttaaccatgtgtttatgggaccaatctagagtcagctgtctttacaggtaactgatgaaatctcagtcaggcagctccagtgactttgtaaaaacttattttctggtctttatcaatgtgaatgtagttttctctcatacagagctctgaacaaaaatgttaggctgttatataatgggctttatgtaagttatgtagtgttaatttggagcttggaatagcactagtgtgaggtagtatcttagtgtgtgctctgagaattgaggcagaagagagggatttagaaagttttctttttttaatgatcagttaatttaccatgtaatattgctgtaaatgataatgtgtacagatattctgttcatgtattcaattgtaaacttgtcaatatttgcatttctattgcttttgtatggaatgattgcaaaaataaagatgttttaactgaaaaaaaaaaa

SEQ ID NO: 4060 - DNA, 1534 bp, Cricetulus griseus
gcctcctctcctgcccctgttctgtctcctattcctccctttgccccaaccctgttccttatggcagcagctccccgcatctggggcgaagcttctcagtggactatcctctcgctccccgggctaagccgggtcactggatgttgctgaaactcctgagatcatgcgctcctttggccgcagcctcactgccggctgtcccctgccgcctccgcctcctctgttgccgtggtctgcgggatgctcagtagcccgctgcgtggcccccgcgatcccgtgttcttcagaagccgttggttgctgcagagttgcgcgaagtagtcatggtgctgtgggagtccccgcggcagtgcagcagctggacactttgcgagggtttctgttggttgctgctgctgccggtgacgctgcttatcataagcccgttcggtgaaactcgcagctttccctacctccttaagtgaatgtttaaggattggagacactgtgacttgcgtctgtcagttcaagtgcaacagtgactatgtgcctgtgtgtggctccaatggagagagctaccagaatgagtgctacctgaggcaggctgcctgcaagcagcagagtgagatacttgtggtctcagaaggatcctgtgcaacagatgcaggatcaggatctggagatggagtccatgaaggctctggagaaagcagccagaaggagacctccacctgtgacatttgccagtttggtgcagagtgtgatgaagatgggacgtctggtgtgtatgcaacattgactgttctcaaaccaacttcaacccctctgcgcttccgacgggaaatcttatgataatgcgtgtcaaatcaaagaagcatcatgtcagaaacagaactacaaccactaaatctgaagatgggcattatgcaagaacagattatgcagagaatgctaacaaattagaagaaagtgccagagaacaccacataccttgtccagaacattacaatggcttctgcatgcacgggaaatgtgaacactccatcaatatgcaagagccatcttgcagatgtgatgctggttatactggccaacactgtgaaaaaaaggactacagtgttctctacgttgttcctggccctgtgcgatttcagtatgtcttgattgcagctgtcattggaacgattcagattgctgtcatatgtgtggtggtcctctgcatcacaaggaaatgccccagaagcaacagaattcacagacagaagcaaaatacagggcactacagttcagacaacacaacaagagcatccacaaggttaatctagagggagcatgtttcccagtggccggacaaccgacagcttggactacacaatacagtattagagacaaaagagtaagacgagatctacacatgttgccttgcgtttgtggtaatctacaccaatgaaaacatgtactacagctatatttgattatgtatggatatatttgaaatagtatacattgtcttgatggtttttctgtaatgtaaataaactatttatatcaacaa

SEQ ID NO: 4061 - DNA, 1533 bp, Cricetulus griseus
tacgctgggcggctaacatggcggcctccagctggctgtgcgcggtcctcctgtttttgtgtgcctcggaccttctgctgctccctcctcctggggcctgcgcggccgacacgccgggcgaagccaccccacctccacggaaaaagaagaaggacatccgcgattacaatgatgccgacatggcgcgacttctggagcagtgggagaaagatgacgacatagaagaaggagaccttccagagcacaagaggccctctgcacctgttgacttctcaaagctagacccaggcaagcctgagagcatcttgaaaatgacaaagaaagggaagaccctgatgatgtttgtcaccgtgtcagggaaccccactgagaaggagacagaagaaatcactagcctgtggcagggcagcctgttcaatgccaactatgatgttcagaggttcatcgtgggctcagaccgtgctatcttcatgctccgggatgggagctatgcctgggagattaaggactttttggtcagccaagacaggtgtgctgatgtcactctagagggacaggtgtaccctggcaaaggaggaggaagcaaggagaaaaataaaacaaagccagagaagggtaaaaagaagaaggagggagatgccaaaccacgggcttccaaggaggacaatcgggctgggagcagaagagaagacctctagcaggtggcatacttcccgccggtcaggcaggaccagacacagccccttgcaggcccgtggagtgaggaacctgcatatcagatgacattctcatgtcttctagaaagggtctgtgcatgacctctggtcagtatcacagttactgtatgaaggcttcacacatgaaggcagggctttgtgattggtagcggacactggcaaaacatgctaactgtggcatcacctgacatggaaacttgatagatgttttgtacctcttgtatctggtgagtccttgacacctccagagtaccactccctcctcctcatcagttcaggagatccattgtctgtcagtcttcctgtggttgtaaggggatgctgttctttctcatgtgaggagagaagggtgcttcctttgagggctcatgctctcatggcccgacaactataaagttgatgaggagggaccagcagaatcttccagagtgagcctcatctgcagtatttctaagtgtttttctttgataaagtgcctaaatttgtgcttttgtatggtactctaatggtgtgctactgttgcatctggggtttgctgttcatgggttggagcctatctaaaagaacatttctgtgaggatgccttttctaagaacttacattctttaaaacctcagttgtgattttaagaaattcagaacagtccatgtacacatacatggctagaaagtgtcactgtcagagtgttgcagtgtggagaattgccctaccctgctgccaatacttcgtcccagtggagctactgttgatcattggtttttcaaaaataaagtacgtttaccagcttccagtgata

SEQ ID NO: 4062 - DNA, 1533 bp, Cricetulus griseus
gggcgagcggagcaggaccgggagcgcccgccgccgccaggcagactgacagagaccagccatggcagacgagccgaagcccatcagtccgcttaagaacctcctggccggcggctttggcggcatgtgcctggtgtttgtggggcaccccctggacacggtcaaggtccgcctgcagacgcaaccgccaagtttgccaggacagccacctatgtactctgggaccatcgactgtttccggaagactcttattagagagggcatcacagggctgtatcggggcatggctgcacccatcattggagtcacccctatgttcgctgtgtgcttctttgggtttggtttggggaagaaactacagcagaaatctccagaggatacacttaactacccacagctgtttgcagctggaatgttatctggtgtgttcaccacgggaatcatgacccctggagaacggattaaatgcttgctgcagattcaggcttctacgggggaaaccaaatacactggtaccttggactgtgcaaagaagctctatcaggagtttgggatccgtggcttctacaaagggactgtgctgaccctcatgcgagatgttccagccagtgggatgtatttcatgacatatgaatggcttaaaaatctcttcactccagagggaaagagtgtcagtgacctcagtgtaccccggatcctcgtggctggaggctttgccgggatcttcaactgggctgtcgcaatccccccagatgtgctcaagtctcgattccagactgcccctcctggaaaatatccccatggtttcagagacgtgctgagagagctgatccgggatgaaggagtggcatccttgtacaaaggattcaatgcagtaatgataagagccttcccagccaatgcagcctgtttccttggctttgaaattgccatgaagatccttaattggattgtccccaacttgtgaggctgaggactgttcaagacttctgtatgctggacaactgttgctgagaagcagtgggcaggactaggtgttcctgaagggtgagggagggagatggtgggatcagagctccaggcatggctgtgatggtgaaattgttgccttaatgacatcctctaccttgtgtaacttgatgtgccattttgaaacttgaatttagaagacttccaaagaattagagatggattaaatagtttatagacttactacctttggccaaattgccacctactggttgactgacggccctactacactcaaaatattcctcactgaagagttgatggctgactctctggaggccctttgcctattttcagccagctaaaccagaagctgggatcttcagtcgctagccaggaaaacccaacagatttctatggtgccatttactcctgggctgcacatacagatgtggttatgaagcccacatctgtctaccagatggactaggtagatatacctaagaacagagcacttattaactattgttagatatttttacacaagaaaataaaaacaaaaaa

SEQ ID NO: 4063 - DNA, 1533 bp, Cricetulus griseus
gctggagtttgctggtgatggcatctacaatttcaccatgggccacatgcacagccgtgcgcatggagaggtgtttcgggctgtccttcaccaggagacggggtttttcctgcagaacccagcaggctccattacgtctcgggtgaccgaggatacatccaaggtgtgtgagtctattagtgacaagctgaacctgctgatgtggtacctggggagaggcctgtgtctcctggcgttcatgttttgggggtcactgtacctcactgtggtcaccctggccaccctgcccctgcttttccttctgccccagaagctgggaaaagtgtaccagtcactggaaatgaaggtgcaggagtctctagcaaagtccacgcaggtggccattgaggccctgtcagccatgcctacagtgcggagctttgccaacgaggagggagaggcccagaagtttaggcagaaactggaggaaatgaagacactcaacaagaaggggccttggcctatgtagtcgaagtctggaccacaagtatctcggggatgctgctgaaggtgggaatcctgtacttcggcgggcagctggtggtcgagaggggctgtcagcagtggagacctcgtctcctttgttctctaccagatacagttcactcatgttgttgaggctcttctctcctgctatccctggatgcagaaggctgtgggctcctcggagaaaatatttgaatacctggacaggactccttgctctccactcagcggctctttggcgcccttaaacatggaaggtctcgtcgagttccaagatgtctcttttgcttatccaaactatcccgatgtccaggtgcttcaggggctgacgttcacgctgcaccccggaaaggtgacagcgttggtgggacccaatgggtcagggaagagtaccgtggccgccctgctgcagaacctgtaccagcccacggggggccgggtgttgctggacggacagcccctggtccagtttgatcaccactacctgcaccgccaggtggctgcggtgcgacaagagccgcttctatttggaagaagttttcgagaaaatattgcctatggcctgacccggaatccaaccatggaggaaatcacagctgtggccaaggagtctggagcccacgatttcatctctggactccctcagggctatgacacagaggtgggtgagactgggaaccagctgtcagggggtcagcgacaggcagtggccttggcccgagctttgattcgaaggccacgcctgcttatcttggatgatgccaccagtgccctggatgctaacaaccagctgcgggtccagcggctcctgtacgagaaccgggggccggcttctccaaccgtgctgctcatcactcagcagctcagcctggtggagcaggctcaccacatcctgtttctcaaagaaggctccgtttgcgagcagggcacccacctgcagctcacggagaggagcggagggtgctatcgggccatggtggaggctcttgtggctccttcagactgaca

SEQ ID NO: 4064 - DNA, 1533 bp, Cricetulus griseus
actaagcctggtcgccatggccctgctcccggccctcctcttagcgctcctggcaggtgctcttgccgagctcccgggatgcaagatccgggtcacctccgcggcgctggagctggtgaagcaggaggggctgcgctttctggagcaagagctggagaccatcaccatcccggacctgtacggcagaaagggcagcttctactacaacatctccgatgtgaaggtcacacagctgcagttgatatcctcggaactccacttccagccggaccaggagctgttgctgcatatctccaatgcatccttggggctgcacttccggaggcagcttctctactggttcttctatgatgggggctacatcaacgcttcggccgagggtgtgtccatccgcacagggctgcaactctcccaagatcccactggtcggattaaagtgtccaatgtctcctgtgacgcctctgtctctaggatgaatatggccttcgggggaaccttcaaggggatatataacttcttgtccacattcatcacttccgggatgcggttcctcctcaaccagcagatctgccctgtgctccaccacgctgggacagtgctgctcaactctctcctggacacagtgcctgtgcgtagtcctgtggatgagcttgttggcatcgactattccctcttgaaggatcctgtggtctccaatggcaacctggatatggaattccggggaacattcttccccctgactgaggggaactggagcttcctcaacagggcggtagagccacagttggaggaggaggagcggatggtgtacgtggccttctctgagttcttcttcgactctgccatggagagctacttccaagctggagccctgcagctgacacttgtgggggacaaggtgccaagtgacctggacatgcttctgagggccacctactttggaagcattgttctcctgagccctacagtgattaactccccactgaagctgaagctgcaggccatgagccctccacggtgcaccatcaagccctcgggcaccaccatctcagtcactgccagtgtcaccatcaccttggccccacccttgctgcctgaagtcgagctatccaagatgatcatggaagcacgtctcagtgctaagatgacactccggggcaaggcgctgcgaacaaaactggaccttcgaaggtttcagatctactccaatcaatctgcgttggagtctctggcactgatcccactgcagaccccactgaagactttgctgcaaattggtgtgatgcccatgctcaatgagaggacctggcgtggggtacagatccccctccccgagggcatcaactttgttcgtgaggtggtgaccaaccatgcaggcttcctcactgttggggctgacctccactttgccaaagggcttcgagaagtgattgacaagaaccgtcctgccgtcgttatggactccactgtccctccagcctctgcagcagctgcctgagtccttcgtcccacccagggagctggcattcagga

SEQ ID NO: 4065 - DNA, 1533 bp, Cricetulus griseus
ctgtgggtgccttgtccttcaagtgcaggagctggctgaactatcgggaatggaagccaatgtgactatcccaatctggcaaaacaagccacatggggctgctcggagtgtggtaagaagaattgggaccaatctacccctgaaaccttgtccccgggcatcctttgagactctgcccaacatttctgacctgtgtttaagagacgtacctccagtccctaccctggctgacattgcatggattgctgcagatgaagaggagacatatgctcgggtcaggagcgatactcgtcccctaagacacacctggaagcccagccctttgattgtcatgcaacgtaatgcctcagtgcccaatctgcgtgggtctgaggagaggctcctggccctgaagaagccagccctgcctgccctaagccgaaccactgagctgcaggatgaactaagccacttgcgcagccagattgctaaaatagtggcggcagatgcagcttcgacttctttaacgccagatttcttatctccaggaagttcaaatgtctcttctcctttaccttgctttggatcctcattacactctacaacttcctttgtcattagtgacatcactgaggagactgaagtagaggtccctgagcttccaacaatccccctgctttgttctgctagccctgaatgttgcaaaccagaacacaaagctacctgcagctcgtctgaagaagatgactgcatctctctgtccaaggccagcagctttgcagacatgatgggcatcctgaaggattttcaccggataaaacagagccaagacctgagcaggagtttactgaaggaagaagaccctgctgtgcttatctctgaggtccttaggaggaagtttgctctgaaagaagaagacatcagtagaaaaggaaactaacagcactgactctgtggactcagtctcatgctcctgaactccttcaatagctgccttccttgctgcagatgtcttcactgcattactctctaattggtctcactggacactttgtgcacagctgtcactctgagcagcttccttgcagcaccacaggctaaggggtgtggctgttcatgttcatagggatgatcttatgctgctccatcctaaacctacaccaatgcccagcagtcaccttttcctctagctatagcagtcaggccactggaccagccaatacttggctgctgcagggaggcctgggctattttttcttaaacatattttataaaactacaaccagatctatcctccagggcctcatcatcatcaaccagttccattggttgaaatttttttcttccgtggatttaagtctaggaagaagtagggagagaaaagaacataccatccttcttctaggacagtaacgatttctctgggttgggccaagactttatttactgcatcatgcatgactcaggtgccctcggggcccttttctctatggtatgaatactgtgtgtctgagttgaaatactacctgacattaaatgaaggatttggagaaa

SEQ ID NO: 4066 - DNA, 1533 bp, Cricetulus griseus
ggttggatttggaatcgtggagatgcgggaggaagccccagccccactggtgccgcccgcggcccgcgagtggaacctgccccccaatgcacccgcctgcatggaacggcagttggaggctgcacggtaccggtctgatggttcccttctgctcggggcctccagtctgagtggtcgctgctgggccggctctctctggtttttcaaggatccgaatgcggcccccaacgaaggcttctgctctgcgggcgtccagaccgaagccggagtagctgacctcacttgggtgggggacaaaggtatcctagtggcttctgactcaggtgctgttgaattgtgggagctagatgagaatgagacacttattgtcagcaagttctgcaagtatgagcatgatgacattgtgtctactgtcactgtcctgagctctggcacacaagctgtcagtggtagcaaagacttctgcatcaaaatttgggacctgactcagcagatgtcattgaattcatatcgagctcattcaggacaggtcacctgtgttgctgcctctccccacaaagactctgtgtttctttcatgcagtgaggacagtaggattttgctctgggatacccgctgtcctaagccagcatcacagatgggctgcagtgcttctggctaccttcctacctccctggcttggcatcctcagcagagtgatgtctttgtctttggtgatgagaatggatctgtctctcttgtggacaccaagaatgcaagcagtaccctcagctcagctgtgcactcccagtgtgtcactaggctggtattctctccacacagtgctccctttctggcctctctcagtgaagactgctcaattgctgtgctggattcaagcctttctgaggtgtttagaagtcgagcccacagagacttcgtgagagatgctacgtggtctccacttaaccactccctccttaccacagttggctgggaccatcaagtcatccaccatgttgtgcccattgagcctctcccagcccctggacctgagaatgcctcagagtagaatggatttcaagaaaaaaaaaaaaaagccctccacctgcaagaatctgcttgcctctgcctccgtattgtgagagcacaggaaggagccttgtagagcatgttactccctagtcccgtgcaataaacaggcagactctcagcctgagggaggctgcagcccatagtgtctaggagggaaaacttccttatataaatgggtatatgtggtgtgagtgtattaagtagtttggggtggggaaaattattcttcagctttcccaaagcactgctctttatttcccacaaagtgagaacagttttatgcttcccaagtccaagaattggatatgttgtctgggatatggaatgtgagtatccctagatttgtgggagtggttccaccactcagagatggggtaacttatttttatatagagtttaattcattatggggaatacttcagtccataaaagtccagcacagtataccttgagaagaca

SEQ ID NO: 4067 - DNA, 1532 bp, Cricetulus griseus
atgctgttggccgctgccatctcattgggtctgctgttgctggccctcttcctgctcctgcgatacctgggctggggctcgttaactatcttctggtttgagttcgtgcagcagccagtctacaacctgctcatgggtgacacaaaggaacagcgcatcctgcgccatgtgcagcagcacgccaagcctggagaccctcagagcgtactggaggccattgacacctactcctcacagaaggagtgggccatgcatgtgggtgacgcaaaaggccaaatcatggatacagtgattcgtgagtatcgcccctcgctggtgctggagctaggagcttactgtggctactcagcggtgcggacggcccgcctgctgccacctggaggcaggcttctcaccatggagatgaaccctgactatgctgccatcactcagcaaatgctgaactttgcaggcctacaggacaaagtcaccatcctccttggggcatcccaggacctcatcccgcagctgaagacaaagtatgatgtggacacattagacatggtctttcttgaccactggaaagaccgctacctgccagacacacgtctcctggaggaatgtggcctgttgcgcaaggggacagtgcttctagctgacaatgtcatcgtcccgggagcccctgacttcctgaaatatgtgagggggagcagcagctttgagtgcacacactacagctcacacctggaatacatggaagtggtagatggcctagagaaggcaatctacaagggtccaagcagccccatgaaatcttgaccacacagcctgccctgagttccccttccagcttccttctgcaagatgacgcacactcatgctgacccctctatgctcctggagcctgtcctcaagtgccttggttcttgattatcgtacactggcacactaacattcatgggctcacagtccgaaaccattacaataaacctgaaaagcacctgaaaaggctgagttaaagctggaggtgcagtggctcacagtgcctgcctagcactgctcttccagaggtcccaagttcaattcccagtaaccacatggtggctcacaaccatccgttatgagatctggtgccctcttctggtgtgcagatatatacatggaagcagaatatttatatataataaataaataaatcttttaaaaaaaaaaaaaaaaaaaaaaaaaaaaaaaaaaaaaaaaaaaaaaaaaaaattaaagtttcagtgccagatccctaggcactgtcatcatcaggcccaggcccagtgagaagtcagggaattggaaatatccagatgctgtttggctgtcaccaaatggcagcaatgcctgtgacagtcctgttcccagcaactcataccacatttgaatcttaagaatgagtcataaactttctagatgcagtgcacacgtctttaatcccagcacccaggaggtaaggcaggcagatctgagttcgaagccagcctggtctacacagtgagttccacgacagcaaaagctacagagaa

SEQ ID NO: 4068 - DNA, 1531 bp, Cricetulus griseus
ttctgagcggaggccagaagttgcgggaatcgcggcatcgctagggagcacgatacggcgtgagagcgatggtgaagagatcccggcggcgtggagcggcccagtgggcagctgtgcgggccagggcaggtcgcaccgccacggacgaaaatgaggacgatttagggtcgccgccctctccgggggactccagctactaccacgatcaggtagatgagttccatgaagcgcggatcccgggcagccttggctaagggctggaacgaagtcgacagtggggaggaggatggtgatgaggaggaagaggtgctagccctagatgttgatgatgagaacgaggaagatgaagagagttcggaggccgaggagggatgatggtgggagctctgtgcagagcgagagtgaggcctctgtggatcctagcttgtcctggggccagaggaaaaagctttattatgatacggactatggttccaaatcccgaggccgtcagagtcagcaagaagtagaagaggaggaaagagaggaagaggaggaggcacaggtaattcagcggcgcctggcccaagccctgcaagaggatgactttggagtcgcttgggtggaggcctttgcaaaaccggtgccccaggtaaatgaagctgagactcgggtcgtgaaggatttggctaaagtctccgtaaaagagaagctgaagatgttgagaaaagaatcacccgagttcttagagctgatagaagacctcaaagccaagttggcggaagtgaaagatgagttggagcccttgttacagttggtggagaaaggagtcattccccctggaaaaggaagtcagtacctgaggactaagtataacctctacttgaactactgcgccaacatcagtttttatttgatcttaaaagctaggagagtccctgcacatggacatcctgtcatagaaaggcttgtcacctacagaaatctgatcaacaagctgtcagttgtggatcagaaactgtcctcggaaattcgtcacctactcacagccaaggatggtgctgtaaagaaagaactgaatccaaaagcaaaattaaccaaagctaagccaaagtctgtttcacagatttctcccgctgctgctgatctgcctgatgaacctgattttgatgaagctgcactaaaatactataaggaaatggaagacaggcagaagctgaaaagaaagaaagaagaaaatagtgccgaggaagaggctctcgaagaacaaaatgccaagagagccatcacctaccagattgctaaaaataggggacttacaccaaggagaaagaagattgataggaaccccagagtaaaacatagggaaaagttcagaagagccaaaattcgaaggcgaggccaggtccgggaagttcgtagagaagaacagcggtatagtggtgaactgtctggcattcgggctggagttaaaaagagcattaagcttaagtgaagttgctctttggcctactttttggcaattattttagatgaataaaagtattttgaa

SEQ ID NO: 4069 - DNA, 1531 bp, Cricetulus griseus
gggaagagtggtccatcctgccagtactgcaaggacgatgagaacaaaccatgtcgcaagtgtgcttgccacgtgtgtggtggtcgtgaggctccagagaagcagctgttatgtgatgagtgtgacatggccttccatctgtattgcctgcagccacagctcacctgtgtcccccctgagcctgagtggtactgccccagctgtcggactgactccagtgaggtggtgcaagcaggtgagaagctgaagcaaagcaagaagaaggcaaaaaccacgttccgggcccatccccggcgtcccctgtgggcaccatgtggcgcttcagagtccaggtcagtgagtctggtgtgcatcggccacatgtggcaggcatccatggccggagcaatgatggtgcctactcgttggtgctggctggtggttatgaggatgatgtggacaatggcaatttcttcacttacacggggagcggcggccgagacctctcaggcaacaagcgcaccgcaggacagtcctctgaccagaagctcaccaacaccaacagggctctggcactaaactgtgacaatgtcatcagtgagaaaggggcggaggccaaggactggcgccaggggaagccggtgcgtgtggtccgcaacatgaagggagggaaacacagcaagtacgcacccgcagagggcaaccgctatgacggcatctacaaggtggtgaagtactggccagagaagggtaaatctggcttccttgtgtggcgctacctccttcgacgggatgacacggagccggggccctggacccgggagggcaaggaccgcatacggcagctggggctcactatgcagtaccctgaaggctacttagaggccttggctagcaaggagaagagtaggaagcgcccagccagggccttggagcaggcaccaacatcctccaagaccaccatgtccaagcggaagaccacaggcctggccaacaacacacaagtgtccaagaagagcaaactggagccctacacactcccagtgcaacaggccaacctcatcaaggaggacaagaacaatgccaagctgtgggatgacgtgctgagttcgcttcagggtgggccgtatcaggtttttctgagcaaggtgaaggaggctttccagtgtatctgttgccaggagctggtgttccggcccgtcaccaccgtgtgtcagcacaatgtctgtaaggattgcctggacaggtcctttcgtgccgaggtgtttagctgcccagcctgtcgctgtgacctagaccacagctccccaacccgggtgaaccagcctttgcagaccattctcaaccagctgttccctggctatggcagtggtcggtgatgccacgaaccaggcagaaggccctcaacacttctccgagttcgtagtgggcttagtttggaggtgttgtccttctacgtctgctcctggcgacccgtccgccttgctcaccagttaaccaggcatctgcaggaaccccgtgttctggctaccagttggacctctgttatttc

SEQ ID NO: 4070 - DNA, 1531 bp, Cricetulus griseus
aagaaacacagacctcccgcttctggacatgcacaccgtggcccgagaggagggagaaggaatggagacaactgacagcgagtctgtgtcttcggctggcacacacattccatctttagaacagctgcttagttctcctgacaccaagcttgaacagcatcttgcagaaccctctttatggcatgctgaatttaccaaagaagaattggctgagaagctcagctccaccacaaagagtgcagatcacctaaatggactgcttcgggagacagaggccaccaacgccatcctaatggagcaaatcaagcttctcaaaagtgaaataagaagactggaaagaaatcaggagcgagagaagtctgtagctaacctggagtacttgaagaatgtcttgctgcggttcattttcctgaagcccggtagtgaaagagagaggcttcttcctgttatagacacaatgctgcagctgagccctgaagaaaagggaaagcttgccacggtggctcaaggtgaggaagaaagtgcttcccgttcttctggatgggcatcctatctgcatagttggtctggacttcgatagaacaacttgaagaaatggtaccagtcattcacagccctctaactcagcaccgtggcctcagtctctgtgatctcccatgcacagagaaaattagttcattcctgcactctggaaccccgggagccactcatttctaagtagtactgtgaattttaaaattgaactgaattttggtaccatatcaactggggaactgaagcttttaaaataatgtttcaagattaaggaaatgctttctgggtaaggttgacatgtttgttaagggattatgaagtaaatatgctacagttaattatgaggctaagttaaattgcaatttagtcaattgctttacaataacccccgcccccatttgttatttcaaaacttaccctggtactggcaatgtgaccctgacattgagtagatgggcccccccctcagctgatgtgtttccatggtgtctccaggcttattgattagattaaaattgtgctcttaaatcaaatttgggtattatattttaatatataattgttagtaaataaccacatagtgctctctggagttacgaagcttacggtttcttctttgattttcagtctcagctagaaacctgactctgtactcagtcactgtgaatattgctttccaacctggttgagctgaaatttgctgctgacacgttgagtttgttctctaaaagctattttctctcagtgttcgctcctcctgtgttaggacagacctaactagtgaatgtattgattaaatgcatctatctcacagctgactttacaagttgagtttttttaacctcataaactgtgaatatgagtatgccaagtggcatttgatgtaattttagtaatatttaaataaattccactttttctttgggcctactataccttttgaagtctgtataaacttgtttgaaatctagtctgttcatatgaatataataaaaat

SEQ ID NO: 4071 - DNA, 1530 bp, Cricetulus griseus
cgaggtgactgcacagcatcggcaccggctcctacggccgctgccgcaaagatccggaggaagagcgacggcaagatactggtgtggaaagagcttgactatggctccatgacggaggcggagaagcagatgctggtgtctgaggtgaacttgcttcgggagctgaagcatccaaacattgtccgttactatgaccgtattatcgacagaaccaacacaaccctgtacatcgtgatggagtactgtgaaggaggggacctggccagtgtcattacaaaggggaccaaggatagacaatacttagaggaagagtttgtacttcgagtgatgactcagctgaccctggccctgaaagagtgtcacagaaggagtgacggtggccacaccgtgcttcatcgggatctgaagccagccaacgtcttcctggacagcaaacacaatgtcaagctgggggactttggactagctagaatattaaaccacgactcgagttttgcaaagacgtttgttggcacaccttattacatgtctcctgagcaaatgagccgcttgtcctacaatgagaagtcggacatctggtcgctgggctgcctgctgtacgagctgtgtgcattaatgcctccgtttacagctttcaaccagaaagagttagctgggaaaatcagagaagggagattcaggcggatcccctaccgctactctgacgggttgaatgacatcatcactcggatgctgaatttaaaggattaccaccgaccttcagtggaagaaatcctggagagtcctttgatagctgacttggttgcggaagaacaaaggagacatctagagaggagaggccagcgcttaggggagccttccaagctgcaggtctccagccctgtgctgagtgagctcaagttgaaggaaaaacaactgcaggacagagagcgtgcgctcagagctcgagaggacagtctggagcagaaggagcgtgaactttgtattcgagagagactagcagaggacaaactggccagagctgaaagtttggtgaagaactacagcttgctgaaggagcagaggttcctgtgcctggctagtgacccagaccttgatcatccatccttagtaatgaggaagaaggttcatttccgtggggaaagcaaagagaacaccacaaggagtgagaattctgagagccagcttgccaaatccaagtgcaaggacctgaagaagaggcttcatgctgcccagctgcgggctcaggccctgtcggatattgaaaagaactaccagctgaagagcaggcagatcctgggcatgcgctaggccagcaaggcatggagctgggccagtggtgggtactgccagcccactagagatttgtactcgactgctgtagttttgtgtgtctggttctgggttttaaatgttcttggacttgagaaacttaattggatacaattgtttatgaataaccagtcaccttatttatacaattttcaatacagtaaaatctattttgtggaaattcaaaaaaaaaaaaaa

SEQ ID NO: 4072 - DNA, 1530 bp, Cricetulus griseus
cgaagggggccgggaacccggaagtacttctcggcagaggcctgggcgactcttttgaatggaatcgggctgattcatcgccggttctcggagccaggtccttgttgagtgtgaggcgctgctctcgccgccaggttgccacaaggccaggagagagagaagaaaaaaactacttgtgaaaaattataccttccagaattagcaagaattggagttaataaggaatttgtcaaattcaacaaattgaagcctaatacgagttatagttactgaacagaaatatggacagacttcttagacttggaggaggtatgcctggactgggccagggtccacctacagatgctcctgccgtggacacagcagagcaagtctatatctcttccttggcattgctaaagatgttaaaacatggccgggctggagttcctatggaagttatgggtctaatgcttggcgaatttgttgatgattacaccgtcagagtgattgatgtgtttgctatgccacagtcaggaactggtgtcagtgtagaagcagttgatccagtgttccaagccaaaatgttggatatgctgaaacaaacaggaaggcctgagatggttgttggttggtatcacagtcaccctggctttggctgttggctttctggtgtggatatcaacactcagcagagctttgaagccttgtcggagagagctgtggcagtggttgtggatcccattcagagtgtaaaaggaaaggttgttattgatgccttcagattgatcaatgctaatatgatggtcttaggacatgaaccaagacaaacaacttcaaatctgggtcacttaaacaagccatctatccaggcattaatacatggattaaacagacattattactccatcactattaattatcgaaaaaatgaactggaacagaagatgctgttaaatttgcataagaagagttggatggaaggattgacacttcaagactacagtgaacattgtaaacacaatgaatcagtggtaaaagagatgttggaattagccaagaattataataaggctgtagaagaagaagataagatgacacctgaacagctggcaataaagaatgttggcaagcaggatcccaaacgtcatttggaagaacatgtggatgtgcttatgacttcaaatattgtccagtgtttggcagcaatgttggatactgttgtatttaaataaagcaatgtagagagctgtcagcgacactctcagtgtattttccttcattgttcctattgctcacaggcaagggagctctgcaggtgatgtggtggcatgtaagtcacctgtgccaccttccatctcagttgtgcagttgcttctgtttatttagtcagggttttgcagattccaaagttgttcaagaatacatcaaagtggacaaattttgttaagatcccatttactatttgaaaaaatcagtagcacaaatatattttgattgttgcttacaaaataaaatacatttacaacccaaaaaaaaaaaaaaaaaaaa

SEQ ID NO: 4073 - DNA, 1529 bp, Cricetulus griseus
tctctgcccttgacagcctttcgcgtcagcatggctgctctggcggctctgcgcggcggcgtccgccggcctctgcttcgagggctgctgcaggaagtaagatgcctggatcgaagttatgcatccaaacccactttgaatgaagtagttatagtaagtggtgtaagaactcccattggatccttcatgggcagccttgcctctcagccagccactaagcttggatctattgcaattcaaggagccattgaaaaggcagggatcccaaaagaagaagtaaaggaagtctacatggggaatgtcatccaagggggtgaaggacaggcccctacacggcaagcagcattgggtgcaggtttaccaatttccactccgtgtaccacggtaaacaaagtttgtgcttcaggaatgaaagccatcatgatggcttctcaaaatctcatgtgtggacatcaggatgtgatggtggcaggtgggatggagagcatgtcaaacgtcccgtatgtaatgagcagaggagcaacaccgtatggtgggataaaacttgaagacctgattgtaaaagatgggctgactgatgtctacaataaaattcatatgggtaactgtgctgagaatactgcaaagaagctgagtattgcccgaggtgagcaggacacttatgccatcagctcttacagcagaagtaaagaagcctgggatgcagggaagtttgcagatgaagtcattcctgtcaccgtgtcagtaaaaggtaaaccagatgtggtggtgaaagaagatgaagagtacaagcgtgttgattttagtaaagtaccaaagctgaaaactgtgttccagaaagaaaatggcactgtaacagctgccaatgccagcacactgaatgatggagcagctgctgtggttctcatgactgcagatgcagcccagaggctcaacgttaagccactagcacgaattgcagcatttgccgatgctgctgtagaccctattgattttccagttgcgcctgcatatgctgtacctaaggttctgaaatatgcaggattgaaaaaggaagatattgccatgtgggaagtaaatgaagcattcagtgtggttgtactggccaacattaaaatgctagagattgatccccaaaaagtgaatatccatggaggagctgtttctttgggccatccaattgggatgtctggagcccggattgttgttcacttggctcatgccttgaagcgaggacaatttggtctggccagtatttgcaatggaggaggaggtgcttctgctgtgctgattgagaagctgtagacagtcccatgtgatcacaaacactgttgaagtgaatgggacttccttgggccgcgttatattcaacatcaactacttcattttttattattttctattaaaaattttttaaagaaataatcatcatatccaaaacctattgacagtacaaataaaaatttcttctttctttctttctttgttttggtaaacttgaaacacttgggaggaagaggcaggaggat

SEQ ID NO: 4074 - DNA, 1529 bp, Cricetulus griseus
  modified_base (137)..(137): a, c, t, g, unknown or other
gggagttgcagatggcgttggaggatggagagactatgagtggaccgtctcagttctcagggactttaatgcgaacatgtgaacggttagtaaagaaggacgattcgtccccagcaaccctgttgggattctcaccncgagctactgtgaattgctgcaaaacaaagtacctttgctgggtagcagcacagcctgcatcgtggtactggacagaagtagccaccgcttgcacacggcgaacctgggtgactccggcttcctggtggtccggggcggcgaagtcgtgcaccgatctgatgagcagcagcactacttcaacactccattccagctttccattgctccgcggctgagggggtcatcctgagcgacagccccgacgctgctgatagcacgtctttcgatgtccagttaggagatatcatcctgacagcgacagacgggctctttgacaacatgcctgactagaggcttggcccacaggagagatagagaaaggagactccttgcagaatccattaacagaaaggcaatgcaaaattgcagaagtcctcaaagcctgagaatcaaatgctgcggctgaagtcgtccactctgcctgtgaggatgcctgcctcgggccttcccaggggagagagtgcatcttggaatggggttggctgtggacagcctggctcctcccctcaggagcctcacacccttagagcatgccccacctgcgctgtgtcctcaaggtgacagcgtggtggctgcagcacactgagtccacagggaagctagtgatgacctgacattcgcagtgactccatatgagtgtggggctctgagtccagcttaatgtttacagttccaatagccatttgcagtaggtaacgtcccttctcagacttccccattacctgcgagcacaaacttactcttaaggtttatgtataattgactgctgtaaagatatatatatatttttgggtccgttcttttccttctttaacttggtggtagaaaaccatatttacttagaagcccttaagttaaagccgtgttttctgtgcaagtcaggtgacggtgtgaagatctcgtgaacagccacgcacagcccttcctctgcaggagacactggctccctgattactgcattgaacttgtgtttgaggttacctcaacttgtttttaaaagatttcgtctgtgagtttgtatatttgagtagctgtctctcgttttatttaaattgtttaccatgtaccatgtacatgtcattgctgtatctcagtgcatcatgcttgtaacaggcatttcgtttataagaatgagttactcatttgtaagctgttcagtaatttatctactattcctaaattggcataatgttagattccttattttgaatctacctttaattactatgtcaacatatcagaaccttatttcttcctatgacttaagctgcctgcgcacaaataaataatattaccaaaggagatgaataaaacaactgtgcaataacaaaaaaaaaaaaaaaaaaaaaaag

SEQ ID NO: 4075 - DNA, 1529 bp, Cricetulus griseus
ctctctctctctctctctctctctctctctctcttttttacttttttttttagttcttcacacagagaaaatggagaaaattcaggtctgtctgtcatttctcaagcctggtccccaagtcagttgtccctgccaccactcccatcacccagcactccttttccaaatgcttggtggaggggagctgatatttagaggggtgccatgtgcgctccgcctgtttgagctaagctttcctggcttttccttttgaatgagaacgtagatgctggagatggcttctctatcgtgaggtcacactgcacgtgtgacactgaaggaagctatgctgctgtgcccttcatggtccgtctcacttagccccaggcccctctttttctctgtggataaattatccataaaatgccttgttgcatgcagagtgtacgctttctgtcttctaaaggatccatggtcctatggattcccaagatgggcaacaccccaaacttgctttcctcgtgttcaaagacctggcagccacgtggctgtagaagagtgactgtctctcagcacagtcctagcatgcctttcctcagaggcccctcttgctagtgagcaaggacccactacccgaggcccatggaagaaccgagggggggagcttgggcaccagagccatggacggggtcagtggggctttgcctagtttgtctctgtgtccgcagtaagcatgtccttgtcccacttgtcctgtttggaaatgacctactggaattgcaaaacctagtttctctttaaaatttacaaccttgaccctggctgtgttgtagaaggatcttgtgagagggtagaactgaagaggggaagaggtggggacgtttccgttccttccccttccctttactgttgagaagcgcacctgcctttgatgctgtctccagtgccgcggttgctcctccatcctattgatacagtgttgtgcatgctggtgttgtatttctatacggtagcttgacatttattaacttatactgtaggtgttatgtattcctatgacaaaaaaacactaagacttcaaaatttttaaattttttttttaatttaattttttcctttcaggggtaaagtttgctttaccaaatagtgattgtaacaaattgatctgttttggatgttgctatagtgacatgcagttctatattttgtttttcaggggggaggggacaaaagaaacaccagtgttagcttactcttaatgtctggtgtttgtcatggtgaaactataactattacagtgtaggagaacgccacgacgttctctgagtgcgcctccgtgctttctcgtcatgtatgatgcagtgaactatttttaaggtctaatcaagtgatattttttttcccccctcaactccgtgtttcgctaaggaattatttcgcacacggaccattcttagcagttttcctcagtgatggaatattcatgaatgtgagtcattatgtagccgtcgtacattgagcaaaataaacgcacagatctgatgtcagcg

SEQ ID NO: 4076 - DNA, 1529 bp, Cricetulus griseus
ggagggatccggctgtggccagtacctcggcgtctctgcgtcgcccggcaggtccggggctccggtccgtgccggtgcaggcgccggcatgtggctgtgggaagaccagggcggcctcctgggccccttctccttcgtgctggtggtgctgctggtgatgacgcgcagccccttcaacgcctgcgtgctcaccggcagcctctacatccttctgcggctcttcagcttcgagccggtgccgtcccgccgggtcctgcaggtgctcaagccccgtgaccgcgtgtccgccatcgcccaccgcggcggcagccacgacgcgcccgagaacacgctggcagccatccggcaggcagctaagaatggagcaacgggtgtggagttggacatcgagtttactgctgatggagttcctgtcttgatgcacgataacacagtagataggacaacagacgggtctggccgactatgtgatctgacatttgaacaaattaggaaacttaaccctgcagcaaatcacagactcagaaatgagttccctgatgaaaagatccctaccttgaaggaagccgttacagaatgccttacccacaacctcacaatcttctttgatgtcaaaggccatgcagatatggcttctgctgctctaaagaacatatacatggaatttccacagctgtacaataacagtatggtctgctcattcttgccagaagtcatctataagatgagacaaatggatcagaaagtaataacagccctcacacacaggccttggagcctgagccatactggagatgggaaacctcgctacagtgtcttttggaagcagtccatgtttgtggtgttggacatcttgcttgactggagcatgcacaatgtcttgtggtacctatgtgggatttcagccttcctcatgcagaaggattttgtctccccagactatttgaagaagtggtcagctaaaggaatccaggttgttagttggactgtcaacacctttgatgaaaagaattattacgagtcccatcttgggtccagctacatcactgacagcatgctagaagactgtgcacctcacttctagattccctgggaggaaatacaatcccaaaactgcctggaggcctcttgcagagacatcggaacattctgttagcacaagccctggggatcttgtggctcacactagcaatagtcatatttcaccacaacaagctgaaaccaggtgtgaccaccattctccagggaaggcttaacactgttgcccttaaagttctggatctgcaaaaaggcagggtggctccgcccaaccctgctgagggtacagagtcatgaggatgagctgagtggatcctgcaattaggatgcaggcatcaatgcatggggcttgcacgatcactccaagttgacattttaaatcttgccatacttcagtaattcacttatttccaatatttgtcgtcagctctgttaacggcgacctgtaggtgtcaaacttgtgaccatactaataaaatcattgaaaggtg

SEQ ID NO: 4077 - DNA, 1528 bp, Cricetulus griseus
caagattcggtcctgtgcagttcttggtgtttggaatcaggctcacactcaacgctcttctgtcacctgtttgcctctgcccaagagtgcgagtgactcggttgtccacccgtggctaggcagtggattgccatgaagcgggcagcgatgcggctttgtaccttgaacagggggctttttattcatggcagaggactgactcaaggataccagtacaccccaaaacaaggacccttacacatgcgtgaagttcgggataagttacgggagatagtaggagtatccacaaactggagagaccatgtaaaagcaatggaggaaaggaagttacttcataactttttggctaaatcacagaaagccctaccacccaggaaaatgaaggacagttacattgaagttctcctacctttgggtagtgatcctggactacgagataaatatttgactgttcaaaacacagtaagattcggcaggattctggaggaccttgacagcttaggagttcttgtttgctacatgcacaacagaaatcattctgttacgatgtctcctttatcaatagtgacagccctagtggacaagattgatatgtgtaaacagagcttaagccctgagcaggacattaagttcactggccatgttagctgggttggaaagacatccatggaagtgaagatgaaaatgttccagctgcacaaggatgatgcattttggcctgtattggatgcaacctttgtaatggtggctcgggattctgaaaacaaagggccggcatttgtaaatccactcatccctgaaaatgcagaagaagaagagctctttaaacaaggagaactgaacaagggacgaagaattgcctttagctccacttcattactgaaaatggctcccagtcctgaggagaggaataccatccatgagatgtttcttagcacactggatccaaagactataagttttcacagtcgaattttgcctcctaactcagtgtggatggaagatacaaaactcaagagcttggatatttgtcatcctcaggagcggaacattttcaatcgaatatttggtggttttcttatgagaaaagcatatgaacttgcatgggctactgcttgtagctttggtggttcccggccatttgtggtaacagtagatgatataatgtttcagaaacccgttgaagttggctcattgctctttctttcttcacaggtttgctttactcagaacaattacattcaagtcagagtacatagtgaagtggcctctcttgggagtaatgagcatatgaccaccaacgtctttcatttcacattcatgtcagaaagagaagtacccttggttttccccaaaacatacggagagtccatgttgtatttagatggcaagcggcatttcaagtccatgagtgccccagtgaccttgaaaaaggactactccgtggagccctaggaaaatctcacttgttgcaagctagtactccctgcatagaggcatagtgcctagtaaagccatgctgaaaagt

SEQ ID NO: 4078 - DNA, 1528 bp, Cricetulus griseus
aatcataatacaacaaccacccagtgggtaactaaaggtggtccacagattgcttacgaacgcagcttcaggtggaagcttgctcacttccgttacttgtgccagtctaatgcactacccagtcatgtaaagatcaatgtgtcccgacagactttatttgaagattccttccaacagatcatggcattaaaaccatatgacttaaggaggcgattatatgtaatatttagaggagaagaaggccttgattatggtggccttgcaagagaatggtttttcttgctttcccatgaagtattgaacccaatgtattgcttatttgagtaggcaagaataactattgtttacagataaatccagcatcaaaccataaaatcctgatcatctttcatacttctgttttattggtcgctttattgcaatggcactattccatggaaagtttattgacactggcttctctttaccattctacaaaattttataactccttatctggataagagacaacaactattgaagaatgtggcttagaaatgtatttttctgttgacatggagattctaggaaaagttacttcacatgatctgaaattgggaggttccaatatcctggtgactgaagaaaacaaggatgaatatattggcttaatgacagaatggcgtttttctcgaggagtacaagaacagaccaaagctttccttgatgggtttaatgaagttgttccccttcagtggctacaatactttgatgaaaaagaattggaggttatgctgtgtggcatgcaagaggttgacttggcagactggcagagaaatactgtttaccgacattatacaagaaacagcaagcaaattatttggttttggcagtttgtgaaagagactgataatgaagtaagaatgcgactcttgcagttttgtcactggaacctgccgattacctctaggaggatttgctgagctcatggggaagtaatgggcctcaaaagttttgtattgaaaagttggcaaagacacctggttaccaagaagccatacatgttcttgtcttggaggagctcttgcatttaaataccccagccaagaaaaattgcacagatagtgtatataagctgttcattctgtacagataattttctgattctctcaaagtataaatggttttcccgtttctttcccaacagaaatatgcaaaacatttcatcattttctactttatttattgttcccttgaaatgactgaccaggaaaaaagatcatcctcaaattttgaagcaagcaagagaatttattaagaagtatatatctatataggcatatgacagtggctctagttttatagagcgccaagtgtattagacatggcagccattcattcacaaagctctggatttgctttgccttgttcctgttgtccaggggaaagtgcaaatgttccatttcttctccctaggtgatatctgattgttttagttgcatggctgttcaggaaggtatttagggcttaggccaactcttactttaag

SEQ ID NO: 4079 - DNA, 1527 bp, Cricetulus griseus
  modified_base (646)..(646): a, c, t, g, unknown or other
caggttcttcaatgaaatttaccccgtctggacgtactcttacttggtgctcctctttcctgtgttccttgccacagactacctccgttacaagcctgtcattctgcttcagggactcagccttattgttacatggttcatgctgctctactgcccaaggattgctggctattctagttcttggaattcttctatggcattgccacagccaactgaaattgcctattactcctatatctacagtgtggtcgacctgggcatgtaccagaaagtcacaagttactgtagaagtgccaccttggtaggcttcacagtagggctctgtcttagggcaaatccttgtgtcagtggctcactggccactgttcagcttgaacgtcaatctccctcacctgtgtttctgttgcttttgctgtggcctggtttctgcccatgccacagaagagtctcttctttcaccacattcctgcctcctgtcatggagtgaatggcatcaaggtacaaaatggtggcatcgttactgaaaacccagcatctaaccaccttcctggatgggaggtgatctgttactcctcccgccctctgctctggctggtccgtgtggtgggccctctccacctgcggctattttcaagtggtgaactanacccagggattgtgggagaaggtgatgccttctcaaagtgccgttatctacaatggtggtgtggaggctgtgtcaaccttgctgggtgcaagcgctgtatttgcagttggttatataaaaatatcctggtcaacttggggagaaatgacgctattcctctgttctctcctgattgctgctgcagtgtataccatggacactgtgaataacatttgggtgtgctatacatcctatgttgtcttcagaatcatctacatggtactcatcaccatagcaacttttcagattgctgcaaacctcagcatggaacgttacgcccttgtgtttggtgtaaacactttcattgccctggcattgcagaccctgctcactctaattgtggttgataacaagggccttggcttagagattaccacacagttcctgatttatgccagttactttgcggtcatctctgtagttttcctggctaacggtgcattcagtgtcctaaagaaatgcagaaagcaggaggatcccagctccagccctcaagcaactactccctaacatgctgctcaagtgatgctgcttccaagcaaggactctgcacagcaactgcctggatgtatttaaactctttatggttcagataaatatttatgaatgtgtatttcatggcttcaaagcagctactcaattaataccttgtattccaggagttaatatgatactgttgagagaagccagaactgaagcttttatcatggtttatttatgagctttaatttaagaataacgtatgaaggactcttaattccaagtgaaaaagtcatttataagttagagatacaggcagtccattttatgtttgcataccccttttacttcaaagaaaaaaa

SEQ ID NO: 4080 - DNA, 1527 bp, Cricetulus griseus
aagaatggaaacaccaacttcatgagtgtaaaattggcccaaccaaaaatgagcagcagctcttctatgtgtctcagcctggaagctcagtggtgacttctctttcccctggagaagctgttaagaaacacgtgggcttgctgcgcgttaaagggaggaagatgaacctgcagaagctgcctctccgcacagtgcggcagttcttcatggaggatgtggttctcgctaaccacccaaacctgttcaaccctgacaatcctaaggtgacccaggccatccagagcttctgcttggagaagagattgaagaaatgcttgaaaataccgagcgcgaacggctagggaattctctttcaaccagagaagcctcttatccgactacgggtggactacagtggaggctttgaaccttttagtgttcttcgctttagccagaaatttgtggtatcgggtcgctaaccccaaagatatcatccactttttcaggcatagggagcaaaagggaaaaacaggtgaagagatcaactttgggaagcttgtttcaaaatctccttcggaaggaacgacactcagagtagaagacctggtgaagcagtatttccagactgcggagaagaatgttcagctctcactgctgacagaaagagggatgggtgaagccgttcaagaatttgtggacaaggaagaaaaagatgccatcgaggaattagtgaagtaccagctggagaaaacacagcggtttcttaaggagcgccatatcgatgctctggaagacaagattgacgaagaggtccggcgtttcagagaaagcagacagagaaataccaacgaagaagacgatgaagtgcgagaggccatgagcagggcccgggcgctcagatcgcagtcagagaactctgcctcagccttcagtgctgacgacctgagtttcgatatagcagaacagacagcaaatgactctgatgacagcctgtcagcagtgcccagcagaggccggggccgaggccgaggtcgaagaggaggcagagggcagagcaccgcatcaagaggaggatctcagagaggccgagacactgggcaggagacggctactcgaggcagatgctcaaaggccactacatcgacctctagaaatatgtccattctagacgctttcagatctactcgacagcagccttccagaaacactgccactaaaaattactcagagactattgaagtggatgaatctgatgaagatgacatttttcctaccagttccaaggctgatcaaaggtggccaggcacaacatctagcaaacggatgtcccagagccagatagccaagggggttgactttgaatcagatgaggacgatgacgatgaccctttcatgagcagtagttctctaagaagccgaagataataatgtttttaatggaacatgattgtcatgatacaggaagaaatcaaagcactgcatgctgactctaaagctgacgatgtttaaagacttatagacttaatgtaaaaaaaaaaaaaaaaaaaa

SEQ ID NO: 4081 - DNA, 1527 bp, Cricetulus griseus
cttcctgcgagtgcgagccaaccggcaaaccccgactgaatgctcggattgggaaaatgaaacggaggaagcaagatgaagggcagagggaaggcccctgcatggccgaggacgatgctgtggacatggagccggagaacagcagccgctttgaggagtatgagtggtgtgggcagaagcggatacgggccaccacactcctggaaggtggcttccgaggttccggcttcgtcatgtgcagtggcaaagaaaacccagacagtgatgctgacctggatgtggatggagatgacactctggagtatgggaaaccacaatacacagaggccgatgtcatcccttgcacaggagaagagcctggtgaagccaaggagagagaggcactccggggtgcagtcctaaatggtggcccccccagcacccgtatcacacctgagttctctaaatgggctagtgatgagatgccatccactagcaatggtgaaagcagcaagcaggaggccatgcagaagacctgcaagaacagtgacattgagaaaatcactgaagattccgctgtaactacatttgaggccctgaaggctcgtgtcagggagcttgaacggcagctatctcggggggaccgatacaaatgcctcatttgcatggactcatactcgatgcccctaacgtcgatccagtgttggcatgtgcactgtgaagagtgctggctgcggactctgggtgccaagaagctctgccctcagtgcaacaccatcacagcgcctggagacctgcggaggatctacttgtgagctagccatccaggcaggccttgcgttgagcaaccccacctgccccagcctctgtgacagtgaacccctctccctttgtacataattgcacacaggttccccgtgtacatacatgcacatacacacccaaacacacatataggactctggagccagagtggagcagcccttcctgcttgctccttctgaacttggggaccatgcctcttttggctctgtttccagtgtgggcaggaaggtagggatggggagtagcagggcaaggctcttgagatccatcccctagactgacagacagacatgcaaacaccagactgaagcacatgtaatatagactgtgtatgtttacaatgttgtgtataaatgggacactttgccctctaccgcctcccctttggttgtacgattttcttttttttaatgactcctggaagcagtgcccccttcggggctggctgggggctcggcccatccacctcttaaggtgcctgcctttccctctcccatggcctccctcccctttcccatgtgctcggtgttcagtggtgtatgtgtcttctcccagacacgggccatgtgcccaaggatatgatcctctccttagtcttagctcatggggctcattatgaggagctggggtagagtggaaaatgggaccgagcagaaacaggctgcagtccggctggctgagggtgcctggctgcccagcctgcataaacaaaaaaaaaaaaaa

SEQ ID NO: 4082 - DNA, 1526 bp, Cricetulus griseus
gagccgagtacgcccggagacgttccggactggccggaagcggaaccgagccgagccggaaggcgctgagcccacctgaaggttgctgagcaccgaccggcaggcgtagagcccagcacagtccacgtcatggcggcggaccggacaggtgtagccggaggagggactgtcggcggctgtttgaccaaggacagtttacaggatgctaagtgcccggcggcaatccccaatcggcggcgcgcttcctcgctgtctcgtgacgcgcagcgccgagcctatcagtggtgccgagagtacctgggcggggcctggcgccgagcccggccggaggagctgagcgtttgccccgtgagcggaggccttagcaacctgctcttccgatgctcgctaccgaaccacctgcccagtgtgggcgaggagccccgcgaggtgctgctacgtctgtatggggccatcctgcagggtgtagactccttggtattagagagtgtgatgttcgccattcttgcagagagagcattagggccccaactctatggagtgtttccagagggccgcctggaacagtacctcccaagccggccattgaaaactcaagagctgcgggaccccagtgttgtcaggagccattgccacaaagatggcccgtttccacggtatggagatgcccttcactaaggagccccactggttgtttgggaccatggagcggtacctaaagcagatccaggacctgccttccactgacctcccccagatgaacctgctggagatgtacaacctgaaggatgagatgggcaacctcaggaagttgctagatgctactccgtcaccagtggtcttctgccacaatgacatccaggaagggaacatcttactgctctcagagccaaaaagcgacgacagcctcatgttggttgattttgagtacagtagctacaactacaggggctttgacattgggaatcacttttgtgagtgggtttatgattacacctttgaggaatggcctttctacaaagcaagtcccacagactaccccactagaggacagcagctccattttattcgacattatctggcagaggttcagaaaggtcagatcctccctgaagaggagcagaagaaactggaagaagagttgctgatggaagtcagttggtatgctctggcatctcattttttctggggtctgtggtccatcctccaggcatccatgtccaccatagagtttggctacttggagtatgcccagtctcggttccagttctacttcaagcagaaggggcagctgactggtttccactcttcaccttgacaatccaactccacctcagatttctcctggcgcctccagggcaggaccttggagggaggggcaaagagcaggagaccccagagactgggctgtgcctcttaagtgaaactgttgtggcaaagctgacccctgtccccctgttttgagtagttgcccaaggtgggcatctgggaacccctggggtttcgtacctaaataaatgaacttc

SEQ ID NO: 4083 - DNA, 1526 bp, Cricetulus griseus
gccgctcgctgccccgggcaggggcacagttgaaatcaaggcaatggcttactacctcaactcagaaacccacgtggatccagggcccatctatgttcgagaaaatgggcagctacacatggtcaatttggctctggatggtgtcaagaacagcctgcagaagccacggcctttcagactttttcccaaaggcttttctgtggagctgtgcatgaacagggaagacactgcacagaaagagaagactgatcacttcatcttcacatacacccgtgaggggaatctgcgctactctgccaaatccctcttcagcctggtgttgggcttcatctctgacaacgttgatcacattgattcccttattggctttcctgagcagattgctgaaaagctattttctgctgctgaagccagacagaagttcacagagccaggtgcagggctcagggctttacagaagttcactgaggcctatgggagtctggtgctttgctcactgtgcttaagaaacaggtatttggtgattgcagaaaaacttgaagagatcaagtctttccgggagctcacccgactggatctttcctgttgcaagcttggagatgaacatgaacttctagaacatctcaccaatgaggctctgtctagtgtaactcagctccacttgaaggataattgcttatctgatgccggcattcggaaaatgacagcaccagtaagagtgatgaaaagaggccttgagaacctaacgctgttagacttatcctgtaaccctgagatcacagatgctggaattggatacctattttcttttagaaaactgaactgtttagatatctctggaacagggctaaaggacatcaaagccgtcaaggacaagctccagacacacataggccttgttcactccaaagtgcctttgaaggaatttgatcatagtaactgcaaaacagagggctgggctgaccagatcgtcctgcagtgggagcgagtgagcgtggaagctgtgcggcagcggaaagatgcagagtctcgaaaggcagctcagtacttctatcagaaacgagctctctcagaagcctcaaggaaatgtctcctggcagacacccacatgaactcttctgggaagctccagttctatagagagaaggttccggactgccatgggccactgttgagccaagagtcaaagaagagcaagaagagagctttcgagcagtcagagcaggagcagagtgcaccacagtcggccaagcagaagtgtatgtgtctggcggtggaagactgggacttgctgaattcctactgactgatccatacagtcaacctttcccctcatctcagcacatgagggggagagactgctgatgattttcttttggtttggatttacttatgacattagcatagcaagcagatatttctacttttgtggtgggggaggggatgccatggacgtatgtaataatttctaatgtatattttcaatacatagtaattttttcaaataaactcttttgctctacgtt

SEQ ID NO: 4084 - DNA, 1525 bp, Cricetulus griseus
atgtctattctcaaggtacttgcccgagagatctttgactcccgtgggaaccccactgttgaagttgatctctacacctcaaaaggtctcttccgagcggctgtgcccagcggtgcctccactggcatctacgaggccctagaactccgagacaatgataagactcgctacatggggaagggtgtctcaaaggctgttgagcacatcaataaaactatcggacctgctctggttagcaagaaactggacgtggtggaccaagagaagatcgacaaattgatgattgaaatggacggcaccgagaataaatctaaatttggtgcaaatgccatcctgggagtatccctggcagtctgcaaagctggtgccgcagaaaagggggtacccctgtaccgccacatcgctgacttggctggcaaccctgaagttattctgcccgtccccgctttcaacgtgatcaatggtggttcccacgctggcaacaagctggccatgcaggagttcatgatccttcccgtgggcgcgtccaccttccgggaagccatgcgcattggggcagaggtttaccacaacctgaagaatgtcatcaaggagaaatacgggaaggatgccaccaatgtgggtgatgagggcggtttcgcgcccaacatcctggagaacaaagaagctctggagctgctgaagactgcaatcgggaaggctggctacacagagcaggttgtcatcgggatggacgtggctgcctctgagttcttcaggtctggcaaatatgacctagacttcaagtctccggatgaccccagcaggcacatcacacctgaccagctggctgacctgtataagtccttcatccaggagtatccagtggtgtccatcgaggacccctttgaccaggacgactgggaggcctggaagaatttcacagctagtgcaggcatccaggtggttggggatgatctcacagtaaccaaccctaagaggattgccaaggctgtcagtgagaagtcctgcaactgcctcctgctcaaagtcaaccagattggctctgtgaccgagtctctgcaggcgtgtaagctggctcagtccaatggctggggtgtcatggtgtcccatcgctccggggagacagaggacactttcattgccgacctggtggtagggctctgcactgggcagatcaagactggtgccccttgccgatctgagcgtctggccaagtacaatcagatccttagaatcgaggaagagctgggcagcaaggccaagtttgctggcagaagcttcaggaaccccctggccaagtaaagtgtgtggagatcctgaaaacacctgccgcttagcccctgtccctggtgtcatcaacgaggctcaaggcagcctagtgcttgtccctcccatgccaccttttccttaggcctttaggtcctacccttggtagtcccttgctggaaaccccagctttgtaatcatgtgattggctaagtcgttgtttgttacctcacttcccagctagtgtatggatccc

SEQ ID NO: 4085 - DNA, 1525 bp, Cricetulus griseus
cggcgggcccggcgtggtgtggaagtagcatcaggtgccagtggcattggtgagccccggcagtctgggaatggcactcgggcaggcggccctgaggagacagctgcccagtatgcggtgattgccatcgtacctgtcttttgcctcatggggcttctgggcattcttgtgtgcaacctgctcaagcggaacacatctgcccacatcgccaccacctccatactgtacagggcctggcctcgctctctggctcctgctgttcccgttgtagccagaagaagtggccagaggtgctgctgtctcctgaggcagcagctgccaccactcctgctcccaccctcctgccccaaacccatctagggctcctaaggcttacgtgccaagacaggacgtcagggtgagatcaccatcttgtctgtgggcaggttccgtgtggctcgcattcctgagcagcggaccagttcattgttatctgaagtgaagactatcacggaggccgggccgttcaggaggtgatcttcccgactccccaccagcctggtcttccccctcgagcagcgggcgctgctgggaagtggtggaagccatactaagtgggttgaagcctccagcagagaacagagccgaggagaaccgatatgtggtccggctaagtgagagcaacctggtcatctgatgggctgtctagaattagacactctgccctgccctgggagggtctaaaggcttcctgcaggagggagagctgcagctgggactgaggaccaagatgcaacggcctgtgccttgggaactagccactcttgccatgtcctggaccctggacgtgcctccctctcttctggcaggccctctgaaaggaaggggtagcaaagagccctgtgctggtggcggagtacttgggttccagcttttctgactgtgaagtggggggaggagagctcaattaccaggacctttccagttccttgcgggttctgggctgagtcctgttggggggagcttgacgttgctgccctcccattagtagctttatctggcctgtttttgctgcttcctgggccttggccttcaaggctcccatgggactattatggcaatgcctccagaaggggcttaatgcatgtgcctgcccctaccctgctatttttaatgaaactgaaaaatgacctgacttgtacaaggctctggtacaaagccccaggccaccctgctgccttcaactctggagctgcagagagaggatggcaggctatagagtgcctctgttctgtggtttccatgctcctgtggtagtgtctgcctgagctttaggtagaaggggtgactgccaacccagcctgtcttagtctctgctctagctcagggcccggttatttatgtggggccgcgcaggcgcggggcccactgcccatcccatttcttatttattgaaacctgctgctgccctgttcctacatctccagccccacacacttgaggaataaaaggtggaaagtggtatcatgaggcgcttcctttcccc

SEQ ID NO: 4086 - DNA, 1525 bp, Cricetulus griseus
catggctatggattggctgggcagtattgtgtcaatcaactgtggaggataggcttgggtgtctatcagggaagagtgtcagcagtggatcaggtcagtcagaccatttctcttactcggccttccacaatggagtgaagtgtcttgtaccagaagtcacctttcgggcaggtgatattacagaattaaaaatcctggagataccaggtcctggagacaaccaacagtttggagaccttcatcagacagaattaggctcttctggtgttgggtaccaagtgggtgtcagtcagaatggtacaggcaaggtggtcaagaagccaacctcttctagtagtgcccctcagaacatccctaagaggacagatgtgaagagccaggatgttgccgtttctcctcagcagcagcagtgctcaaagagttacgtggacaggcacatgttagagcggagacttgagatgactggtgtgtgtgccagtcagatggcactgactctccttggaggacccaacaggttgaatcctaagaatgtccaccagaggcctacagtagccctgctatgtgggccccaatgtaaaaggggcgtcagggtatcagttgtgggaggcacctagccaaccatgatgtgcaagtcatcctcttcctgcccaactttgtcaagatgctggagtctatcaccaatgaactgtctctcttcagcaagacccaaggtcaacaagtgtctagcctaagagatctccctactagccctgtggacctggttatcaactgcctggattgccctgagaacgccttccttcgggatcagccgtggtacaaggcagctgtggcttgggccaaccagaaccgggcaccagtgctcagcatagaccctcctgtgcatgaagttgagcagggcattgatgccaaatggtccttggcactgggcctgcctctgccactaggggagcacgcaggccgagtctatttgtgtgacattggcattccccagcaggtcttccaggaggttggcatcaactaccattcaccctttggctgcaagtttgtcattcccctgcactctgcctagaggggctctggacagctggaccctgtattcccctgcactactcctgccgccaaacccgacaacggacgccttaaggatgtgaagctttgtggaccttgtagattatcttttggatttgtttcttctgtgagaggacaaaacgttcttaaaacttgcctgccacctttccttaatcagggaaggctttcccactggcatgcgtgtcggggggtagaccagtggctccaggcttctttctatcctaccatgcctccattaaggtggggctttgtttacagacataggcagctctaagactgttgtttacagccactgggcatgggctggcaccttgtggggtgggccagggcctattggggtctccacccacgctatttcagaaggctttgtctttcccatgcttcctctggctctgcagccagcctgctcacccttactctaatcatgtagatcagg

SEQ ID NO: 4087 - DNA, 1525 bp, Cricetulus griseus
gctgcaaaagtttcttcaagaggagcgttccgcaggaacttaacttacacatgccgtgccaacaggaactgtcccatcgaccagcaccaccgcaaccagtgccaatactgccgcctcaagaagtgcctcaaagtgggcatgaggcgggaagcggttcagcgaggaagaatgcctccaacccagcccaatccaggccagtacgcactcacaaacggggaccccctcaatggccactgctacctgtccggctacatctcgctgctgctgcgcgcagagccctatcccacatctcgttatggcagccagtgcatgcagcccaacaacatcatgggcatcgagaacatctgtgagctggccgcgcgcctcctctttagcgccgtcgagtgggcccgcaacatcccccttcttcccggatctgcagatcaccgaccaggtgtctctgctacgcctcacctggagcgagctcttcgtgctcaacgcagctcagtgctccatgcccctgcacgtggcgccgctactggccgctgcgggcctccacgcctcgcccatgtccgcggaccgcgtcgtggcctttatggaccacatccgcatctttcaggaacagctgcctcaaagccatcgtgctgttcacgtcagatgcttgtggcctgtccgatgctgcccacatcgaaagtctgcaggagaaatcgcagtgtgcactggaggagtatgtgaggagccagtaccccaaccagcccagccgctttggcaaactgctgctgcgattgccctctcttcgcacagtgtcctcctctgtcatcgagcagcttttcttcgtccgtttggtaggtaaaacccctatcgaaactctcatccgagatatgttgctgtctgggagcagtttcaactggccttacatgtccatccagtgctcctagaccttcggcatttccacctgcccttgtcccccacccctagagaccaagaagactcatccagaccaaggactcaaaagccttgggaatgtggtatgatggaccaggcaggccaggcagaggggagggggcctggggacaaggacagcctactctgcaggaatgcagcctaagttgcatggaccttccaggatttattgtggatggatgtggatatattctgtacagaaaacaactcatatggaagcggactgaatcctatgtagaaacacacacactgaacattgttattcattttgtaaaatactagtctttattttctatttttttgtaaaatttaaacattgtatgcgcataaagaaaaaaagaaaaaaaagttaggggaaaataacattttccaaataattataaaaaatgtcctgtgtctatgtatctatatctgttttgtattttttcctggttccaaaccagatttcctgtgattctatactaataatttttgatataaccctttgcttcttataatgagtgcgatatatgttgtccaggctgttcttcaagaaattaaaattgaagtagaaaaatttaaaacaaaaaataaaaagaattta

SEQ ID NO: 4088 - DNA, 1525 bp, Cricetulus griseus
gcttcctctgaggactgagcttgaagcctccatgccagctgctgttggagacgcaaagccaagcatgggtcaggaaggaagctggcctggctgactgaagaatgggaaccccaggactctcagctcatcttgaaggggtagcggtcccccaggaacgcctgtgaacaatggggacattgttggttagccgtttggttagatgtctctttgctatttataagtgacttttaaaccttctcttggctgttaagaaatgtgttctagattttagctatttatggtttgcagcctgcatgctgagacagtgcttacgttgtcctcacgtgtgcgggcgtgtgtggatgctcgtatgttttgcacattttgtagctgttgacgtgctttgctgcacaaaaaatgaaaactttggggctataatttggaggataagtagagggcgggtgggggaggggtgcggttttgaaatgtcgggacagagacagattccaagacggaaacttagattacatcccagaggcagagaaacagtgggcacttcccccatgtctggggaagaccagaacttgcaactctgcctgctttgatccatatttctcacagtgctgtaatttaaaaaaaaataggatttaagacagataaccacctttacattgtgaatgtgtttgccttgtctaatgacaattccataacatttctctccaccatagtactttaggctagttgtacttgtccgtctgtgccataagtaagtggactgtagttggaccaaaataaaaatgaaagccttgcagaccattctggcagtcagttcctggtccctcgatgtattctaagcagtgtaagtgtctgattgtaccctggtagcatggccagtgtcccttctgtagctgtcccagctctgtagtttacgatgcaaatctgtctcaagatctgtgtgtcactgctgcttctgagagcagggaggattttctgcagctgtttcgaagttgtggcctgcccttgaatcttctattaattactgggtgggccccggctggcaggggaactttctagactcccgctcttttaattgatgtaggcatttgggcttgctacttgaccgttctcaccctatgaaacgtctcacactttgaagcaaatacaattcacagcacagtacacacaaaaaccctggcataagacaggggaggttcttcttattttgtgagctggttgccgtagaaacggataacaaagggcagccttccacttctggtataatggtggagccccttttctcaggcttgacacctgtctgaataagagtgattagagctgcataatatccctctctcagctattgaatatgtggttcacgtaccaaaccctgtagaagttagaaaatgttcgtgtgttgtatgttcttgtttgctactactactatttttgaggttttgtaaaacttgtttatttttttttcacgtatgtgaaactgaaggtcaataaattattagagattttcaaaacaaaaaaaaaaaaaaaaaaa

SEQ ID NO: 4089 - DNA, 1525 bp, Cricetulus griseus
tcagtacctcatggacaggaacaatgagtggaaactgcccaaggacacctactatgactttgatgccgaagcagcagaccacaagcaggaggaggacatgaaacgaaagcagcagcggactacatacatcaaacgagtgattgcacacccatctttccataacataaatttcaagcaagcagaaaagatgatggagaccatggaccaaggagatgttataatccgacccagcagcaagggtgagaaccacctgacggtgacctggaaagtcagtgatggcatttaccagcacgtggatgttcgggaggaaggcaaggaaaatgccttcagcctgggggccactttgtggatcaacagcgaggaatttgaagacttggatgagattgttgcccgatatgtccagcccatggcttcctttgctcgagaccttctgaaccacaagtattaccaggattgtagtggtggtgaccggaagaagttagaggagctgctcatcaaaactaagaaggagaagcccaccttcatcccttacttcatctgtgcctgcaaggaactgccgggcaagttcctcctgggataccagccccggggtaaacccaggattgaatatgtaacagtgactcctgaaggattccggtaccggggccagatcttcccaactgtgaatggactcttcaggtggtttaaggatcactatcaggatcctgtaccaggcatcactcccagtagcagcagcaggactcggacccctgcttctatcaatgctaccccagccaacatcaatcttgcagatctgacaagggctgtgaatgccttgcctcagaacatgacttcgcagatgttcagtgccattgctgctgtgacaggccaaggacagaaccccaatgctaccccagcccagtgggcatccagccaatatggctatggcggcagtggaggaggcagcagcgcctaccatgtgttcccaacgccagcccagcaaccagtggccacaccactaatgacccccagctattcctacacaaccccaagccagcccattaccaccccacaataccaccagctccaggccagcactactccacagtctacccaggcccagccccagccttcctccagctcccgacaacggcaacagcagccaaagtccaacagccatgcagccattgactggggcaagatggctgagcagtggctacaggagaaggaggcagaacgacggaaacagaaacagcggctgacccctcgaccctctcccagccccatgattgaaagcacccccatgtccactgctggagatgcgaccccactcctggatgagatggatcggtagggggcctgttcctcgaactctggttacctctgaggctccaagaggcctggccatctacagcctcactccctgcccctctttttttctctgtccccagcctgtgtgcctgccagccgctgcctacctaccctcatctacgcattgccacctgcttctcacctgtcatttgaataaacagtgtttctacagagc

SEQ ID NO: 4090 - DNA, 1525 bp, Cricetulus griseus
gatggcggctaccagtgaggggcagctgtttgccgcgggtattgaaaagacttggggtgcagttgttcggtcccctgaagggacaccccagaaagttcggcagctgatagatgaggggattgtcccggaagagggaggcacagaaccaaaggacacatctgccacattccagtcaatcaatggatcgcctcaagcagaacagcccccattggaatctacaagcaaagaagccttttttcacagagtggaaacttttttcttcgttgaaatgggcagggaagccccctgagctgtcccctcttatctgtgcaaaatatggctgggtcacagttgaatgcgatatgctcaagtgctccagctgccaggctttcctctgtgccagtttgcagccagcttttgacttcagcagatataaggaacgatgtgctgaactcaagaaatctttgtgcagtgcccatgaaaagttctgtttttggccagacagcccttctccagatagatttgggatgttgccattgggtgagcctgttgttcttgtcagtgagttcctggaccggtttcaaagcctttgtcatttagacctccagcttccttccctgaggccagaggacttaaaaagtatgtgcttgaccgaagacaagatcagtgttctgctgcacctgctggaggatgagtttgattaccaaagtgacgacaggaaaactacaagcaaattgggctcggacatgcaagtccacatcactgcctgtgtgctttctttgtgcggctgggcatgtagttctttggaacccacacagcttcccctgatagcatgttcccagtgtatgcggaaggtcggtctctggggctttcagcagatcgaatcatccctgacagatctggaggcttcctttggcttgactggctcccccattcccgggatggagggtcggcctgagcactttcctctggtgcctgaatctcctaggcggatgatgacccgaagccaagatgccacagtttctcccaactctgaacagtcagaaaaaagtccaggtcccattgtctcccgaactcggagctgggactcttccagtcctgttgaccggcctgagccagaggcagccagccccaccaccaggagccgaccagtgacccgaagcatgggaactggagattctgctggcttggaagtcccctccagccctctccggaaagccaagcgagctcgtctctgctcttctggcagctcagatacctccccacgaagcttctttgaccccacctctcagcatagagattggtgtccttgggtgaacatcacacttgccaaagaaaccagggagaatgggacagcggaggtggatgccagtaccccagcagagccaggctggaaggcagtgttgaccgtcctgttggcgcacaagcactctaaccagccagctgagatggactccatggagtctctctgaaaaatcaagaaaagtgttccgaatattccgacagtgggagtctttatgctcgtcctgaaaatgctccagacaga

SEQ ID NO: 4091 - DNA, 1524 bp, Cricetulus griseus
tcatcaacaaggactatgcagactttgtcaacctctcaacaaacctggtcggcatggacagagccctcaaccagctttctgtgcctttgggacaattacgagaagaggttatgagtcttaggtcctctgtcagtgaaggaattctggcagtagatgaacgaatgtctaaacaagaagacattaggaagaaaagatgagtgtgttgagacttatacaagttattcgatcagttgagaaaattggcaggatccttagaagcatcactcacagacgggctagaagacgccccagatggaagtccatattgcctggtaaactttctcacagaacatggagcagcctagagaaatgctggtccaatgagatgttcctgcctttgttggcacaccgtctgtggaggctgaccttgcagattctggcccgattctctgtgtttgtccatgagatttctgctaggcccatttctaatgaaagcaccaaggagactaaaaaacctttggctggcagcaaagacccttctgaagaccaaggaagccatccttcagaagtacaggcagcgtccatttccagcactcagctggtgtatgtggtctcagacctggacaggcttcaggaatggcttccagagctcctggagatagtcaagccaaaacttgaaatgatcggctttaagaatttttcatctatctcagcggccatggaagactctcagagttccttgtctgcccacgtgccagccctgagcagcaggattgtccaggacctgagcgagtcttgcttcagttatctgaagagtgccctggaggtccccaggctttaccgcaggaccaataaggaagtccccagtgcagcctcttcttatgtggacagtgcactgaagccattttaccagcttcagcgtggacatgggaacaaggtgaagccagcagtgatgcagcactggctgcaggaagctctgtctgagagcacacacaagtactttgagactgtatccgatgtgctgaactcagtgaagaagatggaggaaagcctgaagcgcctcaaacaagccagaagagccccagccgccaaccctgtcagctccagcagtggcatgagtgatgacgacaagatccgactacagctggctcttgatgtggagttcctgggagaacagatacaaaagatgggcttgcagaccagtgacatcaagagcttcccagccctcacagagcttgtccttgctgccagggaccaggcaactgcagaacagccctaggcatcctggcaggacctgaagtggggaagaaagtgacccttgtcctctgagtcacccagcaacagcctgtacctctacccagtgtatgtgggccatctttcacccaggaagaaccaaaagcctttccattgtatggaagataatttttatgacatttgaagctttttactatagtttactgaacaaattgctttatttttgttgtaaatcttactgtagtcaagctgatttctaccatagagttaaagcaaatacacaggcgtggc

SEQ ID NO: 4092 - DNA, 1524 bp, Cricetulus griseus
acatagacattgcaacagaagaccaagtccccaatcgacacataatctctctccttctgtgtggtaatgaacattctacccttgacaagcatgccagcgaagtggtagggccagcctaccatggccaaggcctgcacaggacaaaggccacctggcctttccagttacttgagtttggagccagaatgcaaaggccgtgaagcaaattagccgttccgtgctgccttgccttgccagccagcttggcggaggcccgcagctgtatgtggtagtagagccagttcccatcacagctcaatggcttgaaaacagaggatacaaagctgagagattgctctgcactaggtgttgggaagctgtcctaacaggtgactgaactcactaacaacttcatttccaagtctcacccaccctgttgtctgacaacctgtgtgccttttttgtaaaacgttttcgtgtcttcgagatgcctgttgactatctagagtttagtaccaacttctacactcaagcatatactttcagcttaatgctgccgtctttgtcttgcactgccttcctgcactaacacttctctctactcctgtttataaccatgtatttattacataatgtacatattgtaatgttttgtaagttattaatttatatatctaacattgcctgccaatggtggtgttacatttgtgtagaaaactctgcctaagagttgcaaccttttcttgtaatgttttgtattatgtattatataatccaaatgttgcttaaaagagacatgaagccccaatagcaatgaggacaggaatggccgttgttccaaaggtctgccctttcttattctgagtccctcattctgcccaaccctttgatgagctggttttgaaaacaggattctcatattagatactaaatggtttatactgaggtttattttgtatcgtttgataggggctgggagcactgggatgtagtttatacccatgttctatccaagtctctatatgcacgagttgggttgtcactgggccatgctctatttgtggctttggttctaaaaacaacactacatttgctcatagatgatactgagtgttcccaaactactgacttggaagagctagcctccatactgctcgaaagcaggggagtcatgttcaaattcatcatgaaaggaaacaagacaatgtgaatttttatcatagaatgtgaactgatgtcataaattatacaaatgtgaagcttctgataacacttgttaggcctcttcctggtgtcagtttcagtttgtaaaatatgtgtcatgcttcagttcagcattatgacaatagttaaagaaaatggcacaaatgtgcatgaccaatgggtttgtatgtctgttaacactgcgttgttctggatagacatcatattgttttcaaaagtttctcacaatgtatgttataatattaatactattatatattgtgctcaaatgcattcttaagagacttttatatgagctgaataaacaaaagcatgaataaa

SEQ ID NO: 4093 - DNA, 1524 bp, Cricetulus griseus
ccttccagcctcacctatgaggatacttataacaaccctcaaatatagccgaccgtgccaaggagatcagactcacgctgaagagcaacgtgatcagtctggaccatcacatcagccagtatgctaccatctgccaacagctccaggctgaggtggctgccctgagggagaagctccagatgtatgagacaggggcccaggccctgcaacagcgctctccaccagtcctccaagttgagcacaccacaacaccttccaagctccccattacagcctgggcactccagccagtcctgtaccccagaactccatgcaaagtgtggaacccttcaagaggagagcctggagacagaggctcagaaacagatggttgtggaaggaaatgtttcccatcaggaacagtctccacaggacaagcagcagatgccagagccgagcttgccacgagtcccctagtctgactttgcagccgaagctagtcatgagccaacactcgccacagaaatgggacagggaccattttaagcagttggccctccgggtgctgcgcctggcccagagacaatactccctgctgcaggcagccaaccttctgactcctgacatgatctcagaacttgagaccctgcagcagctggtgcatgaggaaaacactgaactcgggactcagagccccaggactcctggtcgggcgaagggggaccctctagatcaggagctgtatttggagtctaagtcttcagggtactgtggtcctgtgacccggaccatggcaaagcaactgaatggcctcacacacactctgggaatcccacttggacctgactgcacctcagataagacattccaaaagccctccaaggagaagaagaaaaggaaactgaacccagcagaacccagcagcccaccagccccaaatctggagactaagcgccagcgccagtccttccttccctgcctgaagaggggctctctacctaaggcccagccttcctctgagcccagaactcccgaaggagaaaggacctcctccccctcctcccgagtctgcccagctacagtcattaaaggccgggtccccctggcctcttctgccttacagaactgctctactcctcttgtcctacccactcgtgacctcaacaccaccttcaacatctctgaggagtccccctccaaacccagcttccatgaacttgttggctgtgaggcagtctcccaggagctgacgagcaaagaccagccctccatccctagtgcacctgtgctcctgttcaccacgatgggccccaaatcttctctacctacaaccactgccggcaagaagaggcgcactgtgaggtcttcagtttcccgaggccgcagctgcattgcccgccttcccagtagcactttgaagaatccagacagacccttcacagcccctgaaccacccttgattctccactgccttggtgaccagaggactcataagggactgattggggtgacagagtgctgttaactgggtatcctgaccacgag

SEQ ID NO: 4094 - DNA, 1524 bp, Cricetulus griseus
tcctttgccaccatcatcaaagctcacagtgaaatgcagagtgcatctaggagattctacctccagccatctccaaggctccatccccgactgtctttgagaacaccatagaaggccagggcagacagggccaggccctgcccctcttcagaatctggtgccattgctatgcagatgactttgcactggactgtccagacctctgtgggaattgtttcatcaacatatcagctgtctcttcggtggtccttcttccccgtccttctgaatcatcattggaggaaacatacttaagcacagcctcaccaagacagaacaagatgagagatggcaagggctctaagtggcagggtttggttggggagtctccacaaccctcctctctcttccctcctccttgggctcctatctaatcccagctctctgggctgactctggaattgatgaatcctttcgtattgtttctcagcttccttcaaactgcaccgaaggtcagtttgggggagccaagctccccctccccgtaacacaaaagcaggtggacagctaatcagcctgattctgcctcttctgcccatttcttttgtttgtatcttgaaacttaagactcaagcacatgtcggaagggctcccttatgagacagagttcaaagcagcagagggtacagttcaacagcacccccaaagacactctgaagcagagaatccttcagcaaacaggactgaggaatgttcccgtgcagagatcagttccattcgagcaaaaggcaaagatgggctatatgccctcatctacccttccatccctccctggcgttcctatcagtttgttggcttatgaaaccttccgttctttaaaataaaagctagtttacctcaaagaatcatgtttccatttggaaaccaatgacatggcttgagaatggatgaccctccccacagccctcccttactgagcctggtgtccttgagacacgtgatcttggcttagtccggggtcagctgctctgagaaggaaccaggtccccgggcctgagatggggaggaaaggttggatgcagccttcctccccagttagcatgtagtgagcagcctctgtctcttccagcagggtcctgtcaagttaccatagcaaccagcaactccaggtaccacaaagacaatggctccaagaaccaaagtgtgggagagagcaggggttctggcctggccagagtacccaaaattaagccctaaatgctaggggggcaaaggagaaggagaaatagaaatggatgtatgggctaagcagctgcagaggccttgtagtctgagcgagaggccactgaaaggtaggacaggtcgtctctgttctcttcaccactcacccctttccagcagcgtgccccacttctattccaaaactctccccttgaataccgacccttcgaaaaaagaaagcaaaatatacctttagacaacagtgttaccctgagcctcaaggataagtggatggggtctctagaaaaaaaaaaaaaaaaaaaa

SEQ ID NO: 4095 - DNA, 1523 bp, Cricetulus griseus
  modified_base (282)..(282): a, c, t, g, unknown or other
  modified_base (336)..(336): a, c, t, g, unknown or other
  modified_base (342)..(342): a, c, t, g, unknown or other
  modified_base (467)..(467): a, c, t, g, unknown or other
  modified_base (515)..(515): a, c, t, g, unknown or other
agaaggagagagaggagactgtcttccaagtgagctacccatctgcattcagcaaactgattgccctcaagggcaagtcagccctctgctcacctcccagtcttggtctccaaggagtatgtctccaaatcttttaaacagagcctcgccacttgctttcaatgttgccaatcccagcagcggtactgactacccagacccatttgcaaatggtgttgacatccaggtcagcaacgtggactacaggctgtcccggaaggagctgcagcagctcctccaggnggccttttccaggcatggccaggtcaagagtgttgagctcagtccccataccgnttaccngctcaaggccattgtgcaggatgggaaacctgccttaataccgagggcagcaagaaggccatcggtctctcattgcccagttgctggtgttgttgatgtcttgggaaggagatgcccatctttcngttgatgagctcaggaggcattatgaagccacccacagtactcctctnaacccctgtgaatatggattcatgaccttgactgagctactgaagagtctgccttacttagtggaggtatttacaaatgataaggccgaagagtatgtgaagctcacgagcctatacttgtttgcaagaatgtgcggtctttgcttcacacctatcactaccagcagattttccttcatgagttttccatggcctacaccaaatacgttggagaaacactgcagcccaaaacatatggctacagtagtgtggaggagctattgggagccatcccacaggtggtctggataaaaggacatggtcataagagaattgttgtgttaaaaatgacatgaaaaaccggctaagctcccttggccttttccctgccaatcctcctgtcccttcatgcctgccatcccctcagctaagaccagatcccgtcatcctgaagcccactgatctcattcagtttgaggaacaccctcaagagcctctgggtattgtagttttaaaccaagaagaagaaactgaaactccagtaccagtgaagaaggggagatactgtcctgtaactcctgctcgtcttgcagcccagtgctggcccctgcccttcccagtccctccttggaagcccccgagccactgttcagcaaggacacagtggaaagcccagccaaaaagcagcccaaaaatagagtcaaattggcagccaacttttctttgcacctataaccaagctttaactcccatttgaacacagaattgagttaggatgtgtgttgagaggtggtgttggaaagagtctgattttgtaaactatgcatcaaatgcataaattgtaaatcagcagagcggcaaggtgcttcagaaggagtgggttggatactatctccactaggaagagactggagttctatctataatgtgaaggccaaggttgatcagcctaaccttgttgttgcgattttaaagttggctgtaaagctgggaagcgctccatgtgaagatatgtgtccatgttagttc

SEQ ID NO: 4096 - DNA, 1523 bp, Cricetulus griseus
cgttattcggtcccaatctcttcctcctacagcaggagcagcagggcttggccgggccgctgggggaccctctgggaggggaccactttgccgggggaggggacctgcccccggctccgcttgcctcggtgggccccgctgcctattcgcctcctgggcctggtccggctccccctgcagccatggctctccgcaacgacctgggctccaacatcaacgtgctcaagactctgaacctccggtttcgctgcttcctagccaaggtgcacgaggctaggagcgccggaaccggctgctggagaagcagctgcagcaggctctgggaggagggtaagcagggcagggcggggcctggcccgccgcgaccaggcgcagctgaaagccgagctggtggtcttcaagggcctcatgagtaacaatctaacagagctggacaccaagatccaggaaaaggccatgaaggtggacatggacatctgccggcgcatcgacatcacggccaagctgtgtgacctggctcagcagcgcaactgtgaggacatgatccagatgttccagaagaagctggtcccggccatgggggggcggaagcgggagcgcaaggctgctgtggaggaggacacctccctgtcggagagtgatgggccccgccagcctgagggggacgaggaggagagcacagccctcagcatcaacgaggagatgcagcgcatgctcagccagctgagggaatatgattttgaggacgactgtgacagcctgacttgggaggagactgaggagaccttgctgctttgggaggatttctcaggctatgccatggcagccacagaggcccagggagagcagcagcaggaggacagtctggagaaggtgattaaagataccgaatctctgttcaaaacccgggagaaggagtaccaggagaccattgaccagatagagctggagctggccacagccaagaatgacatgaaccgccacctgcacgagtacatggagatgtgcagcatgaaacggggcttggacgtgcagatggagacctgccgccgcctcatcacacagtcgggggaccgaaagtctcctgctttcactgcggtcccgcttagcgacccgccgccagcgccaagcgaaactgaggactccgattgccatgtctcatctgatagctccatgagatagggaccagtgcctggctccctggagctcaccgaggccggggtgggggtctgtgccactgcatgaagcctggccctggggctgtctcctcgcccgggctccctgggtgtctggagctaggcttggcccacccttcctggatatccccatgacattgggacactcctgccttcttcactctgactgtttgctacttctctatctttgaaacgctgccaggacacttgtgatcctcccttctccgtttgtaaggaatgtgattgtgggacctgcctgttctccttggctatcttggacttttgttctggtgctaactggcccaggcactgtgcagcagactcatc

SEQ ID NO: 4097 - DNA, 1523 bp, Cricetulus griseus
tggtaacccgggtgcccggcgtgccgcagttcctacctttccacgccggttgtgtctccaaacgctcgtcaaaatgaagattgaggaggtgaagagcaccacgaagacgcagcgcatcgcttcccacagccacgtgaaggggctggggctggacgagagcggcctggccaagcaagcggcttcagggctcgtgggccaggagaacgcgagagaggcatgtggagtcatagtagaattaatcaaaagcaagaaaatggctggaagagctgtcttgttggcagggcctcctggaactggcaagacggccttggctctggctattgctcaggagctgggcagtaaagtccctttctgcccgatggtgggtagtgaagtatactcaactgagatcaagaagacagaggtgctgatggagaacttccgcagggccattgggctacggataaaggagaccaaggaagtttatgaaggggaggtgacagagcttactccgtgtgagacagagaaccccatgggtggttatggcaaaactatcagccatgtgatcatagggctcaaaactgccaaaggaaccaaacagctgaagctggaccccagtatttttgaaagtttgcagaaagagcgagtagaggctggagatgtgatttacattgaagcaaacagtggagctgtgaagaggcaaggcaggtgtgacacctatgccacagagtttgaccttgaagcggaagagtacgtccctttgccaaagggagatgtgcacaagaagaaggaaatcatacaggatgtgaccttgcatgacctggacgtggccaatgcgcggcctcagggggggcaagatatcctgtccatgatgggccagttgatgaagccaaagaagacagagatcacagataaactgcgaggggagatcaacaaggtggtgaacaaatacattgaccagggtgttgcagaactggttcctggggtactctttgtcgacgaggtccacatgctggatatcgagtgctttacctacctgcaccgagccctggaatcttccatcgcccccattgtcatctttgcatccaaccgaggcaactgtgtcatcaggggcaccgaggacatcacctctccacacggcatcccattggacctgctggatcgggtgatgatcatcaggaccatgctgtatacaccacaggagatgaaacagatcattaagatccgagcccagacggaaggcatcaacatcagcgaggaggcgcttaaccacctgggggagattggcaccaagaccacactgaggtattctgtgcagctgctgaccccagccaacctgctggcaaagatcaacgggaaggacagcattgagaaggagcatgtggaagagatcagcgaactcttctatgatgccaagtcctctgccaagattctggctgaccagcaggacaagtacatgaagtaacattgggctgggaggtgcacccagaggacagaccccacaccgtggacagggccttgagtcaagcgtgctttgcagtgtt

SEQ ID NO: 4098 - DNA, 1523 bp, Cricetulus griseus
aggtaatctgaacctgacaaaatgtttgccaaagcgactcggaatttcctgaaagaggttgacgctggaggggacctgatctcagtgtcacacttgaatgactctgataagctgcaactgctgagtctggtgaccaagaagaagaggcactggtgctggcagagacccaagtaccagtttttgtctgtcaccctgggagacgttctcacagagggacaatgtcttagtccagtggttgtggagtcagacttcgtgaaatatgaaagcaagttcgagaaccatgtgagtgggagcagtcggggacggttggtggggaaggtcaagctaaaggtcgtggtggagggtcgctcttcgtttggaaccctgcggaagcaggaggtggacctgcagcagctcattcaggatgcggtcgggagagcggttaagtctggacaacccggtgctacagcaggtgctagagaggaggaacgaggtcctgtgtgtgctgacacagaagattgtgaccacacggaagtgtgtgctgtctgagcatgtgcagatggaggagaagtgtgggggcttggtggggatccagaccaagatcgtgcaggtgtcagcaatggaggatgggaccgtcatcaaggataccaatgtggtgctggagatccccgctgccaccaccattgcctgtggcatcatcgagctgtatgtgaaacaggatggccagtttgaattctgtctcctccaagggaaacatggtggctttgagcatgagaagaaagttgactctgtctacttggaccccctggcctacagagaatttgcattcctggaccagatgggggtcaagagatctcttcccaggatgggccattacatgttttaaaacaagcaaccgtgcacctggagaggagcttccatccctttgcagtgttacctgcagagcagcagatggcgctgttctgcctcctgcagacagtcctgtttgatgaggaactccttaaggccctggagcaagtgtgtgatgatatggctggtggcctctggtcctcacaggctatcttggcgatggaggagctgacagatagtcagcagcaggaccttacagccttcctgaagctggtggggtgcagggtacagggtgagcgtcctggcccgcaggatgaggtcagcaaccagaagctctttgcaacagcctacttcctggtcagtgcactagcagaaatgccagataatgccacagttcttctggggacttgctgtaaactccacattatccatgtgctgtgccacctgctccacgctctgtgtgatgacagagtatgtgattttgaagaccccaccttggctcctttgagagacactgaaaggtttgaaattgtgcagcgttttgtttgcctctgctgacattgtcttgggagaggatgcggctgtccgtgaaagccaacatcctgaagaactcttgcatcttcccattaattcttcatatcactctaagtgggctctgcactctaagcagagaacatgagtaatgtctttgtcag

SEQ ID NO: 4099 - DNA, 1523 bp, Cricetulus griseus
gttccatgagaagagttcagaagatcagaaagttctatcagactttgtagacgcgctcatcaaaagttcgaaacagacatcataatgtggtccctacaatggctcaaggaatccttgagtataaagacacctgtacagttgacccagttaccaatcaaaatcttcagtatttcttggaccggttttatatgaaccgaatttctactcggatgctgatgaaccagcatatccttattttcagtgactcaaagacaggaaacccaagccacattggaagcatcgacccaagctgtgatgtggtagcagtggtccaagatgcctttgaatgtgcaaagatgctctgcgatcagtattatctgacatcgccagataatactgatcgcacaagtaaatggaaaatttccaggaccaaccattcataatcgtgtatgtcccttcgcaccttcatcatatgctctttgaacaagatttctgaccgaggaggtggtgttcctctgaggatcactgaccgcctctttagttacacatactccactgctccaacgcctgtgatggacaattcacggaatgcccctttggctggttttggttatggcttgccaatttctcgtctctatgccaagtattttcaaggagacctgaatctctactctatgtcgggctatgggacagacgccatcatctacttaaaggctttatcttctgagtctgtagaaaaactcccagtctttaacaagtcagccttcaaacactatcagatgagctccgaagctggcgactggtgtatcccaagcagagaaccaaaaaacctgtcaaaggaaacggtggcagtgtgaaggggaacatgtaggaacctttatgggatcaaagtgggtctatggcagtgctgcttcatgaatgtgtgtggacttttgtttccgcaaaacaaaacaaaacaaccaaccaagcaaaatacaaacgctaggacagacattgatccaatgagagatggagcttggttgtgtgacctgggagaagtcaggagggccagactccagtagaccggcaggtgacctgctcctcatttggcaatgcagaatgaactcgaggttattgacaaatactagaaaaaaagtcagtctctaagttacatctctttactaataagtactttctttctttctttctttctttcttcctttccttccttccttccttccttccttattgaaatttcatctgtatgtttgtgcatataaatacttgtgtttaccaaagatctaaggcatttggttaaataacccaaacattctgagctgtgtttaaaatagtaaagaaaatctttaggatctcaacagcatcaactgtgtaaattaaactgaaacagtcttcctggtatttatgaacccatgggagacattagactctagtgattggatatgaatgcccaggcccacttaacttattaatgtgtggatgatatttttgtcctgtaggttatgtgcagaaaaaagtgataattttataataaatattttattata

SEQ ID NO: 4100 - DNA, 1523 bp, Cricetulus griseus
atggacaaatggactgttcagatcgctagcagtcagagacgagtgacagataataaattgggaaaggaggtgttggtttctagtcttgtttccaacctgcttcattccactcttcagctttataaacataacttgtctccaaacttttgtgtaatgcaccttgaagaccggttgcaggaattatacttcaagagcaaaatgctgtctgagtacctgaggggacagatgcgtgttcatgtcaaggagctaggagtagttcttgggatcgaatccagtgaccttcctcttctggctgctgtagcaagcacccattcctccatatgttgctcagatactcctttaacatgcctagaggttaactttggtttaaagttgaatagaaaccaaggaatgacttttatttttaacttggacatctgggtatcggtagatttttccaccaagtgaaactaaagcaacataaataattggggtgggcaggatagggcaagcagcatttgcaaaagccaaagtgcaacttagaaatttctgtgactacccaggaatttcatgcaaactctaaaatgtcacaactcatgaatagcaatagatgtctcatgatcaaatggcagaaatcttcatttcactaatttttaacttttatttctatggtacagaaatctacaagaccttcatttatgtgttgttttgcaattcagatcaactgatttctagttagtttatttaagtattttaaacaacctgttaattatgagaaactcataatgagtgaagatgtcatgttgcccatccaattgtatatatgtatctattttttaaaaaatgcaggggtagaaatacaatattgataaacattttaaaaatatttttcatctagtatttttctctaagtgttccttgtttaaatgttgatttttcccaagctttccacttagcatttgttgtcattttgtatatagtgtagattgttgcttgtaagaaaggctaataaggaaccaaactcttgtaagtaatgtaaataaaaggtgggtagataatgttttcaatatactcttctacctcagtttacttgaatactgaattatagcttactctttgcctgtgtgggctaagatacatgtaatgctagaattaaagttggtttctgttttcattgactaattctaaattgtttagttaaaaaacaacaaaaagatttggtgtccgtgtatcccatttgttagtggggttgctctgttgtgttctgttaaaattcagaatagatttctgccagaatttagaagctgaaaaagttcctctatgggccattgtacattattttttgattttggctcagaagaatatgtagcaggtagataatgtttttcgatcttttcttaatcatggaacttttcatagttctatttgaaatctctcattaccacttagtaattctagtgtttaataagtgaatggcttgtgcacctattattctcaaaactcagctttgctggaaaggaaaggctatagtttcttaaagactc

SEQ ID NO: 4101 - DNA, 1523 bp, Cricetulus griseus
atccacacccttggggccatcctccaccctgtccctcaggctctgaaggaaatgggcagtttaatgcgccaacaggtgtagcagtggattcgaatggaaacatcattgtggccgactggggcaacagcaggatccaggtcttcgatgggagtggctcatttttgtcctatatcaacacatcggctgaccctctttatggcccccaaggcctggccctaacttcagatggccatgttgtggttgcagactctggaaaccactgtttcaaggtctatcggtacttacagtaacagcggacacccctgcactgaggtcttgcactagaaactggaacggagttttcaatgtgggaccagattacaataggacttttcatactaggaagaacctttggtgaactttccaaggttatttctgaatgtaacgatttccttaaaaactgcttatccaattccgtaattcacttttaggatttaaagagaacctcttctattgaatctatacaagcttcgaagttttacacctgtgaactatggcttataggacagggatttatgcagttaaactaattttgcaaatcagacattaaaagaattagcatatctgttgaccggtgaatgaatggtagcctttgcatcgagcttccaagaacaaaacttgtagttacctattttatttaactttggtcacaagacccaagggaccttctaacctcacttttacagtagatgttattactggtgtacttttgggggggggtggttatcaacaaccatatataaattaccttagaaaaatctaaggctgtcttgcaagatcctcccagctctgactcagggccctcttgagttgagcccatcagaatcaatgcaaatttcccaacctttctgggttcgatcaaagatctttttcgtgtgttctcttcaccttctctttctactcaccttgggacctcttggttgttagcttcagatcaacacactgggatgtaaccaaaagaagtcatgttcatgccatgtagttcacatgtctttcctcttccacatcatgaaagcgaaagctttacctcctgtaaaatgtcagcacatgtagtcagacaccagtgtcctaggacagagagccataagcagccctttggaggacagatggtgtcaaccaaaggcatgtgattgattaatgacttccccttagagaacaagtgttaccaaagttctgttgagcattacaggtacgggcatgttatggttatttatcattgtctaatgaatagtagaggcattaagggacacgtatacatggttagggtaagatagaatgtattatacatttatatatatatatatatatatagctgaatccatggtgtgtggaaataggaagcactctgaaagacagcagcattgcccagcctccttcagcacataaccttgctgctgcagtctgaagccgtcctggtggagtgagccctacagcagttttgagtgttgccattttccagcacgatgctgatgcctgacttccag

SEQ ID NO: 4102 - DNA, 1523 bp, Cricetulus griseus
gcagcttgcctgagtccttcgtcgcttgactgtgtcctcagcactggtcctgggcattcccagccccagccaagtctccttcctgggcacaaggcagaggaaggaggtgctgtggggacctagctctgaccacatttcaggggaatgtttccatttgccaaatcctagtcccatgatctgtccccaaaggggaacaaagggacctctgatagcgaagagttagccccggttcctgcacgttccaggaacaggggtatctggcctcattggtactgtgaaaatgaccagccagagagcaaaacctgtgtgtggggacatcagaagatcaggaactggatgtgtgtgtatgttttctaggtctctgtgtgtccatgtgccccagctcctcagatccccactcagggctgcctctctcctgggggcctctgccttctgttgtcaagacagggtctccatcaaggatggagagaaatggccaggttgcacaggagtggggtggggtatggtagcaaaatgaagagtgctctggggagaggagtcctttttgtgccaaatccctaagtgccatttgggggccacatgtgcagtatgactgtctccctgcctagagcaggggcccaagcacctgcttagtttctagtgttccttgcacttgaactgttgaaggtttgtgaggtagaagctcaggcattccctgggttcctcagcttgtgtcttggggtgtggtatactttctgactgggtagtgtggggtccctctgaggacccatattttggtactaggggatggagcctgggaaatttaaacttggctttcccaagccttcagcctgaatctagcatggctagactctagtcctggctcccaatcctcatgaagcctgcaagggttggactccagtctctttctgtccttgccttccttttactcctgcagcctccttgactcggcctgaattagttggtgccttggtttgtctgtctgtacctatttaagcaggaggcatatgcctcagttttgattggagaccactttgtcttagactctgacaaggcagagaggaaagtttcatgggggtaccgaaggggcaggcagtattcttgcctttcctcatgcctctgccaccagttctctgcagaagcctggtttctggcttggtactgccttcccagcaatctccatgtttcagttgatgaaccaatgggcgcttgattatccaaggtgcagaagagggaagattagctggtccagacagaaaactttttcttgccaggtgggaggggcctgtccataccctggctccctgtaccacagtgccagccatggccttctcccgagttaccgttgcccctttcctcaccggttggtggaggagttggggtaatgggaggccatgggctttggttttataatgtaaccactgtgggagcgagggagggtggtgtaccatgtatttcagtgaaatatttaatatatttaaatatcaataaaatcaaaactactttagtttaaaaaaaaaaaa

SEQ ID NO: 4103 - DNA, 1522 bp, Cricetulus griseus
ctaagctggcgggagcgtccatccccggcagtccccggcctccgcgctccggcggcgagctgtgcaggtttgctctcgacgtccgcgagctcgcgcggaggccgcgctcgcccttaggactccttggcggcccagacgatattaccaagaaaaccagatggcatctggagatttctgcgcacctggagaaggggtagagatactacagcaagtgtgtgacaagcagtttcctccttgtgccctgactgaagaggacctgatccagaacccgcatttcagcaagctgttgcttagtctctcacagcatctggatgaaagtggcttaagcctcaccctggcaaaagagcaggctcaggcatggaatgaagttcggctgcataagacagcatggctgaggtacgaaatcttacagagagtcatccaagagctgcttgtggactactatgtgaaggcacaagacacaaatctaacatcggaagacaaaaagtttcatgagacccttgaacagcggctacttgtaactgaactgacacaactttcaagtcctggccaggagatggagatgccctcactgctaggacttaagaaggccgaccttctggagctgatgccaccttcacaggactttgtgtggatgagagctcggctccagctggaggtggaggagcagctcaagaggaagtgcttcactctgctgtgctaccatgaccccagttcagacactgacggggaaacgctgaaagctgcaaaggtgtggagactatcggaggtcttggtgcgagagaagcagcagtgtctggaggccaagggccagcacaaggagcagctggtgctgctggagaagaggagagccacctacttccaggtgctcctccgctgcctcaccttgctgcaaagacttcttcaggaacaccggctgaagactcagtctgagctggaccgcatcaatgcccagtacctggaaatcaagtgcagtgctatgatcctcaagatgaggatggaggagctgaagattttgtctgacacgtacagtgctgagaaagtggaagtacaccgtctcattagggaccgtttggagggagccattcgcctacaagagcaggacatggagaagtcaagactggtcctgaaaaactatgaggtccttggagaagactttgagaacctagtgaaggaatacacccagctcaaactggcagctgagaacaagcgttgggctctccaggagtttagcaaggcctagccactaagttgagtgtgggcagagccaggaagcatggattctatatggctaccttctctccctgctcaacagactacctccactgtaagggatatgggtacatgtgtttaaaacactgcagtgatgatgacagcctcctggtttccatatctgcttgcatcagccctgtgtaattattttctgaataaagtagtaataattaaattaaaaaaaaaaaaaaaaaaaaaaaaaaaaaaaaaaaaaaaaaaaaaaaaaaaaaaaaaaaaaaaaaaaaaaaaa

SEQ ID NO: 4104 - DNA, 1522 bp, Cricetulus griseus
  modified_base (363)..(363): a, c, t, g, unknown or other
acagggatgtgatgcaggagaattatggaaatgttgtctcattggattttgagatcaggagtgagaatgaagcaaaccagaaagaagagcttagtgaggacgtagaatttgtgaccatgtctgaagagcctattggggatgctgagaagaatcctgaaagcgaagaggcctttgaaagtggggacaggtccgaaagacagtggggagacctgacagcagaagagtgggtcagctaccccctccagcaggtcaccgacctgcttgtccacaaagaagtccacgcagacatccgctatcacatatgttcgcagtgtggaaaggccttcggtcagatttcagacctcaatcggcaccagaaacccncacgggagacagaccctataagtgttacgacacagcggggagaagccgtacgagtgcgaggagtgcgggaagagcttcagccggagctcccacctgtcgcagcaccagcggactcacacgggtgagaagagatacccattgatgctgtcattaatcaggtttatgtatttttttcaaaaatcactttagggatcatagtgtggaaactgcctttaggaaaagataggactgtaagttatgatggaatgaaagtaggaagcgaactgaccccttcagggaagggggcacagaacccttcccagggagtgtcagtcatttctgggttctttgccatctatctttaagatcacttgcccctgtactgctaactctagggtttgatagggccacaccccagtctttatcttagcttgcataaaggcatgtgtatgtacagtgaaatgtgtattctaatagtagaaaccgaattcataagcattagcatgttcttatggggtgtagatcctaagatagaactgtagacataactctgttgtgagaaatgtcctttattttcttttttcttttgttatgggaaaaaaattttacactagtgctcaagcctgcactgtcctgtaaggttttgtcttggacagaaccaaactcttgtttgtatgtttccatcagttgtgagataaatgactggacagttaggtccattgtcctttctcagactgagttatcttcaagaaaaccctttttgttgaaattctttgggttttggcatttcaggagtatcgcttttaccacagagtcactgtaagcacagctgggtgataccagtcactcaccagtgacaacctcaaaagcaacccagtgaaaaaccactcctagggccttgaagtggtcactccatttgagtacgaacttggagcagagcacatggtttctatctgtacaaaatgtagcttaccatgaatattcatattttaactgttaggtgacttacatattcttggtaactaaactcaaatatgttgtctatatcagtgtagccaatgacttgggtggatttcagcattctcctgttgcttctttaagtcactgtaagtgactgcttgggagtagcttgtagaagacagcacctccgacccatcttcatttcacccccttcccctcc

SEQ ID NO: 4105 - DNA, 1522 bp, Cricetulus griseus
ccgcagggctgtgtgtccggggtccgtagtcgcgcgccgcggctcgtgcggctcggcccgggctgcggcgggaagcgaagatgccacagcccgcgccccggagcgccgccatcccgggctgcacgttttactcgaagtccaggtcgagtgttagatccacagtttaaagcaaacagaatggaccatttgataaataatcacattgaagatacagataaaggcctctcgaagtcctcctccgagctgggtatgattttcaatgaacgtgatcaggaattgagagacctgggctaccagaaacatgcctttaatatgcttattagtaaccgtttgggataccacttcaactgggggctgcacttcaagtgggatttagtgcctgtgtctgagctgggaggagccgatggagctactgcacctataaggtcacctacaatggctggaggcttgtttgcaatgaacagacagtatttcaatgaccttggacagtatgacagtggcatggatatctggggaggagaaaatctggaaatctcatttcggatctggatgtgtggtgggaagctcttcatcatcccttgctcaagagtaggacacattttccggaaaaggcgtccatatggatctcctgaaggccaagacaccatgggacacgacaactcactgaggctggcacatgtctggttagatgagtacaaggagcagtatttttctttaagacctgatttgaagaccaaaaagctttggaaatatcagtgagcgtgttgaattgaggaagaaattgggctgtcaatcattcaagtggtatttggacaatatttaccctgagatgcagatacctggcccaaatgccaaaccccagcagcccatcttcatcaacagagggcccaagcgccccagagtccttctgcgtggacggctataccacctgcagaccaacaaatgcctggtagcccagggccgctccagccagaagggaggcttggtgctgcttaaggcctgtgactacggagacccaactcagatctggatttataatgaagagcatgaattgattttaaataacctcctttgccttgacatgtcagaaactcgatcttcagacccaccccgactcatgaaatgccatgggtcaggaggatctcagcagtggacatttgggaagaacaatcggctgtaccaagtatctgttggacagtgcttgagagtggtggacctgatggatcagaagggctctgttggcatggctatttgtgatggctcctcctcccaacagtggcacctagaaggttaaggtgggacctggctgaggacaacataattcactaggttttgtcacacctgacataaatcaaggtgcttaatgaaggacgttgctgaccccatcaggcaagaaccttagtagaacatgcttcaccgggactcaggttatttctgagctgctgctaagagaatcttgtttatccagagaaaaacagaaaaaataattactgaagagttgggtctattagtacaaacccag

SEQ ID NO: 4106 - DNA, 1522 bp, Cricetulus griseus
  modified_base (19)..(19): a, c, t, g, unknown or other
gtacctgtgttcagctgcngaaacatcctgccggaggcccttccaggcccagtgtggccaccgctactgctccttctgcctaaacagcatcctcagctctgggcctcagaattgtgctgcctgtgtccatgaaggcctatatgaagaaggcatttctattttagagagtagttcggcctttccagataatgctgcccgcagggaggtggagagcctgccagctgtctgccccaacgatggatgcacctggaagggaaccttgaaagaatacgagagctgccatgaaggactatgcccattcctgctcaccgagtgtcctgcatgtaaaggcctggtccgcctcagcgagaaggagcaccacgctgagcaggaatgccctaaaaggagcctgagctgccagcactgcaaggcaccctgtaaccatgcggacctggaggtacactacgaggtctgccctaagttccccttaacctgtgatggctgtggcaagaagaagatctctcgggagaagtttcaggaccatgttagatcatgcaacaagtgtcgggttccgtgcagattccatactgtcggctgttctgaaatggtggagaatgaggaacttcaggaccatgaggtgaagaagctacgggagcacctggccctgctgctgagctcattcctggagtccccagcctcacagggaagccagagccaggcggggccagagatgctgcagcggtgccacagtttggagcagaagacagccaccttcgagaacattgtctgcgtcctgaaccgggaagtagagagggtggcagtgactgcagaggcttgtagccggcagcaccggctagaccaggacaagattgaggccctgagtaacaaggtgcagcaactagagaggagcattggcctcaaggacctggccatggctgatctggagcagaaggtctcagagttggaggcatccacctatgatggagtcttcatctggaagatctcagacttcgccagaaagcgccaagaagctgtagctggcaggacacctgctatcttttccccagccttctacacaagcagatatggctacaagatgtgtctacgagtctacttgaatggtgatggcactgggcggggaactcacctatctctcttcttcgtggtgatgaaaggccccaatgacgccctcttgcggtggccttttaatcagaaggtaacattgatgttgctggaccagaacaaccgggagcatgtaatcgacgcattcaggcctgacgtgacctcatcctccttccagaggcctctcagtgacatgaatatcgccagtggctgccccctcttctgccctgtgtccaagatggaggccaagaattcctatgtgcgggatgatgctatcttcatcaaagctattgtggacctaacaggactctagccacccctactaggaatagcagctcagtgaggagctgccacactgggccagggccctgccacacaagggtgggcaggcttggtgcaagtgctgggaagggcctcagcc

SEQ ID NO: 4107 - DNA, 1522 bp, Cricetulus griseus
ggtgacgtggggttgacgctcggcggcgggttttgctgagctccgcggccggtggcagctggtgctttggggggcttcggagagcacgaggtggagtggggcggcgtgtgtggcccgggccatggcgagcaatgccggggagtggtgtctcatggaaagcgaccccggggtcttcaccgagctcattaaaggattcggttgccgaggagtgcaagtagaagaaatatggagcttagaacctgagaattttgaaaagttaaagccagttcatgggttaattttcttttcaagtggcaaccgggagaagaacctgcaggctctgtggttcaggactccagacttgaaacaatattttttgccaagcaggtaattaataacgcttgtgccacgcaggctattgtaagtgtgttactgaactgtacccatcgagatgtccacttaggagagacattgtcagaatttaaagaattttcccaaagttttgatgcagctatgaaggggttggcattgagcaactcagatgtgattcgacaagtgcacaacagttttgccagacagcagatgtttgaatttgatacaaagacatcagccaaagaagaagatgcttttcactttgtcagttatgttccagttaatggaaggctgtatgaattagatggattaagagaaggaccaattgatttaggtgcatgcaatcaagatgactggattagtgcagtgagaccagttatagagaaaaggatacaaaagtatagtgaaggtgaaattcgatttaatttaatggccattgtatctgacagaaaaatgatatatgaacagaagatagctgagttacaaagacaacttgcagaggaggaacccatggatacagatcagggtagtactgtgttaagtgctattcagtcagaagttgccagaaaccagatgctcattgaagaagaagtacaaaagttaaagagatataagatcgaaaatatcagaaggaagcataactacctgcctttcattatggaattgctaaagaccttagcagagcaccaacagttaattccacttgtagaaaaggcaaaagaaaaacagaatgcaaagaaagctcaggaaactaagtgaagaggatatttggacctgtgtacactatgctgcactattttcatggaaaccattaaatactaaggaattttgaacaacatcctaattgactcagtgcacgtttggcatagtaccagtctgtcttgtcctttatgcatggattcaaaaaatttttccctacctgcatcatgtgcatgtagagcatattaaataaaagtggcataaaagtgctggccaaattccattatttgatattggatctgaaagctcttggtactctggaaacataactacaagtaacaaaacctgaaaaatacacaaatgaatatttttaatctgtagctattctgagtaatacttttattgtcagcttaatatatccaatttttgagtgtcagatcttacttaaactgggtcatctgtttctaattgt

SEQ ID NO: 4108 - DNA, 1521 bp, Cricetulus griseus
agagacggcgggagcctcttcgccatggctgccgggcccatctccgaacggaatcaggatgccacggtgtacgtgggcggtctagacgagaaagtgagcgaaccactgctgtgggagctctttctccaggcagggccggtggtcaacacccacatgccaaaggatagagtcactggccagcaccaaggctatggcttcgttgaattcttgagtgaggaagatgctgactatgctattaaaattatgaacatgatcaaactctatgggaagcccatacgggtgaacaaggcttcagctcacaacaaaaacctggatgtaggggccaacattttcattgggaacctggacccagaaatcgatgagaagctgctttatgatactttcagcgcctttggggtcatcttacaaacccccaagattatgcgggaccctgacacaggcaactctaagggttatgccttcattaattttgcctcctttgatgcttcggatgcagcaattgaggccatgaatgggcagtacctgtgtaacagacccatcactgtgtcttacgccttcaagaaggactctaaaggcgagcgccatggctcagcagctgaacgacttctggcagcccagaacccgctgtcccaggctgaccgtcctcaccagctgttcgcagatgcaccccctccaccctctgcccccaatcctgtggtttcatccctgggttctgggcttcctccaccaggcatgcctcctcctggctccttcccacctccagtgccgccacctggagccctccctcctgggatacccccagccatgcccccaccacctatgccacctggggctggaggacatggccccccagcagcaggaactccaggagctgggcatcctggtcacggacactcacatcctcacccattcccaccaggtgggatgccccatccagggatgtctcagatgcagctggcccatcatggcccccatggcctaggacatccccatgccgggcctccaggctctggaggacagccaccaccccggccacctcctggaatgcctcatcctggacctcctccaatgggcatgcccccccgagggcctccttttggatctcctatgggtcacccaggtcccatgcctccacacggtatgcgcgggcctcctccgttgatgccccctcatggatacactggtcctccgagaccccctccctatggctaccagcgggggcccctccctccacccagacccactccacggcccccagttccacctcgtggtccacttcggggcccacttcctcagtaaattgctgtcctttgtctccttatatcctctcagtatcttcatttcttggaccaatcagagttgctatagcttgtcatggctaatgtgctgacccctctcggcaactctgtccccatttcaatgtcattttttccacaggggtttttcttcatttttgttttaaaatgttggtcctgattgttttgccaaacaattatagagaaaataaaattatacttcttg

SEQ ID NO: 4109 - DNA, 1521 bp, Cricetulus griseus
cgaacatctaccgtctgaccagctttatgctggagaacgggaccagtgactgccacctgcctgagaaccctctgttcatcacatgcgacggccggaggaaccacatcctcggctcaaaagtgcagaaaaaatgattttcacggcaatctgaccatgttcatcaggaaagatatcaggaaaaacctgaactacacagaaagaggcgtgttctacagcacaggctcctgggccccgaatctgtaacctttatgtaccagaatttggagaggaacctgaggatgatgttttctggcagctcacagacctccttctaaagcatgtctccagcccctgctcacctacaatggttcagtgtatgtctactatgggtcccagcaagggacgctgtctccttcccccaacatcaccatctcctgcaaggacacctactgtaacctgggctggaccctcctgtcagcagatattggatggagatggccagcctgacctgggtgagtggggttccaccttttgcacctgggtggagggaagcagagagggatttgtttgctgcctttttattcacgtcccagacagagtgacaaagaaatactgactgtggaggaagctgactggaaggtgagcggtgaagaggacttctcttggtttggctactcccttcatggggtcacagtgacaaacagaaccctgctgctggttgggagccccacctggaagaatgtcagcaggttggcacgctcaagccataggaaccatgagaaaaacagcctgggaagggtgtatggctactttcctccaaaccgccagagcgaaattactatttcaggagataagacaatgggaaagctgggtacctccctgtcaagtggccatgtgaggctgaatgggaccctaacacaagtgctattgcttggagcccctactcatgatgtcgtgtctaaaatggcattcctaaccatgaacctgcaccagggtggagctactcgaatgtatgaactagccctggagaagacacagcctgctttgctcagcaccttcagcggagacaggcgcttttctagatttggtagcattctacacctgactgacctggatgatgatggcttagatgaaatcatcatggctgccccactgaggataacagacgttacttctggacttctagggggagaagatggacgagttttacattttataatggcaagcataccacccttggggacatgacaggcaaatgcaaatcctggatgactccatgtccagaggagaaggcacagtatgtactaatttctcctgaggcaagttcaaggtttgggagctcgctgggtctctgtgaggtctaaggaaaggaaccaagtggttgttgctgctggaagaagttcttggggagctcggctctctggggcacttcatgtctacagccttagctcagattgaagacgtcactccactctcctattctgcccctctctcttgggccaagtcatctccagggtggacaaagtattcatccagtggagc

SEQ ID NO: 4110 - DNA, 1521 bp, Cricetulus griseus
  modified_base (1420)..(1420): a, c, t, g, unknown or other
cacattggcctgacccagttgacttcactaggcagaggccatcatggagcagtgtgcatgtgtggagagggagctcgacaaagtcctgcacaagttcctgacctatgggcaacactgcgaacagagcctggaggagttgctgcactatgtgggccagctgagggctgagttggccagtgcaggaccataaggacattcatagcagtgtctcccgagtgggcaaagccattgacaggaactttgactctgagatttgcggtgtagtctcagatgcggtgtgggactcacgtgagaagcagcagcagatcctgcagatggccattgtggagcacttgtaccagcagggcatgctcagcgtagctgaggagctgtgccaggaatctacattgaatgtggacctggacttcaagcagcccttcttggaattgaatcggatcttagaagctctacatgagcaagacctgggacctgcactggaatgggctgtctctcatcggcagcgcctgatggagctcaatagttcattggagttcaagctgcaccggctgcactttatccgcctcctaactggtggccccgagaagcagctagaggctctcagctatgcccgacacttccagccctttgctcggctacaccagagagagatccaggtgatgatgggcagtctggtatacctgcggttgggcttggagaagtcaccctattgccacctcttagacaacagccactgggcggagatctgtgagacctttactcgggatgcatgttccctgctggggctttcagtggagtcccccctcagtgtcagcttcgcttctggctgtgtggcgctgccagtgctgatgaacatcaaagctgtgattgaacagaggcagtgcactggcgtgtggagtcacaaggatgagctgccaattgagatcgagctgggcatgaagtgttggtatcactccgtgtttgcatgccctatcctgcgacagcaaacctcagattctaaccctcccatcaagctcatctgtggccacgtcatctcccgagatgcactcaacaagctcattaatggaggaaagttgaagtgtccctactgtccaatggagcagaatccagcagatgggaaacgtatcatattctgattgtaaggaactttgctggaaggtgttacacaccaaggcttgccttggcggcaggactggctccagtggatcctgatgcctctcagaccagcactaccaagaggcctggcctgctcagtcaggcagaggccaagggaagctgtgaaatcagcctgtacgttcttggctaggaggggactggctgctgtgttcctactgtctttgtttacacttacccctgatagtagcaaaggctttggctatcaaaaagcggacatctttctattcctgccctcaatccaggggtntccagctgtggcccacctccttctactgtacagtcaactataatagaaatcctttctctactgtaaatagcccattagaactgaatgcttgtttttaactt

SEQ ID NO: 4111 - DNA, 1521 bp, Cricetulus griseus
aagaaaaagcctctggatgttacagcctcctcgttggtagatcttaaagctgagctcttccgaaaacaagaagaattcaaacaagagaaacttactgaaagattctggagtttttggaaaaccaaagacaactaataagaagccaagtatctggaccaagcagaatgctggtgtttccagtcgagcagagaaggatgctgaacagaagcttgaggagcagaagactttagacaaagcaagggaaaaactggaagaaaaggccaaattatatgaaaagatgactaaaggagactttccagacgaggaagtggaggacatgtaccttgtggatttcacacagaagattatagacaagcgaaaagaaatggaggtgctcggtgccactagagattctcgaaacacagaagagaaagatgatgatgatgaagagttttctgaaaaagacatacctcctcccaaagaccccagcgaggaatgggtggattatgtggactctttgggccgatcccggcgctgcatgagaaaggacttgccagatctattggagatggataaaaatcttcagggaaggctttttgttagtcctgctaatgaaaaaactctattatctgaagacatgaggaaagaacttcagcgacagcaatgggaggaagaagaaagggaggccctgaaaaagccaatggggcccatccattatgaagacattcgggaaaatgaggccaggcaacttggtgttgggtattttgcctttgcccgagacaaagagttgagaaacaagcaaatgaaaactttagagatgcttcgtgaacagacaacagatcagagaataaaacgagaaaacataaaggaaaagcgaaaggctatgttagaagcgagacttgccaagcttcgacagaaaaaagattaaaaagtcaaaggaagatgggactgaagaggaaaacagagatggagatgttactgagcttttgccatcagaaccaaaggctgttcctgctccacctcatgtggcccagaccagcaaagtagaagtcatcatccaggaaaggaaggacaccaagcctggagtgccacacatccgagagtgggaccgaggaaaagaattttcctttggatactggtcgaagaaacagtcagaactccgggctgagcgagatcctgagtttgccccaccatcgaattattttgtgggtcaaaaaagaactggtccttttagtagccagccatggagcagagtgggatcagcaccgagtgacttggggaattgctctggccagagccaggaacccagctcttcacacatatctacatctggctctgacagcccctcacaagcatccacagtcactttccaaacactagatgatatgatatcttattataaacaagtcacatgaccttgaaaagcatgctggttccatttgtgtcatcagaagtcatgacagaactgagtttcatgtctttcttcttgtcttttccctagaatgcatatgcttgaggtcagattagttggcatggaggagt

SEQ ID NO: 4112 - DNA, 1521 bp, Cricetulus griseus
  modified_base (1268)..(1268): a, c, t, g, unknown or other
aaatatgcctaagaagtcatcagtccctgcagaagaaggacttattaaggatgagttttttgaaagtgtgaaaatgagcacgtacctggttgctttcattgtaggggagatgaggaacctgagtcaggatgtaaatggaaccctggtttctatatatgctgtaccagaaaaaattggtcaagttcaccatgccttggacacaactgtaaagctccttgaattttatcaaaattactttgaaattcaatacccacttaagaaattggatttggtggccattcctgactttgaagcgggagcaatggaaaattgggcctgcttacgttccgagaagagactcttctgtatgacaatgccagttcttcagtagcagatagaaaattggttaactaaaatcatcgctcatgagttggcacatcagtggtttggtaatctggttacaatgcaatggtggaatgacctgtggctaaatgaaggctttgcgtactttcacagagtatataattgctccagaaccagatccagcagcagacttgactgatgagggcatgccatctgcagagagcttcggtcagccttgctggaatttgcctgtacccacagcctagagaactgtaccaccgaggccacgatgctgtttgacaattggatgtcatcaaatggaactcagagcctgcctacggatgtcatgctcactgtgttcaaagttggagcaagaaccgagagaggctggtcattcctcttaaacatgtattcctccatgggctccgaagcagaaaagaacaaaatactggaagctcttgccagctcagagcatgtacagaaactctactggttaatgaaaagtagccttgatggtgatatcatccgaacacagaagttgtcgcttatcatcagaaccgtgggaagacactttcctggacacttgctggcatgggattttgttaaagaaaactggaataagcttgtacataagttccatctgggctcctataccatacaaagtatcgttgctggatcaactcacttgtttcaacaaaggcgcatttgtctgaggtccagacattctttgaaaatcagtcagaggcaaccttgcagcttcggtgtgtccaggaggctttggaagtcattcagttgaatatccagtggatgtcaaagaatctgaaaaacactgacattgtggctgtagcactgacaactgactttcggtgcccatggctctgtctgctttcactgttaggagttctagtaagctcaggcccaattangtttttcatgtcatttctgaaatgtctttaggcagtaagtagttatttattacaaaaattataattcacctgtataccaaccatctacaaaaacaatgagtaattttctttggacacacaaatggagaaaaaagtcatatttgaaattctgttttatttcttagtgtccagagaatttctgatagtgcaaccaaggaaagtctgctgtaagaaacaccatatttacaggttgctgattggtcagctgtttgtt

SEQ ID NO: 4113 - DNA, 1521 bp, Cricetulus griseus
cctaaccaccctcgctgggcccctcaccccaccagtgaagcattttcagctgaagcggaaacccaagagtgccactctccgagcagaactgctacagaagtccactgagacagcccagcagctgaagagaagtgccggggtgccatttcacgccaagggccgggggctgctccgcaagatggacactacaacccctctcaaaggcatcccgaagccaagcccccttcagaagtcccaccacacccagcgtcttcagcccctctgggaaccggaccccaataccaccttccaggacaccactgcagaaagaaaggggtgtgaagctgctggatatatctgagctgaatacagttggtgctggccgagaggcaaagaggaggagaaagactttagacacagaagtggtggaaaagcccaccaaggaagagacagttgttgaaaatgccacccctgactatgctgctggcctggtgtccacacagaaacttgggtctttgaatagtgagccagcacttccctctacaagttacctgccctctacccccagtgtggtacctgcctcatcttacatccccagttctgagaaccccccagcccctccttcccgggaagccagccgaccacctgaggagcccagtgccccaagtcctacactgccagctcagtttaaacaaagggcacctatgtataacagtggcctgagcccagctacaccaacacctgcagcacctacctcgcctctgacacctactactcctccagctgccactcctactgctcagacacccccagtggccatggtggccccgcagacccaggcacctgcccctgttcagcagcaacctaagaagaacctgtccctcacaagagaacagatgtttgctgcccaggagatgttcaagacggcaaacaaggtcactcggccagagaaggccctcatcctgggcttcatggctggttctcgagagaacccatgcccggaacagggggatgtgatccagatcaagctcagcgagcacacagaggatctgcccaaggcagacggccagggcagcaccaccatgctagtagacacagtgttcgagatgaactacgccacgggccagtggacacgattcaagaagtacaagcccatgacaaatgtgtcctaagggccatctccgctgctgaccctcatcaggccagaagacaagtactgctggctatgctaagtgacctgagcagataccgaaggatgtgctccacccagcacctgtcattcacaggctactgggccctttttaattgtcctgtaaaaaacaaaaaaaagttctctgcttgtgcatgccttccctcctgaggctgaggggaccaaaggtgacacctggcaggctagggcgtgagggggctatgaccagcctcactgttactgactgccagggatttctatgtcttttgtacagttgtaaacatttcaagcctgtctctgggtaactattttcattgtaaaatgatatgagtattaaagtttagttttctaaa

SEQ ID NO: 4114 - DNA, 1521 bp, Cricetulus griseus
cctaacgtctcctcaccctgcggttcctataccccccacacccagggcctggtcaccttccccacccagctcttcaacttgctctcgggagagggttacttagaatggtcccccctgttctatgggttctacccaccccgatcgaacctggccgtcccctacctgtgctccgtctttgtcatcggcctcatctacttgctgttcatcctacaccgctcggtgtccgggttgagggagacgctgttggccgagtcggaggttctgaccagctacagccaccgggtgttctcagcttggaactttggcctctgcggggaagcgcacgtgcggctgcgccagcgcatcattttgcacgaactgcaggtggagctggaggaggccatggtcaggcgccgtgctgcggagcggacgctgggccagcgagccaaggtgtgggcgctgagggccgtgctcaacctgctgatcctcgcgctcctgggggcggccttctacggcatcttctgggccacagggttcaccgtgacgctgcaggaggaatcccttgtccaacagcccccaatactcaagctcctggtggactatcttccgtccattttcatctccgtgatcaacttcgtgttgcctctgatattcaagttcatcacctcgttagagggctacacccgcagccgccagatcgtcctgatcctgcttcggactgtgtttttgcgtctggcctccctggtgctcctcctgctgtctctgtggaatcagatcacatgtgggggaaacaaggaggcagagggatgcaaggcctgtggctacaattacagagaacttccgtgctgggagactcgtctgggccaggagatgtacaaacttgtgatctttgatctgctgatgggcttgttggtcatgctcttggtccagtttcctaggaagatactctgtggcctctgtcctggggcagtgggtcgtctggccgggactctggagttccaggttcctgatgaggttttggggctcatctacgctcagaccgtggtctgggtgggaagctttttctgccctttactacctctgatcaacaccgccaagttcctgatactcttctgtctgaagaagataacactcttctccatctactcaccggccgccggcaccttccgggcttccaccgcaaatttctttttccccctggtgcttctcttggggctggcaatctctgctgtcccggtgctctacagtatcttcttgatcccaccttctaagctgtgcggtccattccaagggaagatgtccatttgggtccacatcccggagtccatcgaaaccctccctcagtccgcccagaactttctctactttctggggacgcaggcttttgctgtaccccttctgatcctctcttgcatcctgatggtgtttacaatagccctggctaactcttacggacgcctcatttccgagctcaaacgccagatagagacggaagcgaagaataaagtcttcctagcccagcgagctgtggctctgagctca

SEQ ID NO: 4115 - DNA, 1521 bp, Cricetulus griseus
attagaaaaaatacttaacaacagcaacctcacatgagtatgagcatactaaaaaagatacttgatggatttcggaagctatatcatagatttttgcaagaaaagggaccttctgtagactggggtaaaatccagagacctccagaagattcgattcaaccctatgaaaagataaaggccagaggcctgcctgataatatatcttctgtgttgaacaaactggtggtggtgaaactcaatggtggtttgggaaccagtatgggctgcaaaggccctaaaagtctgattggtgtaagaaatgagaatacctttttggatctaactgtgcagcaaattgaacatttgaacaaaagctaacaatacagatgtccctcttgttttaatgaactcttttaacacggatgaagacacaaaaaaatacttcagaagtacaatcattgccgtgtgaaaatctacaccttcaatcaaagcaggtatccgaggattaataaggaatctttacttcctgtagcaaaggatgtgtcttcctcaggggaaagtacagaagcttggtaccccccaggacatggagatatctatgctagtttctacaactcgggcttgctcgacacctttctagaagaaggcaaagagtatatttttgtttctaacatagataacctgggtgccacagtggatctttatattcttaatcatctaatgaacccacccaatgggaaacgctgtgaatttgtcatggaagtcacaaataaaacacgagcagatgtaaagggtggaacactcactcaatatgaaggcaaactgagactggtggagattgctcaagtgccaaaagcacatgttgatgaattcaagtctgtgtcaaaatttaaaatatttaacacaaacaacctatggatctctcttgcagcagttaaaagactgcaggagcagaatgccattgacatggaaatcattgtgaatccaaagactttggatggaggcctgaatgttattcagttagaaactgcagttggagctgcaattaaaagtttcgagaattctttaggtattaatgttccaaggagtcgttttctgcctgtgaagaccacgtcagatctcttgcttgtgatgtcaaacctctatagccttaatgcaggatctttgaccatgagtgaaaagcgggagtttcctacagtacccttggttaaattaggaagttcctttaccaaggttcaagattacctaaggaggtttgaaagtatacctgacatgctggaattggatcacctcactgtttctggagatgtgacatttggaaaaaatgtttcattaaagggaacagttatcattattgcaaatcatggtgacagaattgacatcccccctggagcagtgttagagaacaagatcgtatctggaaatcttcgaatcttggatcactaagataagcgctgccggatacactttatactaattatgggttaaacagtttcttgtaataaaatgtacctctaagattctcaaatgagcaagtacttt

SEQ ID NO: 4116 - DNA, 1520 bp, Cricetulus griseus
ctcccgaatcggaagccggcgctgcctcgggactcccgatatggcgacttctctgggttccaacacctacaacaggcagaactgggaggacgcggacttccccatactatgtcagacgtgtcttggagaaaacccttatatacgaatgaccaaagaaaaatacggaaaagaatgcaaaatctgtgccagaccattcacagtgtttcgttggtgccccggggtccgcatgcgcttcaagaagactgaagtgtgtcaaacctgcagtaaattgaagaatgtttgtcagacctgcctattagacctagagtatggcctacccatccaagttcgtgatgcaggattgtcatttaaagatgacatgcccaaatcagatgtcaacaaagaatattacacacaaaatatggaaagagaaatttctaactctgatggaacacgaccagttggcatgctgggaaaagctacatctaccagtgacatgctgctcaaattggcccggaccacaccatactacaaaaggaatcggcctcacatttgttccttctgggtgaaaggagaatgtaagagaggagaggagtgtccatacagacacgagaagcctaccgatccagatgacccccttgctgatcagaatataaaagaccggtactatggaattaatgaccctgtagccgataagcttctaaagcgggcttcaactatgcctcgtctagacccaccagaggataagaccatcaccactctttatgtgggtggtctgggagacaccattactgaaacagatctcagaaatcacttctaccagttcggcgagatccgaacaatcactgttgtgcagaggcagcagtgtgcctttatccagtttgccaccaggcaggctgctgaggtggctgctgagaagtcctttaacaagctcatcgtgaatggccgcagactcaatgtgaaatggggaagatcccaagcagccagaggcaaagaaaaggagaaggatggaaccacagactctgggatcaagctagagcctgtaccaggacttcctggggctctacctcctcctcctgctgcagaagaggaggcatctgccaactacttcaacctgcccccaagtggccctccagcagtggtgaacattgccctgcccccaccccctgggatcgccccacctccacccccaggttttggaccacatatgttccacccaatgggaccgccacctcctttcatgagagctccaggaccaatccactacccttctcaggaccctcagaggatgggagctcatgctggaaaacacagcagcccctagcacaacatcaccactcaggagctctgaggaagaaagggcgctctaaaatcccagtaaatgaatcctgggatacgtatacttttccttgctttgtagtttccatggtagctgaatgtgttcggatgtgggcagtcagagaacacagctatgcttccccacatgtgtcagaggatcagtgggcccaaaacaagctgctatgaacacagctgcccaccac

SEQ ID NO: 4117 - DNA, 1520 bp, Cricetulus griseus
  modified_base (1241)..(1241): a, c, t, g, unknown or other
tggggcggcgggctatctaggccggcgcgtctctatggctgcaggggcggtagttccgcaggctatctctgcaccatggctcaggcgagagaaaatgtcagtttattcttcaagctatactgcttggcagtgatgactctggtggctgcagcttataccgtagctttaagatacacaaggacaacagctaaagaactctacttttcaaccacagccgtgtgtgtcacagaagttataaagttactgataagtgttggacttttagctaaagaaactggaagtttgggtagatttaaggcatctttaagtgaaaacgtcttggggagccccaaggaactgatgaagttaagtgtgccatcactggtgtatgctgttcagaataacatggctttcctagctcttagtatttggagcagtataccaggttacctatcaactgaagattccctgtactgctttatgttaccgttttaatgttaaatcgaacactcagcaaattacatgggtttcagtttttatgctgtgtggtggggtcatacttgtacaatggaaaccagcacaagctacaaaagttgtggtagagcagagtccattattaggctttggtgcaatagctattgctgtattgtgctctggatttgcaggagtttattttgaaaaagttttaaagagttacaaaaagatacttccctttggggtgagaaacattcacttctcagcagctgcagccattgttctttctaccattgcttcagtgatgctgtttggattacagataacactttcctttgcaatgggagctcttcttgtatgcatttccatatatctctatgggttacccaggcaagacactacctgcattcaacaagaagcaacttcaaaagaaagagtcattggtgtgtgattggaatcttaagatactcctataacgactaaactgtcaataataaattagagccttaagtcaaccccagatggtagcttaaacaatatcaacaaaattactgtatggcattaaggatcaagaagaaaactgtatgagtgaaatgagaacatcaggtgaaactacaatattcaatcaaggtttaagatttggtatctgaaggttcaagtgccaaagccatttctgtccacactgttctctcgttcaggtaccaggaggggaagcttagccttccttgttgtccagttcatggatagtactttgtccctgtagtagcaaaaaatctagctgcttttancaaagtgaagaatgaataagagaacctatttcatggctcagacactgacttctgtctgggtaatgactgagaacttcagtgctgtattttgtgccatttactgtctggttcatatttctttgctgttagctgatatacttttcagaaaattttctaagtcgcttttatactttcttttttataaagtatggttacctgttgggctctcaatttgtgaactttaagtgatttaaaatatttctataatgttaacggggaaatccagcaataaatttattt

SEQ ID NO: 4118 - DNA, 1520 bp, Cricetulus griseus
cttcttcctcgagactctttccacagcctgggcggggaggccgagaagctgcgggccggcggacgggatgagcgcggcgcggacgctgcgggtgccgggccgtcacggctacgccgccgagttctccccgtacctgccgggccgcctggcctgcgccgcggcgcagcactacggcatcgcgggctgtggaaccctaataatattggatcaaaatcaatctggactacagatttttagaagctttgactggagtgatggattgtttgatgttacctggagtgaagacaatgagcatgtccttgtcacctgtagtggtgatggctcactgcagctctgggacactgccaaagctacagggcccctccaagtctataaagaacacactcaggaggtgtatagtgttgattggagccaaaccagaggtgaacaacttgtggtatctggctcatgggatcaaactgtcaaagtgtgggatccaactgttggaaattctctgtgtacctttagagggcacgaaagtgtcatttacagcacaatctggtctccccacatccctggttgttttgcttcagcctcaggtgatcagactctgagaatttgggattgtgaagaccgcaggagtccggattgtgattccagcacatcagacagagatcctgagctgtgactggtgtaaatacaatgagaacttggtggtgacaggagcagttgattgtagtttgagaggctgggacttaaggaatgtacgacaacctgtatttgaacttcttggtcacacgtatgctattaggagggtgaaattttcaccatttcatgcttcagtgctggcctcttgttcctatgattttactgtaagattctggaatttttcaaagcctgatccgcttctagaaacagtggaacatcacacagagtttacttgtggcttagatctcagtctccagagccccactgaggtagctgactgctcctgggatgaaaccataaagatctatgaccccgtttgtctcacagttcctggttaagatatgctgctctggtctgaagctgggatattggctaatgagctacttaacaagaaaacattaactactgaaaagatagaaatcaggccttcatatgtactgagatttaagaattttcaaacttatgttgaaataagttttaaggcagctgataaagacattgtatcatattgtaagcctggtacacaagccataatttctgtaatcctaaagaataattattgttatgacatatcttgtaatgtctattaaaatgttatctctgtattgtaaaaggactaaaatatggaagttagtagattacatggacagtaatatatttcatttttaatttgtcattttggatgtaaaatataaccacttctgttgataagaatcaaaataaactatgtttcttgatcgtatataatttgtgacatcctaatgcagttgccttgtaaaaatgtattgtgtatatggatctaattttgtattttaatgtagatacagctgatg

SEQ ID NO: 4119 - DNA, 1520 bp, Cricetulus griseus
gccgtaggaagcagtacctgccaccagcccaactggcgcgtgccaggggctacggtggtggggcggggcgggcggggcggggcttggtttagacccccggtgggtagtaccgagccgggggccggaaagggtgggctctagagggcaagcaggtagcggcttgttgtttgccagggtccctcctcttgctccgtacaacagattccagcctagagggccccagactcaccatggagtccatgctgagcgcgggcatcgccatggctgaagcgctgcagaagcggctccccgggctagagaatatgtggctctgggtcacctttctaggcgatcccaagaacctctatatgttgttcttccccgcggcctactacgcctctcgccgactgggcatctgcgtgctctggatcaccttcattactgagtggctcaacctcgtcttcaagtggtttctgtttggagacaggcccttttggtgggtgcatgagtctgggtactccagccagactccagtccaggttcaccagttcccctcttcttgtgagactggcccaggcagcccttctggccattgcatgatcacgggagcagctctctggcctataatgacagccatttcttctcaggtggcatctcggtcccgaagcccctgggtaagggtgattcctagcctggcttattgcaccttcttattggcagtcggcctatctcgggtcttcctcttagcacatttccctcaccaggtgttggcaggccttataactggtgctgtgcttggctggcttatggctccacatgtgcccatggaacgggaacttagcttctatgggttgactgctctggcccttatgctgggtgccagcctcatgtattggactctttttacactgggcctggatctttcctggtccatcagcctggcttccaagtggtgtgagcggcccgagtgggtgcatttggacagtcgaccctttgcctcactgagccgtgtctcgggaactgccctgggtcttggcattgctttacactctccctgttatggccagatacggcgggcatacctgggaaacggccagaagatagcttgctttttgctggccattgggctgctggtcatcttggaatggctgggccacccacctcagatcagcctcttctacatcttcaacttcctcaaatacaccctctggccctgcctggtcttggcccttgtgccctggctggtgcacacattcagtgtccaggaagcaccacccattcactcctcttgatgtctcttgcctcccttgccgctctcttgcccaaagacaacactccttgaccaccacactctaaaaggcagtccttttcctgggctccaaaattggcccggctcacagggaacttcatttctatctcatgttctgtaattttagccccctttttaaaaggacctgtgttcccaaggaggctttgtgaaaaaaaaaaaaaaaaaaaaaaaaaaaaaaaaaaaaaaaaaaaaaaaaaaaaaaaaaaaaaaa

SEQ ID NO: 4120 - DNA, 1519 bp, Cricetulus griseus
ttgcctggctcctgtctgtgaaagacttcctggttctcccaccgttttttctcgtctttttatttccagaagccaatgcgagacattggctctgattaagcgacggctcgtgacccggggtgatggagatcacccctgcaaggggtggactgaaccgagcacacctacaatgcaggaatctacaggagttcctagggggcctgagccccggggtgcttgaccgcttgtatgggcacccagccacttgcctggctgtcttcagggagctcccttctttggctaagaattgggtgatgcggatgctttttctggagcagcctttgccacaggctgcggtggccctgtgggtgaagaaagagttcagcaaggctcaggaggaaagcacaggactgctcagtggtctccgaatttggcacacccagctgctccctggtggactccagggcctcatcctcaatcccatcttccgccagaacctccgaatcgcccttctgggtgggggcaaggcctggtctgatgacacaagtcagctgggaccagacaagcatgcccgggacgtcccctcacttgacaagtatgctgaggagcgttgggaggtggtcctgcacttcatggtgggctctcccagtgcagctgtcagccaggacctggctcagctcctcagccaggctgggctcatgaaaagtgctgaacctggagagccaccttgtatcacttctgctggcttccagttcctgctgctggacacgtcggcccagctctggtacttcatgctgcagtatctgcagaccgcccagagtcggggcatggacctggtagagattctctctttcctcttccagctcagcttctctactttgggcaaggactactctgtagagggtatgagtgattctttgttgaacttcctacaacacctgcgtgagttcgggcttgttttccagaggaagaggaagtcccggcgttactaccccacacgcctggccatcaatctctcatccggtgtctctggggccgggggcagtgtgcatcagccaggcttcattgtcgtggagaccaattaccgactgtatgcctatactgagtcggagctacagattgcgctcatcgcacttttctctgagatgctctaccggttccccaacatggtggtggcacaggtgacccgggagagtgtgcagcaggccatcgccagcggcatcacagcccagcagatcatccatttcctaaggaccagggcccatccggtgatgctcaaacagactcctgtgctgcctcccaccattacagaccagatccggctgtgggagctggaaagggacagacttcgtttcacggaaggcgtcctgtataaccagttcctgtcgcaagtggactttgaactgctgctggcccacgcgcgggagctgggcgtgctggtgttcgagaactcggccaagcggctgatggtggtgacgccggccgggcacagcgacgtcaagcgcttttggaagcggcagaagcacagctcctgagccgg

SEQ ID NO: 4121 - DNA, 1519 bp, Cricetulus griseus
agaggatgaaccttcttcttcccaaactgttacaagccaaacagcctcaaagagaactgtcagaacaccagatgcttcaatgatgagtgaagaccctataagcaatttatgcagaccccactaagaagcccaagatctgattcaacgtaacaaaacaaatggaaattctaaaatgagtgaaatagaagctgtcagtacccagccagtccatttctctgaagatggagaaaccgaagatgatctagagagctcttacagtgacaccactgtcaaggtcagatccaggaactccgttgagtctagagaaatgaaccttctgtcaacagaaagcggtggctgctcggtctagttgtttcccttgccattggattactttggttcttttatactcctgcagtgcaaaccactgctgttcaagaattccagaaccagatgaaacaacttcagtctaagtaccagagtcaagacgagaaactgtggaaaagaggcacaacattcctagaaagacacctgaatagctctgtccctcggccccagcctgccatccttttgctcactgcagcccaagatgctaaagaagtgctcaagtgtctgagtgaacaaattgctgatgcctattcttccttccggagtgtccgtgcaatccggattgacggggcagggaaagctgctcaagacagtgacctcgtcaagcaagaagtagatcaagaactgagcaatgggtttagaaatggccagaatgcagctgtggtacaccgctttgagtctctgcccgcaggctcaaccttgatcttctataaatattgtgaccatgaaaacgcagccttcaaagatgtagccctagtcctgactgtactgttggaggagaagacactgaaagccagtctaggcctgaaggaaattgaagagaaagtgagagatttcctcaaagtcaagttcaccaactctaacaaagccagctcctacaaccacatggatccagacaagctgaatggactctggagccgcatttctcacgtagtattgcccgtgcagccggaaaatgccctgaaagggggcagctgcttatgagggggagaagtggaaatcacgtctcgaattctgaacagttttcagaactttaaccagagacggaatacggagctagtttttgaaaactggttctttttaaaggaagttaagttcatacataaacgtggaatacctaaatcatttatgcagcctgattatctgtgatttgagagaaccgtttctctgtttccactgagaactatgttaggagtgtttagcatggtctaaagtatatatgcaattccctgaggatctgctttgattctagctgaatcattcttgctgtgctgtgaccagtgagaaggactaggtgcctttctcaaagaatcagctttattttaactttggatatttttgttggtttgcttgtgaccttattagtctgacagctctctaattgtagctgtggtttccccattactttccttttataccatttaagtatgtg

SEQ ID NO: 4122 - DNA, 1519 bp, Cricetulus griseus
gggatgatgtctgccagcggggctgttgcagcccggccccccaggggcgtgctgttgggccttcgtcctccgcggctggattgccagccacagggcccttgttccggccccttagcgccgaggatgaggagcagcagcccaccgagatcgagtccctgtgcatgaactgttaccggaacggcacgacgcgccttctgctcaccaagatccccttctttagagaaataattgtgagctctttttcctgcgagcactgcggttggagcaacacggagatccagtcagcaggcaggatccaggaccagggagtgcgctacactttgaccgttaggggccaagaggacatgaacagagaagtggtaaagacagactcggccaccacaagaatcccggagctggattttgaaatcccagccttcagccagaagggagctctgaccactgttgaaggattgatcagccgtgcaatctctggcttggaacaggaccagcccacaagacgggcaacggaacatgccatagccgaaaggattgatgagttcattggcaaactgaaggacctgaagcgaatggcttccccattcactctggtcattgatgatccctcgggaaacagctttgttgaaaacccacatgctccccagaaagatgatgccttggtgatcacacactacaaccggaccccacagcaagctgagatgctggggctccaggcagaggcaccagaagagaagtcagaagaggaagatctcagaaatgaagtgctccagttcaacaccaactgcccagagtgcaatgccccagctcagaccaacatgaagctagtccaaattccccactttaaagaggttatcatcatggccaccaactgcgagaattgtgggcatcggactaatgaggtgaagtccggaggagcggtagagcccttgggtaccaagattaccctccacatcacagatccctcagacatgaccagagacctcctcaagtctgagacatgtagtgtggaaatcccagagctagagtttgaactgggaatggctgtccttgggggcaaattcaccactctggaagggcttctgaaagacatcagagaactggtaaccaagaacccattcacactgggcgatagctcaaatcctgaccagtcggagaaactgcaggagtttagccagaagttggatcagatcatcgagggcaagatgaaggcccactttactatggacgatccagcaggaaacagttacctgcagaatgtgtatgcccctgaagatgatccggagatgaaggtagagcggtaccagcgtacctttgaccaaaatgaggagctcgggctcaatgacatgaagacagagggctatgaggcaggcctggccccacagcggtagcagtgcacagctcacaggccagcttcagtgccaccagcaccacaggcatatttatgactgttggaaaacgatgagcatccaagcccctgcctgtggtgaggaggatatcgcttgagctagagatctaagca

SEQ ID NO: 4123 - DNA, 1519 bp, Cricetulus griseus
agatggcggcgcaggcggtgacgctgctgagggaggtggcccggctggaggcgccgctggaggagctgcgtgcgctgcagtccgtggtgcacgctgtgccgctccacgagcttcgcgagcaagcggcggagctgcgcctcgggcccgctcttctccttgcttaacgagaacaatcgggaacagactgctttgtgtgtgtccatcctggagaggttgctccaagctgtgggaccggttcatgtggccaggaacctcagggttgacctgcagaggggactgactcacccagatgactctgtcaaaaccctcactctgtcccagattggaagaattgttgaaaattctgaagctgttactgagattctgaataacactgaactattaaaacagattgtttattgcattggtggagagaatttatctgttgccaaagcggctatcaaatccctgtcaagaatatcactaacccaagctggactggaagctttatttgaaagtaatttgctggatgatttgaaaaatgtaatgaaaacaaatgacatcgttcgatacagggtatatgagctaatcatagagatttcttctgtgtcgttagaatctttaaactactgtaccacaagtggactggtgactcagctcctgagagagctgacgggtgaggacgtgctggtcagagccacctgtatagaaatggtgacatcactagcatatacccaccatggacgacaataccttgctcaggaaggagtcattgaccagatatctaacataattgttggagcagattcagaccctttctctggcttctatttgccaggatttgtgaagttttttggaaacctggctgtcatggatagtcctcaacaaatctgtgagcgctaccctgtctttctcgagaaagtgtttgaaatggcagacagtcaggaccccaccatgattggtgtagctgtggacacagttggaatcctgggatccagtgttgaaggaaaacaggttttacagaagacaggaacccgctttgaacacctcctcacaagaataggttatcaagcaaagaatgcttctacagagctaaaaaccagatgcttggatgcagtttcttctcttctgtatttatcacctgagcaacagactgatgacttcctgaggatggcagaatcctggtttgcctccttatctcaagactccctggagctcttccgtggcatcagtaaccaacccttccctgaactgcactgtgctgccttgaaagtgttcacagctattgcaaaccagccctgggctcagaaacttatgtttaacagtccaggttttgtagaatttgtgatggaccggtctgtggaacatgacaaagcttcaaaggatgccaaatatgaactggttaaagcacttgccaattccaagactgttgcagagatctttgggaactcaaattatttgagactcagaacctacctaagtgaaggtccatactatgtgaagcctgttgccactacagcagtggaaggagcggattgat

SEQ ID NO: 4124 - DNA, 1519 bp, Cricetulus griseus
ctcaaggtgtcgccccggggaatcatcctgactgacagcctcactagccagctcattgagaacgtgtccatttacaggatctcctactgcacagcagacaagatgcatgacaaggtgttcgcatacatcgcccaaagcccgcacaacgagagcctggaatgccatgccttcctctgcaccaagcggaaagtggcacaagctgtcaccctcactgtagcccaggccttcaaagttgcctttgagttttggcaagcgtccaaggaagagaaagagaagagggagaaaagccaaccaagaaggaggagccatctcagggacccgacgtgacagcaccccgtcattgaaaagcttggttgccactgggaacctgctggatttggaagaggtgtctaaggctcccttgtccacggtcaccactaataccaacaacatggatgagacactgcggcctcaagtcttgggcaccagcagtgtggtctgggagctggacgatggcctggatgaagcattttcaaggctggcacagtcacggacgaaccctcaagtcctggacactgggctgtccacacaggacatccattatgcgcagtgcttatcgcccaccgactgggacaagcctgacggcagtggcatcgatcgagatgacctcttcagcttctgagggcctaggactgactggcaggacacaactggccttgacatgtgatggaccaaaagccacctacagcagagcagccatttgtgcactggaggggacatggccttcagggaagctgggatcctcaaattctgcttctttggggcctggtagctaaggccctccgagaggcagcacctgaccaaagacacatagctctgcacttttatctcccataatggacatggtttgaggtccttgatggtgctgtgggagagcttgcctcctgccctccctccacaggagggccacagtccctgaggtgatctgtatagtgctaggacctaagtgtaccagctgcccattctgttttgtctgtgtgtcctgtgtgcccccaccttctgcctctccataattcctggaatgataccaaagcctagcactaggctgtggcgggatacttttcattcattttacaggtaaggaaactgaggcaacacatgtcggggatggagatgagaatagaacccagatctgataccaaagctgctgtttgtaccgccaacttctcacagcccacgtctcctttctctctagctttgttgtcctcccaggaaccaaaaagccccagctattttctgaccaaaatgtgtttcataacaaaccatctggtgcctttccacacagcgctggcgtgggcctccatgccctgctaactgccacactgcttccgggaagacatgttttgaagtcttttgattccatgggttaaatggaatcctccagaagcatctcgctgtcccttcctgacactgcagccccagtagtcccccctaccccacccagtggccaggcagtttagtggtgagctgtccttagtct

SEQ ID NO: 4125 - DNA, 1519 bp, Cricetulus griseus
tttggctgcatttgcatgaaatcccaatggtgtagaccagtggcgatggatctaggagtttaccaactgagacatttttcgatttctttcttgtcgtctttgctgggaactgaaaacgcttctgtgagacttgacaatagctctggtgcaagtgtggtagctatcgacaacaaaatcgagcaagctatggatctggtgaaaagccatttgatgtatgcagttagagaggaagtggaggttctgaaggaacagatcaaagaactaatagagaaaaactcccagctggagcaggagaacaatctgttgaagacactggccagtccggagcagcttgcccagtttcaggcccagctgcagactggctcccctccggccaccacgcagccacaggggaccacacaaccccctgcacagccagcgtcccagggctcaggatcaaccgcatagcctgctatgcccccacaggactggctgctgctgtctgaactgaacaggccgaagagatgtgctagcgagagaccacctccacagtcacccatttcattgccgtcctcaagagacgtgagactcacacatgccattctcgcttttccccagtattaagcactcatttgcttttggcttgaagaaaatgtactagttgagtgaattaaaggttaatcagaatgagcatggatttgccctgtgcagcttggcagatgtctgaggaatggtttaattgatgctgaggagctgtgtgccttttcaacccttcccagccgcccaccctgcttccaagagctctggggcttgcctgcatgaggctcggaaggtggggctcggatggtgggatctcctggattctgcgctctcttcccttcacttcaaggaacttagagaggccagaaacaagactgcaatgaggggcaggggtggggggggagattcagtcattttacaaaccgacaactgtcaccaaagtttataaaacgcagtagtacttactgtccctcttttctgaaacatcgaagacacaaaactgttagtgacaaaacagtgacaggtagctgggacctaggcgctatcattatgaaggttgttttgcttattgtatatttgtgtatgtagtgtaacgaacttgtacaatagaggaccgtaactactgtttaggttgtacagattgaaatttagatgttacattggccgtctgaaaaggtgtgggttgtcctctatagagagacctacctaaaaactgtttcatgacaaaaaccacacctgaagaaatgttaagaatttggcacagttagtcacttggtgtaatctgaaatctagctgctgaatatctcgaagtaaagccctattcaccgatttggtcttctcggttgagctggttgaatatttggagaaatggtcagttactaaggacatggatttcccagtaggggtttctgcatatcacctgtatggtagttctgtgcatctgttgtccttgtcacctttcaataaagcatataaaatgttgataaaaaaaaaaaaaaaa

SEQ ID NO: 4126 - DNA, 1519 bp, Cricetulus griseus
ggcgggctgagggaggtggaggtaacggcatgccttgtgtggaaggattggccgccccgggtacacccacacagcctcgtggggaaagactgcacgggatggcgtctgcagggtgcggctgcggcctcatgtcagccccaggcacagctttaacaacctgggcatccagtgtgttcggaagaaggaaatcgaagctgccattgaacggaagatccagctgggcatagacccctacaatgctggctctctgaagaaccatcaggaggtcgacatgaacgtggtcaggatctgcttccaggcatcctatcgggaccagcaaggacagttgcgccgcctggaacccgttctctctgagcctgtctacgataagaagtccaccaacacatccgagctgcggatttgccgaatcaacaaggagagcgggccgtgcacaggtggtgaggaactgtacttgctgtgcgacaaggtgcaaaaagaggacatatccgtggtgttcagcacggcttcctgggaaggcagagccgacttctctcaagctgatgtgcaccgacaaattgctattgtgttcaagacaccaccctatgaggacctggagatcgcagagcctgtgactgtcaacgtcttcctgcagaggctcacggatggagtgtgcagcgagccactgcccttcacgtacctgcctcgggatcacgacagctatggtgtggacaagaagaggaagcggggactgcccgacgtccttggggagctgagtagctctgacccacatggaattgaaagcaaacggcggaaaaagaagccagtgttcttggaccacttcctgccgggccacagctcaggcctgttcctcccgccgtcagctctacagccggcagacaccgacttcttccctggtaccatatctcttcctggcctggagcctccgggcggcccagacctcctggacgacggctttgcctatgacccttctgcccctgcgctcttcaccatgttggacctgcttcccccagcaccgccactcgccagtgctgtagtgggtggtgggggtgcagggggcacagttgtggagtctcctggcccagagccactgacactggactcgtatgcagcccccggtcccggggatgttggcactgccagccttgtgggcagcaacatgttccccaaccagtaccgagaggcagcttttgggggtggcctcctgtccccagggcctgaagccacgtagcctttgaggtgccagcgaaggtactgggtgaggagtgtattgcaacaccccattccctgaggccaaccttgatcagtcttccagtttcctcatcctgaattggacagctacagtgctggcaagaagctggggagagctccaggtctccttgagcccattttacagatgagaatgctgagtccaaagaggaaaaggggctcctgcaggcgggccccttctcaggacagattctgagagattgtacataggggaggagggagtagatcccggccctcttccctggtcctgaag

SEQ ID NO: 4127 - DNA, 1518 bp, Cricetulus griseus
ctactaccgagtggtgcttataggggagcaaggggtaggcaagtccaccctggccaacatcttcgcaggtgtacatgacagcatggacagtgactgtgaggtcctgggagaagacacatatgagcgcaccctggtcgttgatggtgagagtgcaacgattatcctcctggacatgtgggaaaataagggggagaatgaatggctccaggaccattgcatgcaggttggggatgcctacctcatcgtctactccatcacagaccgagcgagctttgagaaggcatctgagctaaggatccagctccgcagggcccgacagacagaagacattcccatcattttggttggcaacaaaagtgacttagtgaggtgccgagaagtgtctgtgtcagaagggagagcttgtgctgtggtgttcgactgcaaattcattgagacgtctgcagccgtgcagcacaatgtgaaggaactgtttgagggcatcgtgaggcaggtccgcctgcgccgggacagcaaggagaagaacgagaggaggctggcctaccagaagaggagggagagcatccccaggaaagccaggcgcttctggggcaagattgtggccaagaacaacaagaacatggccttcaagctcaagtcaaaatcctgccatgacctctctgttctctaggcacccagtgtcacccagatgtccccttgatggacatcgtagaaggcccttgggaccagtgatctatattagattgaatacataagcattgttagtggtggcttcccctgttgcaaatgggaaccaacaggttagcctcatgggcaaccaagtgcacgggcaaggaatctttgtcaagagtcagtatttattcataggaacatcttgatttgctacatgggcacctgagactcatttaagggcatatttggggttcacatgagtttgttttgccttctttgggcagcagaatattctcatcacagttgtgactatgagaagtgttggactttgctggaaactaagctcactaacagttcttttctttaaagcccacagagatttgtagacttaggagctgatgtatgtagcacttgtagttcaaaagattgtttacccttgtgtcttacaaatgcttattttgaggaaactacttttgccaaattcgacttcgtcaaatcttttgtgttttgttgttttttgaaatcatggagctatcataaaatatttcttagaaaaaccaacaactgataaccttgagtgcaaagtgattgcactttaaatataatcaaaggttttccccaaaatcatagaaaggcctgatcctttggttgatctttgtgtgccacagctgtgtttttatttattattatgttgcaaataaccattttaacatttgataaagcatatttatgaacatatttcttattgagaaaatgtgttttattaccttttttatctttttcaaaatatgcaagtttttacctatatgtcttataataaaatcaataaaatatttgaaaaggaaa

SEQ ID NO: 4128 - DNA, 1517 bp, Cricetulus griseus
ccaggacaaacaagagaaacaaaagtaaagtcgaagatccagagattaattccatccaggacggtcaaggaagggcagctcctgaggggctatgtgaaatctgtcctgtcacatggtgtgctcgtagagcttgggccttcggttgtgggtttggcccaatactcacacgtgtctcagtgtcgcccacctgagaaagaactttatgacagttacctccccaagggaaagctggtcactgccaaggtcctacgtgtgaacccggaaaggagccaggtagagctgtcactccttcccagcgacactgggaagccggacctgttttctgcctccccagagccaagtggtgtggaggtcgtattaccgggagggagaggatgagatggagcagccgggggtgctgcccatgggaaagcagacaaagcccgcagaggtgccccggctgcagctctcttcaggcttcgtttgggacgtggggcttgactctctgactccagccttgccaccccgaggagagagctcagacagtgaggaggatgagaagacctcaccaagccaagaagaagaaagggcgaaaaaggaaaagggaaggctggagaagcagaaggcggagaaggagctgtcacgcattgaggaggcactcatggaccccgggcggcagcccgagtctgcagatgactttgaccggctggtgctgagctctcccaacagctctattctgtggctgcagtacatggctttccacttgcaggccaccgagattgagaaggcccgagctgtagccgagagggccttgaagaccatctccttcagagaggagcaggaaaagctgaacgtgtgggtggcactgctgaacctggaaaacatgtacggctcccaggagtccctgatgaaggtcttcgagcgggctgtgcagtacaatgagcctctcaaggttttcctgcacctggctgacatctacaccaagtcggagaagttcaaggaagctggtgagctgtacagccggatgctaaaacgtttccggcaggagaaggctgtctggatcaaatacggcgcttttgttttgggaaggagtcaggctgggaccagtcaccgagtgctgcagcgagccttggagtgcctgcccaccaaggagcatgtggacgtgatttctaagtttgcccagctagagttccagctgggggatgcagagcgggctaaagccatttttgaaaacacactgagcacctaccccaaacgcacagatgtctggtccgtctacatcgacatgaccattaagcatggcagccagaaggaagtcagggacatctttgaacgtgtcattcatctgagcctggcccctaagaggatgaagttcttcttcaagcgctacctggactatgagaaacagcatggcactgagaaggacgtgcaggctgtcaaggcgaaggcgctggagtatgtggaggccaagagctcagtactggaggactaagtagctctaggctccacaggacttttacttttaataaacaaaaaaa

SEQ ID NO: 4129 - DNA, 1517 bp, Cricetulus griseus
gtctataagccatttgcgaccactgatgggaggaacagagagtagcatttcagagccgggttctcctgccagcaacagagaaagtgaaacactgagacaccaccatctatcagaatgcaaggtctggagaaaccctttaaacctctttagaggagcagaatataggagatatacttgggtgactggtaaagagccccttacttactatgacatgaacttgtctgcccaggatcaccagacctttttcacctgtgaaacagactttttacgtccttcagacacagttatgcagaaggcatggagggaaagaaatcctccagctcgaatcaaagcagcctatcaagctttagagttaaacaatgactgtgccactgcctatgttctactggctgaagaagaagcaacaaccattgtagatgctgaaaggttatttaaacaggcactcagggcgggtgagatcatttatagacggtcacagcagtgccaacaccagagtcctcagcatgaagctcaactgagacgagataccaatgtacttgtatatataaaaagaagattggcaatgtgtgcaagaaaattgggaagaataagagaagcagtgaaaataatgagagatttgatgaaagaatttcctcctcttaccatgttgaacatccatgaaaacctcttagaatcacttctagagttgcaggcctatgcagatgttcaggcagtcctggcaaaatatgatgatataagccttccaaagtcagcagccatctgctacacagcagcactagggttaagcacagcagaaattaaatgctgtggaaagcaattcatagagctgtggagtttaatccccatgttccaaaatacttactagagatgaaaagtttaattttacctccggaacacattctgaagcgaggagatagtgaagcaattgcctatgctttctttcatctgcagcactggaaacggatagaaggtgctctcaatctcctgcagtgtacgtgggaaggcacttttagaatgattccatacccattagagaaaggacatctattttacccttatcccagctgcacagaaactgctgatagagagctactgcctacttttcatcatgtttctgtttacccaaaaaaggagctgcctttcttcatccactttacagcagggctctgttcctctacagcaatgatagcatttctcacacaccagtttcctgaagtcatggctgtttttgctaaagccgtgagtatgatctcaaggacttgtgtggagtatttgtaagacatcacgggaaagcggctctggtctgtgctaacccacacgagcagtgaaagatacttgtaaacaaacaagaactactgctttgtaaagcttctaccataaatatgtcaaccatgaactctggtgatgtgaatgtctgttgactttaaaagtttaagaatacaatgctgtcacactatattaccaactaaaaaaaaaaaaaaaaaaaaaaaaaaaaaaaaaaaaaaaaaaaaaaaaaa

SEQ ID NO: 4130 - DNA, 1517 bp, Cricetulus griseus
gtcaggtgatggcactctgcacctacccaaatctgctaagcagccccagcttcccagaagtaagaagcgagcccggcgaatcctgcaggcttgtggtggaaacagcttgggatcttacagtgccagccagggtgttaactgtatccgtgaggatgtggcagcctttatcaccaggagagatggtgtgcctgcagacccagacaacatttacctgaccactggagctagcgacggtatttctacgatcctgaagctcctggtctccgggggtggcaagtcacggacaggggtgatgatccccatcccacagtaccctctgtactccgcggtcatctctgagcttgacgctgtccaggtgaactactacctagatgaggagaactgctgggccttgaatgtggacgagctccgggcggcagtgcggcaagccaaagaccactggagcttgcatccttccacttctacctccaagggctacatgggcgagtgtggctacagagggggctacatggaggtgattaatttgcaccctgagatcaaaggccagctggtaaagctactctcagttcgtctctgcccgccagtgtctggacaagctgctatggatattgttgtgaatcctcctgtcccaggcgaggagtcttttgagcagtttagcagggaaaaagaatttgttcttggtaatctggccaaaaaagcaaagctgactgaagatctgtttaaccaagtcccagggattcactgcaaccccttgcaaggagctatgtatgcctttccccggattctcattcctgccaaggctgtggaggcggctcagtcccataagatggccccagacatgttttactgcatgaagctcctggaggagactggcatctgtgttgtgccgggaagtggctttgggcagcgagaaggcacctaccacttcagaatgacaattctccctcccgtggagaaactgaagacagtgctccataaggtgaaagattttcacctcaagttcctggagaaatacgcatgaggatgcctcaggtgccagagggtcttggttccaaggcccaggccttcctcatggactctgcctcagacctcacacaggtggccagcccagttcatcataatttttccaggagacttctctctgtgtgccttggttctgagattcctcaatgaaaggtaaactagaagctagtatatttttatatttttgtaacaattgcttttttcatggggggggtggaagggttagtatttatagtcctaacaagtccaataatttttataaatctcttcagattataaataatcctccaaattttgcaatgtttacatgttttttttaaaagacgataattatgctaggtttgctttttaaataaaagcttaggtgtgctaagagattaataacttcaaataggaatactggttatggtagttcggattttctatagattctatccctatgccttttctgtttcagcatcactcggccaggctggacctgggacagtcacacc

SEQ ID NO: 4131 - DNA, 1516 bp, Cricetulus griseus
tctccgcgcaagaggagcttctgctggggtgactgaattctcaacctgacctatagccatggcaaccaaaggaggaactgtaaaagctgcttcaggattcaatgcaattgaagatgcccaggccctgaggaaggccatgaaaggacttggtaccgatgaagatgccatcattggagtcctggcctaccgcaacactgcccaacgtcaggaaatcaggactgcatacaagagcaacattggcagggacctgattgatgacttgaagtcagagctgagcagcaactttgagcaggtgattgtgggaatgatgacacctaccgtgctgtatgacgttcaggagctgcgcagggctatgaagggagctggcacagatgaaggctgcctgatagagatcctggcttctcgtacccctgaggagatccgtcgaatcaaccagacttaccagcagcaatatggaaggagccttgaagaggacatctgctcagacacatccttcatgttccagcgagtactggtgtccctggcagcgggtggcagggatgaagggaattacctggatgatgcactcgtgaagcaggacgcccaggacctgtatgaggctggagagaagaaatgggggacagacgaggtgaaattcctaagcatcctctgttcccggaatcggaaccatctgctgcatgtgtttgatgaatacaaaaggatctctcagaaggacattgagcagagtattaaatccgaaacgtctggtagctttgaagacgccctgctggctatagtgaggtgcatgaggaacaagcctgcatattttgctgaaaggctttataagtccatgaagggcctaggcactgatgacgacaccctcatcagagtgatggtgtcccgagcagagattgacatgctggacatccgggcaaacttcaagaggctctacgggaagtctttgtactctttcatcaagggcgacacttccggagactacaggaaggtcctactcatcctctgtggaggagatgattaaaacaaacccaggacagagacttcttaacactgggttttttttttttttaacttcatttttctgcactgctattaacattatctcaaatgcttatttccaattaaaacgcctccagttgcctcctttgatccagcctgtgttattatcatctataattagtcattttgatgccttaaacctgttctttcaaagcttttaagacctaaatggagatttagaattagaaattaaaatgtgctccaagtctttaacagattatttcctcatgcatgttttgcagaaactgaatgcactaaatccttttggatttttcttttccataagaattttacaggacagaagcagctctcttccctgagcagccagtcatctcttcatgccagaccctaccatctactactaagaatttccatccagtttcctattttacacagctgtagattgaagttcttatgagcctcctttctttggctttgtctatcgtgttagctgatagtt

SEQ ID NO: 4132 - DNA, 1516 bp, Cricetulus griseus
gccggaccgggcgggcggaggagctctcccgggtcacagcgccgagcggcggcggcgggaagatgcggctgcggctcctggcgctggcggcggccgtgctgttgtgtccggccccggaggtatgtggtgctctcaatgtcactgtgaccccaggacctgtggttgactacttggaaggggaaaatgccactctcctctgccatgtctcccagaagagacggaaggacagcttgctggctgtgcgctggttctttgcccctgatggctcccaggaggccttaatggtgaagatgaccaagcttcgggtgattcagtactatgggaacttcagccgtattgccaaccagcagaggctgcgcctgcgtgaggagcgtcggggagtactatacaggctgtctgtcctgacactccggccagcagatcaggggcagtatgtctgcaaagtacaagaaatcagcaagcacaggaacaagtggacagcctggtccaatggctcctcagcaacagaaatgagagtgatttccctcaaagctactgaagattcatcatttgagaaaaagaaagtgacatgggcattttttgaagatctctatatgtatgccgtcctggtgtgctgcgtggggatcctcagtgttctactcttcaccctggtcatcgcctggcagtctgtgtttcacaagaggaaatccagagcaagacattatttggtgaaatgccctcagaacagctctggggagactgtcaccagtgtgaccagcttggccccgctgcatccacagaagggcaagaggcagaaggagaaggtagatgtcccacctgcagtccctgccaaagctccaatagtcaccacattccacaaaccaaagctgctgaaaccacagaggaaagtcgccttgccaaagatcactgaggaaaacttgacctatgccgagctagagctgatcaaaccaccccgtgctgccaaaggtgtccccagcagcaccgtgtacgcacagatcctcttcgaggagaaccagctgtagtgacacctctcctctggctgtcacctgagctcccacatatttatgaaagaaaggtcctatttttgtattttcacttgtgccttcagtgtggtggggagccccgtcccacaaactcagtcagctcccactcgggggagagcagagcctctcactgtcccctctgaatagaagcagaagtacaagccatgcaggaaagctatgcccaggaagactcaacaattggcaagtgttttgtccatctcagctttggatgtgaactgtaatggtcttgtgtacatgtcagggaccttgggacataagtccatggggaagtttctctgaagacctaaacaatgtacagaaatgttggactttatggaagtaagattcactctgcaaaagtcatcttgatatcaggtttttgatgtaggtgtactctggtggccatttgctatactctgtaaacattgtttggctatgtaatttacatgtatatatgataaattatctatttt

SEQ ID NO: 4133 - DNA, 1516 bp, Cricetulus griseus
aggaggaggtgaagcaacatgcccaggagctttgggtcgcctacaggggtcgtgttgaaggttgccttacagcgccagggccagaccctggaggaggaggacatggagacaaggaacctgcgggtgcacgggttgctgctgcccctcgtcttgcccagcttctactcggagctcttcacactctacctgcttcttcatgagagagaggatgggttgtacagccagggcattgccaacctcagcctgttccctgacacgaagctgctggagttcctggatgtgcagaagcacctgtggcccctcaaggacctctggctgacaagcaatcagagatattctctggtccgggacaagtgtttcctgtcagccactgagtgtctgcagaagatcatcaccacagtggaccctcgggagaagctggaagtgctggagaagacctatggggaaatcgagaccacggtgtctcgggtgctgggcccggaagtacaaacttacccatggatgacctactgcccctgcttatctatgtggtgtcccgagcccgaattcagcatctgggagctgagatccacctgatccgtgacatgatggaccccacccaaacaggtggcctccatgacttcttgctcactgctttggagtcctgttatgagcacatccagaaggaagacgtacgactgcaccgcctgcctggccactggaactctagagaactctggtgacgtggctactctggaccaagaagccagcactgcccatctgccccccattgcctgggtcaaggcaggctgtggaggtagtcctcaaaggagatggtgttttgcttccttgagggacatgcccagctgctgcagtgtgatcccatagctgataacttgccactggcctctggtctgggctcagataaccttttgcctggaagttgcaccatcttgggtgaggagcactcgcttcactctgcctcaggccttagtcagaaaccagcactctctgggctgcgtgcggctgagactcctgggagcctcagggaggaccaccttcagagcctctcagaaagtgtggagcactgtgaagagagcctactgttctcctaccctgctgtccccagagcgagcaaagaggctttctctggctggatccaccaaatgtttcagcgtgaacatagggcctggggcttgagttctgccaggaacttggtccccaggaaagtctttggaagcgtcaaagtgatggaggcctctctctcaatgacagtcctaagtgcctatgacacagatcagctgtgagaaaaccctgccacctactcccctgttcccaatactaactgaacttgggcctctggtccttgtgggtccacagggtttccataatgtcctggtaggttccaggagcagccagggctgtaacaaacccttgggacaaaattgacatgtgaggggatgcaggaacagttacagtctacttatttattgcgcatttttaataaatccgtttacatctttaaaaaaaaaaaaaa

SEQ ID NO: 4134 - DNA, 1516 bp, Cricetulus griseus
ctgttggaagagcaccggggtcttttggagttcctgagctcagcaccgctgaaggattccatgttgcccagaaggaggccttgaggaagtcggaatggcttgtggagcgagcatgttccacgcccccagggccacagactgtcctcatctttgacgagctctcggattgcctgtgcagagtggccgacttggcagactttgtgaaaatcggacacccctgagcccgcgttcagagaggctgcagaagaggcctgcagaagtatcggcaccatggtggaaaagttgaatacaaatgtggaattgtatcagagtctccagaaattactagatgataagaagcttatggattcccttgatgcagaaaccaggcgagtggctgagctgtttatgtttgattttgaaataagtggaatccatctagatgaagaaaagcgcagaagagcagtggacctcaatgtcaagatcctggatttgagcagtgcttttctcatgggaaccaactttcccaacaagatacagaatcatctcttaccagagcacgttcggcgccactttgcccgagatgggagttacacagtcattgatggtctacatgcggaagcctcagatgacttggttcgggaagctgcttataaaattttcctttatccctaatgctggtcagttgaaatgtttagaagaattgctaagcagcagagatcgtctggcaaacttagtaggttattctacgttttcccacagggccctccagggaacgatagctcagactccagagactgtcatgcagttccttgaaaaactatctgacaaactctctgaaagaactgcaaaagattttgagatgatgagaggaatgaaaatgaaactaaatcctcaaaattctgaactaatgccttgggacccaccctactacagtggtgtgattcgtgcagagaggtataatattgagcccagtttatattgcccaatttttctcccttggagcttgtatggaaggcctgaacgtcttatttaacaaactgctgggcatcaccttatatgcagagcagcctgcaaaaggagaggtgtggtgtgatgatgtccggaagctggctgttgttcatgaatccgaaggttgctggggtacatttactgtgattttttccagcgagcaaacaagccacatcaggattgccacttcaccatccgaggaggcagaataaaggaagatggaagctatcagctgccggtcgttgttcttatgctgaaccttcccattcctccaaggacccccccaccttattaactcctgggatgatggagaatctcttccatgaaatgggacatgccatgcattcgatgctcggacgaactcggtaccagcatgtcactggaaccaggtgcccgactgactttgcagaagttccatccattctgatggagtacttttcaaatgactaccgagtagtcagccagtttgccaggcattatcagactgggcagccactgccaaaagctatggtgtctcgcctctgtg

SEQ ID NO: 4135 - DNA, 1516 bp, Cricetulus griseus
ctccaagaggcagagtagccaacaaaaataagttgccagaggcattcctatataactaggtcagttgtcagattgcctcgtgttcaaacccaatgggcacctggaagaacagacaccccggaccctgctgaagaacatcttactaactgccccagaatcttctatcgtgatgccagactcagtggtgaagccagtacaagtaccagagatggtggagtcttccaaatgggaaagcagcccgggaagcctggagctgcaacttcctgaactggaatacccctcaaccctagctccaggtctgccagccactggcagaagcaagcaaaggctgagattgtcagtatttgagcaggaagtgaatcagcggctgcctctctcccaagagccacctgggaatgctgatgcttcatccttgaccagctccttcaacctcagctttgtcccaccttgtcagtcacagtcagtggggagacctggtctggctcgcagacgtcccattcgccggcctgtggatgtaggtgttcttttgcaggatctagaagataattccttgaccacagctcttccaggtgacaactatagaacccctgttgctactctgccaacggatgcagtgttggaagacacccagcctttctcacagccttcagttggctgctcccttagagtgtatcattctctgcccagcccttctcactctgaggttaaaggtgctgaaagagttgtgggccgaaggacacaaagcactgggactgggctggagaagcacatgagcagaactagccttggtactactcctttacccttctccaagctacagcctcagcctccagaaataagagaagcagtgggatcccaggaggctgtggaggccaaggagcaagaaggatcttccagggatgaggatactcctggcaggccagcaagtccagagttagccgctgacacctataacttactccaggctgagcagccacatctctccagccgccaccaccacctgcagttgcagattcagagcccctggagtctgtgccggccaggcttccatccaggacccaaactgtaggtcccaggcatcaccaagacccctataaggctggactgagccactatatgaagctctttagcttctatactaagatgcctgtggagaagaaggctcttgagatggtggagaagtgcctagacaagtatttccagcacctttgcaatgacctggaggcattttctgctcatgctggccgtaagactgtgaagctagaggacatggaactgctgttgcgacggcagggactagtcactgatcaagtctcactgcacgtgcttgtggagcggtatctacccttggagtaccggcagctacttatcccctgtgcattcagtggcaattcagtcttccctgcccagtagtggccaggctttaacacttgccctctccctaccttagacaccttggacctacaccatcatcaaggtttccttctcctagcagcaataaaatctcacaaatggg

SEQ ID NO: 4136 - DNA, 1515 bp, Cricetulus griseus
  modified_base (494)..(494): a, c, t, g, unknown or other
gaggactttactggtggcgtcaccgagtggtacgatctgaacaaagcacccagagacctctaccagattattctgaaggcgctggaacgaggctccttgctgggctgctccattgatatctccaatatcatggatatggaggcaactacccttaagaacctggtgaagggccatgcatactctgtgacaggtgccaagcaggtgaatttccagggccagcaggtgagcctaatccgaatgaggaacccctggggtacagtggaatggaaaggagcctggagtgatagctcctcagagtggaacagagtggacccctatgaccgggaacagctgagggtcaaaatggatgatggggagttctggatgtcattccacgacttcttacgagagtttaccaaactggagatctgcaacctcacacctgatgcccttaagagcaggaccatccggaactggaacacgactctctatgagggcacctggcgccggggaancacagctggtggctgcaggaactaagatgactatagcagtcgggagtcgggctgcagcttcttgttggcccttatgcagaagcaccggcgccgggagcgtcgcttcggccgagacatggagaccattggtttccgcggtgtatgaggtcccacgggagctggtgggtcagcctgtgcacttgaagcgtgacttcttcctggccaattcttctcgggcacgtacagagtccttcatcaaccttcgagaagtcagcaaccgcatccgcctgccaccaaggggagtatatcgtagtgccctccaccttcgagcccaacagggaggctgactttgtgctgcgtttcttctcagagaagggtgctgcgacccaggagctagatgaccagatccaggccaacctccctgatgaggaagtgctctctgaaggagagatcgatgacactttcaaaaccttgttcagtaagctggcaggggaggacatggagatcagcgtcaaggagttgcaggtcatcttgaacaggatcattagcaaacacaaagacctgcggaccaatggcttcagcctggagtcgtgccgcagcatggtgaacctcatggatcgtgatggtaatgggaagctgggcctggtggaattcaacatcctgtggaaccgaatcagaaattacctgaccattttccgcaagtttgacctggacaagtctggcagcatgagtgcctacgagatgaggatggccattgaggctgcaggcttcaagcttaacaagaaattgcacgagctcatcatcacccgctactcagaacctgacctgtctgtggatttcgacaactttgtgtgttgcctcgtgcgactggagaccatgttccggtttttcaaagctctagacacagacctggatggtgttgttacctttgatctgtttaagtggttacagctgactatgtttgcatgaagtggggattcaactcccattgccgtgttcttcctttcttcttccaccaagccgtgccttcctgccatgccac

SEQ ID NO: 4137 - DNA, 1515 bp, Cricetulus griseus
aggtactgacccttgacctcggggtgctcccccatctctcaggcgtgatggctacgggcgcggatgtacgggacattctagaactcggtggcccagagggagatgcagcttctgggaccatcagcaagaaggatatcatcaacccggacaagaaaaagtccaagaaatcctcggagacactgaccttcaagaggcctgaaggcatgcatcgggaggtctatgccctgctttactctgacaagaaggatgcacccccactactgcccagtgatactggtcaggggtatcgcacagtaaaggctaaattgggatcccaagaaggttcggccttggaaatggatgccatttaccaacccagctcgaaaggatggcgctatgtttttccactggcgacgagcagcagaggagggcaaggactacccttttgccaggttcaataagacggtgcaggtgcccgtgtattcagagcaggagtaccaactctaccttcacgatgacgcatggactaaggcagagactgaccacctcttcgacctcagccgccgatttgatctgcgctttgtagttattcatgatcggtatgaccaccaacagttcaagaagcgttctgtagaggatttgaaagagaggtactaccacatttgtgccaagcttgccaacgtgagggctgtgccaggcacagatctcaaaataccagtatttgatgctgggcatgagagacggaggaaggagcagttggagcggctctacaaccggaccccagagcaggtggcagaggaagagtacctgctacaggagcttcgtaagattgaggcccggaaaaagagcgggaaaaacgcagccaagacctgcagaagctgattacagcagcagacaccactgcggaacagcggcgcacagaacgcaaagcccctaagaaaaagctaccccagaagaaggaggccgagaagccggctgttcctgagactgcaggcatcaagtttccagattttaagtcggcaggtgtcacacttcggagccagcggatgaagctgcccagctctgtgggtcagaagaagatcaaggcgctggagcagatgctgctggagcttggtgtggagctgagccccacccccacagaggagctggtgcacatgttcaacgagttgcggagtgacctggtgttactctacgagctcaagcaggcctgtgccaactgtgaatacgagctacagatgctgcggcaccggcacgaggccctggctcgggcaggagtgctggggggccctgccacaccagcagtgggaacagccccagcctctgctgagccagcagtgtctgaatctggacttggccttgaccccactaaggacaccatcattgatgtagtgggtgcacccctcacacccaattcgcggaaacgacgggagtctgcctccagctcatcttctgtgaagaaagccaagaaaccatgaggggccactagggttggtggtatggtgtaaatagagctgttacattaaggaaaaaaaaaaa

SEQ ID NO: 4138 - DNA, 1515 bp, Cricetulus griseus
gcgcgccgccctccgcgggcccccgggtacgactgctctccggcccccgcacccgcctcccggcctcggtcgcgcccgccgcggtcctggctgcggcgctgctctcgtcgttcgcgcgctgctctctcccggggcgcggcgacccggtggcttcggtgctcagcccctacttcggcacgaagactcgctacgaagatgtcaacccctggctgctggtcgacccggtggcgccgcggcgggacccggagctgctggcggggacctgcaccccggtgcagctggtcgccctcatccgtcacggcacccgctacccgacgaccaagcagatccgcaagctgaggcagctgcaggggctgctgcggacccggggacccggggaccgcgggggcggagtgggcgccgcgctggtggagtggccgctgtggtacgatgactggatggacgggcagctggtggagaaggggcggcaggacatgcgacagctggcgctgcgcctggccgccctcttcccagatctcttcagccgggagaactacggccgcctgcggctggtcaccagctccaagcaccgctgtgtggacagcagcgccgccttcctccaagggctgtggcaacactgccacccgggactgccaccgcccgacgtctcagatatggagtgtgaccctccaagaattaatgataaactaatgaggttcttcgatcattgtgagaaatttttaactgacgtggaaagaaatgagtcagctctttatcatgtagaagccttcaaaactggacctgaaatgcagaagattttaaacaaagttgcagctactttgcaagtgccagtaagcagtttaaatgcagacttagttcaggtggcttttttcacctgttcatttgacctggcaattaaaggtgtccattctccgtggtgtgatgtgtttgatgtagatgatgcaaaggtactggaatatttaaatgatctgaaacagtattggaaacgaagttacggctataccattaacagccgatccagctgcaccctgtttcaggatatctttctacacctggacaaagccgttgagcagaagcaaaggtctcagccgatttcttctccagtcatcctccagtttggtcatgcagagaccctcctgccgctgctctcgctcatgggctatttcaaagataaggagcccctgacagcatataattttaaggagcaagcccatcgaaagttccgaagtggtcacatcgtaccttatgcctcgaacctgatatttgtgctttaccattgtgaaaacgcaaagacccctcaagaagaattccaagtacagatgctgctgaatgaaaaagtgttacccttggctcactcacaagaaaccgttgccttgtacgaggatctgaagaaccactacaaggacattcttcagagctgtcaaaccagcaaagaatgtaacctacccaaagtgaacatcacatccgatgagctgtgaggaagcctgatctacattaggagttccaggccagcca

SEQ ID NO: 4139 - DNA, 1514 bp, Cricetulus griseus
ctaaaagaaaaattacatatcagtgaactcatgctagataagtgccctttctcacctccatctgatttagcctttaggtggcattttattaaacggcatactgttcctgtaagtccaaaatcagatgaatgggtgagcacagacttatctgagagtaaattgagggacagtcagctaaaacgaagaagcatggaagaagacataccctgtttctcacataccagtgttcagccttgtgtcacaactaccaccagtgcttcttgtagaggtggccacataactggctctatgatgaacttggtcacaaataacagcatagaagatagtgatatggattcagaggatgaaattataacactgtgtacaagctccagaaaaagaaacaagcccaggtgggaaatggatgatgaaatcctccagttggaggcacctcccaagcaccacacccagattgattatgtgcactgccttgtcccagacctccttcagatcagtaacaatccatgctactggggtgttatggataagtacgcagccgaagctctgctagaaggaaagccagagggcacctttttacttcgagactcagcacaggaagattatttattctccgttagttttagacgctatagtcgttctcttcacgccagaattgaacagtggaatcacaactttagctttgatgcccatgatccatgtgtcttccattctcctgacattactgggctcctagaacattataaggacccaagtgcctgtatgttctttgaaccacttttatccactccattaatccggactttccccttttccttgcagcatatttgcagaacagttatttgtaattgtacaacttacgatggcatcgatgcccttccaattccttctcctatgaaattgtatctgaaggaataccattataaatcaaaagttaggttactcaggattgatgtgccagagcaacaatgatggagaaaggttaagaatgtggacttgcatacatattttcatttaatatcttatttttcttgtgcctctttgaatttttcctactaaaggcagttagaatctaaaataaaacttgctctaaattttaattccagatcaatttattttcttatgatacacttgttatatatttttaagctaggtgtttggttttggtttttacctttgaatattctgtattttttttaaataatcttctgctctttgctacatgtaaaatattttgctaatctacactatcagtattcttgtatggcagaatagttattgttccattttcattttaaaattcttcggtaaagatgagtgtgataatccatccatgataatgtaattaactttttaatcgctactagaaatgttaggcaacaaaatggtttaaaaatgaaatttaaagtgttttcattttaaatattaactaaaatgagtttgattgtttttaatatggcagtggaaaaatagaatgttatgttctagaggtacatttgttctgcagtaaggcagga

SEQ ID NO: 4140 - DNA, 1514 bp, Cricetulus griseus
  modified_base (93)..(93): a, c, t, g, unknown or other
gcggcggcgatggctgcggcggagcccgggagctctgctcagcccacgccgcaggcccaggcccagccgccgccgccgccgccgcctggggcnccatcatcgcagccgcccgtggcgctcagcagccggcacgagaagagcctggggctgctcaccaccaagttcgtgtcgttgctgcaggaggcgcaggacggcgtcctggatctcaaagcggctgcagatactttggctgtgaggcaaaagcgaagaatttatgatatcaccaatgtcttagaaggaattgatctaattagaaaaaagaattgaaggaaagagaactcgaccagcagaaattgtggctacagcaaagcatcaaaaatgtgatggaagattccattaataacaggttttcctatgtaactcatgaagacatctgcaattgctttcatggtgatacactgttggccattcaggcaccttctggtacacagctcgaagtacctattccagaaatgggtcagaatggacaaaagaaataccacataaatttaaagagtcactcaggacctatccatgtgctgcttataaataaagagtccagttcatctaagccggtggtttttcctgttcccccacctgatgacctcacacagccttcctctcagtccttaacatcagtgactccacagaaatctaccatggctgctcagaacctgcctgagcagcaagtttctgaaagaagccagaatttccagcagacaccagctacagaaatatcttcaggatctattagtggagacattattgatgaactgatgtcttctgatgtgtttcctctcttacggctttctcctaccccagctgatgactacaactttaatttagatgataatgaaggagtctgtgatttgtttgatgttcagatactaaattattagattccatggaaacttgggactgttatctacctctaactataacattttagaattcttaataacctgagtatttaaaattatgaatgtaacaccattttagttcactgattctgtaaatgttctttcctaacattttattttttacttcacaaaacttgagagggctctgactgcttcaggggaaaagatgaaatgacgaacagcatgccccaccagcatgatcccatccaagtgactttcaatgcagaattcttgcagtagcttcctctcctgagaggaaagttaaagcagacttcaggtcatcatgaaacattgcccaaaagatcacttatttgtctttaccttttattgccacaaagttatttctgtgtgtccttcaaacagacattcactgccacatataaagtgaaggacatcactgttgagtgaacagattttgtgaagtgccttctgttttagcactttaattctatcagtttgttgacttctgacattctactttcctagagtataggaaagatctgtttatgttagtttgtttttaaaatgtgccaatgcctgtacattaacaagatcaaaaaataaagttgtataaaa

SEQ ID NO: 4141 - DNA, 1514 bp, Cricetulus griseus
aaacagaaagccagtgcatctatggccagcagtgccaacattgccacggaggaaaaacagactttgaccctggcaagctccctgtctgctgtcaaggaagacgcttgcactgatgtcatgagtgagaactgggtcagcctcaaatatgccagtggtgtgaatgtcaacttgcagaagaatttaaccctccccaaaaatgtactgaacaaagaggaaaactcaactgaaaaacacacttgtcaataatacttcttcagaatgtactgtgaaggagggaatacagacatgtatgtttcctaaggaaactgacattaaaacttcagaaaatgtggttgagctcaaggaacaagaagagccctgcccacagaagacttctaagagccactgaagcaatgacatcagaagctggtgtgcacaggacagcactggggagatgtgtaaagctggtgtggagatttcaggcagctcccctgcacggagagaggaggacagttactaccagaagtctgagaagaagtgtgcagacaagttttgttcggactccagctctgactgtggcagctcctcaggcagcgtgcgggccagccggggcagctggggcagctggagcagcagcagctccgactgtgacaggaaactagtggtggatgcccagcaccttctgccacccggagatggtgtttcctcacaggacttttctccggaagcttccatcctcgtgaacctctctaaacacatgtgcagccccacagatgtgagtagcctgtctcagttcacagagtcctcctctcccagtcttcctgctgcaccctcaggtgctggagaagagaaaggtctgtatccacctggaggactgtggccttcccagccagtgtgcctgaccagtagcttcaactgcccagcagagaacagtgcaccgggtgtgtcccaggggcctgcctccatccctgacagcagtttcattgattggagtgcatcctgtgaaggccagtttcccagtgtgtactgcccgctggaactgaacgattacaacgcctttccggaagaaaacatgaattacgccaatggcttcccctgcccctccaaagttcagactgacttcattggccacagcgctcactctacctggaacactccagccagcactcccactacctgggaacatgccggttttgtcaactctccgtcctacctcaccagcacccgaagtttgtctcccatgtctggactttttggttccatctgggccccacaaagcgacgtgtatgaaaattgctgccccgtgagtcccgccacagaacattcgacccacatggaaaaccaggtcatgtgcaaggagtactacccagggtttaacccatttcgtgcctacatgaacctggacatatggactagcacagcaaatcgcaatgcaaacttccccctgtccagggactccagctactgtgggaacgcgtgagggatttcagtctggagcaatgtgaataaagggccttgtgttttgattcctagcg

SEQ ID NO: 4142 - DNA, 1514 bp, Cricetulus griseus
tacttcctggataacttgattgtcttctatgtcctttcctatcttcagcctgccatggctgttatcttctcaaattttagcattataacaacagctcttctattcaggatagtgctgaggcggcatctgaactggatacagtgggcttccctcctgattctgtttttgtctatcgtcgccctcactgccagtaccaaaacttcgcagcataacttggcaggacatgggtttcatcacgattccttctttaccccatccaattcctgccttcatttttagaagagaatgctcccaaagagacaattgtacaaccagggagtggactttcaccgatgtcaactggaacaccacagccagagtttttagtcacatccgttttgggcttgggccacatgctaattatagttcagtgctttatttcttcaatggccaatatctataatgagaagatcctgaaggaggggccacagctcaccgagagctattctttcatacagaatagcaagctttatttctttagcattgtttttaatgggctgaccctggtccttcagagcagtaaccgtgaccagattcagaactgtgggttttttatggccacaatacattttcactggcccttattttcgtaactgccttccagggcctttcagtggcttttatcttgaaattcttagataacatgttccatgtcttgatggcccaggtgacaactgtcatcatcacaacagtgtctgtcctagtctttgatttcaggccctccctggaatttttcctagaagccccaacagtcttcctctccatatttatttataatgctagcaagcctcagaatctagagtgtgcgcctaggcaagaaaggatccgggatctaagtggcaatctttgggagcgttccagtggggatggagaggagctggaaagactgaccaaacccaagagtgatgactcagatgatgacgctttctaatcatccctacttggttgacagctcccacaaactgtgtgagcatttacagcatctgtgacaattgtcttttctgataaactgatatttgaaaacataatactctttacatgtatctaaccactgcataaacaactccatccaagacttagaacagccacagggtggcaggtttctgagacatgaacataagactatgaataacccagtatttgagtcaacaagacatatttgcagattgttttcctcatcttccaggttccagaaatcatgttcattgacaggtcattaaaaagtaagaaaatagagtggtttgtcccaggtcttatagctgggtggtgattgaagcaaactttaagcctgtgtgtttacaaagtcctatatttgtaaatgtgaattataagctaccatgcagtttgcacattccttcaaatttctgtgtatttatatataagaagttactatcattaaaatccacctgtctacccagaacaatataattggcaataattgcttaaaattttttaattaaaataattactaaact

SEQ ID NO: 4143 - DNA, 1514 bp, Cricetulus griseus
ctctttcacaggcttaaacatcagtgataataacacttgggtatactccaacaaaatttcagagctggaaacacacattccatgcagaagctgggacacagaactgtgtcctatctcaacaaataagtgcatgccacgctatgtccagatcccagattcccatggtatccccaggacttatgctaactttactatatcaaaagagtccagagataccacaagaacattgcatagcctaaagaggcatcggaatttcactgcaaactgtggccttcttagctcctggactagcacttggcatgttgcagatgacctcactcagaatactttagatctggagtacttgcgttttgatcataagctaaaacaaatagtaaagaaggtggattctcagcaggcttccaatgtagtcaaagtagaaatcttaaaattctgaaagaagtcatactgttccagtccacctcaataaacttaaatacaacagtactttgaaagaaggtagaaatgatatttcacttattctaaatgaatatgccgagtttaataaggttatgatgaacagcgaccaaattgtttcccaagagaaagaattaagtgtagcttctgcagaagctgtgtcccaggagacatgtcagccaagacagtcggtatcctacaaagatgtgatcacagacttgtgtgccactctgcatatcaaactaaaaggagttatgagggaggcttgtaagagccccttttctggttctacctcgttgagacagaagataagtcattctttttaagaacaaagagcattctaaagaaaggaggccattcagaaattgaacttctgaatttctgtcaagcttttcaaggggagaatgagacactattagttatcatcaaaaatgaagacataatgtcacatttgcatcaaattccttctctgctgaaactaaagcatctccccagtgtcatctttgctggggtggacagccctgaagacattctgaatgatacctaccaagaactctttcgctcaggcggctttgtggtatcagatgataacatactagaaagtttaacattagttcaactgaaggaaattgtcacaatcctggaaaaactaaatgaaaatggaagatggaagtggctgcttcactacagagaaaataaaaaactcaaggaagatgtcagggtagattcaattgcacataaaaagaacttaattctgaaatcatatcagagtgtaaaatatcattgaattgcttcattatcacaactgtgactctccatcaccaacaaaagctagaaaatttgaaatgcttgctaaacctgcaagttcaacatatcagtgccaggtttgctgtcttcctaacagacaagcctacagtatccacagaagtctttgaaaataatggaattcttgttacaaatgtaaactacttcactgaaaatatacaaaagatagcagctccatttaggagtagctattggtaataaataaaggagtataatgcaaaaaaaaaaaaaaa

SEQ ID NO: 4144 - DNA, 1514 bp, Cricetulus griseus
gcagatggatggcttgaccactaatggtgttcttgtgatgcatccacgaaatgggttcacagaagactccaagcctggaatatggagagaaatatcagtttgtgggaatgtgttcagtcttcgagaaaccagatcagctcaacagagaggaaagatggtggaaatcgaaaccaatcagctacaagatggctccttaattgacctttgtggtgcaaccttgctttggcgtactgcggaaggcctttcccacactcctactgtgaagcacttagaagctttaagacaggaaatcaatgcagcccgacctcagtgccctgtagggttcaacacactagcctttcccagtatgaagaggaaagacgtttgtccctctgtggcttggatgtgaagctggattttatcgtggacgccggccctcccacccattgccttttagcccttgtgggcacgtgtgttcagaaaagacaacggcctattggtcacagatcccacttcctcatggtactcacacttttcacgcagcctgccctcttttgtgcacatcagttggctggtgaacaaggctatatcagacttattttccaaggacctctagactaacagctgtctctaggactgcattataagtttataagctaagtgagttgggtattccaaccagttgtccacgtaagtttctctgctctggtcattgcattaagatgaagaattttttaaatatttataatagcaatttctgaaaaaaatctgagaaaatcaagcaaaggaaattttgaaagttccagacttctgaattctgagttttgaaaatatattttgaggaaaaaaaagacatagtctaatttgatgccttcgttttagtgttttgaatcaccacccatactcagtgttgagttgttctgtataactgagggtttgttggttcaaactacgttagtttacaatttgttgcaaacattgtaaaatatagcaacatgtatattaatttttttctatttatctttatcatagaaaataccttagaatgtcgtgatagagtagcatggtaatgatggtgtcacacactttgggtgtgaatggtagtttagtgggcacatagctcaaggatttgcaaagttaaggagaaagacaagagatcttccttcccccaggcctgtataagtagggaatttgatgaattagagtatttcataaaaccagattcacattaattaccattgtctaagaggtgtttgttttttaaccacattgaagttaatcggaaaatatttttttccttaatgtttctctcaagtgtagtactataacaaaagctaatgctaagagacattttatatgctcctttgaatatgcaatctaatctagatgatctatttttctcccatggtaactgatctgtttttagtgccagcgacatttggcaagtttattttttggatataaactgtggttcatctgttcactgtttctaaaaaaaaaaagaaaaaaaagaaaaaaaaaaaaaaaaaaaaaaa

SEQ ID NO: 4145 - DNA, 1513 bp, Cricetulus griseus
aggggagggggcgaggggctcagcggttcgtcgcagcttcggtccccgccgcctgcctcctaggggtctggcgagtcctggcttgccagctccctggagacttgagggcctcggaaggcctgacgggggcgctggccaccgtgctggggggcaaggggttgctggtgcagagctgtgactcggagccggctggcaagccgctgtgcccgtgcggctgcggaagaatgtctgctacgtggtgctggcggtgttcctcaacgagcaggatgaggtgctgatgatccaggaggccaagaaagagtgccggggagcatggtacctccctgcagggagaatggaatctggggagaccatcgtggaggcgatgcagcgggaggtgaaggaggagactgggctgctctgtgaaccagtgacactgctgtctgtggaggagaggggtgcctgctggatccgttttgtattccttgctcgacccacaggtggagttctcaagacttccaaggatgcagatgctgagtccctccaggctggctggtacccacgggtctccctgcccactccgcttagagcccatgatgttctgcacctggtagagctgggtgccaaattctgccaacaagccatgcaccctctcattctgcctcaagagcttccctgcagtgtggtctgccagcggctggtggccgcctttacaacagtccagtcagtatgggtgttggcgagcacagtggggactcctcacttgcccatcactggctgtggcttcggatccatggagcaaaggggtggcatcaaagtggccaccctacggctactacaggagtgtctgactctgaacaatctggcagtggagaccaaggggttgctcggactgcaacacctcggcaaaaaccatgttgacggtctctgcctgaatgttctagtgatggtggcttttcggatcccaggaattgaagatgagcccccaaagattaggggtgagaactacttttggtgggaggtattagaggaagacttgcaaaaacagcttctacacagacttcaggaatcttctgtcatccccctgagcagatagagaggtatcagcagtaggactgtggaggggataggacatgggggactcatccctcagggcagagtcattgctgagtaaaaaagtgttatttaacttgccttcttgcctaaatgtctgtgtgaagatgtggggccactgtcccatctacagccacccaagtctttcctcatgatgcacaacacacaccgatgtgatgcaggggtgtagggctcccagagtaggcaacactgttcactgaagtctcaacccacccaggctctctttagcttttctgtcctgccccgggtgggtgtgggactttgaagtgaccacacccctaataaaaacacagctcagacctgtccaggtgttggaacagtttggtctggtgaaattgtatgtgggacaataaagagctgagaatgacattatgtgtgtgtgtgtgcacacatcacagtg

SEQ ID NO: 4146 - DNA, 1513 bp, Cricetulus griseus
gagattactcagccgggtcggagtccagcgccaacgccgggccttccctgcctgaactttgtaagctgttttgtctccagacccagccctcatccactcaacacattcactgacaaactctcacgctcacaccgggtcgtctgattgtgacatcagttgcaaggggatgaccgagcgcattcacagcatcaaccttcacaacttcagcaattccgtgctcgagaccctcaacgagcagcgcaaccgtggccacttctgtgacgtgacggttcgcatccacggaagcatgctgcgcgcacaccgctgcgtgctggcagccggcagccccttcttccaagacaagctgctgctgggctacagcgacatcgaaatcccgagtgcacggaagacaccgaccaggccgagggcacagagagtgagcccaaaggtgaaagctttgattccggggtcagctcctctattggcaccgaacctgactcagtggaacaacagtttggggcaggagccacaagggagggtcaggcagaacccgcccaacctgagcaggcagcagaagcctcaactgagggcagtgcccagccaaaccagctagaaacaggtgcctcctctccagagagaagcaacgaggtggagatggacaacacagtgatcactgtcagtaacagctctgataagggtgtcctacaacagccttcagtcaacacatccattgggcagccattcgcaagtacccagctctaagcctgccaccagcccctcacaggccagcagacccagtttgtgacagtgtccccagcccggcctgtccacctttactgcacagctgccagcgccacagcccctggcatcatctgcaggccacagcacagccagtgggcaaggcgaaaaaaagccttatgagtgtactctctgcaacaagactttcacagccaaacagaactatgtcaagcacatgttcgtccatacaggtgagaagccccaccaatgcagcatctgttggcgctcccttctctttgaaggattaccttatcaagcacatggtaacacacacaggagtgagagcctaccagtgtagcatctgcaacaagcgcttcacccagaagagctccctcaatgtgcacatgcgcctgcaccgcggggagaaatcctatgagtgctatatctgcaaaaagaagttctctcacaagaccctgctggagcgacacgtggctctgcacagtgccagcaacgggacccctcccgcaggcacgcccccaggtgcccgcgccggcccaccaggcgtggtggcctgcactgaggggaccacttacgtctgctccgtctgcccagcaaagtttgaccaaatggagcagttcaacgaccacatgaggatgcatgtgtctgacggataagtagtacctttctctctttcttacgaaccaaacaaaacaaaacaaaaaacaaaacaaaaacaaaaaagcaaaaacaaaaaaccaacagaaaacaaaaacaaaacaaaaaaaaaaaaaaaaaa

SEQ ID NO: 4147 - DNA, 1513 bp, Cricetulus griseus
gttctgcgcgggtgagctgggagagccggtggcggcgctgcactcggtggctgcggctccacgtgctcccggcggccggttaagaccgttggcggagtctgcagagagggcaagagttcaaacctgtctcaggtagaatatttagtcatttaaccaaaaatggtattttttacatgcaatgcatgtggtgaatcagtgaagaaaatacaggtggaaaagcacgtatctgtctgcagaaactgtgaatgtctttcttgcattgactgtgggaaagatttctggggtgatgactataaaagccacgtgaagtgcatcagtgaaaatcagaagtatggaggcaaagactatgaagccaagacacataaaggtgatgcaaagcagcaggcatggattcagaaaattaatgaattaataaagaaacccaatgtcagccctaaggttggagaacttttgcagcaaatcagtgcttttgacaatgttcccagaaaaaaggcaaaatttcagaactggatgaggaacagcctgaaagtgcacagtgatgctattctggagcaggtgtggaacatcttctctgaagcgtccagcagtgagcaagatcagcagccacccagccatgtggctaagtcatctgcagagatccccactaaggttccatctgcccaaacaaatggcaccacagaagaacaagtagaggcaaagaagaataaaagagaaaggaaggaagaacgacagaagaataggaagaaagagaaaaaagagctgaaatcagaaaacccaggaaaacctgaaggtccaaaagacgaagaagcgcaaaaagggccaggaggctggacatgaggctggtggggaggagaccaccaaggccaacagcccaccagaaaagaaaagggcccggggtgggcaggcttcagaagaggatgcagacagaaatgggggccctggggaagatgctgatgaggggcagaccaagacaggggcaggaaaacagaagcggcgaaaatactcagaagttgagtctgataacaaaaagaaaaagatgaagttgtcaggacagcctgaggagggagagactgaggaccatgaggttccagcgaaaggtaaattcaactggaaggggaccattaaagccgttctgaaacaggctccagacaatgagatatccatcaaaaagttaaagaaaaaggttatagctcagtaccacgcagtgacaagcgaccatcacatgtcagaggaggagctcctggccatcttcaacaagaaaattagcaagaaccccacctttaaggtgctgaaggacagagtcaagcttctgaagtgaatgcaccgtcacttcacacacttttgactgcttccctgtactgtttgtaaaatgtgtaatgaattataacaacccgaatttttgctttctgaaactaattttaagttaaggaaaaaatatattttggtaaaaacgttaagaaaaaaaataaaatatattcttgtacgaaattaaaaaaaaaaaaaaaaaaaaaaa

SEQ ID NO: 4148 - DNA, 1513 bp, Cricetulus griseus
cctccgcgatgcatcggctgcaggtggtgctgggccacctggccggccggcccgagtcgagctccgcgctgcaagccgcgccctgctccgcgggcttcccgcaggcctcggcctccgacgtggtggtggtgcacggacggcgcacccccatcggccgtgcgggccgcggcggcttcaaggacaccaccccggacgagcttctgtcggctgtgttgaccgcggttctccaggacgtgaggctcaagcctgaggcgctgggggacatctccgtgggtaatgtacttcagccaggagctggggccatcatggcacgcatcgcccaatttctgagtgacattccagagactgtccctttgtctaccatcaatagacagtgttcctcagggctgcaggcagtggccaacattgctggtggcatcagaaatgggtcttatgacattggcatggcctgtggggtggagtccatgtccctgtctgagagagggaaccctgggaatgtttcttctcgcctgctggagaatgagaaggccagagattgcctgattcctatggggataacctcagagaacgtggctgagcagtttggcatttcacggcagaagcaggatgccttcgctctggcctcccagcagaaggcagcgagagcccagagcaggggctgtttccgagctgagatcgttcctgtgacaaccaccatccttgatgacaagggcaacagaaaactgtcactgtgtcccaggatgagggtgtccgccccagcaccaccatggagggcctggccaagctgaagcctgccttcaaggatggaggctctaccacagctggaaactccagtcaggtgagtgatggagcagctgccgtcctgctggcccggagatccaaggctgaagaattgggcctgcccatcctcggggtcctgaggtcctatgcagtggtcggtgtccctcctgacatcatgggcatcggtcctgcctatgccatccctgcagccttgcagaaagcaggcctgactgtgaatgacatagacatctttgagatcaatgaggcctttgcaagtcaggccgtctactgtgtggagaagctgggaatccctgcagagaaagtgaaccccctggggggtgcaatagccctgggccaccccctgggctgcaccggggcaaggcaggtcgtcacactgctcaatgaactaaagcgccgtgggaaacgggcttatggagtggtgtccatgtgcatcgggacgggcatgggagccgctgctgtctttgaataccctgggaactgaagccctggctgcaggcactgcccagagagtccaacagtgacggaacagagagggcctctacggaagcatgggacacccagcactggaggggtgtatcacagcactttaatttagaaaatgtgatcactggtggcgcaaagatgtgggactgtcccgtctagtaccccaagctgtgctgaagtgagcatgggacaccatgcgtactctgagtcattgtgtacctctgaggga

SEQ ID NO: 4149 - DNA, 1513 bp, Cricetulus griseus
ctggggagctggttcaaggtcacgattccctgtggcagaaagtctgacaagacacagctaatgaaatcagtccacagcctctgcagcatgcccttcaccgcagtggatttccattgtgacaaacaccggatccggttctttgtccaggatgttagcactgcctgtgcattgaaggatgtcagctataagatgtatgatgaggacagtcagaagatccctgtttttgtcaatccctcggatgtaccctactctgtgctgaataggttcacgggagaacaaatggagcagctaaagctggccctgaggaaaagatacgatgtttcccagcgtgctctgaacctccaaaagctccactctgacccagacttggtgcaccatggcatagacatgattctgacccgaagaagctgcatggctgctacccttcagatcatccaagaggatttccctgagctgctctccttgaacttgagcaacaacaaactgatccggttagatagcctgtttgatgtggtggagaaagcaccccaagtcaagattctgaacctctccacaaaccagctaagaacagcgtgggagttggagaagatgaaggggctgaagctaaaagagctgtggctagaagggaaccccatgtgcagcaccttctcagacaattcggcctatgtaagggctgtcttggactgtttcccagaattgactcacctggatggcaggaagttaccactttcaagtgtaatggacattgaagaacctcagttaatgaagccctgcaaggaaagctttaagggttctgaggccataaagaatcaactacagcaattcctgcaggagtattacttgatctatgactatggagagagacagggtctcctcagagtttaccatgaccaggcctgcttctccctgacaattcccttcaaccccagtgatccagatctgagtggcttgtgtgagtacttcaaggatgacatagacatgaagaatcccaaggagttctaccttcagaggcagttgctgaagtacacaaaacaagacattgtggactttctcagggcactacccaaaaccctgcatgtcttgagctcttttcaggtggacatgtgttttcagacggatacgatgctctgcttctctgttagtggattattcaaggaagtggaaggcagctctcagggatatattcgtggcttcatgcgcaccttcattgctacccttgacagttcaaacctgtgcattgtgaatgaccaactttttctgaggaatccaagccctgatgagatccagggtgcctttgccgtacccttgtctacatcatgctccaccttcaagcccgtcctctctcaagagcagcaaaggatggtgtgggatttctccaaccagtcggggatgaaactcgagtggtctcagaagtgccttgaggacaacaagtgggactacaccaaagctgctgaggtcttcactatgctccagactgagagcaagatcccaaaggaattcttcagacagatga

SEQ ID NO: 4150 - DNA, 1513 bp, Cricetulus griseus
ccggtcaccggttcgtggacgggcctcgggcgagcaatggcggcggcacagccgagcagaccccgggggccgccgagcggctgggcgagccgtcggggtcaggtgctcgcagcgctcttcctgctgctggcgtccgtggcgggatccgaggccagggtgcaagacgacttcagtctggtgcagccgctggtgaccatggagcagctgctgtgggtgagcgggaggcagatcggctcggtggacactttccgcatcccgctcatcaccgccacccctcggggcacgctcctcgccttcgccgaggccaggaaaacgtctgcctccgatgagggggccaagttcatcgccatgaggaggtccacggaccagggtagtacatggtcctcgacagccttcatcgtagacgatggggaggcctccgacgggctgaacctgggggccgtggtgaacgacgtggacacaggggtggtgttccttatctataccctgtgtgctcacaaggtcaactgccaggtggcctccaccatgttggtgtggagtaaagacgatggcatttcctggagcccaccccggaatctctccgtggacattggcacagaaatgtttgcccctggaccaggctctggcattcagaaacagcgggagcctcggaagggccggctcattgtgtgtggccatgggacgctggaacgagatggagtcttttgtctcctcagtgatgaccacggtgcctcgtggcactacgggactggagtgagcggcattcccttcggccagcccaaacacgagcacgatttcaaccccgacgagtgccagccctacgagcttccagatggctctgtcatcatcaatgcccggaaccagaacaactaccattgccgctgcaggatcgtcctccgcagctatgatgcctgcgataccctcaggccccgggatgtaaccttcgaccccgagctggtggaccctgtggtagcagcaggagcattagccaccagctcaggcattgtcttcttctccaatccagcccatcctgagttccgagtgaacctgaccctgcgctggagcttcagcaacggtacgtcctggcagaaggagagagtccaggtgtggccgggacccagcggctactcgtccctgactgccctggaaaacagcacggagggagagcagcagcccccgcagctgttcgttctgtacgagaagggcctgaaccagtacaccgagagcatctccatggtgaaaatcagtgtctacggcacgctctgagccccaccggcgcccaaggacactacgcgtcatctgacctcacggctctctcgaggggctgcagaaagggcctgaagcacagctcttcctcgggatgctagccttttgcagagcagtttctctttaacagggaagccactccgttaggacctaacagctgcccagctgcctctcccagacaggaagttcctccctcaccaagagcacttttgcattaatttaaaaaaaaaaaaaaaaaagttattaa

SEQ ID NO: 4151 - DNA, 1512 bp, Cricetulus griseus
  modified_base (13)..(13): a, c, t, g, unknown or other
gagaaatacaagnttcctgttccactcccagaaaggcaaagttctggatgatatggacggaaaccaagtggatactgggcaagatgattggctctggaggatttggactgatatacttagctttctccacaaataaaccaaacaaagaatgcaagacatgtaataaaagtggaatatcaagagaatggcccattattttcagaacttaaattttatcagagagctgcaaaaaagaatatattagaaagtggatagaaagaaaaacttgattacttaggagttcctctattttacggatttggtctgactgacttcaaaggaagaagctacaggttcatggtaatggaaagactgggagtagatttgcagcagaagctctcagaccagaagggcacttttcaaaagtcgactgtcctgcaacttggaatcagggtgctggacatactggaatatatacatgaaaatgaatatgttcatggtgatataaaagcggcaaatctactgttgggttacataaatccagatcaggtttatcttgcagactatggactttcctacagatactgtcccaatgggaaccataaacagtatcaggaaaatcccaggaagggccataatggaacgatagagtttacaagtttggatgcccacaaaggagtagccccttccagaagaagcgacgttgagatccttggttactgcatgctgcgctggctatgtgggaagctgccttgggacacaaaccttgaggaccctttggctgtccagactgctaaaaccaatctgctggatgagctcccagaatcagtgctttcgtgggctcctcctggaagtagttgctgtgaactcgcccagttcttggtatgtgtccataatttagcttatgatgaaaagccagactatcagaagctcaagaaaattctgaatcccaatggggtacctttaggaccactggaattttccactaaagcacagagtgtccgtgtctgtactccaacccttcaaaaagtggattcaccaaacgttacaatgaaagcagccattgagttgccagataagttcccaaagaaagcctgcagagggacaagtgcaacgtggagaaaggagcatgaagagggccagccccgagctctgctgagcagagcagcagcacaggaaaactcaaggagaagaaatatgtatgagtattcagattttcagagtgacatgcacagtcttcaacagacacccagctatatgagtttccaaggttcgtattgtaagtcctatccagatcccaccagtagagatacaatcagaaagccaaggtatccagctcagtacagatatatttctaccagtgatgtgggtgtcacagacttgggaagtcctccaagactttggcctgcagctttcccagtgacactgagtgaagacatgaaggcagatgtgtataactatggactcactatattgtgcctgttggtactagtttgtctcgctttgtattttctctgaaatcatcaaataaat

SEQ ID NO: 4152 - DNA, 1512 bp, Cricetulus griseus
ggatgagaaaccggcgtctgcggagcgggtattcaggctagaaggaagtagcttttaggtccggcagcactgcagaaatggcagagtttgggatctctcctggccagcttgtggcagtgttctgggacaagtcatctcctgaggaggccctaaaaaaactggtagatagtcttcaagggttaactggcagtgagggccaaatattcacggaaaacatcagccaactgttgcagtctgcccataaagaatccagcttcgatgttattctgtcgggtgtagtcccaggaagcgcctctctgcacaatgctgaggttctggctgagatggccagaatccttcggccagggggatgtctttttctgaaggaaccagtggagacagctgtagttaatgatgacaaaatgaagacggcctctaaactgtgttcggccctgactctttctggccttgtggaagtaaaagagttgcagcgggagtccttaagccccgaggaggtgcaatctgtccaggaacacctgggctaccacagtgacagcctgctctcagttcgtatcaccggcaagaagcctaactttgaagtgggctcttccagccaacttaagattttcagcaacaagaagtcttcagtgaagcctgttgtggatcctgctgctgccaagctctggaccctctcagccaatgacatggaggatgacagcatggatctcattgactcagatgaactgctagatccagaagatttgaagaagcccgatccagcctccctgaaggctccttcatgtggggaagggaaaaagaggaaggcctgtaagaactgcacttgtggccttgcagaagaactggaaagagagaagtcaaaggagcagggtactcagcccaagtctgcctgtggaaattgctacctgggggatgctttccgctgcgccaactgcccctaccttgggatgccagccttcaagcctggagaacaggtgctcctgagcaatagcaatcttcaggatgcctaggaggaacctcaagcacacacacctgctcctccagccaactccttccctcagcccaccactgcctcctcccacctctggattgagggaagctgctgtggtgcagtggtgtgtggtgctgctgtgtcttgaaagaccaaggtgtgaaggggccttcctcttatagtgttaggagaaggggttgtacataagggtccccttctgatgtgacagtgctgacctttccacccttgagtctagacctggaatattaatgctgtacaagctccaggctctgctcagtgatgctgccacctactggtcttcctcagtgtgtaattcttggagccgtggtcagctgtgaaagggcctcgggcaccaaagaagtcactccccagttgctgtgatccatcttgtgtccctctgcccttcccacctcatcccattttgctgtagtgttgtatctgtgtcctgttgtcatttctgttaaacaatagatattaaactttcatgtttctatgtatccctt

SEQ ID NO: 4153 - DNA, 1511 bp, Cricetulus griseus
atcatccggtgtcctgatggcatatctattcctgagctgagagaagcatgcgattacctttgtatctcttttgaatacagtacaattaaatgtagagatctcagtgcccttatgcatgaattatcaaatgatggtgctcgtagacaatttgaattttatctggaagaaatgatcctccctctcatggtagcaagtgcccagagtggggaacgagagtgccatatagtggtgcttacagatgatgatgtagttgattgggatgaggagtatccaccacagatgggagaggaatattcaactaaattatttatagcaaaattatatagatttttcaagtacattgaaaacagagatgtggccaaatcagttttgaaggagaggggtcttaagaagattagattgggaatagaaggctatcctacctacaaagaaaaagtaaagaaaaggccagggggccgcccagaagtcatttacaactatgtccaaagaccctttattcgaatgtcctgggagaaggaggaaggaaagagtcggcatgtagactttcagtgtgtaaagagtaaatctatcaccaacctggcagcagctgctgcagacattccccaggaccagctggtagtcatgcaccctactccacaggtggatgagctggatatcctccccagccaccccgcctcgggcagtaatgaccttgatcctgatgcacagaatccaatgctgtgatgctgatgttcctgaaaccatagcatgctactcttcacagtgacgttgtactcctcattctgcactgcgaggccacttttcttcattgtgagatgcacatgtttaggatactgcagtgtaggcttttttaaagaccaaaggtagctgaatggttttttaatgagtacaactttagcatcctggttccagttatataaatgtatttgtttaccagtaggtttgtgaaattggttctttgtacagggacagccctttttcacacatctaatcttctcagaagtggtgggaattggcagctggggtactttgaatgcaaattgatacttatcatgccccaggtaaaatgcagaatattaagagttgcactttatagatggtggttaaatggagctgttgaagccattttagagttgtgatgcacagtataacattaagtgcttctatcagagtattcctcagtacagtatgtatagttggcccacaagaagcaaaaacatgtttatcttgagtttatttgaatgattaggatgagatttgatgttcataatgttggttcactcatctccagagccctgtaactcttctagagtgagtcacatgcagggagagtgaacgtcaagaggtggtttactgtccagtctgccttacccttaatctgttcagatatttatttactaatgtcttttttcttaagagttatgggataggaaaatgaattgtttgctcttcatttactaaatgattgtaaactcgagtttttcatcaaaataaaattccattagttttaa

SEQ ID NO: 4154 - DNA, 1511 bp, Cricetulus griseus
gtgcaataccagcatgtctgtgtctactgatggtgccgaagcacctcacagattccagcttcggaacaagagactctggttagaccaaaaccattgtttctgaagttgttaaagtctgtcggtgcacaaaaagatacctatactatgaaagagattatattttatcttggccagtatattatgactaaacgattatatgatgagaagcagcaacatattgtgtattgttcaaatgatcttttaggagatttgtttggagtgccaagcttctctgtgaaagaccacaggaaaatacatataatgatctacagaaacttggtggtcgtaagtcagcaagagcagcagcagcgagtccacagagcccccctcaaatcaggatcttgacgatggtgtaagtgaacactcaggtgactggttggatcaggattcggtttccgatcaattcagtgtagaatttgaagttgagtctcttgactcagaagattacagccagagtgaaggagggcaggagctctcagatgaggatgatgaggtctatcgagtcacagtgtatcaatcaggagaaagtgatgtagactcctttgagggagatcctgaaatctcattagctgactattggaaatgtacctcctgcaatgaaatgaatcctccccttccacctcactgcaacagatgttggacccttcgtgagaattggcttccggaagataaagggaaggataaaggggacatgcctgaagaagccaaactggaagaaggcttagatgtgcctgatgggaaaaaagctacagcgaatgattgtaaggagtcctgcactgaggaaagtgatgataaggaaatatatacctcccagtcacaagagagtgaggactattcccagccgtcaacgtccagcagcattgtttatagcagccaggaagatgtcaaagagtgggagaaggaagagacaccagacaaagaagagagtgtggaatctggcttctctcttaatgccattgaaccatgtgtgatttgccaagggcggcctaaaaatggttgcattgttcatggcaaaactggacatctcatgtcatgtttcccatgtgcaaagaagctaaaaaaaaggaataagccctgcccagtgtgcagacaaccaattcaaatgattgtgctaacttattttagctagctgacctgcccataaaaatagaattctatatttctaactatatataactccccagattaggttttatttttatctgcatacactaaaacgagaaaagtgtctcagtccatgtaaaatttgttgtacaatttatcaagtatttgatttcctttttttccttctacaaagaacatttaatttatttagtacctctcatgtaaggagttaaaaaactgtgtgaaggattaaatatttaagttattgaaattctgaaagcaagcgcgcacgcacgcgcgcgcgtgcgcacacacacacacacacacacacacacacacacacacacacacacacacacacttttaaa

SEQ ID NO: 4155 - DNA, 1511 bp, Cricetulus griseus
cacgtgctcccactctgtccgggttctggtaactgcgggctcggtctcgtgtgcgggcctcagtgggccatggcggtggctgcggcggaaacgcgcgtgttcctggaagtgcggagacggctgcagagcgcgctgctaatcctgggtgagccagacgaaggagggatgcgcctggacgtttctataactcccacctcactcttgatgcggacacctgatggctgcaccgagacccagcttccagcagaggtcaggcttgtgccttcctcgtgccgaggcttgcagtacatccgaggagatgggttgcatctgcgtctgcaggcccacactgaatcaggcccacaaccgatttcagtgtttaaccaaagcttgcaagctcaaggacgctgcacattttattgccagtcctgcggtgacgtcacgataaaggacaggaagctcctcagggtgctcccactgccgagtgagaactggggagctctcgttggagagtggtgctgtcatcctgacccctttgctaataagcctctacatccacgagaaaatgactgttttattggggacactttcttcttagtgaatttgagaagtgatttggagcaggaaccaaaagcaaataccaaagtcatttgtaagcgttgcaaggtagtgttgggagagactgtatcatcagaaacaactaaattttacatgacagagataattattcagccatctgagggaagttttcctaacataccaaggtctcagtttgttcagagtatcattgcccagtgcctggtggaactctcctctgcgagaagcacttttagattcacaattcaaggtcaggatggcaaagtgtacatcttgctctggattttaaactcagacagtttggtgattgaaccacttcgaaattccagttgtgtcaaaaagttcccgctgttggaaaatacatcggaagctgactccagctctgcttggaacgcagtcaaagtcctctaccagccctgcatcaaaaacaggaatgaagagcttgctcgctcatgggaaagtgacatcagtgtccaccctttgactctgccctctgcgacctgcctggagctgctgctgatactgtcgaggagcaatgcatcactgcctctgtccctttgccagatgaattcctttcaggtggcctttttgaagatatagctgttgaagtctgggttaagtatagaagttgcacctctacttcccacagagaggaatattcaaatctgtgctgtgtcagcaccacctggaagcatattagctaatggaaacccatctgtcctgtgtgaacacagcgaggaacttcactggggagctgaatgttaacggctgtaaatcccaggaaataaactttttaagagctcccggtttgtttaaaatactaatttttaaaaactgaaatgtagaagttttcatatcttattcaaagaaggtgcttgttggtgtttgttgaatgagtgattatccaatttaaagttttcctgagggtgtaaaac

SEQ ID NO: 4156 - DNA, 1511 bp, Cricetulus griseus
gcttccaccatggcggagatggctgagctttgcgagctgtacgaagaaagcaacgagctgatggacgagctgcccggcgagggcgatatggaggtaggccgcggggcccgcgggcccgcggaggagggccccatggaggaggaggccgcgccgttagccgcccgcgcccagcgcggcctgttccccgaggctggcgcagatctggagggcgacgagtttgatgactgggaggacgactacgacttcccagaagaggagcgctggagcggcgcgatgcacagggtgtctgccgcgctggaggaagccaacaaggtgttcctgagaacggcgcgagccggagatgccctggatggcgggtttcaggcgcgctgcgagaagagccctttcgaccagctcgcctttatcgaagagctgttttcgctgatggttgtcaatcgactgaccgaagagctcggttgtgatgagatcattgatcgagagtaaatgctgacgaaagaggaggaaactacctgagagggagagattcaacattctgctgtttttgggttcattccaactagttttgtgcaaaaaacaaaaacacggaatagaagacaaaacagtgagtgaccgtgcagtcttggaaaaggagaatcgaggaaggaggaaaaagctctggttcagactgttgaacgagatgatttttccctgcgttggagaagaacttggtcgtgttaagcttgtaaaaatggttttgcaagagaaaaatcgtgactgccaatacaagaatctaattagagaatgaagaagaatacatccacaagatatctttgattcgaactgagagcctgttgagaaaactttccaaattctgttttgtggtttatataaatcagttatcaaaagctaaatttgagatttaagattgagtattcatcgacccccccaaagaaaaatcaaagtgaatatgtgtgtataagtgtagatgtgtgttaccatgtgtactattatcttaaaatgtgttacaaaagctgggatttgactgcacatgtatcttcatgatttataaagctactgtgatctgtaatttggaaaaaccccttgtgatgatttttaaagtaaaaaaagccaatcaggatatctttttaaagttttaagttcatgcattaaaatttatgggaaagcccaaagacaaactttctaataaatacccttttatactagggaacttttactcactgttttttaccttgacagatggtaagactatagctgaacttcatattgtaagaactgtttgtgaaaaattgtcaagtaaaaggaaaccctacctgtacctataaaagattatatgagctattatgctgtcaaactttggaggttttaaatctgctcagaagtccacctggatacctgatactcatattctctctctctctctctcctcctctctccccgtccctccttctgatcatgcttgttagtccctatgcaccagcattggcgataataaattttcctgttctgtagta

SEQ ID NO: 4157 - DNA, 1511 bp, Cricetulus griseus
cgggatctcgggtctctttagcgccatctgctcgcggcgccgcctcccgctcctcccgccgccgccgccgccgccgccctgagtcactgcctgcgcagctccggccgcccggctccgcgtctgagcctcctggaacgataattggagttcttacaagatggcagacattgacaacaaagaacagtctgaacttgatcaagatttggatgacgttgaagaagtagaagaagaagaaatgggtgaagaaacaaaaatcaaagcgcgtcagctgactgttcagatgatgcaaaatcctcagattcttgcagcccttcaggaaagactggatggtctggtagacacaccaacaggatacattgaaagcctgcctaaagtagtcaaaagacgggtgaacgccctcaaaaaccttcaagttaaatgtgcacagatagaagccaagttctacgaggaagttcatgatcttgaaaggaaatacgctgttctctatcagcctttatttgataagcgatttgagatcattaatgcaatttatgaacctacagaagaagaatgtgaatggaaaccagatgaggaggaagaaatttcggaggaactgaaagaaaaggccaagattgaagacgagaaaaaggatgaagaaaaagaagaccctaaaggaattcctgaattttggttgacagtttttaagaatgttgatttgctcagtgatatggttcaggaacatgatgaacctattctgaagcacttgaaagatatcaaagtgaagttctcagatgctggccaacctatgagttttatcttagaatttcactttgaacccaatgaatatttcactaatgaagtgttaacaaagacgtacaggatgaggtcagaaccagatgattctgatcccttctcttttgatggaccagaaattatgggttgtacagggtgccagatagattggaaaaaaggaaagaatgtcactttgaaaaccattaaaaagaagcagaaacacaagggacgtgggacagttcgtactgtgactaaaacagtttccaatgattctttctttaatttttttgcccctcctgaagttcctgagaacggagatctggatgatgatgctgaagccatactggctgcagactttgaaattggtcactttttacgggagcggataatcccaagatcagtgctgtactttactggagaggctattgaggatgatgacgatgattatgatgaagaaggtgaagaagctgatgaggaaggggaagaagaaggagatgaggaaaatgatcctgactatgaccccaagaaggatcagaacccagcagagtgcaagcagcagtgaagcaggatgtctgtggccttgaggacggcctaccctggcctaccttctgctttcctggaaaagatggaattacatcatttgaacctattttgagtttttctcttgtttgtttgcctaattttgttttatagcctaaaataaaaacataatacagttttagccctcaaaaaaaaaaaaa

SEQ ID NO: 4158 - DNA, 1511 bp, Cricetulus griseus
  modified_base (141)..(141): a, c, t, g, unknown or other
gaagtgttccctctcaaacagaaactggtggcgtgggacctggcttcacattcactttccgcagccccgaggaagtcttccgggagttcttcgggagtggagacccttttttcagagctctttgatgaattgggccccttntcggagcttcagaaccggggttctcgacactccggccctttcttccaccttctcttcctcctttcctggccagtctgatttctcctcgtcgtctttctccttcagtcccggggctggtgcttttcgttctgtctctacagctactacctttgtccaaggacaccgcatcaccacacgcagaatcatggagaatgggcaggagcgggtagaggtggaagaggacggacagctgaagtcagtcacaatcaatggtgtaccagatgacctggcactagccttggagctgagccgtcgtgagcagcaaccttcagtctccttcaggttggggagcacacaggtccagccgacgactcctgtcttccgtccccttggcagcagcccttctgaggatgaggacctacagcttgccatggcctacagcctgtcagagatggaagaatctgggcagaagccagcagatgtgttctgagctggatatcctggatacagagttgctgcagttccaacaggacagcgccctcccccatgtgctaggagggaatactctatctctctccctcactttagctgagtgtagggctggggcctgggtggtgggtggggactgagtgggaggcacccatagtcttagcctctgaactctctcccctgggtgcttagtgctgtgtcttgcagattacaagtcccagagtgcaatgcaccctggcctcgtttctgatagctcttatcccaggggaagcggtgctctattataaagctgggcttcttgggatatgtagttccaaacctgacaagtctgtcactctctgactggggagatcttgtctttcatcttgtccctgggcaggggtggtgagaattgtgagtgatggagaaaagaccagaactttggttcctctaatacttcttgctagacccaggttggagtgagcatacccaagtcccgtagcatctgagagggcgtttcccttgggcagcctggggttcaaggactaagctagtggatggagtaggtatggcatggtcctggaaggctggtggctgtgggctggcagaacatgggagagaaggctgccttggctggagtgtgtatggcgaagactggcatgccaagggagtgttggacatattgcttgaatggctttctttggcctctgaccttgctgcccattctttccatcatccttcaccctccatgagccacctgtctgctggggagtccaaggccaagggggggattggtgggacaggctgtggccagcttctgtaaccctgagtctctgagacccaccaaagctagatgaactgagctcagactcaagggaaaatggaagccaataaagttgtagttttgagaaaaaaaaaaaaaa

SEQ ID NO: 4159 - DNA, 1510 bp, Cricetulus griseus
tccagacaagaataaaagatgaaaatgcagaaactcagtttagacaattggtggccatttatgaagttttaaaggatgatgaaagaaggcagaggtatgatgatattctgatcaatggacttccagattggcgacagccagtattctactacaggcgagtgagaaaaatgagcgatactgagctggcattactcctgttcattattctcacagtgggtcattatgctgtggtttggtcaatctacctggaaaaacaactggatgagctgcttggtagaaaaaagagagaaaagaagaagaagacaggaagcaagagtatggatgccgcaaaacttggtgcttctgaaaaaatgaaagattgctagtaaaaccacaatggcatgatttgcttccatgcaaactgggaatttggttttgccttacactaaaagcattgcctcatctaatccaggatgctgggcagttttatgcaaaaatacaaggagacaaaattgaaggaaaaagaagatgccctggctagaattgaaattgaaacacttcaaaaaacagaagaaagttaaagttaaaaaaacgaaaccagaatttcctgtatatatgcctttagaaaatacgtatattcagtcttatgatcatgggacttctattgaaaaaatagagaagcaaattgacgattggctggaaaccaggagcagaacacaagaaaaaaacggcacctgaatggacagaagaggacctcaaccagctgacaagaactatggttaagttcccaggagggaccccaggtcgatgggaaaagattgcccatgaattgggtcgatctgtgacagatgtgacgaccaaagccaaggaactgaaggactcagttacctgctccccaggaatggtcaggctctcggaacttaagtcaaatgttcagaattccaggccagtcaagacagccacaaccttgccagatgatatcatcacccagcgggaggactcggcaggggccatggaggatgagagacaagagactgctgagggtgaggaggagacagtggccatagaagcccggcttcggaggcgaaagtcagccagaatggctgaggcagtgaccagagtggagccagagaagaaaccaagaggaaagaggcaaaaagactttgatatttcagaacaaaatgaatccagtgatgaagagaaccagagaaaagaaagaactcgagctacagaggaggcctggactcagagtcagcagaaacttctagaactggcactacagcagtaccccaaaggagcctctgaccgctgggacaaaatagccaaatgtgtcccatctaagagcaaggaagactgtattgctagatacaagctgctggttgaactggtccaaaagaaaaagcaagctaaaagctgaagctgctggaagatgatgatctatcatcatcattttccaaagggagtaactttagaaatctcatgcagaaacttgcattttgtaccttcagtatttctaacgtcatgtgacctt

SEQ ID NO: 4160 - DNA, 1510 bp, Cricetulus griseus
gcggcggcggaggcggcgagggcgcggagggctaattggctgccggctgcagccaaggaggcttgagtgtttggagaaccagctgagggggaccccacggcggggtcggggagacccagggctgcagctatggaggaccagagggaggcactaagaaaaatcatcaccaccctggctgtgaagaacgaggagacgcagaccttcatctactccctgaagcagatgctgctgaatgtggaggcaaaactcagccaaagtgcaggaggacctggaagctgagttccagtccctcatgtcggtgctggaagagctgaaggaatccatgctgatgaagatcaaacaggacagggccagccgcacctatgagctgcagaatcaactagccgcctgcactcgggccctggagagctctgaggagctcctggagacagccaaccagaccctgcaggcagcagacagcgaggacttccctcaggccgccaagcaaatcaaagatggtgtgaccatggcccctgccttccgattgtcactcaaagccaaggtcagcgacaatatgagccacctcatggtggactttgcacaggaacggcaaatgctgcagactctcaagttcctgcctgtgccaagtgcccccatcattgacctagccgagtccctggtggccgataactgtgtgacgttggtgtggcgcatgcctgatgaggacagcaagattgaccactacgtgctggagtaccgcaggaccaatttcgaggggccaccccgcctcaaggaggaccacccctggatggttgtcgagggcatccggcacactgagcacaccttgacaggtctcaaatttgacatgaagtacatgaacttccgtgtgaaggcctgtaacaaggcggtagctggtgaattctctgagccagtgaccttggggacgggaccgcttcacagctgagtcttacacggtgctgggggacacgctgattgacggtggggagcattattgggaggtgcgctttgaaccagacagcaaggcttttggcctgggtgtagcctaccgtagcctgggccgttttgagcagctgggcaagacagctgcatcctggtgtctgcatgccaacaactggctgcaggccagcttcactgccaagcatgccaacaaggtcaaagtactggacagccctgtgcctgattgcctgggtgtacactgcgacttccaccaaggcctcctgtctttctacaatgcccgcaccaaacagctcctgcataccttcaaggccaagttcacacagcccctgcttccagccttcacagtgtggtgtggaagcttccaggtgacaacaggcctgcaggtgcccagtgctgtgcgctgcctacagaagcggggtaggtgccaccagcagttccaataccagcctcacctaggccggggccgatctgccagcccggggtggcttcagccggcatctccacctacctgctgcttggagccttaactctggaagggagggtcggggtcccc

SEQ ID NO: 4161 - DNA, 1510 bp, Cricetulus griseus
ccgggctggcccgggctggccgcggccatgaacttctcggagtcgttcaagctttcgggcctgctttgcaggttctccccggacggcaagtacctggcttcctgtgtccagtaccggctagtggtccgggatgtgaagacccttcagatccttcagctgtatacatgcctggaccagatccagcacatagaatggtctgcagactccctctttatcctgtgtgccatgtacagacggggccttgtgcaggtatggtcactggagcagccagaatggcactgcaaaatcgacgagggctctgcagggctggttgcttcctgttggagcccggatggccgtcacattctgaatacaactgaattccatcttcgaataaccgtctggtccctgtgcacaaaatctgtatcttacatcaagtatcccaaagcctgtcagcagggaataactttcaccagggatggccgctacctggccttggcagagaggcgggactgcagggactacgtgagcatcttcgtgtgcagtgactggcagctcctccggcactttgacaccgacacccaggacctcacagggatcgagtgggccccgaatggctgtgtgctggcagcgtgggacagctgcttggagtacaaggtcctgctgtactccttggacggccgcctgctctcagcatactgcgcctatgagtggtccctgggcatcaagtctgtggcttggagtcctagcagtcagttcctggccattgggagctacgacggaaaggtgcgcctccttaatcacgtgacctggaagatgatcaccgagtttgggcaccctgcagccattaataatcccaaggcagttgtgtataaggaagctgagaagatcccagagctggggctgggccacctgtccttcccaccaccccgagcaatggctggtgccctctctacctcagagagcaaatatgagatcgcctctgggccagtttccttgcagactctgaagccggtagctgacagagcgaaccctaagatgggtgtggggatgctggctttcagttctgacagctacttcctggcaacaagaaacgacaatgtccctaatgctgtctggatctgggacattcagaagctgaagctgtttgtggtcctagagcacatgtctccagtgcgcacatttcagtgggacccacagcagccacggctggccatctgtacaggggggagcaaggtgtacctgtggtccccagcaggctgtgtgtcggtgcaggtacctggtgaaggtgactttccagtgcttggactgtgctggcatttaagtggggattccttggccctccttagcaaggatcacttctgtctctgcttcctggagaccaaggaggaagttggcacagcctgtggacaacgggacggccatgcctaggacctgagtggaatcagaggcagcggattctgctggtcccaacacaagcaacatctgcacaggctctccagatgggatacttggtgctcagttttctgta

SEQ ID NO: 4162 - DNA, 1510 bp, Cricetulus griseus
cttcgacacggcagtgccactaatggatgatggggagtgctgctgctcgtgtacggtcagggtttcacagatgaccagctggtactggtagagcagaacacactgatggtggaggagagggaacgagagatccgtcagattgtacagtccattgcggacctcagtgaaatcttcagggacctgggagccatgattgtggagcagggtacagttcttgacagaattgactataatgttgaacagtcctgtgtcaagacggaagatggcttgaaacagcttcacaaggcagagcagtaccaaaagaagaaccggaagatgcttgtgattttaatactggttgtcatcatcgtagtgctcactgtggtcctcatcggtgtgaagtctcgctagtgactccacattctggagagtgctactgcatggatctgagcagcatgttaaataatttgttaggaaaattgttttcaatcatctggtttttaagaactttggtaccaaaaatttatgagtagaggcgcaaaatgcctcttcatcttcccagctgaaaacaaaccaagaagtccttcaagaatttataatccgttccccattaacttaatttagcttttccatcactgttaacgatcagagtaacaaagtgtgaaaaataagaaaccatcattgatgttaattaacacatttagacgggccagttaaaccagcttcatgcgtttaaatcaattgtaagtagcatatccctcattcagaattttgcactgccttttctactgtaaaccaagaggggttactaagcaaaacctcctgaatcagaaagttggtcatttgaacctcatttcatgaaagcttgacagtgtgtccccagccatccttgctcagtccattgcttacactctagctacgtaatgacctgtccaaacctgacttcatttaatgaactgtaaatttacacagaagccattttaaatgggtcaccccatttaggattagtggatctcgaattattaaccaaacatcactccatttcaaagtaaaatattctacccatgatttgatttatccactctgccattgccacttagcaatgcccagaaagcgggtatattcctgaggacaatgagaacctcgactagggaagccctgtgtgtgtgtatgtctgggggaaagaggagaatctgtctgtctgtctgtctgttggggggggaggggcatttgggtgctggctgggccactgtgtgaagcagtgtgtgtctaatgtaacggatgtaccgctttctctgctaattgagagagcattatttatttgttttgacacaagtgcttgcagtgtttcatcccagctaatggcttcttaaaggtaataaaacccgccaacctaattggccagataagacctttttccttgtgtgcttaaataaagcaattagtgaagcgcttctatccaaaatgtactttttttttgtcctgtacaaataaagcaatctcacagattagaaaagaacaaaaaaaaaaa

SEQ ID NO: 4163 - DNA, 1510 bp, Cricetulus griseus
ccacagtgcgcccaccgcgtgtttccccgccgcgtggcgatgagcagccccaggagcacgccgcctcccccgcgccacgagcctgacccagggatgtcctatggcataatggagattgccatcattgcagctgtgatcactgcagtggccttggtcctggtctgcctcctctttctcatgcttcggtacctgtacaggcacaagggcacctaccacaccaatgaggccaaaggcacagagtttgctgaaagtgctgatgcagccctgcaaagtgaccctgccctccaggacgctggggacaacagcaagaaggaatacttcatctgaggggtagcagactccacctcccttcaagatgtttctggctacaggagagaaagcacacccactatgtaccaccattatcagcaccaggaagccctcaagggcaccccaagactcttactgcagaacactgggtgcctgccaggaaactgatccagatggaaggaatcaaggtgtagagcacctcttccagggactcaatggccacccagaggctggcattggctctacaagaaatagagaatatctggatacacaggtctccctgcacaatgcaggcctcatctcactagtacaaaagttctcctcattgtgcatgggtggttgggcctggaagtggggctgtatagaagtgtgacatctataagctgactggggatactggcatcagatggcagtccttgacatttggggagaacagcaggtgccagagctaaaaggcatcttcctttcccatcaatccagctcaaaatgataacaaataaatctgaagtgtaactgagcattcattatcaaatggcactactctaagtgtctaggaaacagtgaatgccacccattgctgacttttcttatgtataacattgtgtctgtgtgcatggggcaagaattggccagttctggcaagaagacaggaggaagaatgacctttcccctcactggtccagctatataaaacaaatggaaggatgaagcacagtcattgggccactggctgaagcactgatttcttgataaatagtattagaaaaagagacttgtgctcaatagccatgagtgaactcaatgagaatataagctcagtcaagtatggccaccagccaaaggagctgaagtcctgggaatgctgtggggaagagaagcagggatttaatcagaacaagtgacagatggccccagattggtgaatgtctgtgttctcatctatgaagtaaatggctggctacagttgtcacccattcattcatttagagaggcctagtctaaaaccctagtggatgcttgaaaccaaaggcagtattaaaccccttgtatttggcttttctgcacacacttatgttaagatttaatttataaattagacacagtaagaaattaactgcagtaactcacagtaaaatggcatacttttaagcataagctgtaataaaagatttttgaaaccataaaaaaaaaaaaaaaaaaa

SEQ ID NO: 4164 - DNA, 1510 bp, Cricetulus griseus
aaaaagaagaaaaaggagcggccaagtaaagactgttccaagttggacatgcttgctagaaattttcaggcagcaacagagtctatctctaactctgaaaacatccacaatggctcagtagaacaaaccgaagaaccagaaacctcatctcactccccttccagacacatgaaccacttagagcccaggccagggcctggagccaaccggggatggctacagaccccgtggaccctagagactccaagcttctgctacccaaggaagtcaatggaaagcagcatgagcctcttgcatttctcttggacatgatgcatcatcacaaagagggaaacagcaaacagaagttaaagcagaccagcaagactagtaatgagccatccaggaagcctgtggagcctcccaaaaccacagaggtgcagcccaagctccgggcccagcctgagttaaagcctaaagtagttgaccttgctctcctcacagagcagaagagagaggagaggaaggccaacagcaacaacaacaacaaaaagcagctgagccacatcaaagaggagaagctgaacactgtcactcctgagccaccctcccccagccagctcctgcagaatggcaggctgattctggcaagttctcctcagcccaagggcaagaataagaaaaataaaaagaagaaaggagacagaaccagcagttcaattgatgatgttttcctgcctaaagatatcgacctggacagtgtggatatggatgagactgagcgggaggtggagtatttcaaaagattctgcttggactctgctagacagaaccgacaaagactgtccatcaactggtccaactttagcttgaagaaagccacctttgctgcccactgaatgaggactgcctgaagagggatatgtgggaggcagctgggctgcgccactcaagagccaagcccttcagtggctccacagagcttcggtacccacccagggtgtgtagggcgggatgccgtggactgataacccccagaccgagaacttgctgctcgacctgcgttgttagcttgtgtgcgtgtagtctgtgagtgagacttctttgattgtagctctgtgctgttggaatggaacagtagttcccgccaattcctccactaccacggcctcagaggcctgggccgtggccagagacgagtttgcatcatccatgtgactctgtcgcctctgcatcttgccctgttctgtcatctgtccccgccagggtgtcagccatccctcagctcccatgtgccctgtcgtcccacccaaggcggactgggcgggcaggcctcctttgtactctttcacaatctactgtttccgagtgtacacgttgcgctgtttgtgtttgaccccctgacttgtagccagcttgtgtaagaccctttgcagaatgagaatgttaaaaacaagaaacccacccagtactcacaccatcaagtctgttctagagcgtacaaccgtattaacacggaggcctgcctggc

SEQ ID NO: 4165 - DNA, 1510 bp, Cricetulus griseus
  modified_base (41)..(41): a, c, t, g, unknown or other
ctggatgcacctgtgacctccaccaaggcccggagtggggnttcaagtggcagtgaggggcactgtgccgtatgtggagacaatgcttcctgtcagcactatggggtccgcacctgtgagggctgcaagggtttcttcaagcgcacagtgcagaaaagtgccaagtacatctgcctggcaaacaaggactgccctgtggacaagaggcggaggaaccgctgccagttctgtcgcttccagaagtgcctggctgtgggcatggtgaaggaagttgtccggacagacagcctaaagggccggcggggccggctgccttcaaaacccaagcagcccccagatgcctctcctaccaatctcctcacttctcttatccgggcacatttggattccgggcctagcactgccaagttggattattccaagttccaggagctagtgctgccccgctttgggaaggaagatgccagtgatgttcagcagttttatgacttgctcacgggttccctggatgttatccggaagtgggcagagaagatccctggttttgctgagctttccccaggagaccaagacctgctgctggagtcggctttcctggagctcttcattctccgcctggcctaccgatctaagccaggtgaaggtaagctcgtcttttgctcaggcctcgtgctacaccggctacagtgtgcccgaggctttggtgactggattgacagcatcctagccttctcacggtccctgcatagcttggctgttgatgtccctgcctttgcctgcctgtctgctctggtccttataaccgaccgacatgggctacaggagcctcggcgggtggaggagctgcagaatcgcattgccagctgcctgaaggagcacatggctcctgtggcaggagagccacagccagctagctgcctatcacgcctgctgggtaaattgcctgagcttcggaccctctgcacccaaggcctgcagcgtatcttctacctcaagctggaggacttggtgacccctccacctattgtggacaagatctttatggacacattgtctttctgatccctaccctgaacacgtgtgcacacatgtgtgtgctattatgtcacccatgtgcctttaagcccatagcccacggacccccagagcaccccagcctggttttgagctcagactgactcttctttactccagaagatggacagggagctcaggacctgggaggagggtgtgcattcatgggggtgaccccactgtttgtcttatccttgtagcttagtcatggccttctccagcttgagatctcttctatcttccttccacatgtatataactgtcactcaaggtgaatggcaggttctgatttatatttgtgtatttttcctggatttataggatgtgacttttctgatttaatatattttaatatattgaataaaaaatagacatgtagttgaaaaaaaaaaaaaaaaaaaaaaaaaaaaaaaaaaaaaaaaaaaaaaaaaaaaaa

SEQ ID NO: 4166 - DNA, 1509 bp, Cricetulus griseus
tgagagatggaagagcctcagaaaacgacccgaatgtggcagggcaggaggaagatagtccagtcatcagcaccagccctcagatttctgtgaatgaattttcctgccattgctgttatgatacccctggttaaccccaccaccttgaactgtggccacagcttctgccggcactgcctagctttatggtggatgtcttcaaagaagacagagtgtccagaatgcagagaaaaatgggaaggtttccccaaagtcaacattctcctcagggatgccattgaaaagttatttcctgatgccattagaatgcggattgaagacattcagcagaataatgacatagtccaaagtcttgcagcctttcaaaaatatgggaatgatcagagtcccctaactgccagcacagggcgagtgaatcagcagagaggagggggattcttctccggtgtactcacagctttaactggtgtggcagtcatcctgcttgtgtatcactggcgcagcagagagtctgagcatggcctcctggtgcacaaggctgtggccaaatggacagcagaagaagttgtcctctggttagaacagctgggcccttgggcctctctgtacagagaaaggttcttatctgaaagagtaaatggaaggttgcttttaactttgacagaggaagaaatttccagggcaccatacaccatagaaaacagtagccacagaagagttatcctcatggagctggagcgtgtgagagccctgggtgtgaagccaccccagaatctttgggagtacaaggctgtcaacccaggcaggtccctgttcttactgtatgccctcaagagctccccaaggcttggcttgctgtacctgtacctgtttgactacacagactccttcctacctttcatccataccatctgccctcttcaggaaggcagctctggggaggacatcctcactaagcttctggacctgcgggagcccacatggaggcagtggagagaattccttgtcaagtactcctttctcccataccagctgattgcagagtttgcctgggactggctggaggtccactactggacatcacgcttccttatcgtcaatgccatgctgctgtctgttctggagttgttctctttttggaagatctggtcaagaagtgagctgaagacagtgccccagaggatgtggagccatttttggaaagtgtctacgcagggcctattcatggccatattctggccactcattcctcagtttgtctgcaactgtttgttttactgggctctgtacttcaacccaattattaacattgatctggtggtcaaagaagtccggcgactggaaacccaagtgttctgaccagcagcaaggtccaggagagcctgtgagtctccctgatgtccaaactgttgcattcaaggaagcaagcgactcatttctacccctggtaaagcaaggtgctgcttctatgtgtcaaggctttaaccaggtctcctctttccctgtctc

SEQ ID NO: 4167 - DNA, 1509 bp, Cricetulus griseus
gtgatgctccatggaaagcaccccttgcagaagagtgggactacatgacaatgaaagagttgctagataagatctgctggaccaaatctgcaaagcagcttgctactctctttgtgaacctgtgtgtcactgcagagacccatgaggtctctgctttgtggttcctgtggtatgtaaagcagtgtggcggcacaaccagaatcatctcaacaaccaatggagggcaggagaggaaatttattggtgggtccggtcaagtgagtgatgaaatatatgaggctaaatatgtgattagtgccattccacctgttctgggcatgaagattcactatagtcctcccctgccgatgctaagaaaccagctgatcactcgtgtgcctttgggttcagtcattaagtgcatagtttattataaggagcccttctggaggaaaaaaggatttctgtggaaccatgattattgaaggagaggaagctccaatcgggtacacattggatgataccaagccagatggcacttatgccgctataataggatttatcctttctcacaaagctagaaaactgatacgtcttaccaaagaagaaagactaaagaaactttgtgagctctatgcaaaagttctgaactcccaagaagctctgcagccagtccattatgaggagaagaactggtgtgaggagcagtactccgggggctgctacacaacctacttccctccaggcatcatgacccagtatggaagggttctacgtcagccagtgggcaggattttctttgcaggcacggagactgcctcacactggagtggctacatggagggagctgtgcaggctggggagagagctgccagagagattctgcatgctgttgggaagattccagaagacgaaatttggcagccagaaccagagtctacggatgtccctgcacgacccattaccagcaccttcctggagagatacttgccttctgtgccaggactgctaaagctgcttggattgaccaccatcttttcagcaacagctcttggtttcctggcccacaaaaggggcctgcttgtgcgtttctaaatatgggactttctttattcctgtgtgttgtgtcctcacctactcaagttctttgcagttgtacttacaatcctgccttgcataactggaagacattaaataccatctggagctcatcctttgctttagagttgaataaaccaactgcaacagaggtgaaatttaatcacacaaggcccagtaagcccctcatatgtggatgactggaatggatacaagttgatgcttttcccacctcccaagatgtatttcccagtcatcctctgctttatgccatcttcattggtggttgttcctatgtggatttactctgtattaactggtattgtgctactcagtagatatcctttgctcttgcttgttttgtggaatattgccaactgtattttttatttttcttgaatagtggaagttcttatctttgccatttctttt

SEQ ID NO: 4168 - DNA, 1509 bp, Cricetulus griseus
gcctgtgctgtgtgggagtgccttgaaaaacaagggtgttcagcccttgctggatgccattactatgtacttgccatcacctgaagaacgcgagtacgggtttctgcagtggtataagggtgacttgtgtgcactggcatttaaaagtgctgcatgacaagcagcggggacccctggttttcctgcgcatttactcgggcacactgacgccccagttggccatccataacattaatagaaactgcacggagagaatgagtcgtctgcttttgccatttgctgaccaacatgtagaaatcccttccctgactgctggtaacatcgctttgacagttggacttaaacaaactgccactggagacaccattgtttcttccaagtccagtgccttagctgcagcccgtcgagcaggaagaggagaaaagaaacctggaaaaaacagtgaaacagagagtctgctgttggctggggtagagattccagagcctgttttcttctgcaccatagaaccaccatcagtggctaagcagccagatttggatcatgccttggaacgccttcagcgtgaagatcccagtttgaaagtgaggcttgatcctgactctggacaaacagtcctgtgtggtatgggggagttacatattgagattattcatgaccgaatcaagagggagtatggcttagacacctatctagggcctctgcaggtggcataccgggaaaccatcttaaactcagttcgtgccacagataccctagaccggactctaggagacaagcggcattttgtgagagcagaactggaagcccggccagtagaagcatcatctggcatggccgtgattgagtatgctgactgtatcagtgtagacctactgcaggcctcccgtgaggccattgaaaatgcagtgcacagtgcatgcctccagggacctttacttggatccccagttcaagatgtggcaataacattacactcattgatgattcaccctggtacctccacaactatggttaatgcctgtgtctcaagatgtatccaaaaggccctgaagaaagctgacaagcaagtcctggagccactgatgagtcttgaggtcacagtgactggagattacctcagccctgtcctggcagatttggcacaaagaagagggaacgttcaggaaattcagactcgccaggacaacaaagttgttataggatttgttcctttagcagagatgatgggatattcaactgtgcttcgaacgctgacatcaggctcggctacttttgctttagaattctctacttatcaagccatgagtcctcaagaccaaagtactctactcacccagagaagtggtttggctcatgtgctttaggaccttgggaacatggattaatgcctggaaaagcacgggctgcttcattctcagtaagaacgctgtttttttcattggatggtaaattactgctttggtttcaatcaataaaaagatggtttattaaaaaaacaaaaaaaaa

SEQ ID NO: 4169 - DNA, 1509 bp, Cricetulus griseus
  modified_base (478)..(478): a, c, t, g, unknown or other
aaacagctgcataacaggattgccagagccacttgaggccctccagacattccggccggctgccagctcctccttccgccattgccagctggatgtggggcgtgagatgaagctgctgacagagcttaacttcctgagagtgccggaggctcctgtcatcgacacccagcgcacctttgcctatgaccaaatcttcctgtgctggcggctgcccccccactcaccacctgcctggcattacactgttgagttccggcgcaccgatgtccctgcccagccaggccctgcacgctggcagcgacgggaggaggtgaggggcaccagtgcccttctcgagaaccctgatacaggctctgtgtatgtacttcgtgttcgtggctgcaacaaggctggctatggagaatacagtgaagatgtacacctgcacacgcctccagcacctggctttcctcaccattggcatgggcaagatccttcngggttccggagcaagttcgaatggcagggctgaccgggagggatggcccagcagctggctgcacagtgcccctgccaccccgcctgggcatctgcttggactacgagcgggggcgagtttccttcctggatgctgtgtccttccgtgggctcctcgagtgccccctggactgctcagggcctgtgtgccctgccttctgcttcattggtggtggcgctgttcagctgcaggagcctgtgggcaccaagcctgagaggaaagtcaccatcgggggctttgccaaactggactgagtctttcagcccccctttccagacctaagctctgctccccggcctccaggcagcgggttgtttgcccagcagcttctccccagacttttcctaactatgtggtcctgccctgtataccttgccagctgtgtcttcccagggcttccctgactaaggggctctcccctgattacctctggatgtcctccattctctgtgttacctgttggcctgggcccccaggcccaccaagtctctgccccaggccccgcctgccgtcttaaccaagacatagaaagcccctatcccatccctgtcttgccccccaacaacccaggcttacagggagggagggcacctagaacagtgggtgtgatcgacagctctgccctttgccttgccaagctccctgctccaatgatgctgaactacagccttggcagccaggctttgagcctccccagtgagagggaggagaacctaccattttatttaggtccctatacccccagccgcatgtcccttctgtccctcttctccctcttgcatgctttacctaccctgcacccatgccaacgtgccaagtctcccttgggaactcagccgaggctggtgtccccgctgggttgggccaagctaggcctctggtgcctgctactgcctccttgcagtgggcattgctaggcctatgctgagcaacagctgtgattctcatggtttataaacaataaactgtgacaccaggcaaaaaaaaaaaaa

SEQ ID NO: 4170 - DNA, 1508 bp, Cricetulus griseus
gctcgggcgcggggaaggcggcggccccgggaccggcggccggaggaggagctaccgcgcaggccccgggcgcccggtgggtcccggcgagcgccgccagctcgtatgaaaatccatggacaatcccaaatatgttgtcgatgacaagaattggtttggccccagtgttgggctatctgattcttgaagaagtattttaatgttgcactaggttgttttgctctagcgtgggctaacggtatttgttggatggtatttattgctacgaaacgtgggccaatacaaaaatcagctttgggaagtgctcttgatccacttgctgataaagttcttatcagcatcttatatgttagcttgacctatgcagatcttattccagtcccactcacttacatgataaattttcaagagatgtaatattgatcgctgcagtgttttatgtcagataccgaactctgccaacaccgcgaacactagctaagtacttcaatccttgctatgctactgctagattaaaacccacattcatcagcaaggtaaatacagcagtccagttaattttggtggcagcttctttggcagctccagttttcaattatgctgacagcatttatcttcagatactatggtgttgtacagccttcactacagctgcgtcagcatacagctattatcactatggtcggaaaactgttcaggtgataaagggcaaatgagagagctcctgcagcaaggaagcgacttgcatcatcggcagcagcgccagcgaaagctacaggactttccccatcttggtgttcagcttgagaaaggacttgtcagacaaaccatgtcttaaaaacggaagtaatgtcagaatttccagtgtatttttaaatacaaataaaactataatgtagaatttttaatcttagtttttttgattaatttgtgagatgaattattctagttattgtcttttttaaaaatgttttttaaaaaaaatagttgatagcattgaaacaggaaagcaagagggattccctgagattagatatataccgtacacaacgagactatgcatttttatgtttgaattttaaatctatatacacattaacagttgatgtggttaatacttgaccatttgagaaactgacagtaaacttagctgtgggtagggtagaggtgtacacagccttaaaatgcagtaagtttagaaaataaagaaaggtcaaataaaatagatggtcttgaagttcatcagtagtcttccagcctctcaggtaccaaatagtttgttctggcataatagacaacacaggagtcagagtaggagaacatgtaataataggctttgcatcttaaaggcagagaattacatcatgccttcctactgtttctaatgtaatgtttgatattggaacctgtactcatatgtcatgtaaataatataaaacttttcttctgttgttaactcaataaaagaataaaagaagctagaaaaaaaaaaaaaaaaaaaaaaaaaa

SEQ ID NO: 4171 - DNA, 1508 bp, Cricetulus griseus
tacgccgaggtgaacagcctgaggagccgcgagtactgggactacgaagcccacgtcccgagctggggtaatcaagatgattaccaactggttcgaaaacttggtcggggcaagtatagtgaagtatttgaggccgttaacatcaccaacaatgagagggtggttgtaaaaattctgaagccagtgaagaaaaagaagataaaacgagaggttaagattctggagaaccttcgaggtggaacaaatatcattaagctgattgacactgtaaaggaccctgtgtcaaagacaccagctttggtatttgaatatatcaataatacagattttaagcaactctaccagatcctgactgactttgatatccggttttatatgtatgaactacttaaagctctggattactgccacagcaagggaatcatgcacagggatgtgaaacctcacaatgtcatgatagatcaccaacaaaaaaagctccgactgattgattggggtctggcggagttctatcatcctgcccaggagtacaatgttcgagtggcctcgaggtacttcaagggaccagagctccttgtggactatcagatgtatgattacagcttagacatgtggagcttgggctgcatgttagcgagcatgatattccgaaaggagccattcttccatgggcaggacaactatgaccagcttgttcgaattgccaaggttctggggacagatgagctgtatggatatctgaagaagtaccacatagacctagatccacacttcaatgatatcttgggacaacattcacggaagcgctgggaaaactttatccatagtgaaaacagacaccttgtcagtcctgaggccctagatcttcttgacaagctcctgcggtacgaccatcaacagagactgactgccaaagaggccatggagcacccgtacttctaccctgtggtgaaggagcagtcccagccttgtgcagagaacaccgtgctttccagtggcctcagcgcagcacgatgaagcctggggaatcgacggtctgttgcggttcctcatacttttccataagcagaacaagaaccaaatcaaacgtcttaacgcgtgcgtagcgagatcacgtcctgagagcagacacaaaatggtggcaggcttggcgagcacgaactagaccacctgaagggcagcccaccaccgtaaatcagacctcacttccgaatgtaaaaggttcacatgcctttggcttcctgttgacttcctcccgacccagaaagcatgggaaatgtgaagggtatgcaaaaatggttgttggttactgttgctccctgtgcccttgacctgtcccatggctgcctgttgctccagcaaatcccaaggactagctgaccacagactccacagatgggatgggggcagtgtatggcatgatgggcagttacattattattttaaaagtatatattattgaataaaacgttttaaaagaagtaggaaggcagggtttctctgtgtaa

SEQ ID NO: 4172 - DNA, 1508 bp, Cricetulus griseus
atcaccaatgagcgcctctataaaagcagctggcgaggacgcgagacaccgctacacaccgacccttggtctccctgagttcatccgagcgaaagccaacgcagacaacctgagcgaggcaaaatataaggagtcttggcataatcttcgtgctcaaggctgcaagatgacgatagatgctctccccttccaggctgcacgagcctccggggacatagccagtgactttctctacaggcacgactttgtgaaggagcggggacaactcattggggtccgcagtgtgagtgatgacccacgactacggcactgccagcggatgggccagctgcagagtgagaatcgatacaagaaggaggcagccagcagccaagcccagtgccacctgcccatggatatggtgcacctggtccatgccaggaaggcccaggccctggccagtgaccatgactaccggacacagtaccatgagttcactgcactgcctgaggatctaaagatggcctgggccaagaagcccatcgccctacagagtgagtttcactacaggtcagacttgatgggcatgaagggcacaggatggctggctctgagatctccccagattgagaatgcaaagaaggctggagagctcatcagtgagaccaagtaccgtaaaaaaccagacagtatcaagttcaccacggtggtagactctccagaccttgttcacgccaagaacagttacatgcactgtaatgagcgcctgtacaggtcgggggatgcagactccatgcataggtacaccctgatcccagaccacccggatttcgccagagcaagacttaatgcgatgcacctgagtgataaagtctacagaaactcctgggagcagaaccgggctgggggctatgacttcaggctggatgccatcccattccagactgccaaggtgtccagggatatcgccagtgatttccggtacaaagaggcgttcctgagggaccggggcctacagattgggtaccgcagcatcaatgatgacccaaggatgaggcatttcctccgtgttggcaggctccagagcgacaatgagtacaagaaggactttgccaagggttgctcccagttccacagccgcactgaccaacctggtttcctccaggccaagaggagccagcaactggccagtgatgtacactacaggcagccactgccccagcacaccagcgacccagaacagctgggcctgaagcatgcccagaaggcccaccaactgcagagtgatgtcaagtacaaatctgacttgaacctgactcgaggtgctggctggacccctcccggctcctacaaagtagaaatggctcggcgggctgcagaactggccaacaggaggggcctgggtctccagggggcccatgcggggccggagcagaaggggggcacagagatcatcagagccgggaggtgaacccagatgcctcggagattctgcacatcaataggaagaagactctgctgatgtgagc

SEQ ID NO: 4173 - DNA, 1508 bp, Cricetulus griseus
gcatttaccaaccaaatctctgttttgttgggcacatggattataagtacttgcgctggcaggtttgttagataccccagggattttggatcatcctttaggaggatcggaacaccattgaaatgcaagccatcacagcccctggcccacctcccgagctgcagttctgtatgtgatggatttgtctgagcagtgtggacatgggttgaaggagcaattagaactcttccagaatatcagacctctgtttatcaacaagccttcttattgttgtagcaaacaaatgtgatgtgaagagaataactgagctttctgaagaagatcagaaaatatttaccgacttgcaggctgaaggattccctgtcatcgagaccagcaccctgactgaggaaggtgtcattcaggttaaaacagaggcttgtgataggcttttggctcatcgagtcgaaacaaaaatgaaaggaaataaagtgaatgaggttctgaacagattgcatttagctgtgccaaacaagagagatgataaggagcgaccccctttcatcccagaaggagtggtagctcgaaggaaaagaatggagattgtagagcccaggaagaagagggaacgagatcttgagctggaaatgggagatgattatattttggatcttcagaaatactgggacttaatgaattcatccgagaaatatgataagataccagagatctgggaaggccataatgttgctgattatatcgatcctgctatcatgaagaaattggaagagttagaaaaagaagaagagctaagaacagctgctggggagtatgacagtgactctgaaagtgaagatgaggaaatgatggaaatccgacagctggcaaaacaaattagagaaaaaaagaagttgaaaattctacagtccaaagaaaagaatacacagggacccaggatgccccgaactgctaagaaggttcaacgggcagacttggagaatgagatgcgtagtcttggtgttgacatggatgataaagacaatgcccactatgcagtccaggcaagaagatctcggagcgtcactaggaaaagaaaacgagaagaatctgttccaccctcttctatagcccggagtcggagttgttctcgaactccacgtgatgtttctggtcttcgggatgtcaagatggtgaagaaagccaagactatgatgaagaaagcccagaagaagatgaatcgcttggggaagaaaggggaagcagataggcatgtgtttgatatgaagcccaagcacttgctctctgggaagaggaaagctggtaaaaaggacaggagatagtgttctcttcagttggtgtgctttgactggactcttactgtttatttctgggtatggtatgatgccctttatataacttggaatcaccatctgttaacttggaagagacaatggaaatgacttaaaaatacttgttgctttgctgaaaactgataaacctgattaggcatgccgagttgtgctcactgc

SEQ ID NO: 4174 - DNA, 1507 bp, Cricetulus griseus
  modified_base (697)..(697): a, c, t, g, unknown or other
ttctattgatgctttgatggccaaattaaagtcaccatgatgacaagggaacaaatacagaaagagtatgatgcgctagttaaaagactcggaagatctcctcagtgcactgcagaaaagaaacaagcaagaagaggaggcagagaggctgaggcgcattcaagaggagatggagaaggaaaggaagaggcgcgaagaggacgagcaaaggcggcggaaggaggaggaggagaggcggatgaaacttgagatggaagcaaagagaaaacaagaggaggaggaaaggaagaagagggaagacgacgagaagcggatccaggctgaggtggaggcgcagctggcccgacagagggaggaggagtcccagcagcaggccgtcctggcacaggagtgcagggacagggagttggctctgcgtatcgcccagaacgagtctgacctcatcagtgatgaggcgcagagcgacctggcactttcatctcaactgtgatttttcagttttaagccttgtccaaattatttcatgtgatttaagccggtgtgctgcttcagacatctctccttcccctttccctattctgagcatctgttttggtctttggaactctaatggtagagctgttttgtaaactttgtaactcagaagccgttgtacttagacagcttgtttcatgcctcaggtggtttttaaaacacncccttttgtgtgctgtcagtcctcatcagatggcagcagctggagctaatatttatgactttaatattaggaacttagagacaaaactgcattgaggagttatggtaacacccaaaggagtctttgtaataataataatagtattttattacatgtgatctttattaattaggttgccttttccccgctggggattgaacacaggacttcacacaggctaggcactaccgcggaggcccctccctagcctttagttgtctacttttggaagatagtttcactcacaggttattaatatggttctcaggggattcaaatatgtagacctttggtttcttaaaatagctttaaaatacttggatcagcagaatatttcttgaactaatcattccgttaatactaagttaatgataatcttactaccctatatgaaaaaaaaagttgtagaaaaccagggacgtcatacagtttactactagaccaccaaggagatataaatgcctttgctccagctgtgtaagagtgaaaacgatgctttgtttgctcagccaatcccgagagacttacaaagggtcttttgactgtttggtgaaaattcacagcagtgtcttcttatcccagtactgacctatgtatgaggtatcttggattcttcgaagttttccaggagacaattaggaaaaattaatgcacattgaaaatagcataatgtttaatcttaatttctgtcaatatagaaactcaacttcaaactgacaaacaggcctaattaagtgacctacttttcgttttacttctggaaatctgtct

SEQ ID NO: 4175 - DNA, 1507 bp, Cricetulus griseus
ggggaacatggcggcggcggagccctcggtggccgcgctggctggcggcggtgtgggcgcgggggcgccgtcgggcggcgtgccggtgctcttctgcttctcggtgttcgcgcggcccgcgtcggtgccccacggcgccggctacgacgtgctcatccagaagttcctgagcctctatggcgaccagctcgacatgcaccgcaaattcgtggtgcagctcttcgccgaagagtggggtcagtacgtggacctgcccaagggcttcgcggtgagcgagcgctgcaagctgcgcctggtgccgctgcagatccagcttacgaccctgggaaatctcacacctccaagcactgtgtttttctgctgtgacatgcaggaaaggttccggccggccatcaagtactttggagacattattagtgtgggacagagactgttgcaaggagctcggatattaggaattccggttatcataacagaacagtaccccaaaggtcttggcagtacagtgcaagaaatcgacttaacaggtgtgaagctggttcttccgaagaccaagttttctatggtgttacctgaagttgaagcggccttagccgagattcctggcgtccggagtgttgtactgtttggagtagaaacacacgtatgtatccagcaaacggccctggagctggttggccgaggcattgaggttcacattgttgctgatgccacctcctcaaggagcatgatggacaggatgtttgctcttgagcgtcttgctcgaactgggatcattgtgaccactagtgaagccgttctgctgcagctggtggctgacaaagaccatccgaaattcaaggaaattcagaacctaattaaggcgagtgccccggagtctggtctgctctccaaagtataggatccttgaaggatcgggatcctccgacggactgcaagccagacaagctcttgtctctaataaaactaaaatgttaagtaaacagcagttcctcctttgcagctcttagtaacacttaactggctagaccattgggtacaagcatttagttatgatgtcaaggcttcaggtgctgcttatcttctttgtttcttaatgggctcttatttattaagacaaattacaatggaggtgcctgttttgtctacaccatatactccaaccatacctttccaaagtgctccctctggtgaagttttcttaaattgtgcactttatatcagatatcctgcatagcagataattacctcatgattcatagcagcagcaaaattacagttatgaagtcacaatgaaagtcacttgatggttggggttcaccacaacatgaggaactgtattaaagggtcaaagcattaggaaggttgagaactactgttctagaaaatgagtgcaaagaaacatcatatagttatctacattttaaaataatttctaataaatgtaatctagtggttttcatacttttattatctggagagcttgtgaaaatactgattctagctt

SEQ ID NO: 4176 - DNA, 1507 bp, Cricetulus griseus
gctggcccagggtccagagctggctgaagatgatgctgatctcttacataagcatattgaagttgctaatggcccagcctctcattttgaacaagaccacagacatatgtggatcatatggatggatcttactcactctctgccttgccgtttagtcagatgagtgaacttctgaccagagctgaggagagggtcttagtcagaccacatgagccacctccacctccaccaatgcacggagcaggagatgcaaaaccaatacccacctgtatcagttctgctacaggtttgctagaaacccgcccccagtcaccagctgcaggcagagcacctgtgtttgtgagccccactcccccacctcctcctccacctctcccatctaccttgtcaacttcttcgttaagagcttcaatgacttcaactcctcccccacctgttcctcccccgcctccacctccagccacagctttgcaagctccggcagtaccaccacctccagctcctcttcagattgcccctggcgttcttcacccagctcctcctccaatcgctcctcctctagtacagccttctccaccagtagctagagctgccccagtatgtgagactgtgccagttcatccactcccacaaggtgaggtgcaggggctgcctccacccccacctccgcctcctctaccaccaccaggcattcggccgtcatcacctgtcacagttgcagctcttgctcaccctccctctgggctgcacccaactccatctactgccccaggtccccatgttccattaatgcccccatctcctccatcacaagttatacctgcttctgagccaaagcgtcatccatccaccctgcctgtgatcagtgacgcaaggagtgtactactggaagcaatacgaaaaggtattcagctacgaaaagtcgaagagcagcgtgaacaggaagctaagcatgagcgaattgaaaacgatgttgccaccatcctgtctcggcgcattgctgtggagtacagtgattcagaggatgacttagactggctggagtaaggaagttgctttgctgtgtattgcaagactgaatgcacaattgtcctttgtggcgcttgttctttgaaatatttggtcattctagtgttttgcttcctattcctcataatgaataaccttttcctccatcattttttgatttctctgagaagtaatagcatatatttcaaactaaatattttacagtggcttatcttatttttctctccctggaaaatataatttggtctaataaaccactaagtattaagcatggaaatttttttaaacctaaagaaagcaactgagaatgaaattttgaaggtagctgtgtctgttaatgagccttattccatttctcgatgttttaaatgaagaaacactgcctcgattatatgaatacactcagaaagaacatttagcttgtagtgttgaattctcttaaggaatggtttaattttttatctatttttattgtttt

SEQ ID NO: 4177 - DNA, 1507 bp, Cricetulus griseus
caggccctgatgttatacatttattcccattgtccatataagaaacatctagaaaatctaaactactgctggggctatgagaaatcctgcaaaccagagtttcgatttggctaccctgtttgcagctatgtcgacgtgggatggacagacactctggagtcagctgcggacatgttctggaagcaagctgactttggatatgcccgagagcggctggaggagactcgcacactctgccagcccagagagaacaagcgactcaagtctggtttgttcccggtaccttcagtattgcagagctactggtctgtacctggacttaagaaacgtcaagaggagccctgacagattcaagggaagtatttttcttcagggtggtgaagttggaggacactgtaaactggacagtcaagcactgatgtctgaaggtcagcgcaaaagccctctgcagtcttggtttgctgaactacaaggctacactcaactcaatttcagacctatagaagatgctaaatgtgacctcattgttgaaaaaccaacttatttcatgaaattagatgcaggtgttaacatgtaccaccacttctgtgattttctcaacctctacatcacccagcacgtgaacaattctttcagtacagacgtgtacatcgtgatgtgggacaccagctcttatggatatggtgacctgttctccgacacctggaaagcatttactgattatgacgtcatacatttgaaaacctacgatttcaaaaaggtgtgctttaaagaagctgtgttttcattgctgccccgcatgcggtacgggctgttctataacactccactgatctctggctgtcagaataccgggttattcagggccttctcccagcatgtgctgcataggctaaacatcactcaggagggacccaaggatgggaaagttcgagttaccattcttgcacgaagtacagaataccggaaaatactgaaccaaaatgagctggtaaatgcactgaaaacagtatccacatttgaagtccggattgttgattacaagtacagagaactcgggtttttggatcagctgaggatcacacacaacacggacatatttattggcatgcatggagctggccttacccatttacttttccttccagactgggctgctgtattcgagctgtacaactgtgaagatgagcgctgttacttagacctggccaggctcagaggtgtccactacatcacctggcggaagcccaacaaagtgtttcctcaagataaggggcaccatccgacgctgggagaacacccaaagtttaccaattactcttttgatgtagaagaattcatgtaccttgtcctttcaggctttcagagcacgtactgcaacatccacagtggccatttaagaagaaacatgatgaactgtagaatgttgactttgtttacaagaagagagtgtttaaacactctcacatccagactcccaatcagaggagcagaacaacctgtcata

SEQ ID NO: 4178 - DNA, 1507 bp, Cricetulus griseus
tatgtctgaagaaccagggtcagcccagctggagaagcgggaatcaaaggaacatcaagaggacagctcagccacatccttcagtgaccttcccctctacttggatgacccagttcctcctccatcacctgagcgaatgcccagcgcagagcccccaccccaggcccgccctgaattctgggcaccagctcccctcccaccagttcctccaccgatgccaccagggacccgggaagatggtagccgtgaggagggcactcgaaggggtcctgggtgcttggaatgccgggatttccggctccgggctgcgcaccttcccctccttacctgtgaggctagcaggtgtagaactctgactggttggagacaagtgtagagccttgaagagctccagcaactccaatagagtaccatcaactgcagctctggctcctcttctcgggatagcctgaggaacctccagccactggcctgtgcaagcagacccagccttcaacaatgatgtggtccagaggcggcattacagaattggcctcaacctctttaataagaagccagagaagggtatccagtatttgatcgagcgaggtttcctgtcagacactcctgtgggggtggctcacttcatcctggagcggaaaggcctgagccggcagatgataggggaatttctggggaaccggcagaagcagttcaacagagatgtgttggaggagccaaggactcagtgaatgggactctggcccgcagtagtctggaggacacttatgggcaggcgatgggctcaagcggggtgcactcagtagttccctgcgagacctctctgatgcaggggtctgttattagcagtccacgccctcaccagaggatgcccacctccgccccaccccgccgccagaggagtacaagagccagaggccagtctcgaactcctcatctttcctgggctccctatttggaagcaagagaggcaaagggcccttccagatgccaccaccgccaacaggccaggcctctgcctcgtcttcatctgcttcctccacccaccaccaccatcaccaccaccaccatggtcacagccatggtggcatgggggtgctacctgatgggcagtccaagctccaggccctgcatgcccagtattgccaaggaccgggccctgcctgcatgccccccattccttctactttccccacctacatctgaagacaatgcactttacagatatcacccacacatatcacactggggcagggcacccagcatcagccctggggaaagactcccagaggatcaccctgagcccaagatgtccttcctgaggcagagatcgaagccatcagagctggggctgcgagccagaatgcccaagcccctcttgttcatcaaaatctccactgcctcgccagtcctttcacagccctgtttatttattataatatatttttacaagtcccaactcctcttcttgccctatacatccagctcctttcacagtccctgcctt

SEQ ID NO: 4179 - DNA, 1507 bp, Cricetulus griseus
aatgtaagatggcggagtagcaacgcggtgctgtaggtgttcagacgaccggctgacttcggattcagtctccgcagcggcagtgacccctgagcgaagggcgcgtttgtgtagttgcccaagatgcctaacatcaaaatcttcagcgggagctcccaccaggacttatcccagaaaattgctgaccgcctgggcctggagctaggcaaggtggtgactaagaaattcagcaaccaggagacctgtgtggaaattggagaaagtgtacgtggagaggatgtctacattgttcagagtgggtgtggtgagataaatgacaatctaatggagcttctgatcatgattaatgcttgcaagattgcttcagccagccgggttactgcagtcatcccttgtttcccttatcgcccgccaggataagaaggataagagccgggctcccatttcggctaagcttgttgcaaatatgctatctgtagcaggagcggatcatattctcgcatcaacaacgcatgctttgaagctagttagtagtcaccaataccatacctcaggaggataagatgaagcactgctccaaaatacaggtgattgacatctccatgatccttgcagaagctatcaggagaacccacaatggagagtctgtctcctacctgttcagccatgttcctttataatagaataacttctgaagcattttgaaaataaaccaaccccaccccttgtttttcttggtatttggtgagttcatcggaagacccagcttgctccagtgtagctttttacatcccacattagatacattagaatttagcctaaattggaaaaaggcattgtgattaactgctaggatgtcctacttgcattgtttcatcctggcttttttgtttattttgtgagccttgcagctttaactagagctcagctgctgaaagatgtatagactgttgagagtattccacaaggtccttaggctgtgattgacaaagctcacactccattgcatgtgactgctttgggggttttcttcattcagaataactagcaacaaagccagcccatatgtgatatacattttcaggcaagaaccctgagcatccttaaacataattcagtagttgagcaccctgttaggcaggggcaggtagctcaatgaagtaatttttgggaggaagaagcctgatctattgctatctgtttaactctatagcttgaattctctacacatgttcatttccatttggctttaacttcagccatcttggccttttcctggccaaataccttggacttggcgatcattgtactataatcttctgtaagacagactgcttcttgctatgtaactgctaacattcacattagaaaacttgttgtagctcagtcttccttagcctattaccactgtggtagtaggttttaggtggtgtcatagtgccttttgattaatttaagtatttaatttttcatgtttcttggatccatttggcctctcagttaaact

SEQ ID NO: 4180 - DNA, 1507 bp, Cricetulus griseus
  modified_base (196)..(196): a, c, t, g, unknown or other
agtggaaaggcaggtgtccacagccatggctgaagagatcagacgcctctctgtgctggttgatgaataccagatggacttccacccatccccagtcgtcctcaaggttttataagaatgagctgcatcgccatatagaggaaggcctgggccggaacatgtctgaccgctgctccacagccatcaccagttcccngcagactatgcagcaggacatgatagatggcttgaagccccttcctctcgacacctcgccaaccccacgtactcgcccccttcgccacagggctcctcacacaggaggagcttatggtctccatggttaccggcctggcctctctgacatccaggacctccatgggcattctcgtggtcggaggagtggtgtggaaggctgtgggctggagactcattgccctctcatttggactgtatgggcttctctatgtctatgagcggctgacctggaccaccaaggccaaggagagggccttcaagcgccagtttgtggaatatgccagtgagaagctgcaactcattatcagttatactggctctaactgcagccaccaagtccagcaggaactgtctgggacatttgctcatctgtgccagcaagttgatatcacccgagagaatctggagcaggaaattgctgccatgaacaagaaagtcgaggctctggaatcacttcagagcaaagccaaattgctcaggaataaagctggctggttggacagtgaactcaacatgttcacacaccaatacctgcagcccagcagatagtgggcagctggggcgggcctgcactgagaagaggcagggctgcgcctcccatcagctccagtccttggccatggcagagagaagaagaagcaccccttgcctcgaggtccttgctctttcttcagctcttggcctattagtcctagcttattagtgagagctagtttcggccaggtggttaaaggatgtagcaggaggaatggtggaagatggtcctctcctgcccatgtctgcgtgcttgcttgcccctcagtctaccctgtttgcagtgacagtgaccgtcttagtcaaggtcagcatataaatgggaagaagtagtgagtagtgagtatacaaccaggacagacagaggggttacttcgaagtgggtcaggacaaatcagcgtaacatgatcccaaaaaaatgttgtgttctttttgggggaacaaatagaatacactctttttcagtgtagcccctgagtaatgaatgaacttttgaactatattatataagtaaaaattccatttataccaccagggagagcctgtacctgagacgtttagcggagcactttagtttcttgctgctaactgttgtgtgatctttgctggggcgcacaaggctcctgacacagtgagttgcttctggtatatttgaggcaatgcacttgcctgagttacctgtatctctgctgatgtgttggaaactaaaataaagccccagttgtgaccctgtgtg

SEQ ID NO: 4181 - DNA, 1507 bp, Cricetulus griseus
accatgctgcagttgacattctgcagaatgcacctgaagatgtgacacttgtcatctcccagccaaagagaaccattcaaagtgccttctactcctgtgcatgttgccagtgggatgaaaaactacatgaagaaaccttgctacatgcaggacggtgctccagacccttcagaggaccagccctggccacgtggcactctcaggcacatcacagagagtcctttttgggctctctgggggcttgcgggaaggaagcctcagctcccaggactccaggactgaaagtgccagcttgtcccagagccatgtcaatggcttctttgctagccacttaagtgaccgaggatggcaggattcacagcattacactggcactcagttgcaggccaccatccgcacgcttcaaggcttgcttgaccaggggatcccctagtcaggagctacagaatcttcaagaattaaaacctttggatcagtgtctgattggacagactaaggaaaaccgaaggaagaacagatacaaaaatatccttccctatgacaccaccagagtgcctcttggagatgaaggtggatacatcaatgccagtttcatcaggatcccagtggggacacaggaatttgtgtacattgcctgccaggggcctttacccaccacggtgggggatttctggcaaatggtttgggagcagaactccacagtgatagcaatgatgacacaagaggtggaaggagaaaaagtcaaatgccagcgctactggcccagcatcctgggcacgacgaccatggccaatgagagactgcgcctggccctcctgaggatgcagcagctgaagggcttcgtagtgagggtgatgagcctggaggatattcagacaggagcggtgcggcatatcactcacctgaatttcactgcctggccagaccatgatacaccctcccagccagacgacctgctcactttcatctcctacatgagacatatccataggtcaggcccagtgatcacacactgcagtgctggcattggacgttcagggaccctcatatgcatagacgtggtcctaggattaatcagccaagatcttgaattcgacatctctgacttggtgcgctgcatgagactacaaagacacggcatggtgcagacagagggtcagtacgttttctgctatcaagtcatcctctatgtcctgactcatcttcaggctgaagaacagaaggcacagccatgactcccacggtgaccgagagcagcctcctcaggatgtggtgtttttgcagatactttaaccactgatggttatcaaaactcatttaacatgacctgaacaaggcaggtcttaggaacaaggcagcatttggtcttagtggacattgttacaaagacacactgagtctattttaatgtaccaaatcttgtttatagcaaattttccagttattttaataaagtagatttattttatagaggatacttgaagccagtatttaagcttttaatgac

SEQ ID NO: 4182 - DNA, 1506 bp, Cricetulus griseus
catggcactggcccaggagctgtacagcttcccagcctccaagctggacttcttcgtggctcagtggctgcagccgaccagagagtggaaagaggaggtgctggagactgtgaggacagtggaacagttcctgaggcaggagaacttccatggagaacgtggactggcccgggatgtgcgggtgctgaaggtggtcaaggtgggctccttcgggaatggcacggtgcttaggagtaccacggatgtggagctggtggcgttcctgagctgcttccacagcttccaggaagaggctaagcaccaccacactatactgaggctgatgcagaaaaagatgttctattgccaagaccttctggacctcgggctcgataaccttggagtgaccgaaggagttcccagtggtctcatcttcactattcggacaagggagacctgggagcctatcactgtcaccatcattccggcctacagagccctggggccttcctgtcccacctcgtgaagcatcggccaactaagctgaagagcttcctgcggttggtcaaacactggtaccagcagtatgtgagaaacaagtgccccgggccaatctccccttctatgccctggaactactaactgtctatgcatgggaagcaggcacccaggaagatgctaacttcaggctggatgaagggctcgccactgtgatggagttgctccaggatcacgaactcatctgcatctactggacaaagtactacacactgcagaatccagtcatcgaggactgtgtcaggagacagctcaaacgagaaagacccatcatcctggacccagcagaccccacccacaatgtggcagaaggatacagatgggacatagttgctcagcgggccaaccagtgtctgaaacaggactgttgctatgacaacagcgacaccccgatccccagctggactgtgaagagagcaccagatatccaggtgacagtggagcagtggggtcactccgatttaatcctctgggtgaacccttatgaacccataagtaaacttaaagagaaaatccgccggagccggggctactcaggcctgcagcgtctgtcctttcaggaacccggtggcccacggcagctcctcagaagccattgctcactggcctattacggaatcttctcccacgtccacatctgtctgctggacaccatctcccctgagatccaggtctttgtgaaaaacccggatggtgggagccacgcctacgccattcatccatttgacttcgtcctgaacctgaaacagcagattgaagacaggcggggctttccaagccaggagcagcagctggagttccagggccgtgtcttgcaggactggtttgactttaaatcctatgacatccaagacagtgtcaccctcatcctgtccaagaagaaggaggggaaatctccatttgcacccagctagtttcctctgtgagctctgcattttgctccctctcttatcctagactcagcatagt

SEQ ID NO: 4183 - DNA, 1506 bp, Cricetulus griseus
gcgggtgggcctgtcggagtgttgagatttgagcttcggtgtttgaacccagggtctcgaaatgcatcgtgattcctgtccattagattgtaaggtgtatgtaggtaatctcggaaacaatgggaacaagactgaactagagcgtgcttttggctattatggaccacttcgaagtgtgtgggttgctcggaaccctcctggctttgctttcgttgaatttgaggatccccgagatgctgctgatgctgtccgggagctggatggaagaacactgtgtggctgccgagtgagagtggaactgtcgaatggtgaaaaaagaagtcgaaatcgtggcccacctccttcttggggtcgacgccctcgagatgattaccgtaggaggagtcctccacctcggcgaagatctccaagaaggagaagcttctctcgaagccggagcaggtcactttctagagataggagaagagaaaggtctctgtctcgtgaaagaaaccacaagccatctcgatccttctctaggtctcgtagccgatctaggtcaaatgaaaggaagtagaagaccagtttgctaaagaagtggtgtacaggaaataacttcatgtgacaggagtatgtacaggaaattcaagttttgtttgagacttcataatcttggtgcatttttaagatgttttagctgttcaaatttgctttgtaatttgctttgaactttagtttttcatagactgaaataaacctagatcctgcccagttaaagtgtgatgtgctaatgctatctttaagtttccagggtacattgtagagctgaacctttgagttactgtgcaagattttttttcatgctgtcatttgtaatatgtttgtgagaatccttgggattaaagttttggttacaaattgttgtttaacttgaaagcctgtttttccttgcacactcaaatctgtgagcttggtatcaagtccaagtataacattcctattggaagccatactatattttcttgtaaagtgcttttggattaataaaatactagcataattgtgtagtagtcagttgagtgaacccactgttagagttgttcttatccctggggaagcagttggttatccagttactttcttagtaggcagcataactaagaggcactggattaagtgaatgaattttttttttccctttggttgtcaccttctaagagctagtcatttttaggaattgaagccagttctaggatcatgaaagtggcttttatcttcagcatgaacacattcaacaaagttacaaaatttggttttattttataacttgaggtcttgcatgggattccaaattaatccatcatgatgtaaaacccaccatatggttaaatgtgacagtgcacagttgaatatggaggcatgcattcctcttagaaatatggaggagttgttttcagattgtttgtgtgcaattagattaaatcataatgcaacagtcttgtggcttaagttttcttaaatgtgttc

SEQ ID NO: 4184 - DNA, 1505 bp, Cricetulus griseus
cccaaggagacctaccccaatgagcgtgtctgccccttcccccagtgccgaaaaagctgccccagcgccagctcgctggagatccacatgcgcagccacagtggagagcgtccctttgtgtgcctcatctgcctgtcagccttcaccaccaaggccaactgcggaacgccacctcaaggtgcatacggacacactcagcggtgtctgtcacaactgtggcttcatatctaccacaagggacatcctctacagccacctggtgacaaaccacatggtgtgccagccaggctccaagggtgaaatctactcaccagggtctggacacccagcagccaaacttcctccagacagcctggcaagcttccagcagcactcattgatgcacggcaccctggctcccgctgacaaggcacgcagaggcagacccgcagcgcttgtcgccagggcctgggccacgagaagagacggtggcgcgaccactccagaggccgaagccgctggccggggcagcgagggcagccagagcccaggcagttcggtggacgacacagaggacgatcccagccgcacgctgtgtgaggcctgcaacatccgcttcagccgccacgagacctacactgtacacaagcgctactactgcgcctcgcgccacgacccgccaccgcgccggccatccgcacccgcgccagctcccggacccgcggctccggcgctgacagctccgcccgtgcgcacgcgccggcgacgcaagctctatgagctgccaggagccagtgctccgcctcctgcagtaggccccgcccctgtgcctgttgtccccgcccccacggctgagctgccctcctccccgagaccggcgagcgcaagcgccggccccacccccacgccctctccaggcccggtgcccgacgggcccatagacctgagcaagcggccccgtcgccagactccggatgcacctgccactctgcctgcactggccgactaccatgagtgtaccgcatgtcgcgtaagcttccacagcctcgaagcttacctggctcacaagaaatactcgtgccctgctgcgcctttgcgcactgctgccctctgcccctactgcccgcccaacgggcacgtgcgcggagacctggtggagcacttgcgcctggtgcacggcctgcaggtagccaagccagcagccaacccaggtgctgagccccgcacaccggccgaacgtgctccgcgtgacagtcccgatagccgggcaccacgcaccccatccccagttcctgagaacacgccttctgaccccacagaccaaggtgtgcggacgccctccaagggcccgcccgcatcagctcctgcatcaggtggtggtggtggccaccgctactgccgcctgtgcaacatcaggttcagcagcctgtccaccttcatcgcacacaagaagtattactgctcctctcacgcctccgagcacgtgaagtgagtctgcggggccgcaccgcctggacccttggcac

SEQ ID NO: 4185 - DNA, 1505 bp, Cricetulus griseus
ggagctggttttccatctaccccagtcagcaagagccccatggtggagcaagctgtccagactagttctgctgataacttgaatgctaagaaactgttacccagcaaggttacctcggggacacagctcaatggtcgccaggctcagccaagcagcaagactgccagcgatgtagtccagccgacacctgtgcacacccaagggcaggtgaatgacgagaacagaagacctccacggaggcggtcaggcaatcggcgaacaagaaatcgttccagagggcaaaaccgtccaactaatgttaaggaaaacacaatcaagtttgaaggtgactttgattttgagagtgcaaatgcccagttcaaccgagaagagcttgataaagaatttaagaagaaattgaattttaaagatgacaaggctgagaaaggggaagagaaggacccagcagtgatgacccagagtgaagagactcctgctgaggaagatcttctggggcccaactgttactatgacaagtccaagtccttctttgacaacatttcttctgaactcaaaacaagttctaggcggacgacatgggctgaagagagaaagctgaacactgagacctttggggtgtctgggaggttccttcgtggccgcagttcacgtggtggattccgaggaggtagaggcaatgggacaacacggcgcaacccccacttcccaccgagctgggactggccgggtgtaagggtgcagtacacggtcttgtttaccaagtctggacaccctcatactacttggctttggactcaacctaaacttggatgtggtctgattagaaccacttgttttgggggaagtatttgtaggtgatctcctgaaggtatcttgacctacattttcttcttggttgcacacagccgaattgtaaggttttggtatttttgcaaaaaggtttctataggcaaaggctcagtcctcactttgtaatttttttttttttggcccctggtgctgctggcctggtaccccatctgctaacagtgggaagtctcaggatccaggcagggccagcacagggtgaaccagtcataggataggggtgggagggtcaagggcagggagggggtggtgttccatggatcatgttgtgtaatgaacaagtgatgttcagggttcgaggctgacagaggaggagtacagtaggaagggccccctgagtgtcatgtagagcctggcttccacaggtactgaggcttagtgtcgaagtccaagacaagcctctggctgcacttaagtgttctcatctactttgaaatgagcctagtttttttttcccccttctttctaaggtcactggccttatttcctcgtttgtaaatagttgttgtgtgtttattttaaaggtgatggagggagggtgggaacataaactttgttgcatgagtaaatgggtcagtatttttctgtatgagcatgcatcctctgactgacagggcactcttcaaaaaaaaaaaaaa

SEQ ID NO: 4186 - DNA, 1504 bp, Cricetulus griseus
ggtgcaaccaatgtgtgatcatcaccagctccagccacctgctgggcaccaaacttcggcaacaaaaccaccttccgcgtagtggcccattccagtgtgttccgtgtgctgcggaagccccaggaatttgtcaaccggacccctgaaacggtgttcatcttctggggccctccgaacaagatgcagaagccacagggcagcctcctgcgtgtcatccagcgggcgggcctcgcgttccctaacatggaggcctatgccgtctctcccacccgcatgcagcagtttgacgacctcttccggggtgagacgggcaaggacagggaaaagtcccattcctggttgagcacaggctggtttaccatggtgattgcggtggagttgtgtgaccatgtgcacgtgtatggcatggtccctcctgactattgcagccagcggccccgcctgcaacgcatgccataccactactatgagcccaaggggcctgacgagtgcgtcacctacatccagaatgagcacagccgtaagggcaatcaccaccgcttcatcaccgagaagagggtcttctcatcctgggcccagctctacggcatcaccttctcccacccctcctggacctagccatcctgtctttgcaaccttggagagataaaggcaaagtggctctgggccgaaccatttgaccttggccatcttccagccagttcaggttggctggagtatttcccagccaatcaaatcagggccttgatgagggttttttccttccagccagtgagggctggggttatctcttgtccaatcagggatttggaatcctgtatggtttaatcgggtgtcagggggtctttcttgtgtaatcagggtctaagcaaagtcaatcagggtatagggggctttctgagtcagtctaagactcgggtactatcctttcccaaaaggccttgtgcccgaaccccaggaatgggccccaaatcatttcctccttagctgggacaaagaggtcctatcacaaggatctggggacttggtgttgcccccacagttccagaatcagagatacagtacggggtaggaactgcctggaggccaggccagagagtttgtggagttctagaagttgtaggaagggctgggaggtggaggcgtgtgtccaggtcctggcttcttcctgagtgaccttgagcaagccctcctctttctggcgtgctataatgacatcacattcctgagtgcagacagagaccctcactctatattgtacttaagtgtaaattccccatcgatcatccctcactgggggactcagctccctgggaatggggagcctggggggcccttatccacctcctagaaactttagggtatctttatataaatgctcccttggctgaggaactgtgacagaagtggggaaaacatgcagctgttttcttagcctctctgtccagctgccgttaacctgcctctagaaagaccagacaactcttcctgccttgcagcagga

SEQ ID NO: 4187 - DNA, 1504 bp, Cricetulus griseus
gggcgagccacgcggagagttgtggggcgggtagctcgactcctgatgaagacacaaggagtcggatgggagggggactccagatcccagcatgccccgcggcgggccctaccggccgcgactccgggcttggccccggccctagctcgtcggcggtgtactggggcgcgtggaggctgtagtcacggtggcgcccgcggggacggaggagggaatgagtgaagaggagcagggctccggcactaccacaggctgcgggctgcccagcatagagcaaatgctggccgccaacccgggcaagaccccgatcagccttcttcaggagtatgggaccagaataggaaagacgcccgtgtacgaccttctcaaagccgagggccaagcccatcagcctaatttcaccttccgggtcaccgttggcgacaccagctgcactggtcagggccccagcaagaaggcagccaagcacaaggcagctgaggtggccctcaaacacctcaaaggggggagcatgctggaaccagccctggaggacagcagttctttttctctcctagagtcttcactgcccgaggacactcctgtcattgctgctgaagttgctgcccctgttccatctgctatactaaccaggagccctcccatggagatgcagccccctgtctctcctcagcagtctgagtgcaaccctgttggtgctctacaggaacttgtggtgcaaaaaggctggcgtttgccagagtacatggtgacccaggagtctgggcctgctcaccgcaaagaattcaccatgacctgccgagtggagcgcttcattgaaattggcagtggcacttccaaaaaactggcaaagcgtaatgcagcagctaaaatgctgcttcgagtgcacacagtacccctggacgcccgggatggcaacgaggcagaacctgatgacgatcatttttccattggggtgagctcccgcctggatgggcttcggaaccgggggccaggctgcacctgggattccctgcgcaattctgtgggagaaaagatcctgtcccttcggagctgctctgtgggctctctagggactctgggctctgcctgctgcagtgtcctcagtgagctctctgaggagcaggctttccatgtcagctacctggacattgaagaactgagcttgagtgggctctgccagtgcctagtggaactgtccacccagccagctactgtgtgtcatggttctgcaactaccagggaggcagccagaggtgaggctgctcgccgcgccctacagtacctcaggatcatggcgggtagcaagtagtaccttggctgcagtgatggatgtacgccttttacttttgctcctcctgagcctgagcctatacatcaaccatgctctggagccctccagaggtgccatctctacctctggcacagactgcctgccttgagactgaggaaggcacaggcaagcaaggagacatgaaccatagggccctagccagcacaggat

SEQ ID NO: 4188 - DNA, 1504 bp, Cricetulus griseus
cgcaggcactgccggagtcaacgaccccaggatgctcccttttgcctcctgccttcccgggtctttactgctctgggcgctcctgctgttgctcttgggagcagcgtctccacaggattcggaagagccggacagctacacggaatgtacagatggctatgagtgggacgcagacagccagcactgccgggatgtcaacgagtgcctgaccatccccgaggcctgcaagggcgaaatgaaatgcatcaaccactatgggggctatttgtgtctgcctcgatctgcggctgtcattaatgatctacatggcgaaggccctccaccaccagtgccccctgctcaacaccccaatccttgcccaccaggctatgaacctgatgaacaggagagctgtgtggatgtggacgagtgcgcccaggctttgcatgactgtcgccctagccaagactgtcataacctgcctggttcctaccaatgcacctgccctgatggttaccgaaaaattgggcccgaatgcgtggacatagacgagtgtcgctaccgatattgccagcatcgatgtgtgaacctgccaggctcttttcgctgccagtgtgagccaggattccagctgggtcctaacaaccgttcttgtgtggatgtgaatgagtgtgacatgggagccccatgtgagcaacgctgcttcaactcctatgggaccttcttgtgtcgttgtaaccaaggctatgaactgcaccgggatggcttctcctgcagtgatatcgatgagtgcagctactccagttacctctgccagtatcgctgtgtcaatgagccgggccgcttctcctgtcactgcccacaaggctaccagctgctggccacaaggctctgccaagacattgacgagtgtgaaacaggtgcacaccagtgttctgaggcccaaacctgtgtgaacttccatgggggctaccgctgtgtggacaccaaccgttgcgtggagccctatgtccaagtgtcggacaaccgctgcttctgccctgtctcgaaccccctgtgtcgagagcaaccttcatccattgtgcaccgctacatgagcatcacctcagagcgaagtgtgcctgcagacgtgtttcagatccaggcaacctccgtctaccctggtgcctacaatgcctttcagatccgtgctggaaacacgcagggggacttctacattaggcaaatcaacaatgtcagtgccatgctggtccttgccaggccagtgacaggaccccgggagtatgtgctggacctggagatggtcaccatgaactctcttatgagctatcgggccagctctgtactgagactcaccgtctttgtgggagcctacaccttctgaaggagaccctcagggaagggctgggtggggcccccctctttctccctctcatagcttaaggagcctggggttgaggggtgactgttctgcttaaagagacaatgatgtgaaggacaataaagggagaaaggagaaaaaaaa

SEQ ID NO: 4189 - DNA, 1503 bp, Cricetulus griseus
ctgtgaaaccatcgcgggacagtcattttgccatttttatcataccccagggccgagagactgagtggctctttggcatggatgagggccggaagcagctggcagcaagtgcaggcttcaggaggctggtcacagtggctcttcatcgaggccaacagtatgatggcatggaaagcattcaagcagagctgtcaaccagagtcatggagctggccccagccgggatgcctccccagcagcaggttcccttcctgtctgtgggcggggacattggagtccggactgttcagcaccaagaccacagtgccttgagtggtgactatgttattgaggatgtgcaaggagaagataggtggtactttcggcgtctcatcttcctcagcaacaggaacgtggtgcagtcggaagccaggctgctgaaggatgtgtctcacagagcccagaagaaacggaaaaggacaggaagaaacatcgacctgctgatactcctgaggacttcccttctgccccaggacagtccatcgataagagttacctctgttgtgaacaccataaagccatgatcgctggccttgccctgctgagaaacccagagcagctcttagagactccactgacattattggtggtgggcctgggtgggggtagcctccccctcttcgttcatgatcatttcccagagtctcgtgttgatgctgttgagattgatccgtccatgttggaagtggccacccagtggtttggcttctcacagagtgaccggatgaaggttcacattgctgatggcctggactacattaccagcctggcaggaggagaagccgaccccactatgatgtgatcatgtttgatgtagacagtaaggatccgacactgggaatgagttgtcctcccccagcatttgtggaccagcttttcctgcagaaggtcaaaagcatcctgtctcatgaaggtatctttatccttaacctggtgtgtcgtgatttggagttaaaagactcagtgctggctggactcaaggcagccttccctctcctgtatgtccggcgaattgagggggaagtgaacgagatcctgttttgtcagctgcaaccagagcagaaacttgctacaccagagctcctagaaatggctcaggctttggagcggaccctgaggaagcctgggcagggttgggatgacacttatgtcctgtcagatatgctgaagactgtgacaattgtgtgattggtggggccagtcagccctctcagctttctgcccagactgacttgtattcttgggctgctgggagtatgatgcacagttcttttggaacatatgtttttcttggtttcatactcagcctagtccctccctaccttttgggattgggaggcagcccagggatgattatggaagtggtggtgcacacctttaatcccaacacttgggaggcagaggcaaatggatcctctgtgagttcgaggctagcctggactacaaagtgagttcaggacagcc

SEQ ID NO: 4190 - DNA, 1503 bp, Cricetulus griseus
cccggcaagatggccgagtacgacctgaccacccgcatcgcgcacttcctggaccgccacctggtcttcccgctgctcgagttcctctcggtgaaggagatatataatgaaaaagaattattacaaggaaaattggatcttcttagtgataccaacatggtggacttcgctatggacgtctacaaaaacctttattcggatgacatccctcatgctttgagagaaaaaagaaccacagttgttgcacaactgaaacagctccaggcagaaacggaaccaattgtgaagatgtttgaagacccagaaactacaaggcagatgcagtcaaccagggatggtcggatgttatttgactacctagcagacaagcatgggtttaggcaagagtatttagatacactgtacagatacgcaaaattccagtatgagtgtgggaattactctggagccgcagagtatctttatttcttcagggttttggttccagcaacagatagaaatgcactaagctcactctggggaaaactggcctctgaaatcttgatgcagaattgggatgcagccatggaagacctgactcggttaaaagagaccatagacaacaattctgtgagttctccgctccagtctcttcagcagcgaacatggctcattcattggtctctgtttgtgtttttcaaccatccaaaaggccgtgataatattattgatctcttcctttaccaaccacagtaccttaacgcaatccagacaatgtgtccacatattcttcgctatttgaccactgctgtcataacaaacaaagatgtgcggaaacgccggcaagttctgaaagatctggtgaaagttattcaacaggagtcttacacatacaaagacccaattacagaatttgttgaatgcttgtatgttaactttgactttgatggggctcagaaaaagctgagggaatgtgaatccgtgcttgtgaatgacttcttcttggtggcttgtcttgaggacttcattgaaaatgcccgtctcttcatatttgaaactttttgtcgtatccaccagtgtatcagcattaatatgttagcagataaactgaatatgactccagaagaagctgaaagatggattgtgaatttgattaggaatgcaaggttggacgccaagattgactcgaaactaggtcatgtggttatgggcaacaatgcagtctcaccctatcagcaagtgattgaaaagacaaaaagtctttcttttagaagccaaatgttggccatgaatatcgaaaagaagcttaatcagaacagtaggtcagaggctcccaactgggcaacccaagattctggcttctactaaagaattataaagaaaagaagaaaaagaaagtaattaaagacacagtaaccattatatataaagggtgccatacatttttagaaacaattgacatttgctataaattttggacaatttgaataaaattggctgtgattgatttttatcttgcttgaa

SEQ ID NO: 4191 - DNA, 1503 bp, Cricetulus griseus
cggggctcagcttcgccccacaaatcttctccacagcccttagtggctacacctagccagcatcaccagcagcagcagcaacagcaacaaatcaaacggtcagcccgaatgtgtggtgagtgtgaggcatgccggcgcactgaggactgtggccactgtgatttctgccgtgacatgaagaagttcggggggcccaacaagatccggcagaagtgccggcttcgccagtgtcagctgcgggcacgggaatcgtacaagtacttcccttcctcgctctcgccggtgacgccctcagaggccctgccaaggccccgccggccaccaaccacgtcaacagcagccacagccatcccagaagctggggcgtatccgtgaagatgaggggacagtgttgtcatctgtgggtaaggagctgccagaggctacagcaacacccgagccactctcagatgaggacctggcattggaccctgacctgtaccaggacttcctggggcctggctgtgtgcatgctgcccagcctggttctaagtattgttcagatgactgtggcatgaagctggcagccaaccgaatctatgagattctcccgcagcgcatccagcagtggcagcaaagcccctgcattgctgaagaacatggcaagaagctcctggaacgcatccgccgtgaacagcagagtgcccgaacccgtcttcaagaaatggaacgcagattccatgaacttgaggccatcattcttcgtgctaagcagcaggctgtgcgtgaggatgaggagaacaatgagaatgacagtgacgacacagatctacagatcttctgtgtctcctgtggacatcccatcaacccacgtgttgccttgcgtcacatggagcgttgctatgccaagtatgagagccagacatcctttgggtccatcgtaccccacacgcattgaaggggctacccgactcttctgtgacgtctacaatccccagagcaaaacatactgtaagcggctccaggtgctatgtcctgagcactcacgggaccccaaagtgcccgctgatgaggtctgtgggtgtccacttgtacgtgatgtctttgaactcacaggtgatttttgccgtctgcctaagcgccagtgcaatcgccattattgctgggagaagcttcggcgtgcagaagtggacttagagcgtgtccgggtgtggtataagctggacgagctgtttgagcaggaacgtaatgttcgcacagccatgaccaaccgagcaggattacttgccctgatgctgcaccaaacgatccaacatgacccactcactaccgaccttcgatctagtgctgaccgctgagcttcaccagcccagagcccctcacccctgcattccagttaggggagtggccctgcatcaccggctttctgttcctccattcatctgtttattccactgctccttagttttatccctgtgtccatctatgttctggcttacatttgcccttattaatgggactctg

SEQ ID NO: 4192 - DNA, 1502 bp, Cricetulus griseus
ctttgggtagtcgcttcatggctgtgaagatggcggtagctgcgtggcttcaggtgtctcctgtcatttttcttctttttgggggcgcagccgttcccattgtccttttttggtgcagggccagcacccgtgtttgccgcagatagatcaaaagtggcacattccaatgccgtcggggaaaaattattttagttttggaaagattcttttcagaaatactaccatcttactgaaatttgatggagagccttgtgatctgtcttttaatataacctggtttctgaaagtgctgattgctacaatgagatctacaacttcaaggcagatgaagtagagtcatatttggaaaatctcaaaggaaaaaaaaggcttgtctgggagataccaaacatcatcaaaattaagactgatcttgcttccttggcctttatacccttggctttcctagacactgccctgtgctggtggatattcattagcctgactcaaacaatgaagctattaaaacttcggaggaacattgtaaagctctctttgtaccgacatttcaccaacacgcttatcttagcagtggcaggtgttcatcatctggacaaccatgaagttcagaatagtgacttgccagtcggactggcgggagctgtgggtggatgatgccatttggcggttactgttttccatgatcctttttgtcatcatgattctctggcgaccatcagcaaataaccagaggtttgccttttcaccattgtcagaggaagatgaagaggatgagcagaaggaaccgatgctgaaggaaagctttgaaggaatgaaaatgagaagtaccaagcaggaaccaaatggaaatagtaaagtaaacaaaacacaggaagacgatttgaagtgggtagaagagaatgttccttcttccgtgactgatgtagcacttccggccttgctggattcagatgaggaacgaatgatcacacactttgaaaggtcaaagatggagtgagcaatgggaaactgctgttggagatggctagtatcagggaagagaccagcttgtgtgtcagtcttctgcactgctccatgggattaaaggaggcaatgacatctgggagctgggggagaggtgtcaaccaagaagaacagcttactgagaacacattcataggattcgaaaaatctacaagcttctttacatcattgatatccttccctcccaaaccccatcatgactgtttttgcaacctacgtgttgtccctgaacttcctgttcagttgtataatctgtcagactaggaagtttaatgtttctgaaaggactatgtcatctgcaccataatttgtcatctctaggagcagctgcctgtgatttcattttatttaggaagttgtatcagtgatgggagaaattgtcgtttatctttcagtttcccaagaagtcaaggttacatcttgcagaagaagtttgcttttttttttttttttttttttttttttttcttttttacaga

SEQ ID NO: 4193 - DNA, 1502 bp, Cricetulus griseus
cagacctactgccagagaaccctaagagagataaaaatcttgctgcgtttcagacatgagaatatcatcggcatcaatgacatcatccgggcaccaaccattgagcaaatgaaagatgtatatatagtacaggacctcatggagacagatctttacaagctcttgaagacacaacacctcagcaatgaccatatctgctattttctgtatcagatcctgagaggattaaaatacatacattcagctaatgttctgcatcgtgacctcaagccttccaacctcctgctgaacaccacttgcgatcttaagatctgtgactttggccttgcccgtgttgcagatccggatcatgatcacacagggttcttgacagagtacgtagccacacgttggtacagagctccagaaattatgttgaattccaagggttataccaagtccattgatatttggtctgtgggctgcatcctggcagagatgctctccaaccggcctatcttcccagggaagcactaccttgaccagctgaatcatatcctgggtattcttggatctccatcacaggaagatctgaattgtataataaatctaaaagctagaaactacttgctttctctcccacacaaaaataaggtgccatggaacaggctgttcccaaatgctgactctaaagctctggacttattggataaaatgttgacattcaaccctcacaagaggattgaagttgaacaggctctggcccacccatacctggagcagtattatgacccaagtgatgagcccattgctgaagcaccattcaagtttgacatggaattggatgacttacctaaggagaagctcaaagaactcatttttgaagagactgctagattccagccaggatacagatcttaaattggtcaggtatctagaactttaactatacagctaaccccctagaaagggagagatggtacaagttaaaaacatctttagaaggaaaaaggaattcaatgtgtccccctttgattgatagagcttttgttgtgattgcttcctggtatgaaatgaagaaattagacttcatctttcacagattatgaggacatgaaataaagtggcagctcttagacaccgtgacagtgatatgtattgggggttgggggtcatatgtgagaaaataacttgtgggagggaacagctttgaggcatttactcccaaaaaaccttattttactttatatgacattttaaatgttcagaatttctattgtgtaacttttgtggccttgggactgtgtggttgttgctggctggttgtggtgttagggattgaatccaaggcctcatgcatgctaagcaagtgctataccaccgagctacactcctaagacttgagaagaggaaattaatgggagagggaaagggggtaagaggataacgggtgaatatgctcaaaatacattatacatgtatgaaaatgtcagtgaaaccattactatgtataattaatatat

SEQ ID NO: 4194 - DNA, 1502 bp, Cricetulus griseus
cttcagtctgactccaaacatcatgtacccaagcactagcacaaatgagaaaccttttgaattcacagactgtgagacagtattttttaatcagtcatactttcagacagatatgaggcctcacaatggaggagaaccctatgactggaataaatatgggaatggttttattcatcccacaagttttgctatgcatcttccgattctcaatgcaagaaacccctacaaatttgaggaatgtggaaaggactttcagtattttgcatgccttaataatcccatgggaatgtgcactggagaaaaattctgtgactgcaaagaatgttggaaagccttcacggtttcctcacacctaactcagtatgtatcaattcatactgaagaaaaatccaaagtgtgtaagatatgtgggaagtcctttgctaattttctcgactttctgcacatgtaaaaactcatactgaagaaaagccctttgtatgcaaggagtgtggaaaggtttttttttttgtttttttttatttttctagcatttcttttgttttctcagacaggtagtcataactgtagataatgatggttattttttttctactttagtggtttctttacagaaatgagtatgatgtccagcacaatagttaaagtagtaaaagcatatttttctttagaattataatgaggtatgctctccaccatactgatttgcttattagatagaattttttaatatctggattttacttactgattttatagtatttctttaattgtgaagtaaaattcctcttggattcattaattgttttccttgtattcctctgtgatgaccatactcatttgctggtaagactcaagtacctaggatttccttggtccataatacctaatactggaatgagtaaaaggactctaaaataaaggcagtcatttattaatgatgattatatattagttgtctgatgttaaccttaaattcctagatatatttaacttggacattaaggatcatttttgttttgtgtgattgctggggatcaaacaatcccaggagtatgcaagcactctaccagtgagctacagttttgaaccagatggattattcttactatttagtgatcgttatttttgctcacacaaaggttttcatagatgttcttaagtaacattggcatataagtttttcttatgcaagaagaaatggagtatgggataggtggagtgcctgtgtagcagtgtacaagatcctggtttcaatcctcagtaccatcaaaacaaaattttaaaatagattgactggtttttagctgtagattagaacagtatcatatactacagtgaagtgtattccttactaaattcttaacctgttcagttatcctgacctagaataattgatgtttgggtacctgctttctatcatcttaaactgtttggtatcttttatgtttctaggataactaatatttacattaaaataaaaaaaaaaaaaaaaaaaaaaa

SEQ ID NO: 4195 - DNA, 1502 bp, Cricetulus griseus
gttgagaacaaggatcacaggtctccctcatcttcctttggcccttcagttcgatggtttccattcttgtaccaaccaagtctaccgccttgtggttcctggcccctcaatgccaatgttatttgaggcagagggttcatctggcacaactcagcgtcctctggaactggctggcacacagtcctgcctcactgtccaaaaggagtggaccctggaacttgggagctctcaggacatacctaatgtactagatatctccaaagcactgcctgagtcctcgctgacccacctgcttagtgacaacttctccaattccttggtgtctttctctgctgaaattttgtcacggatactatgtgaaccacctctgactcttcgccgaataaggcctgagaatgctggggctgttaaaacaggcgtgaagctaacagtagctctagaaatggatgactgtgaatatccccctcacctggacatatatatcgaagatccacacttgcctccccaaataggactccttcccggagcccgagtccactttagccagctggagaaaaagatttccagattcaacattgtttactgttgtttccggccgaccacttccgtgcaggtccgtgagcttccccctagagaacaaagccagggttcctctgccccacatctacctggctgaacttctccaaggtgaccgggtgccattccaggccactacctcttgccacatagtccttgtcctgagcctccagatcctgtgggtgtgtgctcactgcaccagcatctctccccaggggaggtgtagtcgtcaggaccataactgtccagctcagacggcagtaagccaggccagtgtcaggctcttggtagaagatggcactgcggaagccacagtgacctgtaggaaccatcacgtggcagcagcactagggttgagtcctagccagtggacctcagtcctagaatgtgcacgggggccagggagagtggccttgcagtttaaaggcttcggagcccagacagagtctccaagcaaaacccatgaacctttggccctgtttctccggaaactttgtgacagcccagctgtcctccgacctgttaagctttcttttgcacttgaaaagagaccctctgatgtcaccccactagaacccgcccgcctgcagcacttccagtgtggagagctccccctgctgaccaaagtgaatcccaggctccggctggtctgcctttctctgcaggagccggagctccccatccttccagaagcttccgctgcttcctcttgactggaactgcctaagggcctcacagtgcttccaggagcccagacgctgcagtcacgagctacagccccactgtcgtttctagttattccggtccggcctgccttgggaacactgagaacagcaagtcgcagcatgaacgttggttctttcctcagatcgggctaggaggcctgcactcctaggtggccctcgaggaccttgggtctgccttgt

SEQ ID NO: 4196 - DNA, 1502 bp, Cricetulus griseus
accaggactgtcacgttcccagggccccagcccctggagaaggagagggcacatcctgggtctgccgccagtgtgtctttgcgattgccaccaagagggggggcgccctgaagaagggcccctatgcccgggccatgctgggcatgaagctctgtctgccgtatggactaaaggggctggactgggacgccgggcacttgagcaaccgacagcagagctactgttactctggaggccccggggagtggaacctgaaatgctgcagtgtcggagctgtctccagtggttccacgaggcctgcacccagtgtctgagcaagcccctcctctacggagacagattctatgaatttgaatgctgtgtgtgccgggtggccctgagaaggtccggaggttacagcttcgctgggtggatgtggcccacctggtcctctaccacctcagtgtctgctgcaagaaaaaatacttcgattttgaccgagagatcctccccttcgcctctgagaactgggacagtctgctcctgggggagctttcagacacccctaagggagaacgttcttcccagctccttgccgccctcaacagccacaaggaccgcttcatttcagggagggagattaaaaagaggaaatgctttttggtctccacgcgcggaccccgcctcctgtggagcctgtcactggagatggagctcccaccaggcagagggcgctgcaggcctcagtgtctccaccacccaccagccctaaccagagctatcagggcagcaggggctacaacttccggcccacagacgcccgctgtctgcccagcagccccatccggatgtttgcttccttccacccttctgccagcactgcagggacctctggggacagtgaacccccagacaggtcacccctggaactccacattggcttccccaccgacatccctaaaagttctccccactcaatggctgcctcatcctcctcagccccagctcccatcccaggcctttccagacactcagtgcccccttctccccttgtgccatagtctgtctccagggaccgggggaggagtccgaggtggggttggctacctgtctcgaggggaccctgtcagggtcctcgctcggagggtgcggcccgacggctctgtgcagtacctagttgagtggggaggggggggcatcttctgacagccctctcctgcccacctccccgtccacacactggcactttcatgccctgacctctgacctcacctacagctgggatgtacctggagagatagggagtagttctccctactgcccaggctggaatccaggggagtggggaagtcctcctctctgccccttcatgacccctgaccctcatccttctcatttcctttgatgttattttgttacagcttttaaaatatttttaaaactatttaacccctgggtatagagactgggggtggtggtccaggattccagactctgtatgactgtaataaagagaaataaac

SEQ ID NO: 4197 - DNA, 1502 bp, Cricetulus griseus
tgcggttgcgatgtcgcccccgccgggcggcgcgggtcccggtccgccgcggacgctcgtcccccgccgcgcggctgagcttcgcggtcggccacttcctcaacgacctgtgcgcgggcatgtggttcacctacctgctgctcttcctgcactcggtgcgcggctacagctcgcggggcgccgggctgctgctgctgctcggccaggcggccgacgggctctgcacgccgctcgtgggctacgaggccgaccgcgccggcctgcgcgcgctgcgggccccgcaaggcctggcacctggcgggcaccgtctgtgtcctgctgtccttcccattcatcttcagcccatgccttggctgcggggaggccacccctgagtgggctgccctgctctattatggacccttcatcgtcatcttccagtttggctgggctgccactcagattgcccacctgagtctcatcccagagctggtgaccagtgaccacgagaaggtggagctcacagccctcaggtatgcgttcaccgtggtggctaacatcacggtgtacggtgccgcctggctgctgctgcatctgcagggatcctcgcatgctgggcaggatatcagtgtaggtgaccagctgggagtccaggatgtgccggtgtttcggaacctggccctgatggtggtgggcgtgggagccatcttctcgctgctcttccacttgggtaccaaggaggggcggcggccctgtccccgggagatggaacctgacgagcacagccccctggtggcccccacagccaggccactgctgctctggaaacactggctgcgggagccagctttctatcaggtgggcatgctgtacatgaccacgaggctcattgtgaacctgtctcagacctacattgccatgtacctgacctactctctcagcctacccaagaagtttatcgccaccatccctctggtgatgtacctgagcggcttcctctcatccttcctcatgaaacctgtcaacaggcgcatagggaggaacatgacctacttcagcgggcttctggtgatcctggccttcgcagcatgggtggctctggtagataagctgggcgtggctgtgtatggggcagctgtgctgctgggtgcaggctgtgccactgtccttgtcacctcactggccatgacagctgacctcattggcccacacacgcacagtggagccttcgtgtatggtgctatgagcttttcggacaaggtggccaatgggctggcagtcatggctgtgcagagcctgcacccctgcccctccgagctgtgctgtagggcctgtgtgggcttctaccactgggtgatggtgaccgtgaccggtggtgtgggtgtggccgcggccctggctctctgcagcctcctcatttggcccattcgcattcgaacccgtactggggaccccagagaccggccctgacccggctccctagggcaacacgacgaaggaccaggcagacaccctagtccccc

SEQ ID NO: 4198 - DNA, 1501 bp, Cricetulus griseus
ttcagcgagtggaaaatacccgatttcttttgccagaagacaatgtttgtagtgagatgttggtaaaatctcaatttgttgcttgcatggctacttgtcattcacttacaaaaattgaaggcattctttctggtgacccactggatttgaaaatgtttgaagccattggatggattttggaagaagcaactgaagaagaaacagcacttcataaccggattatgcccactgtggttcgtccttccaaacagctgcttcctgaatctacagcttcaggaaaccaagaaatgaggagtcagtggatcgatggggaaaatgctgcttgtcctgggccctaagctgtagaaagaagacaccaaaagctaaatacatgtacttggcgcaggagctcaaagacgatcctgaatggccacctaaacctcagtcaacgacggaagccaaaactgtagtaaaggagaatggatcatgtcagatcagcaccatagcatagcagagactgcttctgccgtgctagtgacagtattcaggaggatgtgcttaggcttctgacactgtgtgtcagaacggcactatttcagtttatagccctctcatacatagtacagtagttgattaaaaaacaaaaccagtaaaatggcatttgcctcacagttattaactatcaatctggctagatcttcatgcagtaacctaaatgtgatatatttaacatcctcaagagaatgatcataaaatgctattttgatacataccccttttaatatttagggttgatagggtttatatctcatctgtccatattgtttgcaaaggaacaaggttttatgtaggtgagagaaagcatttgtagaagttagatttcaacatagacaggggtagggttattccagtgagggaggatgtttgaggaatgtctgtcagtccagacatgggtcctgcttagtgcggtaggtagatggactcttctgtaggtcaccgtcatatagagatttgggttctgaattttacattaaattatttgagtatatacagacctaaattttaaaatctgtacatatattattttgatgtattaagattgataatattgctgatttaaattttatttatgcacatacttaaaggacagaaatgtctgggaaagtaattgttaaataatgatatgttaactttttaacttttttaaattaaataagtattttttaacagcaaaagctcatacacagcaaggagcagcttcaggctttagagaacatctaattcatgcatgcagttttgatgtgtctaagaaaggggttttctatatttatggtgggaggttactgggaacttttaacaagatagggtattaacttttgtacagtctgggcatttacatgtatttttaatgtattacgatttggtaattatgtgcacatgaaattaataaacattacttcctgttatgatttgtgtaattccctaagactgtggtaatttttttaagtaacttttatatatc

SEQ ID NO: 4199 - DNA, 1500 bp, Cricetulus griseus
gatttccaaggtcagactatgacatcagacaaggcatgccaccttaaagacaataaaaagaagcaactgcagaaaagcccaaacaggatgacaacatacctaaaaaacgagtgcttggttattatcatggccaggttgttcagtctaagattaattcatttagaaaggttccaaatatcaaaggtgagagtccttcagcaaccaagaaacttcctcctactgtgtctaaagccacaaaggctaagtctgcacctgtaaacgccgtcagtataagagcctcaagtgtgactgctaccaccaagtttgtaaacactaagtctgtgagcactacgtccaagaacacacttgtgcgaccacctattagaagcctccacaaggcaccatcaagaagtaaaacatctgaaagtgtatccaggactcatttgtctaataccagactgatagaaaagtcagaaaatatggaccgacgcagatacacaatggcaggagcaactgttcctagatcagttcagcccaaagaaaccacagaagagagaaaagctccaatgactgagcggagaactggcaaaggaaaaggactaaaaaggcctcctaacttaatagctaatcagtctgagacaaagggacaaaaagaaaacccagttgggtccttttggactacaatggcagaagaagatgaacagagattatttactgaaaaagtaaacaagacaatttctgaatgccttaacctgatcaataagaagggatgcccaaaagaagaaattttagacacattgaatgacctgattcataatattccagatgccaaaaaacttgttaagtattggatatgtcttgttcgtattgaaccagtcacaagtcctattgaaaatattatctcaatctatgagaaggccattctggcaggggctcagcctattgaagagatgcgacacataatcatagatattctaacaatgaagagtcaagaaaaagttaatttgggagaaaatattgaggagggtcatgcaaccaagggacatacccaggaagtcaaagattttataacccctgattcaaaaactgaagcaggttgcctaattagatataatgtatcttctactccatgcttgcaaagtatgaaaaagaagatgcaacatggtaataattccacagttaaagagctaaaagtttctcacaccagtgaggcgttctcggcgcattcaagaaaagactttacaactgccagatatgttaaaagaccacgacccttgtgtatcttcactgggacagttgtctgagttgggagaggatgcttttgtttgccgtcctaatacagcactgtgccctctgttctctgagactgacacagtgggagagaaatagtgctgctgagaaaggaggggtgttatattattcctgtggtggtttgtcatgtacaactttatgtaggtctgacgttgtccctgcacctatgtacaatacagtgaacttcactagtttgtttattgggttttt

SEQ ID NO: 4200 - DNA, 1500 bp, Cricetulus griseus
aaagctgctgaagcagacagcaaactgaaacaggtctacatccccacctatactaagccaaaccctaaccagatcatttctgtgggttcaaaacctggcatgaatggggctggattccagaagggccttacttgtgagagctgcctactactacacagtctgcccagtggtatgcctggggcccacctaacatgcagtgtcgtctttgtgcttcctgctggatttactggaagaagtatgggggactgaagaccccaacccagcttgaaggagcagctcggggcactacagagccacactcaagaggtcatttatccagacctgaagcccaaagtctctcaccctatacaaccagcgctaaccgggccaagttgctggctaagaacaggcaaactttcttgctccagaccacaaagctgactcgtcttgctagacggatgtgcagagacctgttacagccaaggagggctgcccgaagaccctatgcacctatcaatgccaatgccatcaaggcagagtggctctatccgacttcctaaggctgccaagacgccactgaaaattcaccctccggtgcggctgcccttggcaactatcgtcaaagatctggtggcccaggcacctctgaaaccaaaacacctcggggcaccaagacaccaatcaacaggaaccagctgacccagaaccgaggcctgggggcattatggtgaaacgttcttatgaaactatggcaggggcaggggtccccttctctgccaatggaaggcctctggcctcagggattcgttcaagctcacagccagcagccaagcgtcagaaactaaaccctgctgatgctcccaatcctgtggtatttgtggctacaaaaaagaccagaccagggctttaaggaaggctctaactcacctggaaatgcgccgagctgcccgaaggcccaacctacccttgaaggtgaagccaacactgatggcagttcggcccccagttcctctgccagcaccctcacatcctgccagcaccaatgagcccattgttctggaggattgagcatcttaggggagggagatgggatgagaggtagaggggtaggtgcccaaggcatacaaaagcctacaggaacttgcctgtgtgtctacctaccctatttgggggttgggacccacagttgttttggacagctgggctggggggggagggttttttaaatttttaaaaattttacctccctttgtaaaagggatggaggaggggaagagtaaacatgtcaggtggtggtacctggcagggggaaggagagtgcactgccatgtctacctttttctctttattttctaattggggtttctcttactgtccggtgtccggactttgctaattagtttgagggctctaaggtggcatccaaccccagcccatgctcgctctttcttccctcccctttcttcagcccaaaaaaaaaaaaaaaaaaaaaaaaaaaaaaaaaaaaaaaaaaaaaaaaaa

SEQ ID NO: 4201 - DNA, 1500 bp, Cricetulus griseus
ggcaaccattatgttcataagctaactgacttcaagtactcgagcagcagatcctcttccgaagccaccttgtctacctctcctaccaggccaaccactctaagtttagatttcaccaagaacactgtggaccagctccagcccagttccccaaaggtgtacctgtacatccagatgcagctgtgcagaaaggagaaccttaaagactggctgaaccgacgctgcagcatggaggacagggagcacagtgtgtgtctgcacatctttctgcagatcgcagaggccgtggagtttctgcacagcaagggactcatgcacagggacctgaagccttccaacatattcttcaccatggatgatgtggtcaaagttggggactttggactagtgaccgccatggaccaagatgaagaagagcagactgttctgactccaatgcccgcctatgccacacacacaggacaagtggggaccaagctctacatgagcccagagcagattcacggaaacaactactcccataaagtggacatcttctctttgggcttgattctgtttgaattactttacccattcagcactcagatggaacgagtcaggaccttaactgatgtaagaaatctaaagttcccacccctgtttactcagaaatacccccgagagcatttgatggttcaagacatgctctctccttcccccacggagaggcctgaagccataaacatcattgaaaatgctgtatttgaggacttggagtttcccgggaagacggttctgagacagcggtcccgctccatgagttcatctggaacaaaacattccagacagcctagctgttcacacagcccactgcctggcaactagctttcagctgtccctctagagacttactttctagagataccagggtgatttttgaaagtgattgtcgtaaagctgactccagttttgtccctggtaggcacttgacccatctgcactatttggaaggcacatagcacaagccgggtctcggttcatgtcagtagtgtcatagtctgcagcattgaatagctccatcctttaggttgttctagggagtgttaggaattttttgtactttttacctccaataatgggaaaatgaaactttttaggtatcagtctaaggttctgatttgagggcttcaaaaaaaagaaactgtagtaagaaatggatcatctattatgactaacttcttcaattatgtaatttttagcctactagaatcctatcttatatataatactgtaagtgggtacatccctcaaactgattatagatatgtttaatcatctcaacttgctaacgttttcatttttcctgtaaatatgtttattttttatttatgaaaattctgaaatcaatccatttgggttggtggtgtacagaacacacataagtgtgttaactattatgacttctttcaagtctaaatgatttaattaaaactttttaaattaaaaaaaaaaaaaaaaaaa

SEQ ID NO: 4202 - DNA, 1500 bp, Cricetulus griseus
tgagctgcgatggctgcggcggcagcagtgatcccgccgacgggcttggaggatggggtgtctcgggctcgcggggaaggcgcaggggaggcggtggtggagcgcgggcccggcgcggcctaccacatgttcgtggtgatggaggacctggtggagaagctgaaactgctccgctacgaggaagagctcctccgaaagagcaatctgaagcccccgtccagacactactttgctctgcctaccaacccaggtgagcagttctacatgttttgcactcttgctgcttggctgatcaacaaaacagggcgtacctttgagcagcctcaagaatacgacgatcccaatgcaactatatctaacatactctccgagcttcgctcatttgggaggactgcagattttcctccttcaaaactaaagtctggttatggagaacatgtatgctatgttcttgattgtttagctgaagaagcattaaaatatattggtttcacttggaaaaggccatcatatccagtggaagaattagaagaagaaactgtcccggaagatgatgcagaattaacattgagtaaagtggatgaagaatttgtggaagaggagacagataatgaagaaaacttcattgatctcaacgttttaaaggcccagacctatcgcttggacacaaacgagtctgccaaacaagaagatattttggagtctacgacagatgctgcggaatggagtctagaagtcgagcgtgtactaccgcaactgaaagtcacgatcaggactgacaataaggattggaggatccatgttgaccaaatgcatcagcacaaaagtggaattgaatctgctctaaaggaaaccaagggatttttggacaagctccataatgaaattagccggactctggaaaagattggtagccgagaaaagtacatcaacaatcaacttgagcacttggttcaagaatatcgtggggcccaggcccagctgagtgaggcaagggagcgctaccagcagggaaatggcggagtaacggaaaggaccagagtcctgtctgaggttacagaagaattagagaaggtgaaacaagagatggaagagaagggcagcagcatgacagatggcactccattggtgaagattaagcagagcttaaccaaactgaagcaagaaaccgttcagatggacattaggaatgggggttgtggagcacactctactgcagtccaagctgaaggaaaagtgcaatatgactcgagacatgcacgcagctgttaccccggaatcagcgattggcttctattaaaacatgtgggctttcatgcttctgattatttgtttttatatcagatgatttttttaatgttgcatggatttccaaacacaatctatacctctcaagcttgttcagtgggtgtttttgcacaggtattgtatcatggtgattatgacggctaaagccttttaacaaatagaaataataagtatttaataaagtacttaaaa

SEQ ID NO: 4203 - DNA, 1499 bp, Cricetulus griseus
cgcgtccaggggcgcgacgtacaaccagacggacggctctcctcgcagctcgcggaggcgaaccgggcgacagtgccatggcagaacaagatgtggaaaatgagcttttggattatgatgaagacgaagagccccaagcaccccaggagagcactccagctcccccgaagaaagatgtcaaagggtcttacgtctccattcacagttctggtttccgggactttctgctgaagccagagctcctgagagccatagttgactgtggctttgagcatccttcagaggtccagcatgagtgtattccccaggccattctgggtatggatgtcctgtgccaggccaagtctgggatgggcaagacagctgtgtttgtgctggccaccctgcagcagatcgagcccatcaatggccaggtatctgtactggtcatgtgccatacaagggagctggccttccagataagcaaggaatatgagcgcttctctaagtacatgcccagtgtcaaggtatcagtgttctttgggggcctctccattaagaaggatgaagatgtgttgaagaagaactgtccccatgttgtggtggggacaccaggccggatcctggcacttgtacggagcaggagtctgaacctgaggaatgtgaaacactttgtactagatgaatgtgacaagatgctggaacagctggacatgcgccgggacgtgcaagagatctttcgcctgacaccccatgagaagcagtgcatgatgttcagtgctaccttgagcaaggagatccggccggtctgcaggaagttcatgcaggatcccatggaagtgtttgtggatgacgagaccaagctcacactgcacgggctacagcagtactacgtcaagctcaaggacagtgagaagaaccggaagctctttgacctccttgacgtcctagagtttaaccaggtggtgatcttcgtcaagtctgtgcaacgttgcatggccctggcccagctcctagtggaacagaacttcccagccattgctattcatcgaggcatgccccaggaggagcgcctgtctcgctaccagcagttcaaggacttccagcggcgcatcctggtggctaccaatttgtttggcagaggtatggacattgagcgagtcaacatcgtcttcaactatgacatgccagaggactccgatacttaccttcaccgagtggctcgtgctggtcgctttggtaccaaaggcctggcagtcacttttgtatctgatgaaaatgatgccaaaatcctcaatgatgttcaggatcggtttgaagttaatgtggcagagcttccagaagaaatagatatctccacatacattgaacagagccgataaccatatgtgtagccaatgcaccatggccaccctctttcccacctgctgcttcagatcctcttcctaggtgacaaatgggtgtatctttttatattgttccaaagctgtagctgtgtaagaataaacttttactgtgaa

SEQ ID NO: 4204 - DNA, 1499 bp, Cricetulus griseus
aaaccaaagacccagcagtcaccagtttccaatgggtctcctgagttaggaatcaagaagaaagccagagaaggaaaaggaaacacaacctatctgtgggagtttctcttagatctacttcaagataaaaatacgtgtcccaggtatattaaatggactcagagagaaaagggcatattcaaacttgtggactcaaaggctgtctcaaagctttggggaaagcataagaacaaaccagatatgaactatgaaactatggggcgagctttgagatactactaccaaagggggattcttgcaaaggttgaaggacagaggcttgtatatcagttcaaggatatgcccaaaacatagtggtcattgatgatgagtgtggctagagttgtgaatatcacctcccctgctcatgatgcttcatccaggtctcctaccaccacagcatctgtgccagcagcagcagctccaaggacagttcgtgtggcaatgcaagttcctgtggtaatgacatcactgggtcagaagatttcaactgtggcagttcagtcagtcaatgcaggtgcaccattaataaccagcaccagtccaactacagccacctctccaaaagtcgtcattcagacgatcccgactgtggtgccagcctctgctgaaaatggagacaaaatcaccatgcagcctgccaaaattatcaccatccctgctacacagcttgcacagtgtcagctgcagacaaagtccaatctgactggatcaggaagcattaacattgttggaacccccttggctgtgagagcacttacccccgtttcaatagcccacggtactcctgtaatgagactatctgtgcctgctcaacaggcttctggccagactcctcctcgagttatcagtgcggttattaaagggccagaggttaaatcagaagcagtggcaaaaaagcaggaacatgatgtgaaaactttgcagctggtagaagaaaagggagcagacgggaataagacagtaaccatgtagtggttgtcagtgcaccttctgctattgcccttcctgtgactatgaaaaccgaggactagtgacatgtgagaaaataaacatgtttcagtgggaagtgaactatacattgagatgctgacagaaaactgcctcttagactaggaacgactgaaccctcaagaaaaaagactgaaagggaccaagcagcccactacaatatcaagttacactaagagttggaacactaacacctgtaagaggttacatagttttcagtggggcgggattgggatgggtgatctcattgttacatatagcaatttttgatgcattttatatgcataccagcaattattactgtgtttgcacagtactcacttaactggtgctatgtgaagactctgctaatataggtattctagaatgtgaactgagtggatccaaaagctccagaagaggatagacaaaaagatctagtgtgttttcttcttgtttaattttgtttt

SEQ ID NO: 4205 - DNA, 1499 bp, Cricetulus griseus
cgcagttctggctagtgagcgccaagtgcacaagagctgccgggaacgagacacttccctgagccccggatctttctcccacctggaactatcccaccatacacatttctctattttgagaatccccacgtcatggacctcatcgggctgctgaagtcccagtttctgtgccacctggtcttctgctatgtgttcatcgcctcgggtctcatcgtcaacgccatccagctctgcacacttgtcctctggcccatcaacaagcagctgttccgcaagatcaatggcagactgtgctactgcatctccagccaattggtgatgcttctggagtggtggtcaggcacggagtgcaccatctacaccgatccgaggtcctccccccactatgggaaagaaaacgccatcgtcgttctcaatcataagtttgagattgactttctctgtggctggagcctggctgagcgacttgggatcctggggaactccaaagtcctggccaagaaagaactggcttatgtcccaatcattggctggatgtggtactttgtggaaatgatcttctgcacacgaaagtgggagcaggatcggcagacggtcgccaagagcctgctgcacctccgggactacccagagaactatctgttcctgattcactgtgagggcacacggttcacagagaagaaacaccaaatcagcatgcaggtggcccaagccaaggggctgcccagcctcaagcaccacctgctgcctcgcaccaagggctttgctatcaccgttaagtgcttgcgagatgtagtcccagctgtatatgactgtacactcaatttcagaaacaatgaaaacccaacgttgctgggagtcttaaatggaaagaaatatcatgctgattgctacgttaggaggatccctatggaggacatcccagaggacgaggagaagtgctcagcctggctacacaagctctatcaggagaaggatgcctttcaggaggaatactacaggacaggggtcttcccggagacgccctgggttcccccacgacggccctgggctctggtcaactggctgttctgggcgtcgctgctgctctatcctttcttccagttccttgttagcatggtcagcagcggttcatcagtgacgctggctagcttggtcctcatcttctgtatggcctccatgggagttcgatggatgattggcgtgacagaaattgacaagggctctgcctacggcaatattgacaacaaacagaaacagacagactgacctggggatgtcaccctccaaagggaaccttggggaactgttggcctctgcctagtcttcttagggttcagtgctggagactggagagctttgctgggacgagcagaaaccacagcctctccattcacagagtttgtctcagcgctggacggaaaaggaagacgtccttaaaccctttccccgtgtgtgtgtgtgtgtgtgtgtgtgtgtgtgtgtgtgagtctctgaga

SEQ ID NO: 4206 - DNA, 1499 bp, Cricetulus griseus
ggatgagaccctgggcgtggcgtccgtgccctcgcagtggaggggcgtccagggcattcgcggggagacgaaaagttgccagacagccagcattgccacagcagaggcatctgtccaggctcggacacaggtggatgcccaggtacagacagaggctcctgagccagtggccccagtacctgtttcccagcctgacactctcaggctggcagcctttctccggagggtggaggccacggtcatccgggagctgaacaacaactggcagagccatgccttcgatggctatgaggtgaactggacggagccacagcagacggtgtcctgtcttcacaccctggtctaccccccagcccaagggcagggtctgcatgtgaccggcatttcctggaacgccaccggctctgtgctggcctgtgcctatggtcggctcgacgacggggactggagcacacttaagtcctatgtgtgtacttggaacctggaccgccaaggcctgaacccccagcagccatcagcagtagtggaggtgcccagtgctgtcatgtgtctggcctttcatcccacacagccctcgcacattgcagggggactgtatagcggtgaggtgctggtgtgggacatgagccggcccgaggacccactgctttggcgcacaggtctgactgatgacacccacacagaccctgtgtatcaggtgctgtggttgcctgaaccccggcacagccaccgcttccaggtgctgagtgcgtccaccgatggaagggtgcttctctggaggggcagtggcgctgggcagctgcgactctccaagggttttgctctggctgtgcagcagctgcctcggagcaccaaactgaagaagccaccccgtggagagactgaggtgggggtgacatccgtggccttctccagctttgactccagcctttttgttctgggcacagaaggtggctttcccctcaagtgttccctggcagcagaggcagctgctctcactcggatgcccagctctgtgccccttagggctccagtgcagttcaccttctctccccatggtggccctgtgtactctgtgagctgttcccccttccacaggaatctcttcctgagtgctgggaccgatggccatgtccacctgtactccatgctgcaggcccagcctctgacctcactgcagctgtctcacaagtacctgtttgctgtgcgctggtcccctgtgcgccccttggtttttgctgctgcttctggggaaggtgacgtgcaactgtttgacctccagaaaagctcacagaaacccacagtttccataacacaaacccaagatggaagtcctgtctactgcctggagtttaacagccagcagactcagctcttagctgctggtgatgccaagggcatggtgaaggtgtggcaactgagtacagctttcacagaacaagggcccagggagacagaggacttggaccaactagaagcggaagtagctacctgagggc

SEQ ID NO: 4207 - DNA, 1498 bp, Cricetulus griseus
aaaaccttctacggaattaccggaaagccaagaacagtcacccaccaggaacgtgccctttctacgaggagctggagctctggtgaggggatataccgggctatcgcagagcgggctgtgtgcgctgggtttcctgcggacactggagcagtgtcgctacagattcaagaaccttcttcgaagctaccggaaagccaagagcagccgtccaccagggacctgccccttctacgaggagctggactcactgatgagggctcggactgtgatcagggccatggagatagtaggagaagccagaggtcttcctggatctgggcagagtggcactgaggctgatgaccaagaggcctggggtgagatggaagatgaagatgccattaaacttctgccagattcccaaactccagatacagggtttgattggaagcatgaggacgaagaccaaacttcagagcaggatgttgggaagagtgttcctctgaggaggacttggaaaaactcattgaccatcaaggcctatacctcacagagaaagcctacagatgtgacacgtgggtgaaaaactgcagtaggagcttccacttcatggcccaacccggaacctacccaggggagaagccctacaaatgtcttgagtgtggaaaaagttttaggcttcaagcagatctcaaacctactgaaacatcagaggctccactctggaggaaatcctgaccagtgtaatgagcctggggagaacttcagccaaagtccatcttttagtgctcaatggagaagttcttcacaggagatacccaaagaagctcaggatgtcagtggaagcatgaactctccccggaccctgcagcaccaactcaggggagaagctgtatccatgtcctgagtgtggaaggtgtttctctaagagctctgccctcatcagccaccaaagaatccacacaggtgagaagcctcatgaatgtagagagtgtgggaagagcttcagtaagagctccaccctggccaaccaccaacggacgcacaccggcgagaagccatataagtgtgcagactgcggaaagtgcttcagcgagcgctccaagctcaccacccaccacagagtccacacgggggagaagccctacagatgcctcgagtgtgggaagttcttccgcgaccgctccaacctcatcactcaccagagaattcacaccggagagaagccgtacaagtgtggagagtgcggaaagcgctttaatcagagctccagtcttatcattcatcagaggattcataccggggagaaaccctacaagtgcacggagtgcggcaaagacttcaacaacagctcacacttcagtgcccaccgcagaacccatgctggagggaaagcattgtaggcaacacctcctcccaacagaagagcaataatgtctatttatgaaaaaaaaaaaaaaaaaaaaaaaaaaaaaaaaaaaaaaaaaaaaaaaaaaaaaaaaaaaaaaaaaaaaaaaaa

SEQ ID NO: 4208 - DNA, 1498 bp, Cricetulus griseus
ccgagagggttgaggtggtgtccccactgagctcttggaagagagtggttgaaggcctttcactgttggatttgggagtgtctccatattctggagcagtatttcatgaaactccattaataatatacctctttcatttcctaatcgattatgcagaattggtatttatgataacagatgccctcactgctattgccctgtattttgcaattcaggacttcaataaagttgtgtttaaaaagcagaaactcctcctagaactggaccagtatgctccagatgtggccgaactcatccgaacccctatggaaatgcgatacatccctctgaaagtggccctgttctacctcctaaatccttatacgatcctgtcttgtgttgccaagtctacctgtgctatcaacaacaccctcattgctttcttcattttgaccacaataaaaggcagtgttttcctcagtgctatttttcttgccttagcaacataccagactctatacccagtcaccttgtttgccccaggacttctctatctcctccagcggcagtacatccctgtgaaagtgaagagcaaagccttctggatcttctcttgggagtatgccatgatgtatataggaagccttgtggtgatagtttgcctctccttcttccttctcagctcttgggatttcatccctgcggtctatggattcatactttctgttccagatctcactccaaacatcgggcttttctggtacttctttgcagagatgtttgagcacttcagcctcttttttgtctgcgtgtttcagatcaacgtcttcttctacacagtccccttagccatcaaattaaaggagcaccccatcttcttcatgttcatccagattgccatcatctctatcttcaagtcctatccaacggtgggagatgtggccctctacatggctttcttccctgtgtggaatcatctctacagattcctacggaacgttttcgtactcacctgcatcatcgtcgtctgctctcttctcttccctgtcctgtggcatctctggatttatgcaggaagtgccaactccaatttcttttacgccatcacactgaccttcaacgttgggcagatcctgctcatctctgactacttctatgccttcctgcgacgggagtattacctcacacatggtctctatttgactgccaaggacggcacagaggctatgcttgtgctcaagtagccctggctggcacagaactgcatggacaagagggggaagggccaggagcccgccaggtcccttatccagagttgccagcaggcgagtcctcaggcagaagaggttcaaatccagggttacaaatctctggtaccataggggactcatagctggcggcccagggggagaagtttggagcaccccacttggacctcccactttgtgactgcacaggaaggaaggggaaacctgcaggtgagcagggctttataggttgtggctacttaataatgtgt

SEQ ID NO: 4209 - DNA, 1498 bp, Cricetulus griseus
gaatttaacaaattggcgaatccaggagctgatgggaaaaagatggttgcattactcatagagcatgtttgtaaagcacttgaggagttatacaatgttcactgctcagttgaggatgttatcaacttggattccagcactgaagaaaaatttagccgacatctaatctttcagctccatgatgtggcgtttaaagataacactcatgttggtaattttgtgagaaaaattttgcaacctgctcttcacttaattaccaaggaagatgacgataagattccagaggcaacagaccacaaagtttcctgtttttctgatgtaccattaaaacaagagattttagagacctgggagaagccggggtcacctaagcaatacatccctgatctttcatttttagttgtgaagaataatatgggagaaaaatgtctttttgtaagatttaggcgtttatacaagaaacagaaactttcgactgtatcgatcatcaaagataggaaaatgtagtggctttggaggttgctgaagataacagatttattccaaagcagtcaaaagatatttctgaggaaaaccagtatttcctgtcttccctggtgagcaatgtcagattttcagacactttacgaattctcacatgtgacacatctcgttctttctttggtgaataaacatgacattaaaggaggaattcggcgttggaactactttttcccagaagaattactggtttatgacatttgtaaatatcgctggtgtgaaaacattggaagagcccacaaaagtaataatattatgattctggttgatctgaaaaatgaagtttggtatcaaaagtgccatgaccctgtatgtaaagcacaaaacttcaaatctaactgttttccattacccactgaagtaagtctcctgtttcttctgaaagaggaggagttcactcctgatgaagtaggtgaaaccagcaactcactgactaagaattctcaaaacccaccatcaagtaatctgttaccagacagccttttctgatgctggctgggatgaccaagatgatgcctgcttcttagaagctacagaagatgctgaattcgctgatgctgcagacaggagtcttcaatggacgatattcctgacgaactaattatagaagcattacagagcagctaactgtggacaggacttacataatgaggctaccatttgcctgaagcctgaggtttaggacataaatgttaaattagggctggggctatagcccaagggtagaatacttacctatcatgtgtagggccctgcatttaattcccagcactgtaacaaaccaaattctattaacttattattggacctatttatagtaactgttttatcacttagtttattctcattcctgctcaaggagcttccccagctgatagttgatggttttcaggtgttttttggctcccagaaccgttcttgcttcaaacaatagagctggaaggctagatgagtcata

SEQ ID NO: 4210 - DNA, 1498 bp, Cricetulus griseus
gttcttgccggggtcgcttgctgctgacgtgtgccgaccggcttctgactgcggtgtgggtcgctatggcggttggacatcacactcctcttccgggcgagcgtcaagacggtgaagacacggaacaaggctctgggagtagcggtgggtggcggggccgatggcagccgggacgagctgttccgccgaagccctcggcccaagggagacttctccagccgggctcgcgaagtgatttctcacattgggaagctgagagactttctcctggaacacaggaaggagtatattaatgcttacagccataccatgtccgaatatgggaggatgacggatgccgagcgagaccagatagaccaggatgctcagatattcatgaggacttgttcagaggcaattcagcaactcagaacagaagcccacaaggagatacattcccagcaagtgaaggaacacaggaccgcggttttggatttcgttgaagattacttaaaaagagtatgtaagctttactctgaacaaagagccatccgagttaagcgtgtggtggataagaagagactatctaagctggaacctgagccaaatacaaagaggaaagaacccccatctgagaaagcctcacagactgcttcccaggactctgaagaaaagtctgctgccgaggagcttccagaaaaaccagtggccgaagcacaacctgaactgggaacctggggtgatggcaatggtgaagatgaactgtctccagaagagatacagatgtttgaacaagaaaatcagcggctcattggtgaaatgaacagcttatttgatgaagtgaggcaaatcgaagggaaagttgttgaaatttccagactccaagagatattcactgaaaaagtcttgcaacaggaaactgagattgacagcattcaccagttagtcgtgggggcaactgaaaacatcaaggaaggcaacgaagacatacgagaggccatcaaaaacaatgccggcttcagagtgtggatcctcttcttcctcgtgatgtgttccttctccttgctcttccttgactggtacgacagctagcccaccagggctacacccgtgcccacactgctgcctgacatacaccatgtgccagcatatgtctcatctgccctgtagctgtgtaaggtccaaggactggggagtcgtggcccccaagccaacatttggaacctgtcaggacctggaaatgcatggattaaaagtgtcctgcacctccaggagaggccacaagcatggcagggcctgaacagggcaggggatatggcacacctgttgtccccattacaatgcttgaggccttgtctcccgccttcccacaccagtagcttcaggggagaacatgcctaatgtttctaaagtcattggttcttactccttgtggtgtctaatgtgtgctgatatgtggccatcttgtcatggaaaatagttcacatctgccttgtcaagctaataaatgcaattacag

SEQ ID NO: 4211 - DNA, 1498 bp, Cricetulus griseus
ttgatctccagaatatgttgaggcagacctgtagcaggagcagtgacatttattcccgggagtccttgagcccaccccagcactgcctttttgaagctggctgtagggaaacttattcttgcaagatctaggcccagtctctttctgatctgtgagaaagaggaagggcgttcagcatttaatagtttgcttgtcttccactcttgccaggaaatgtttatttgcctctaattggccctgagagaccacagagaggctggggctcactgagggattggctggggatgtgtaaagcaaaggctatgagaagcatctgggagttggttgttgttggattgaatttccttttttgttttgcccacaacttcagccagtgcagcaggtcccaatgctacagtaatggacttaagattgcaggtacccttcaggggaggtagccatgtcttcttgagcctgtggccctcagaggttctattttccaaggctcctccctatctcctggctagttaccacatattaccactgggctaccagtctctaagggcctaagagaggctctcttgagaatccagggaaactgagcccaggagttacctatccttgattcatccttccctggttctccctctctggtccataatttccctggtgccagcttcttttccacctggggcatcctcatccctgggctctctgctgcagatggcagtgtcagcctccaataggtcactggcagtgccaatggggtctttgcaaggccctaagtttaagtaaaggcagtggttctgcctccatcctggctttcccacccttagggagcgaggcctacagttgtcatattttaattccattcctttaagtctggaatgttaaactaggcagaactatcatcttgcttcccagtttaaatgcctctggccctggaacaagccttttcaagacgtgaatcattttgcttacacaatagatctgttccaacagttctgtgtaaaccaaacgctattttttaatgcatttggactgctggccatttaaaagcagtctatgattgcttcttttgtaaagcaagcaacctccctctactttagctggtttcgttatctgggttttcacatttgggctttcccagagtggagcacacctccggggcttgtggctgatgctgtgtagacgtctgcatctgctgcgtgtgtggtgtggctggccggtaggtgagtattactgcgtgtgtgagtgaagccactcccaggctgatgctctcttcctgtgcccagtgactgcccaatggcagccctagctgcccttcattcccacctgctgccaaagtccctgtgctaatgggattacagaaacaaaaagtaggaaaaaaatttttcgtaaactttgttttatattaaaacttccataagtctgtgtgtgttaaaacatgaggttctgcctctgtggctgtgtttgaaaaaataaagttttattagaataatccattttcccaagacaa

SEQ ID NO: 4212 - DNA, 1498 bp, Cricetulus griseus
agcggagtctgtaggagccccggcccaagtaacgctgccgccccggagccgcgttggaggcctccctcccagttaagtgcctctttgcatagcaccggccccaccccacgctcactggtactgctaccaagcatcgggccatggcgggtcggggaggtgcggctcgacccaatggaccagctgctggcaacaagatctgtcagtttaagctggtcctcttgggggagtctgcagtgggcaaatccagccttgtcctccgctttgtcaagggacaattccacgagtaccaggagagcacaatcggagcggctttcctcacacagactgtctgcttagacgataccacggtcaagtttgagatctgggacacagctggacaggagcgatatcacagcctggcccccatgtactaccggggggcccaagcagccatcgtggtctatgacatcaccaacacagatacatttgcacgggctaagaattgggtgaaggagttacagaggcaggccagccccaacattgtcattgcactcgcaggcaataaggcagacctggccagcaagagagccgtggagtttcaggaagcacaagcctatgcagatgacaacagtttgctgttcatggagacatcagcgaagactgcaatgaatgtgaatgaaattttcatggcaatagctaagaagcttcccaagaatgagccccagaatgtaactggtgctccaggccggaacagaggtgtggatctgcaggagagcaacccagccagccgaagccagtgctgcagcaactgagccccctgcctgccactgcccccactcctccaccagaatgacccgactggaatccactctaaccaatcgcacttaacgactcgactcgggccaccactgggggcaggggagggtccatcatgaattctccacataactttgatcctaggcggagggagttattccaccctgcacctttctgtacaaatactaattcaattttaagtcttaagtcacttttttaatatatatgatcttctgctcttcccagttccctctcgactgctctcccacttgccctttgctagaacacccacatcttaccttgctgggagtggtcttggtcctggggtggtgggcaggctctgggctggggaagggacaggcagctcttccctcatttggctgtcatcaggctgcagaccctccccatctgactcccagctggcagagagatcgcagcatttcataagcgtcatttgtgacagccacatacccatggcccaggacccctccacccttggtcaccctgacttctggctctgagccctattctgaccaaatcacgatgatgagtatttggggatgggtgggtaaggggggggagtggggaggggacggaaccaactttttctgtattttgtattgtatgttttcttcaacatgtaaccaatcagtatcttgtcaatatagtcagccgatcgatcgacctcaaaaaaaaaaaaaaa

SEQ ID NO: 4213 - DNA, 1498 bp, Cricetulus griseus
gagttccagagagcccagtctctactcagcaccgaccgggaggcctccatcgacatcctccactccatcgtgaaacgtgacattcaagaaaatgatgaggaggcagtccaggtcaaagagcagagcatccttgaactggggtctctcctggcgaagactggacaagctgctgagcttggaggacttctgaagtatgtacgacctttcttgaattccatcagtaaggctaaagcagctcgtctggtgcgatctcttcttgatctatttcttgatatggaagcagctacagggcaggaggtcgagctatgtttagagtgcatcgaatgggccaaatcagagaaaagaactttcttacgccaagcattggaggcaaggctggtgtctttgtattttgatactaagaggtaccaggaagcgttacatttgggttctcagctgctgcgggagttaaaaagatggatgataaagcccttttggtggaagtacagcttttagaaagcaaaacataccatgctttgagtaatctgccgaaagcccgagctgccttaacctctgctcgaaccacagccaatgccatctactgcccccctaaattgcaggctaccttggacatgcagtcaggtattattcatgcagcagaagagaaggactggaaaactgcttactcatacttctacgaggcatttgaaggctatgactctattgatagccccaaggctatcacatctctgaagtacatgttgttgtgcaaaatcatgctcaacaccccagaagatgtccaggctttggtgagtggaaagcttgcacttcgatatgcagggagacagacagaagcattgaaatgtgtggctcaagctagcaaaaacagatcactggcagattttgaaaaggccctgacagactaccgggcagagctccgggatgacccaatcatcaacacacacttggctaagttatatgataacttactggaacaaaatctcatccgggtcattgaacctttttcccgagtacagattgaacacatatctagcctcatcaaactctccaaggccgacgtggaaagaaaattatcacagatgattcttgacaagaagtttcatgggattttggaccagggggagggtgtcctgattatttttgatgaacccccagtagataaaacttatgaagctgccctcgaaacaattcaaaacatgagtaaagtagtggactccctctacaacaaagccaagaagctgacatagagttggatctgtagcggtcctttggagagtgtgtgtggcgggagagtgaacccttggggaaatgctaggagattctttctttctgttctacttttcgctcggaaagtttttaaccctcattggtgcatctgtatccagcgataggcggccagttctcacgtaatcagcactggccaacatgggagtggggaaattgacttaaaaaaaaaaaaaaagaaaaaaaaagaattactaaaataaaaggaaaaagg

SEQ ID NO: 4214 - DNA, 1497 bp, Cricetulus griseus
gaaggctattgaattggttgtcaataatgggaagaacctacattgtagaagagactgttggccagtatatttcaaacatcaatctccagggaaaaccttttgtctctggtcttttaataggacagtgttcttcacaaaaggattatgtgattcttgccactagaacaccacccaaagaggaacagaacgagaacatcaagcatcccaaagctaactcggatactttggatgaagaatgggccacagaacatgccagccaggtatccagaatgctccctggaggacttgtggttcttggaatatttattattacaacattagaactagcagatgattttcaaaatgccctgcgcagactaatattttctgtggaaaaatctattaatagaaaaagactatggactgtcacagaggaagaggtctcagaacgagtgatacttcacatatgttcttctacaaaaaagttatcttgtcgaacttacgatgtccatgatccaaagagttcagcaagacctgccgattggaagtatcaaaacagagtgttgacctcctggctgtctctagagtgtactgttcacgttaatattcacatcccactgtcggctacttctgtcagttacactctggaaaaaaatacaaagaaaaaataccaagaggaaatcctcaagcaactgctcattcttttgatgttcgagtgctaacacagttgtccctgaattcagaccacagatccacagccacagtccaaatctgcagtggttctgtaaaccttcggggtgatgtgaaatgcagagcttatatccacagcaacagacccaaagttaaagatgcagtgcaggcagtgaagagagatattttgaacacggttgctgatcgctgtgaaatactttttgaggatctaattttgaatgaaattccagaaaaaaaaaattatgaacttcctcagcgagtttttgttccccttcctggatccgctataatgttatgtgattataaattcggtgatgaatcagctgaagaaattagagaccatttttcagaaatgttcgatcatgagattcaaatagaagacttggaaattgcagaggaagtaaacacagcttgtataacttcctctgtgaagagcgaagcgtcaccaaccaacacaagtgatgaacaaccagagccaccaagtaaaactacagttggattgaagattaagcaaaacataggtgccattgcagcactagcagttgcagtccttgcggccggcatctcctttcattacttcagtgattagctctgctacaataatgtctattaggtgtgtttctgacttacatgacatcaccagctgccttgtttaccctgctttgttatctgcccgggtttccaaagtaaactatacacctaaatggagttgcatgtaacacatcactattatgtattttcagaagagtcaaactgtgagctattttagattttagtactgtaagaaaaaaaaaaaaaaaaagttta

SEQ ID NO: 4215 - DNA, 1497 bp, Cricetulus griseus
gagccggggctgcgctcctctaattgggactccgagctggggctatttgtggtgttggcgcggctccaagaaggccatcacagccagtgccccctactgccctatagagaaggaagatgagcgagtccagctcaaagtccagccagcctctggcctccaagcaggagaaggacgggactgagaagcgaggccggggtaggccacgcaagcagcctccggtgagtcctgggacggcgctggtagggagtcagaaggagcccagtgaagtgccaacaccgaagagacctcggggccgaccaaagggaagcaaaaacaagggcgctgccaagacacggaaagctaccacagctccagggaggaaaccaaggggcagacccaagaaactggagaaggaggaagaggagggcatctcccaggagtcctcggaggaggagcagtgaccacgcgcagtgccgcctgctccttggccatcaaaggagcagctttcccttgggcctggaagcccggctcccaggcccctccccacccccaccgcacactaccgcaccagctgcaggctctgcccagctgcaggctctgcgactgccgcacccacgggagcaggatttgtccccgtgcgctcctccccaacacacctgccctctcccgacaaggctaacttcctcttagccgcagcctgtcctgctgcgcacctcccttagagacagtgctctctgggctccttgttttgcctgtcccttctgctctgctcttcctggcttccttgtagagagagggagcatccccggagcattaaagggccccaaagggccccagccccatctgacaagccccgttgactggactagcagcaggtgtggtcagcgccgggatgcttaggtcccagcacgcccgcccccaccaaactcaccaggtgggtttctcagccacttctgccccaccttacgacagatgggagtcaccacccatctccagaggcagatgggcgccaactcacctcccccactcggactctaggctgttccccttcctccagaggggcactaaggagctagccttgcccccctccttttgctcctccctgcccccacccccaaggttctggttcatcttttcctctgttcacaaactacctctggacagttgtgttgttttttgttgttcaatgttcattcttagatacccaccattgctgctgctaccagcgccaagagttcatcctccctttctgcctgcattctccccagacactctaggggaaaggggggctggggcgcagcaggctggttaccaaccccaccccagggaagatggggccctgccccttggatgctgcagcagagtgaggaggtgggcccattttgatgggaaaagggtgtaggtccacctccccccttgttctgtgggggaggggtggccagtatttgtcccggcctggggctccccctctggtttcctatttgcagttacttgaataaaaaaaaagccttttctgga

SEQ ID NO: 4216 - DNA, 1497 bp, Cricetulus griseus
aggcattggcggttggtgtgcatcatggcaactgtggctgccaccacaaaagtccctgagatacgggatgtgacaagaatcgagcgaattggtgctcactcccacatccggggtctgggactggatgatgccttggaaccaagacaggcttcccagggcatggtggggcagcttgctgcccggcgtgcagccggcgtggtgctggagatgatccgagaagggaagattgcagggcgggccgtcctcattgctggacagccaggcactgggaagaccgccattgccatgggcatggctcaggcactgggccccgacacaccctttacagccatcgcaggcagtgagatcttttctctggagatgagcaagactgaggctctgactcaagccttccgccgttccatcggtgtccgtatcaaggaggagacagagatcattgaaggcgaggtggtggagatccagatcgaccggccagccacaggcacgggatctaaggtgggcaaactgaccctcaagactacggagatggagaccatctatgacctgggcaccaagatgatcgagtctctgaccaaggacaaggtccaggccggggacgtgatcactattgataaggccactggcaagatttccaagctgggccgctccttcacacgcgctcgcgactatgatgccatgggctcccagaccaagtttgtgcagtgcccagacggggagctgcagaaacgcaaggaggtggtgcacactgtgtccctccatgagattgacgtcatcaactcccgcactcagggcttcctggccctcttctcaggagacacaggggagatcaagtcagaagtccgagaacagatcaatgccaaagtggctgagtggagggaggagggcaaggcggagatcatccctggggtgctgttcatcgatgaggtccacatgctagatattgagagtttctccttcctcaaccgggccctggagagtgacatggccccagtcctcatcatggccaccaaccgaggcatcacccggatccgaggcaccagctaccaaagtccccatggcatccccattgaccttctagaccgcttgctcattgtgtcaacatcaccctacagtgagaaggacaccaagcagattctacgcatccgctgtgaggaggaagatgtggagatgagtgaggacgcctacacagtgctgacccgcattgggctagagacctccctgcgctatgccatccagctcatcacagcagccagtctggtgtgccggaaacgaaagggcacagaggtgcaggtagacgacatcaaacgagtatactccctcttcctggacgaatcccgctccacgcagtacatgaaggaataccaagatgccttcctcttcaacgagctcaaaggcgaaacaatggatacctcctgagctgaagctccaccccaacccttcctaccttgttttctacaagttctgacactgtgactctgtataaaatggttgtaaaac

SEQ ID NO: 4217 - DNA, 1497 bp, Cricetulus griseus
gcgcaggcgcgctgcgggactggctcgggagactggctgcgggtcgcaatgccgtacgccaaccagccaaccgtgcggatcacggaactcaccgaagagaacgtcaaattcatcatcgagaacacggacctggcggtggccaattccattcggagggtcttcatcgccgaggtgcccataatagccattgactgggttcagattgatgccaattcctcagtccttcatgatgaattcattgctcacaggcttggattgatccccctcactagtgatgacattgtggacaagctgcagtactcccgggactgcacgtgcgaagagttctgccctgaatgttctgtggaattcacccttgacgtgaggtgcaatgaagatcagactcgtcatgttacctctcgagatctcatctccaacagcccccgggttattccggtgacatcccggaaccgggataatgaccccaatgactacgtggagcaggatgacatccttattgtcaagctgaggaagggccaggagctgagacttcgagcctatgccaagaagggctttggcaaggagcatgccaagtggaaccccactgcaggggtagcttttgaatatgatccagacaacgcacttaggcacacggtgtatcccaagcctgaggaatggccaaagagtgagtactccgaactggatgaggacgagtcacaggctccctatgaccccaacggcaagccagagaggttttactacaatgtggagtcctgtggctcactgcgccctgaaaccattgtcctctctgccctctctgggttaaagaagaagctgagtgatttacagactcagttaagccatgagatccagagtgatgtgcttactataaactaaccatagctcacccgctgcagaagactgggttcaaggtctacggtcttgggagcccttctggtttctaggctctggactacagctgctcaagctgcctggaacgtcaccggagagattgccaggggttcactggtgttagacagagcagtttttcactaggcatttagcattagtggttttcaggcagcctggggaaaagcacacaccagcacagaaaggaagggatatttattgatcaacaatagttgtctttttacaagtttttatttttggcaataaagagcacaacataatctccttcatgcgtcatcgtgctgctaactgagccagctctgcctccctctcgatctgggcccatttcttttacagactagctgacctctgggtgctcattgcttaggtcagtcagagctgggctggccgagtcacctccctggctcttgggcccctctgggagggagcctccttatcatcctgccacaaatgtacaacagtggttatttacaaggtctgttcccacaaatcagaaccctaaagtaattaaaaaacagaaaacacgaaacaaaaggttgatgtgaatagaaagatagcccttctgcacggtagtcaaataaataccag

SEQ ID NO: 4218 - DNA, 1497 bp, Cricetulus griseus
ctgcgtttgtacagtgggagtccaactcgaagcgagaaagagcaggtctccatcagctccttctactacaaggaacggaaatcaaggaggtggaaaagtaagcgggaaggatcggactctggcaatcgacccattaaggctgctgggaaggtcatcattcaggatatttcctgcctccttcctgttcataagtcactgggagagctgtacatactgaatgtgaacgacactcaggagacgtgtcagaagaacgcggcctctgccatgcttgttggaaggaaggatctcgtccaggtttggtcgctggccacggtagctacagatctttgccttggtccgaaatctgacccagatttggaaacaccttgggctcgacatccatttgggcgacagctgctggagtcccttggctcactattgccaactccgtgatgttcagaccttggctatgctctgcagtgtgtttgaagcccagtcccggcctcaggggttaccaaacccttttgggcctttccctaaccgttcttctaatcttatggtatcccacagtcgataccccagcttcacctcctcagggtcctgctccagcatgtcagacccagggttcaacaccggtggctggaacatagcaggaagagagacagaacacatgtcttcaccttggggagagtcttctccagaagagctccgctttgggagtctaacctacagtactacacccccgtgagcgggaacgcgaccagcatgataaaaacaaaaggcttctggaccctgccaatacgcagcagtttgatgactttaagaagtgctacggagagatcctctaccgctggggtctgagagagaagcgggcagaggtcgctgaagtttgtgtcctgtcctcctgaccctcacaaagggatcgagttcggtgtgtactgcagccactgccggagtgaagtccgtggcacacagtgtgcaatctgcaagggcttcacattccagtgtgccatctgccatgtggctgtgagggggtcatccaacttctgcctgacctgtgggcatggcggccatacaagccacatgatggaatggtttcggacccaggaggtatgtcccactggatgtggctgccactgcctgctggagagcaccttctgaacttgaaaggtgatggtaatgtccaaaatcccagaggacgccataaaatgctggaggaggctttctgctgctggtggtggaaagttccagaacccgggctatccccagtgattcagactgtcacagcatctgctccgcatgagactttgccttcccttcagtatggctgtcaggcatggagtggtgctggttgaaaggaggggggcacagagtttgcttcctgcaccgtctattgagtccacagtggatgctttcatggggaaaagcacctgtttccagagccagcattagccttttcaggagttgtccttgaaccaggaatggtctctccaaatgccagtacaaaatcacatcagc

SEQ ID NO: 4219 - DNA, 1497 bp, Cricetulus griseus
  modified_base (1343)..(1343): a, c, t, g, unknown or other
accgggtgaagagacggcggcttcagtgcatggggttttgcgttggtggcgaaatgcgacaccacgatggcccacaacttcctgtccgagaacgactggcagatggacaaagcgctgagcgcctacttcgaaccgccggagaacgaccccgcgtggccacgccagcctccgatgtccttcagatccgaggcctatgttgatctaaccgacgaggatgcaaatgataccaccattttagaaaccagtccatctggacctcctctagaagatagcagcattatctctttcattacctggaatattgatggactagatggaagcaatctgccagagagggctcgaggggtgtgttcctgcctagctttgtacagtccagatgtggtatttctacaagaagttattccttcatattgtgcctacctaaagaagagagcaagcagttacaaaattattacaggtaatgaagaaggatatttcacagctatattgttgaagaaaggaaaagcgaaatttaaaagtcaagagattgttccttttccaaatactaaaatgatgagaaaccttctgtgtgtgaatgcgagtgtgggtggaaatgaattttgccttatgacatcccatttggaaagcaccagagaacattctgcggaacgaataagtcaattaaaaatggtttttcagaaaatgcaagaggctccagattcaactactgttatatttgcaggagatacaaacttacgagatcatgaagttatcaaatgtggcggtttacctgacaatgtttttgatgcctgggaatttttgggcaaacccaaacattgtcagtatacatgggatacaagaacaaatactaatctcaggattcctgctgcttgtaagcatcgctttgatcgagtatttttcagagcagaagagggccaccttattccccaaagtttagaccttgttgggttggaaaaactggactgtggtagatttcctagtgatcactggggtctcctgtgcaatttgagtgtagtattgtgaatagctttccaaatttgagctttacatgtttgcagtagttctggacccatacagatttcaatctttcaggaaagctaggtttaacacagaagaattaataaactggatcattagtacatcaaaagtagttacatttttactttgtagcttgtgtcctaagaattaagcattggtgtgtgtaatcaaagcatgcttttgttcagaatgtgtcagctgttgttaagaggacacagagccactcagcttgtaacagtgctcattgctgccattagaacttcaagtagtggcttggtaatgattacacccagcttaagccatanggaatttttttttttcttagagaaaagtaagaagaaaagtaaccttttggttttgttactggtaagatggaaatacttttcaggaagtgagtaaagaatatattttttaaaaatgttctgtaaagaaaacaatgtactgtaaataaagtatttt

SEQ ID NO: 4220 - DNA, 1496 bp, Cricetulus griseus
aaatgtaatctgttagaaaacaattggaatacatgcgaaatatgataaagcacgcagaaatggagaggacatctgtcttagaaaagcaggtttcactagaaaaagaacggcaacatgatcaaaaccatgttcagagccagctggaaaactggatcttcttgaacaggaatacagcaaactcactacgatgcaggtccttgcagaaaaaaagatgcaagagttggagtctaaacttcatgaagaagagcaggaaaggaagcgtatgcaggcacaagcagcagagttgcagactggtctagaagcaaatgacttattttgaagataagacaacttcttcgtatgttgcaaccaacactaagaaaaattaaaaaaaaagtaacaaaaaccaaccaagaaaagaaaggtcctaggaactattttggtgcacagccacattacagattgtgcttaggcgatatgccctttgttgctggaaagtccaccagtcccagccatgccgtggtagccaacgttcaacatgtcttgcatctgatgaagcaccacagtaaagctttgtgcaatgatcgagttgttaacagtgtccccttggcaaagcaagcctgttcacgaggttgcaggagtagtaagaagtcagtgacacctccctctggcagtgtcagtgaagaactgtcggatgtcttagagactctgcaggatgaatttgggcaaatgagctttgatcaccagcagcttgctaaactcatacaggagtcaccaactgtggaactgaaagacaacttggagtgtgaattggaggcattagtgggaagaatggaagcaaaggccaaccagataactaaagtgcggaaataccaagcacagctggagaaacaaaacatagataagcagaagaaggaattaaaacctaacaaaaagactcttgatgaagaaggaaacagcagcaatcggtcacctggagtcacaaggaccacaagtaagaaggattttgccaaacagagacctggagaaaaaagcaaggaaaaatcttcagttattgaaggacatgcaaaccatacagaattcactgcaaagcagtaatctgtgttgggattactgacaccagatcataaacgatataccttattggacaataaagactttccaggtttcatgcttgctaatgttgccattactagcaggtgtccaggggcccaagcttcattacagtctcttgtgtcatgcagcacaactacgtggaaatggagttttacaccatgagaggcttgtactgtttgaatttgctatactcatatactgcactttgtaaacaaatgaccaggtttttacttgtgggtgtttttttaaagtaggactatatgtaaattgggtttgaaaattcagaatgaggctgtccccgtagtcagtgcttgaaaagtctcattttttaaatcttccccaggcatgaagtgacctctactttcccctctccagatgaccattaaatgtactgttttcaa

SEQ ID NO: 4221 - DNA, 1496 bp, Cricetulus griseus
ggaagatggctgcggttgtggcggccgatacgcagctgatgctcggcattgggctgatcgaaaaggacactaatggagaagttctgtgggtgtggagttatccttccacgacagcctcgttaagggatctgctgctccgaaaatgctgcctaacagatgaaaacaaactcctccacccctttgtctttggtcagtacagaagaacatggttttatattactacagttgaagttccagattcttcaattttgaaaaaggtgactcatttttctattgttctgaccgccaaagattttaacccagagaaatatgccgccttcactaggatattgtgtagaatatatctgaaatacgggagcccagttaaaatgatggagagttacattgcagttcttaccaaggggatctgccagagtgaagaaaatggctctttctttagcaaagactttgatagtcgaaaggcgtatcttgcaggttccatcaaagacattgtgtctcagtttggaatggaaactgttatcttacacacagcattgatgttgaaaaaacgaattgttgtctatcaccccaaaatagaagctgtccaggagtttaccaggactctgcctgccctggtgtggcatcgacaggattggaccatcctgcattcctacatgcacctccatgctgaagaactggaaggcctgcagatgtgcacaggatacattgctggctttgtagaattggaggtaagcaacagaccagacctctacgatgtgtttgtgaatctggcagatagtgagatcaccatcgctccacttgcaaaagagaccatgacaatgggcaaactacataaagaaattggtcagctaattgtgcaatctgcagaagacccagagaagtcagaaagccaggttatacaggacattgccctaaaaacaaaagaaatcttcaccaatctagcaccattttcagaagtgtcaggtgatggaggaaagatcatcctcagtgttgaggcactgaagcaaaagcgattcccgcctgcaacagagaacttcctttaccatctagcagcagccgaacagatgctgaagatctgactgttccacagcaagaccccacagaacttcccttcattctgagtacccattggcattatatagtattggaattacagaggaaaggttctatttttaatgatttatttccaagtattgagatctcacctgagaaacacatgaaaacaattgtgtttttcttttctccctgccaatctgacccactgctggacagtgttttaactcacagtttgctttttattcttctaggaaaaaacttgaattcttcatgagagattttactttctgagccaaattgctatgttttctgtagaattatgtagaatatcattcaagagatactgcaatttgcactttcttgtaaaagcaaatcttttggggcctttgaaatttttgcctatattatgaaggtttttcatagattttgtacctgattag

SEQ ID NO: 4222 - DNA, 1496 bp, Cricetulus griseus
ggattctaacgcaatcctggaaaggttccccacaattggtcaactgttggcgaaagcttgttggaatcctctcatcttagcatatgatgaaagccaaaaatatctaatatggtgcttatgttgtctgatgaacaaagaaccacggacccctggagaatcagaacttaactcctggatccggagtttgttatcacacgtactttccacgttcagattcaacttaaaagaagtcagtctttttgctgaaaatctgggatatgagcttgttgattactgtcccagtttgcttaaaaatatggtgttgtcattagtgtctgagcttagagagagtcatcttaatggattgaacactcaaagccggatggctcccgagcgcatgatgtccctgtcacaagtttgtgtccctctggttactctgcctgattttgaaccactggtggaggctcaacttacttaccatggacgtgaacctcaggaagccctctcgccagagttcttcgaagctgtaaatgaggccttcttgtcgaaaaagatgattctgcctacgtcctctgtggtcagcctctggtttcgccatctcccaagtcttgaaaaagcaactctgcatctttttgaaaagctgttctccagcaagagaaatcgcctgggagaggtggagtgctgtataaaagagtcattgctgcctcaagcagcctgccaccctgccatcttcagaattgtagatgaaatgttcaggtttgtgctgctggagactgacggagccccagaagtgatagctgctcttcaggtattcacctggtgcatggcagaagctctgggaaaagagaacaagcagatgaagttttccctcaagacctacttcccttacggtgctccagctctcactgcagtgctgtcccagcaccctgaagctatcccacagagacaccagctccagcctctgctgcacatttcccaactcctcagagaagcagttgaagaccctactcatgggtcccagcaaactcccttcgagagctggtttttgttcattcactttggaggatgggttgatctggccgtgcagcagttgctgaggacagaagctgagccccctgaaggcctgctgtggctcttggcattctattacagcccacaggatgggagtcagcagagagtgcagaccatggtggagctgaaggcattgcttagccatctgctgatgctgctccgaggtgagcgtctgtcagctgtcgatgtgcagaaagcagcccccagagcacccatatgcgggcagctggtcaggcgccttcttcttagcctcttgctctggacccccggaaggccatccgattgccagggaagctgtcacccatatggcccacacggatgctgtaacccatgagattgttggctttcttgaccagactttgtacagattggatcatctttgtgtcgaagcctcaagaaaactggcgagagagctccttcaggagcttggagctcaggtctagcag

SEQ ID NO: 4223 - DNA, 1496 bp, Cricetulus griseus
ctatgagtgccaggagtgtgggcaaaattttgtccagaagtcacaactcaatgcgcaccagaagacacatgccaagaaggggaaagctaacaaatagtgtgaattcagaatctcccccataattcatccttctcgtataatccacacagaaggagaatcttctaagtatcgagaaaaacattgttggccatgtttttcccttacagaattatcagcacatgtacagaaggaaattctgggatgttattaggaagaactttacagtatggccaacttttataaatatcaggtggcagggctggagagatggcttagcagctaagagcaccgactgctcttccagaggtcctgagttcaattcccagcaaccacatggtggctcacaactatctgttatgtttttgtaattttaatcagctatatcatgatcagcggaactttgggttggagatggatttgtagcagtctcagctgcttctaaggcagccgtatttacttctcttactgtagatgttgtgtagcagtagtatgtgtctttgtattttgtatgaaaaatacctcatggttttcccttccttttctgggtagcgggaggcaacatggccaatggctaaaagtgagattctaggctcttaatgtcttgacccagacaccagcatgggcatgccatgaaacttcactgtgcctccgtttcccttcctgtgagagcaatgataggggcatcctaaaattgccttgaggttgacatagattgatattttaaaacacttagaacagcgtctgtaatacataaaaacttgacattagatatgattctcattaatttgtatttcctgactcatacagtgaaaaggttggcaacccactacatatctcccaccttattgctgttagtgccttgatttgatttggttgtgtatctacccacagtggctcaggagcagatcctgagtaggcaaggccagggattagtgaaccaccgtccttctgccagatagatccacagcccatttttgtagcctctaagctgagattagttttatatgactcagttattgcaagaattaaatattttgtgacacacgaaggttgtaggaaacaaaattccagtgtctttaaatgaagcactttgagaacacgaatacaaacccatttgcttacactctgcctgtggctgcccctaagatattgacgactcagcactttatcacataggtttctgttactcagagctgcccacaccgcagccggtcctgagcccactcctataaatgttccgtttatgaaacatgatgcagcagtatgtggatgagtgatttctgtgtagtatatttattttgttcattgtatttatatgtgggaaaagcctaggcttcgaagtatttttcccaaaggaatgtgttttttttctttttgtatttactgaattgttacattaaaataaatttcccggtggaatgtaacaaatatatgaaataaactttgcctcaattaaa

SEQ ID NO: 4224 - DNA, 1496 bp, Cricetulus griseus
ctttgaagaagctctggagatggcagctaaaggcgacagcaccaatgttgataagctggtgaaggacatttacggaggagactatgaacgatttggccttcaaggatctgctgtagcatcaagctttggcaacatgatgagtaaagaaaagagagaggccatcagcaaagaagacctcgcccgtgccacattggtcaccatcaccaacaacattggctccattgctcggatgtgtgcgctgaatgagaatattgaccgagttgtattcgttgggaactttctcagaatcaacatggtctcaatgaagttgctcgcatatgccatggacttttggtctaaaggacagctgaaagcactgtttttggaacatgagggttattttggagctgttggggccctgttggaactgttcaaaatgactgatgcgcagtagatgaaacagcctcctttgagaacggagaactgacagacactgccagagaaggtgacgtctccttgggacagaagccaagccactgtggtggatgaacctgctgtatttgtaaataaactaaaatcctagtccttttgctcttagggttcaagcttatgatacaaaatggggaatataataattttttctgtatactgtaatttttaaaaagaaaaaaaaagaaattgtgcagcctggccaaacctaccaatttcatgcattaactttgaaaagtagtgtgatgtttaagagaggcctgaaaggaaaacgctgttcatttttcttctggggtttactgatcagtgtggtaattttaacttcatttagtaattactctaggagattttacctttacttatattttttcatgacgtttcatgatttgctcttggtttcaaatgaaactcgaatctggcatgttgcactgtgaactacttttgttctgtttttgtcccctgtgatcttcctcttaactatctatacactttatttgttgtaattgctcatgtcaatcaaggtgctgaccaactcaacacaaagttaaacacataatctaaagttctaaaaatgtgactgcagtgaaaaaaacttaaaggaaagggttaatgaaagtggcacacattggacattgtatgcaaattttatctttgtctttgtacccctcaaagctataatgtttcattggatttactttacactaagttaaaatagtctgtcataaaatgtcctcattcctgtatgccatatgaatggcagcaaactgaaaggtttttgttaagatagatgggtcactttcaaaagaggatgctatacgcacactttaacacaagatctaaccatcttttggatggagggtacccttgcaaaggctttggaaaggcaatacagtaactccttggtcaatcttcacctctctaccttgtggagcaccacctttcatttccatatccttgagtcttgaagaagttgatgctaatggaagaattcatgtgtctggtttaaataaagcccgtctctgttggga

SEQ ID NO: 4225 - DNA, 1495 bp, Cricetulus griseus
gaattctcctcaatcatctgaaggtagtcggagcacccaacaatggataaatttgtcattcgaacgcctaggacccagaatagcccgcagaagaaacagctcggaggaaaggtttacaagcaagccacgattgaatctttgaagagagttgtggttgtagaagacataaaaagatggaaaactatgttggagcttcctgatcaaaccaaagaaaacctagttacagccttacaagaattaaagaagaaaataccctccaaggaggtgttgcgatcgacaaagataggtcacattgtgaacaagatgcgcaagcactcagacccagaggtggcgtgtcttgccaaagaagttcacaccgagtggaaaactttctttgaaaaacatttggatagaccttctattgaagtacgaagtgatccaaaaactgagtcatttagaaaaaatgcccagaaattactctcagaagccttggaattgaagatggatcacctactggttgaaaatattgagcgggaaacgtttcatctctgctcccggctcattaacgggccttaccggaggacggtgcgagctctggtcttcacattaaagcacagagctgagatccgggagcaggtgaagagcggggcgctgccggtcggcacgtttgtacagacccacaaaaagtgacccgaggacgggcccagcgctgggcctcgctccgccattcaaagactcttttgagtttgggtgatgcgggtgtcggctgtgctggatattcccatggtgccattccttcagacagaatatggggagccccgggagacgggcctgtgggagcggcttcattagctgccttgcgctggcgctgcctgacgggacgcacacggctgtcactaggaagcgccatccagttgccatcacccaacacaatggaagggtgacaggtttcactgtgagcttgccagggacacctctaaactcccccatgtcaggcagatgaagttaccactttatttcgccaccctgcaggtaactgaaactcaattaccgctgctgctcactcggttccatccccctgagtttagacagctccgatgcctctcagaactcccctgtctgttctctttgctcaaccccaggggtgagcccactggagcctgagaccagccctgcttgccagcgctcacttatctgagcctttcagctctccctggaagaccttaggggatgggctcctgagcccccatgctgaggtttctaatgaggagctggcctgaagcttcccgcacctcggggtttatttgaatacaggctctgtagaggatgcataatgaaatttctcttgcagacttactgcagtttgaaaagatgcatatgtgaagattttcaatgaaatatgtctacacaagcctgcttgggtgattatgtaaattgtacttgctctttaagaagtgataataaacagagataaactaaaacaaactttttttttttttttttttttttagacaaa

SEQ ID NO: 4226 - DNA, 1495 bp, Cricetulus griseus
agctcctggaaccatccaaatcagcctacttctaaaaggagaaggattcgatgtcatgaagtcaggcgatgcccgagtggcactgattggctttccttctgtgggtaagtccaccttcttgagtctgatgacctctacagccagcgaagctgcatcctatgagttcaccaccctgacgtgcatccctggggtcattgaatacaaaggtgccaacatccagctcttggaccttcctggaatcattgaaggagcagcacaagggagaggccgtggccggcaggtgattgctgtagcacgcacagctgatgtcgtcgtcatgatgctggatgccaccaagggagatgttcagaggtccctgctggaaaaggagctggagtctgtgggcattcgcctcaacaagcataagcccaacatctacttcaagcccaagaaaggtggtggcatctcctttaactccacggtcacactgacacagtgctcagagaagctggtccagctcatcctgcatgagtacaagatcttcaacgccgaagtactcttccgagaagactgctctccagatgaattcattgatgtgattgtgggcaaccgggtgtatatgccctgcctgtatgtgtataacaaaattgaccagatctcgatggaagaagtagaccgtctagcccggaagcccaacagtgtagttatcagctgcggcatgaagctgaacctggactacttgctggaaatgctttgggagtacctggccctcacctgcatttacaccaagaagagaggacagagaccagacttcacagatgccatcattctccggaaaggggcctctgttgaacacgtgtgccatcgcatccatcgctcactggccagccagttcaagtatgccttggtgtggggtaccagcaccaagtacagcccgcagagggtaggcctgactcacaccatggaacatgaggatgtcatccagattgtgaagaaatagtcataccaccagcctgcttacttgactcctggggacttggacaccctgggacacacaaaccggaaaagtatataccccaggaagggactcttgagtcagctgtttcataagcttctccagtaagcagtgttgggacaggcgaggctggggaccagggctttgctgaggacatatcctataagcctattgtgataggctttctagggaacctacagcctgtgtccatgtcctgtgcccatgtgggctctcaaggagctaataacccacattcctcccagccagacctcaagtcctgacagcagctctagcacttagcggcctcaggatgaaacctcccacaggtcctcccaacacagggctgtccctcgtggaagccaggggcccagccaaagtgtcctaaagtgcctcccccttggagcccctcccaaagcagccccgcctgcctggatggggcctgtgaatctggctttgtttccttctgagcacctatctgggccttcctttctgaaaataaaa

SEQ ID NO: 4227 - DNA, 1495 bp, Cricetulus griseus
gaggcagaggttgtcgggcaaagcgggcgaggccacctcctcccctccaaagccaaggcttccaaactcctgtgctgcagtcatcctcggaccacccgacttgggttaagggcaccgtatgctagaggatgcccagaactttggcctccagcatctctccagcggccacttcttgcgggagaacctcaaggccagcacgcaagttggtgacacggcaaagcagtacctacaaaaaggtcttttggttccagatcatgcgatcacacgactaatggtgtcagaactggagacccggagcacacagcactgcctactagatggcttcccgaggacattagaacaggcagaagaagaagactagaatcagtaatctgtgacctagtgatcaatttgaatattccctttgagacacttaaagaccgtctgagccgacgatggattcacccttctagcgggagggtctataatctggacttcaaccacctcaagtactggggttgatgacattactggtgagccacttgtccaacaggaagatagccgaggggtgcgtccaccagttctctgggacggagactaacaaaatatggccttatgtttacacacttttctcaaacaagatcacacctattcgatcccaagaagcatactgagcctgccatcggaagaaccaagaagacattgtcgttcactcaatcatgcgtttcgtcctggtgccctggccaaattagaagctagctgagatagcttgcagcatctttactagtttaagtgatgaagtaatgaggaaaatctagtgggtagaaagaattcacgaagaagaaatgctcctcctgcctttgaaaaaatattaatgctgacagtgttgtccttctggtgagtgatccaagccagatggtatgaagtcagtaaagggaacaagcctgtgggcttggagcatcttgcactagatgtacattgcacctgcactgagtaagacagctttaccattgtgggaactcagaatctttttgttttcttcctattccaaagatgcagtctataggtggccacaaagtccagaaatgaagatgctaatattttgtcaatcatcacaatagtcaataaagcatttgtaaacctgcatttattaaaacatgaaagttaaccataaatgccatcccttatttttggtgtggcaaactgcacaattcttgccagaataaacgccatcacctggaccttggcgcttcttggtgtggcattctgtatgtggttgggtatgaaggaagacaggcaagtggcttacgtttcccaggagccaacaggtcagcttttcttcagtgtgacagttggtgttcttcttgatttgggcatatatgcttaattcaaagtatctgagtgtgttctgtatatgctatcctaactattcattgtattaattgattttttttgttaccttgcttgaagattgatttgtattcaatttgatagaaataaacggttttctgcttaa

SEQ ID NO: 4228 - DNA, 1494 bp, Cricetulus griseus
aagagcagccaatatggcggcggagcgcgacggcgggccgcaacagtcgcaggagatgatggaggtcgacaggcgggttgaatctgaagaatcaggtgatgaggaagggaagaggcacatcggtggcatcgtgacagacctcagtgagcagagtctgaaggatggagtggaacaggagacggaggacccagaagaggaacatgatgagctggcagtggatatggaaaccatcaacctggaccgagatgcagaggatgttgatctgaatcactatcgcattggaaagattgaaggctttgaggtgctgaagaaagtgaagtcactctgcctccgtcaaaacttaattaaatgcattgagaacctggaggaactgcagagtctccgagaactggatctctatgataatcagatcaagaagattgagaatctggaggcgctgacagaattggagattttagatatttcttttaatctgctgaggaacattgaagggattgacaaactgacacggctgaaaaaactcttcttggttaacaataagatcaataaaattgagaacataggtaccttacgtcaactgcagatgctggagctgggttcaaaccgcatccgggcaattgaaaatatcgacacgttaaccaacctggagagtttatttctgggtaaaaacaaaattacaaaacttcagaacctggatgcacttaccaacctgacagtcctcagtatgcagagcaaccggctaacaaagattgagggtctgcagagcttggtgaacctgcgtgaactgtacctcagccacaatggtatcgaggttatcgagggcctggagaacaataacaaactcaccatgttggacattgcatcaaataggataaaaaagattgaaaatatcagccatctaacagaactgcaagaattctggatgaatgacaatctcctggagagctggagtgaccttgatgagctcaagggtgccaggaacctggagactgtgtacctggagcgcaaccccctgcagaaggacccacagtaccggcggaaggtcatgctggctctaccctccgtgcggcagatcgatgccacattcgtcaggttctgagtcctccttgctcctcacctggtccctctcttcccagccacggttttttaatctacctattgctcctgaagtcgtcactataccaacagtcacaacccaatggcaataataaggcactggtggtagctggcctgagacaccacacaccatttggagatgccaacactattaaatcttgccacgtggtcttcctggtgaattggtgacggttattgtagccatggagagaatgcaggacatgttacagtcatttgttcttcctgtctgtctatgtccttagcctggctgtcctggaactagctcttgtagaccaggctggtctcaaactcacagagatccgcctgcctctgcctcccaagtgctgggttaaaggcatgtgctaccaacatctggca

SEQ ID NO: 4229 - DNA, 1494 bp, Cricetulus griseus
atgtccaccgctatggcaactcgtaagcgggcaaagccggcccccgggtccggggccgatgcggtggccggcaagcggcggcgaaaggtcgactctgcccgggacagaggcaaatccaagggtggtggcaagatgaatgaagaaatttccagcgattctgagactgagagcttggctccaaggaaaacagaggaagaggaggaggaggagctagaggagactgcacaagagaagaagctacgcttggctaaactctaccttgaacagctcaggcagcaagaggaagagaaggccgaagctcgtgcatttgaggaggatcaggtggcagggcgcttgaaggaggacgtgctggagcagagaggcaggttacagaagtcggtggcaaaggagatccaggccccagctcccactgacattcgagttttacgtggccaccagctctccatcacatgcttggttgtcactcccgacgacctggccatcttctccgccgccaaagactgcaccatcattaagtggagtgtagagagtgggcggaagctgcgtgtgatccctcgagccaagaaggggacccaggggcagcctgcaggccacagcacccacatcctctgcatggccatctcctctgatggcaagtaccttgcctctggtgaccgtagcaaactcattctaatttgggacgcccagagctgccagcacctgtacaccttcacgggacaccgggacgctgtgtcgggactggccttccggaggggtacccaccagctctacagcacttcccacgaccgctctgtgaaggtgtggaacgtagcagagaactcgtacgtggagacactcttcgggcaccaggatgctgtggctgcattggatgccctgagccgagagtgctgtgtgacagctgggggccgggatgggactgtgcgtgtgtggaagatcccggaggaatcccagcttgtcttctatggccaccagggctccattgactgcatccatctgatcaatgaggagcacatggtgtcgggtgcagacgatggctccgtggccttgtggggcctctccaagaaacggccacttgccctccagcgtgaggctcacgggctacatggggagccaggcctggagcagcccttctgggtgtcatcggtagcagccctactcaatacagaccttgtggccacaggctcccataatgcctgtgtgcggctttggcagtgtggagagggcttccggcagcttgaccctctttgtgacatccccttggttggttttatcaacagcctcaagttctccagtgccggggacttcttagtggctggagtggggcaggaacacaggcttggccgatggtggaggatcaaagaggctcggaactcagtctgcatcatcccactgcgcagactccctgcaccccctgttgctggctcctgacactcatccttatttaagtgctttccaggccctgcctccccttttgtattaaagcctcctatttta

SEQ ID NO: 4230 - DNA, 1494 bp, Cricetulus griseus
cctcccctgcctcagaatgggaccctggctcctaccctgattcctgtgatccagccagcttcctgaggggatgcctgggaaccagcagaaatcagagtctttggagatggactctgacatgtcgccaagctgcaggctcagtgacttgagcagaggtggcagtctggagagccggagcagcagctctcgctccagaagcttcactctggatgatgagagcctgaagcacctcacacacgaggaaaaggatgtcatcctgttctttgaggagaccctcgattccctggaatatgactttgatgagccagccctgtgtgacagtggcattcattgccactctccacagtctctggaagagagcccttccagtcactctgaaccggaagatgtcatcgatttagtacagccaggacctgtgtctggggaagctgggagccttgcagatgtgcctcaagtagcaggggccccatctgctacaaaacagggctctcctgttcctgaaggtggaaacaagccgctgagaattccctacctccaccagactccgggatcccgaggtgtttctctgccgcaaaattctgagaagttagcaggaaacgaagccctgtcccccacctccccatcgaaggagggcaggcctggggaatggaggacaccgacttctataacctctcgaaatggggaccaggttggcgtatggcaccgacacacagcccagccggcacccaagatccaccgcttccccagcaacatatgcgtgaccaacagcgccggcaaggacttcaacaaaactatctccaaggcggccgtcaacgtgcaggagcggaaggcccaggtcctggccaacatcaatggcatgtccttcatcgccgcgggcgacacgtcatcggaagagcggtggcagaaggcagaggagcagaggggcggctctggggacggggaacgcgcccagggcagggtgggcatggccggggagcccgggggaccgcgtgcaggaggcccagccagggcgcagcagtccagggctgtgcagaccgagcagccaccgctggccaatggcttccagagcgtgcacgaggccctgcgcagcgagcccagccccttcgttcccaccagcaagaccatcactttccggccagacccggctatagcgggcaagctggcgcgccagaacgccagccgcagcctgtacgaaccgcgactggacagcctccaagaggcccgcaaacgcacaggctcgctcccccgggctgcgggcttccgaccacatggcatcacagtgcagttcgccggccgcggctccacggaagaagcacgacgagaggccctgcgcaagctcgggctgctaaaggagaacttgtgagggtcataggtgggactgctggagtggctgggtaggccttgcacgcccgcactgggtgtccggttctataagcgcaggagctgggtggcacgaagtgctgcatattggggaagaagtctcagccccatccc

SEQ ID NO: 4231 - DNA, 1494 bp, Cricetulus griseus
gccgaccgcactctgttcgtgggcaacctggagacgaaggtgacggaggagctcctcttcgagctgttccaccaggctgggccagtaataaaggtgaaaatccccaaagacaaagatggcaaactgaaacagtttgcatttgtgaatttcaagcatgaagtgtctgttccatatgccatgaatcttctcaatggaatcaaacttttcgggaggcctatcaaaattcagtttagatcaggaagtagtcacgcctctcaggacgccagtgtgtcatatccccagcatcatgttggaaatttaagccctacctccacatctcctaacagctatgaaagggctgtgggtaacatgactccatcagcacagatggtccagcggtccttctcttccccagaagattatcagcggcaagcagtgatgaacagtgttttcaggcagatgtcatatggtgggaaatttggttctccgcatgcagatcagtcgggattttctccatcagttcaaccacacggtcatacctttaaccagtcttccagctcccagtggcgccaagatgcattgtcattacagcgtaaaagacagaattctcacccctacctagcagatagacactacagccgtgagcagcgctactctgatcatgggtctgactatcattacagaggaggccgagaggatttctactatgatgacaggaatcatgatggctggagccatgactatgataacagaagggacagtagtagaggtgggaaatggccttcatctcgacattaacaagcattccaaggacacggtttaccgggccattttaggcccttttaatgaagttgttttggagatatttctaaaatctgtacagagtagccccacaattttccacctgtctttgaaaaaaaagtttttttaagcctagcagcactctcatagagaactgagaactgtggctccacatttgttactttaattaccttacctcagggtttctgaagaggaaggattttatataaaagatgtgccaccattccaatcatttcagctaggaaagatgaactgtatagattggttgtattataaagcaaatattttaattatctcacccttttgtgttgcaagaaatttcttggtaatgaatcattttggtgtatatagtagaaaacatccaaattggtagtctgaaatggctatctgcattttgctaataaaagaaaatagaacttctcagtaatccattttattaacagtttatttaaacagttgatttgttttgtttggggatgaatcatattttctaactcagaatttaagtacaaattctgtggtatgctcttgaattttatcacaaacatacattataaatctatactagttcattctaagaactttaaaattctttcattaaattatatttaatgtatgactagtcactcaggaagataaatatctacatgtgtatttttacataaaaagacagtgttgatgaaaattcttttt

SEQ ID NO: 4232 - DNA, 1494 bp, Cricetulus griseus
gaagatggcagcgctgagcaatgtccgctggctgacccgagcggtggtcgccgctcggaaccccggggcttggagaggtctccgaacatcggctgcggctcacgccgcttcacagacccaggcagaagatgtgaaggttgagggtgcctttcctgtgaccatgttgccgggagacggcgtggggccggagctcatgcatgctgtcaaggaagtgttcaaggctgctgctgtcccagtggaattcaaggagcaccgcctgagcgaggtgcagaatatggcttctgaggagaagttggagcagctgctgagttccatgaaggagaacaaagttgccatcattggaaagatccataccccaatggagtataagggcgaattagcttcctatgatatgcagctgaggcgtaaattggacttgtttgccaatgtggtccatgtgaagtcacttcctgggtacatgactcgtcataacaatctagacctggtaatcattcgagaacagacagaaggggaatatagctctctggaacatgagagtgcaaagggggtcattgagtgtctgaagattgtcactcgaaccaagtctcagagaattgcaaagtttgcctttgactatgccaccaaaaaagggcggagcaaggtcacagctgtccataaggccaatatcatgaaacttggggatgggttgttcttgcagtgctgtgaggaagttgctgaactgtaccccaaaatcaaatttgagacaatgatcatagataattgctgcatgcagctggtacagaatccttaccagtttgatgtgcttgtgatgcccaatctttatgggaacattattgacaatctggctgctggccttgttggaggagctggtgtggtccctggtgagagctacagtgcagagtatgcagtttttgagacgggtgctcggcacccatttgcccaggcagtgggcagaaatatagccaatcccacggccatgctgttgtcagcttccaacatgcttcggcatctcaatcttgaataccactccaacatgattgcagacgcagtgaagaaggtgattaaagttggcaaggtacggactcgagacatgggcggctacagcacaacaactgatttcatccagtctgtcatcagccatctgcacccccatgggggctagagccctcactccctccaactccaaaggaccatgctacctacacatcccttcagtacaatggaccaaggaagaaaacatctaacagtagaccctaattgcttttctggcagaggctaggttatcctgggggctggtggtatagggtacctgcacaaggtgggtgtttgggactggatccagaccacaggatgatgacagctttttcctacaggttcgaacctcagatatgggtggttatgccacttgtcatgacttcactgaagctgttattgctgccctgtcataagtcttacaatgtgcacatgtaaaatatccaataaaacaaacataca

SEQ ID NO: 4233 - DNA, 1494 bp, Cricetulus griseus
gccgccgccgccgccgccgccgcggcttgttctgcctaagatggcgccgctcgatctggacaagtatgtggagatcgcgcggcagtgcaagtaccttcccgagaacgacctgaagcggctgtgtgactatgtttgtgatctactattggaagagtcgaatgttcagccagtgtcaacaccagtaacagtgtgtggagacatacatggacagttctatgatctttgtgaactgttcagaactggaggccaggttcctgacacaaactacatatttatgggtgattttgtagacagaggttactatagtttggagaccttcacttatcttcttgcactaaaggctaaatggcctgatcgtattacacttttaagaggaaatcatgagagtagacagataacacaggtgtatggattttatgatgagtgccaaaccaaatatggaaatgctaatgcctggagatattgtaccaaagtttttgacatgctcacagtagcagctttaatagatgagcaaattttgtgtgttcatggcggcttatctcctgatatcaaaacactggatcaaattcgaaccattgaacgaaatcaggaaattcctcacaaaggagcattttgtgacctggtgtggtcagatcctgaagatgtagacacttgggcaatcagtcccagaggagcaggttggctttttggagcaaaagtcacaaatgagtttgttcacatcaacaacttaaaactcatctgcagagcacatcaacttgttcatgaaggctataagtttatgtttgatgagaagctggtcacagtgtggtctgctcctaactactgctatcgatgtggaaacatcgcttccatcatggtcttcaaagatgtcaatacaagagaaccaaagttattccgggcagttccagattcagaacgtgttattcctcccagaaccacgacgccgtatttcctttgaggccattgccatcccactggcccactttttgccctcttatatcccgcctttcttgtaccctctacaatatactttttattgagcactttgctgctgaaatgctgcctcttgccttttttaattttaaattatctaaatttattgtttgttatggtgtccatagcaatgtttttctatcagttttgtcactcatcccatccccatcttggacttgtttgagaagacttgagaaatgtcttaatactcacattgctgcatgtagctcttgcttatttgctgttctggggaaacaggacgcatttcctcttttaaaaagccaattgacaattacatggaaatcctcctcatttatatcagccaggcttctgtttttgtttggtagggtttaagaaatttcagcagcaaagttgtccagtgggcaggatggactgcaatgcctaagtcatgtacccttgtcccagctgtaaacttcactgtccttactggatgatgatttgatgttttaaaagggtataaaataaattggtctaaagggc

SEQ ID NO: 4234 - DNA, 1494 bp, Cricetulus griseus
ggcatgtgccccaaccagctcagcccccacctgtgggtggacgcccagagcacctgtgagcgtgagtgcaccagggaccaggactgtgcagcatctgagaagtgctgcaccaatgtatgtgggctgcagagctgtgtggcagcccgcttccccagtggtggcccagctgaacctgagacagcagcctcctgtgaaggcttccagtgcccacaacagggctctgactgtgacatctgggacgggcagccagtttgccgctgccgtgaccgctgcgagaaagaacccagcttcacttgtgcatctgatggcctcacttattataaccgctgctatatggatgcagaggcctgcctgcgggggctccacctgcatgttgtaccctgcaagcacattctcagttggccacccagcagcccaggaccacctgagaccactgctcgaccaaccctggggctgctcccatgccacctgccctgtacaacagcccctcaccacaggcagtacatgtcggggaacagccagtctccactgtgatgttagcggccgtccagcggaagaacctgatcatgcgccctgaccagatgtatggcaacgtggttgtcaccagtattgggcagctagtgctctacaatgcccagttggatgatgcaggcctgtatacctgcactgcacgcaatgctgctggcctgctacgggctgacttccccctctctgttttgcagcgggcaaatactcaggacagggacccaggagtcctggccctggctgagtgccagcctgacacacaggcctgtgttcggaccccccaccctcatcatgtcctttggcgctttgacccacagcgaggtagctgcatgaccttcccagccctcgaatgtgatggggctgcccggggctttgagacctatgaggcatgccaacaggcctgtgcccgtggccctggggatgcctgtgcactacctgccgttcagggcccctgccagggctgggaaccacgctgggcctacagcccactgctgcaacagtgccacccctttgtatacagtggctgtgaaggcaatagcaataactttgagagccgggagagctgtgaagatgcttgtcctgtaccacgcacaccaccctgtcgcacctgccgcctcaagagcaagctggctctgagcttgtgccgaagtgattttgccattgtgggtcgactcacagaggtactggaggagcccgaggctgcgggtggcattgctcgtgtggctttagatgatgtgctgaaagatgacaagatgggcctcaagttcttgggcaccaaatacctggaggtaacattgagtggcatggactgggcctgcccatgccccaatgtgacagctggtgatgggccactggtcatcatgggtgaggttcgtgaaggtgtggccatgttggatgcaacagctatgttcgtgctgccagtgagaagcgagtcaagaagattgcagagctgcttgagaagaaggcttg

SEQ ID NO: 4235 - DNA, 1494 bp, Cricetulus griseus
tcccgccatggctgcacgcttgctcctccgctcccctgcgcgtcccgagcgcccgctccgtgccgcgccccgccgccccccgcccggtgttctcattccggaggagaagcacgcctggaaaccccttctgctaaaaaattaactgatatcggaatcaggagaatcttttcctcagaacacgacattttccgggaaagtgtaaggaagttttttcaggaagaagtggttccgtaccatgcagaatgggagaaagctggagaagtgagtagagaattgtgggagaaagctggcaagcaaggcctgcttggcgtcaacatcgcagagaaacatggcggtattggcggagacttgttctcaacagcagttacttgggaagagcaagcatactcaaactgcacaggccctggtttcagtcttcattcggatattgtcatgccctatattgcacattatggcacaaaagaacagatagagcacttcatccctcagatgacggcaggcaagtgcatcggtgccatagcaatgacagagcctggtgctggaagtgacttacaaggagtcagaacaaatgccaaaaggtctgggagtgattggattctcaacggaagcaaggtgttcatcactaatggctggttaagtgaccttgtgatcgtagttgccgtcaccaatcgtgaagctcggtcgcctgcccatggtattagccttttcttggtggagaatggaatgaaagggtttatcaagggccggaagctacacaaaatgggaatgaaagctcaggacacagcagaactattctttgaagatgtacgattgccagctagtgccctacttggagaagagaataaaggcttctactacctcatgcaagagctcccacaggaaaggctgttaattgcagatttggcaatttctgcctgtgagttcatgtttgaagaaaccaggaactatgttaagcaaaggaaagcttttgggaaaacagttgcacacatacagacggtgcagcataaactagcagaattaaaaacaaacatatgtgtaacgagagcttttgtggacagctgtctgcagttgcacgaagaaaaacgtctggactctggctcagcttccatggcaaaatattgggcatctgaattacaaaacagtgtagcttacgactgtgtacaactccatggaggctggggttacatgtgggagtacccgatttcaaaagcttatgtggacgctagggttcagccaatctacggtggtaccaacgaaataatgagagagctgatcgcaagacagatcgtcagtgacagctagacatctgcctacgtcctgcaatcctattacatacagctaacctgaattcaactctacttgggataaaatggaacctggaaagggggaatagtaaagctgttttatgtatgcttattacagggaaaggaaagaaatataattacaaagattaacacgggaaagaaaaaatttgaacccaaagagtctaaagtt

SEQ ID NO: 4236 - DNA, 1493 bp, Cricetulus griseus
tctgcgtggcttccgaagacaagaaagagaactgcttttggttacctaccactggccccatggcatccatgcagatggatcctgagctagccaagcaactcttctttgaaggagccactgtggtcattctgaacatgcccaaggggacagagtttggtattgactacaactcctgggaggtggggcccaagttccggggtgtgaagatgatccctcctggcatccacttccttcactacagctctgtggacaaggccaatcccagggaggtgggccctcggatgggcttctttcttagtctgaagcagcggggactgacagtcctgcgttggaacgccgttcaggaagaagtagacttgtctccagctccagaggctgaagtagaagctatgagagccaatctccctgagctagaccagtttctgggaccttacccctatgctacactcaagaaatggatctcactcaccagcttcatcaatgaggccaccatggagaagctgcagcccgagagccggcagatttgtgccttctcagacgtgttgcctgtgctttccatgaagcacaccaaggacagggtggagcagaatctacccctctgtggtactgagtgcaaaagctaccaggagggtttagctcggctgcctgagatgaagcccagggctgggacagagatccgcttctcagagttgccggctcagatgttcccagcaggtgccacaccagcagagatcaccaggcacagcatggacttgagctatgccctcgagactgtgctcagcaaacagttcccttgcaatccccaggatgtactcggtgaattgcagtttgcctttgtgtgcttcctgctgggcaatgtgtacgaggcatttgagcactggaagaggctcctgaaccttctgtgtcggtcggaagcagccatggtaaagcaccataccctgtacgtcagcctcatctccatcctgtaccaccagctcggtgagatccctgctgacttctttgtggacattgtctcccaggacaacttcctcaccagcaccttacaggttttcttttcttctgcctgcagtattgctgtggatgccaccctgaggaagaaagcggaaaagttccaagcccacctgacgaagaagttccgctgggactttgcttcagagccagaggattgtgccccagtggtggtggaactccctgagggcatcgaaactggctaactgcaaatcctcaagccagggagacccttcccacatggctactgcccggtgtctctgctcatccgtcttcctgggatcctccagcatagcgatccaggcaggtcctgtaaagatggagcaggatccctcttcaccagtaaatacattcctttgttgcaaaagcaagatattgtggtttcctttagcctggccctggcacttaatttcagaaaaaggcccttgtagagtgtccagatgaaacctgcccaacaacagtctaattccttctacaacgagaaa

SEQ ID NO: 4237 - DNA, 1493 bp, Cricetulus griseus
atccaaaaggaccagcatggctttggcttcacagttagtggggaccgaattgtgctggtgcagtctgtgcgccctggaggtgcagccatgaaagccggtgtgaaagagggtgaccggatcatcaaagtgaacggcaccatggtgaccaatagctcacacctggaggtggtgaagcttatcaaatctggtgcttatgttgcacttaccctcctgggctcatctccttcctccatcggtgtctctgggctccagcagaccccatctctggcaggaatacccagagttaaccccatgattccaccaccacctcctcctccacccttgccacctccacaacacattacaggacccaaacctctgcaggaccctgaaagttcaaaaaagcaatgccactcaaaatcctcaggagtatgctgagacaggaggagaaggagctacagctgagcaggaggaggatgcaggaggagctgagagccctgcctcacccctcccccctcccctggatggaggcatcaggacaagggaccctgtccttctggccctcacaggccctctactcatggaaggacttgctgatgctgccctggaagatgtggagaacttgcggcacctgatcctgtgtggcctgctgcctggtcacactgtgaagactcaggctgctggtgagcctgaggatgacctcacacccaccccttctgtcatcagcatcacttctccacccctgggacccaggatccccagggcaagctcccactgtaggtgacaacacccagcttctgaggccagagggaagccagccagagggggaggatttggcactctattctctggcacacctgccgtcagaatctgagatatctgaagtggaaggcggagcacaggctacggggaactgtttttatgtcagcatgccagcaggacctctggactccaacactgagcctaccgggacaccgctaagtccctcacagcccccacagcctccctacatggccaacagagcctccctggtcctcagggatgtgggtataatcttccataccatcgagcagcttaccatcaagcttcacagactcaaggacatggagctggctcacagagagcttctcaagtcccttggaggagagtcatctggtggaaccactcctgtgggcagttttcacacagaggcagccagatggacagaccactctctctctcctccagccaaggaagccctggcctctgactcccaaaatagtcaggagcagggatcctgccctgaaggctccgacacccccatggaagacagtgccacagacacagctgcatcaccaggaccatagccatccagacaacctgaggaggagacttctgtgtaaatgcacttttttcctccccttcttcctaggcctgtgacagctgggtgcctgactctcctctctttccctttagtttcctataaatatgtctattgtatgtgcattttttgccattgtaaataacttagcctt

SEQ ID NO: 4238 - DNA, 1493 bp, Cricetulus griseus
gggattaattttgggactccctcccagccagcaacgactaccccttctactggcctcttctcactcaccacacaggccccaaccacacagaccccaggattcaactttggaacaacacctgcttctggaggaactggcttctccctggggatcagcaccccaaagctcaacctgagtaacacagctgccacaccagctacagccaacactggcagctttggccttggcagtagcacccttaccaactgccgtctcaagtgctgggacctccagccagggaacagcccccactggctttgtctttgggtcctctaccacctctgctccatctacaggctccacggggttctcattcaccagtggcaatacatcccagcctggagcctctggcttcaacattggctctgtgggtagctcagcccagcccacagcactgtctggctctcccttcactccagccacgatggtgaccactacagcgggagcagcacagccagctgctgctgcgcccactgctgccaccaccagtacagggtccacactctttgcttctatagcacctgctcctgcctcatccagtgctacagtgctctccctctcagctccagtgacaactgcggctactcctagtgctggcactctgggcttcagcctcaaggcccctggagcagctcctggcacctccactactagcaccacctctaccacccgcctccaccacaaccactggctttgctttgagcctgaagcccctggtgccaactggctccagcagtgtagctgctactgggactcccctacctggctctagcaccgcagctgggacttccacaggtcccgcaatgacctatgcacagctggaaagcctgatcaacaagtggagcctggagctggaggatcaggagcggcacttcctgcagcaggccacacaggtcaatgcctgggaccgcacactgattgagaatggggagaagatcactagtctgcaccgtgaggtggagaaggtgaagctagatcagaagcggctggatcaggaactggacttcatcctatcacaacagaaggagctggaggacctgctgagcccattggaggagtcagtgaaggagcagagtggcaccatctaccttcagcatgccgacgaggagcgtgagaagaccttcaagctggctgagaacatcgatgcacagctcaagcgcatggcacaggacctcaaggacatcatcgagcacctgaacatggctggcggccctgcggacaccagtgacccactgcagcagatctgcaagatcctgaatgcacacatggattcccttcagtgggtggaccagagctctgccctgctgcagaggagggtggaagaggccagccgtgtctgtgagggccgccgtaaggagcaggagcgcagcctgcgcattgccttcgactagtcctgcgtgaataggaggggctccttgggttacaggaccgctggctttcttttgggtggttgt

SEQ ID NO: 4239 - DNA, 1493 bp, Cricetulus griseus
gagtgagcacgagggtggtttggggggagcaagagaatttctcagggggagctaaaagggacaagtttgtggagacggctctgaacagggagtgcagacagaagcgtctggaaatagccagggtgagaggggccgttagagggagagaaacaggaaacatcaccctttcaagagggagcaagatcagggatcctaagaatccacagacagcctaaagtttacaagaagtgtgcacaggcagcgagagaaggccagaaacagggccaaggcaggcactagagcgccaagggatgaacttcaccgtgggtttcaagccgctgctaggggatgcacacaacatggacaacctggagaagcagctcatctgccccatctgcctggagatgttctccaagcccgtggtgatcctgccctgccagcacaacctgtgccgcaagtgtgccaatgacgtcttccaggcatctaaccctctgtggcaatcccggggctccacaactgtatcttcaggaggtcgtttccgctgcccatcttgcaggcatgaggttgtcctggaccggcatggggtctacggccttcagcggaacctgctagtggagaatattattgacatctacaagcaggaatcctcccggccactgcactccaaggctgaacagcacctcatgtgtgaggagcacgaagatgagaagattaacatctattgcctgagctgtgaggtgcccacctgctctctctgcaaggtcttcggtgcccacaaggactgtgaggtggcccctctgcccaccatttacaaacgccaaaagagcgagctgagtgatggcatcgcgatgctggttgcaggcaatgaccgtgtgcaagcagtgatcacgcagatggaggaggtgtgccagaccattgaggacaacagccgcaggcagaagcaactgttaaaccagaggttcgagaccttgtgcgccgtactggaggagcgcaagggcgagctgctgcaagcgctggcccgggaacaagaggagaagctgcagcgcgtgcggggcctcatccgtcagtacggagaccacttggaggtttcctctaagctggtggagtccgccattcaatccatggaggagccgcagatggctctctacctccagcaggccaaggagctgatcaacaaggtcggggcaatgtcgaaggtggagctggcaggacggccggagccaggctatgagagcatggagcaattttctgtgaacgtggagcacgtggccgaaatgctgcggaccatcgacttccagccgggcgccgcgggggatgaggaggatgacgaggtggctttggaaggggacgagagcaatgcagggctggaggaggagcggctggacgggccagagaggcctgcactgaccagaccctgattcagagtgcgagcccgcaacgggaggcaaggcatgctgaggaccggctcagagaccacggcgcaacccagctaggcatcccgcccccgggaaggt

SEQ ID NO: 4240 - DNA, 1493 bp, Cricetulus griseus
ctctgtaagagaggacaaagacagtgctcaaaatgcttgctggaatgcaagctcctccgacgctactgctgctactgcttaccctgccagccacaggttcagaccctgtgttctgcttcaccaagtatgaagagtcctctgggaagtgcaaaggcctgcttgggggagatgtcagcgtggaagactgctgtctcaatgctgcctatgccttccaggagcatggtggtggtccctgtcaggcatgcaggtccccacgatggtcaccatggtcctcatcgggccccctgcctccgttacatgtgaggggtcccaacttgcgacacaggcgtctgtgtgggcaggggtgggcagttgctctgagaaggtggctcctaggacacttgagtggcagctacaggcctgtgaggaccagccatgctgtccagaaattggtggttggtctgagtggggaccctgggggccttgctctgtcacctgctccaaaggaacccgaacccgtcaacgactatgtgataaccctgctcctaagtgtggggggccgactgcccagaagaggcccaacaatcacaggcctgtgacactcagaaggtctgccccacacatggggcctgggcagcctggggcccctggagctcctgctcaggatcctgccttggcggaactgaacaacctaaggagacacgaagccgctcgtgttctgcaccagcaccttcccatcagccccctgggaaaccctgcctaggatcagcctatgagcatcggggctgcagtggcctgccaccctgtccagtgcctggtggctggggaccatggagccctgtgagcccctgctctgtaacctgtggcctgggccagaccctagaacgacggacatgtgaccacccagtacctcgtcatgggggcctcttctgtgctggtgatgccactccggacccacatctgtaacacagccacgccttgccctgtaaatggggagtgggaagagtggggaaaatggagtcactgcagccgtgtgaacatgaagtctatcagttgtgaggaaatcccgggccagcagtcacgcacaaggagctgtggtggccgcaagtttaatggacagagatgttctggaaattaccagcatattcgacactgctatgacatccataactgtttcttgaaaggtacatggtcacagtggagttcctggggtctgtgcacaccaccatgcggccccaaccccacccgtgtacgccagcgcctctgcacacctttgctccccaagttctcgcccacagtttccatggtcgaaggtcagggtgagaagaatgttaccttctgggggactccacggccacagtgtgaggcgctacaggggcagaagctgatggtggaagagaaacggccatgtctgcatgtgcctgtctgcaaagacccagaggaggagaaaccctaaaatcccttgcttccattctgacccctgatcttccagacctgaataaaccagcctttct

SEQ ID NO: 4241 - DNA, 1493 bp, Cricetulus griseus
ggactattacctgaagcacaaattccttaatgagcaagaccttgatgaacttgtcaacagatcacacatgggctacgagcaggtcagagagtggtttgcagaaaagacagagacgatctgagttaggcatagaattatttgaggaaaaatgaggaggaggaggaagttatcgatgagcaggaagaagaggaagaagaaacagatgatagtgacacttgggaaccccccacgacatgtgaagcggaagctttctaaatcggatgactgaaatctacttaacattctgaaggagagtaagttcttcaactcaagatgtctgaattactgtgaatgggcccaatccttgctgacactgaaatgctttggggcgtgcatactctacaaaacaggatccaatgtaccaaaagaaatgcagcttgatgttgtgccaaagtcaaactgctgccgccggggagctctgcaatggaaataaagcgctggttagacacgacttgtaaaaagtgaaagcttaataccgctacacttttattcttaggatggaactttgtgaacctttgactttttaaggggttaatgaccactagagcttgtcctcactttactccagcttaccactgtataagataggccgtgttgcctgttttctttgacatgtgattaagcttatagctttgagtgaccaaacattttgcagagtaaaagttcttagaactgggaagtgggggagggaaccaaaccctaatttacttctgtgtcttatttatcaggtcctacaccaaaatagggccctttcttttgtggtcatcggaccacctttcaaaatgtgctttcctcacagagcaaattgtcgtttaattagatctggactcaaaaaaatggttttgaatgatcacacgtagtagctttggccagtttgttttctaatttaatgaataatgaatactaagctcttggttaaatgtttgtcagttaatgaaactgttatggaaaagcctcgaatatgcatgctgctttcatttttataaactttttattttttaactatagctttattagcaattcccaaatgctgcaatttgctgatcttttcactcagacagctggcttggtgggtggcttttttcatactactgttaacttttttaaaaaaagaagtgatgtaaagactgtaacaattgaatgcactaagctgtttttcttttacacgtctaaaaacttcttaaataccctgtattataatgattaaatcgctccctttttaaaaccattgctaatgtggtctgagtttcatttgacagtaatttcagtgttctcaagatctgatcctttaagcgtcaaggattggagatgaaggattggatatatttacgttatgtttcctttgtgctatgctaactttgtatagctgaaaagaactccatgatttcccatctctctggcaggctggatgaaagtctgctctgattgtttgcttagcttttaaatactattta

SEQ ID NO: 4242 - DNA, 1493 bp, Cricetulus griseus
cttcatccctccacctctggagaaacgcagggccatctctgacgtccgccgtaccttctgtctctttgtcaccttcgacctgctcttcatctccctcctctggatcatcgagctaaataccaacaccggcatccggagaaacctggagcaggagatcatccactacagctttcagaactcattctttgacatctttattctggcattctttcgcttctctgggctgctcctgggctatgctgtgctacggctccgccactggtgggtgattgcggtcaccacactggtgtccagtgcattcctcatcgtcaaggtcatcctctctgagctgctcagcaaaggggcattcggctacctacttcccattgtctcttttgtcctggcctggctagagacctggttccttgatttcaaagtcctgccccaggaagctgaagaggagagatggtatcttgctgctcaggctgctgttgcccggggacctctgctgttctccagtgctttgtctgagggccagttctactctcccccagaatcctttgcagggtctgacaatgaatcagatgaggaagtccctgggaagaaaagtttctctgcccaggagcgggagtacatccgccaggggagggaagccactgccgtggtggatcagatcttggcccaggaggagaactggaagttcgagaggagtaatgagtatggggacactgtgtacaccattgaggttcctttccatggcaagaccttcatcttgaagaccttcctgccctgtcctgctgagctggtgtaccaggaagtgatcctgcagcctgagaggatggtgctatggaacaagacagtgaccgcctgccagatactgcagcgtgtagaggagagcacccttgtctcctatgatgtgtcatcaggggctgcaggtggcgttgtgtcccccagggactttgtgaatgtccggcgcattgagcggcgcagagaccgatacctatcatctggcattgccaccacacactgtgccaagccccccacgcacaaatacgtcaggggagagaatggtcctggaggcttcattgtactcaagtcagccagcaccccccgagtctgcaccttcatctggattcttaacacagatctcaagggtcgcctgcctcggtaccttatccaacagagcctcgcagccaccatgtttgaatttgcctttcatctgcggcagcgaattggagagctgggggcccgagcttgaacatgctccctcgccaccctgctggccagggttctgtctccatagcctccagagactgaaagagggactatttgggcttcctgctgttgatgaagggtgatgctgagcagcaggtggcacctcattccctggctgtcccttcccactgagccagccgtactgccgggaacgtgaccctgagcagttgtgaggttgagcacctggactctggggtgccccagactggaagagccaggactgttcttccgatgttgac

SEQ ID NO: 4243 - DNA, 1493 bp, Cricetulus griseus
  modified_base (306)..(306): a, c, t, g, unknown or other
ctacagtgtccccacaactccagaagacttcctcagcaacatggacgagatggacacaggagaatgccagtcagacacccatggcagtcaatccccagcagacccgcttccctgatttcctcgactgccttccgggaaccaatgttgacctagggactttggagtctgaagacctgatccctctcttcaatgatgtagagtctgctctgaacaaaagcgagccctttctcacctggctgtgatcactaccattgtaaagtgatgcagctgtgatgtgtgttatatatatatatatataacacacanatatatatatatatatataaattaaggactgagagtagcatgttcatttagcaggtcagtctacctgcactagcaatgaagtccttggctgtttattattgtgaactgacattatttataatctatgaatttaatctcttttttattttttgaaagacatcaagaatctgggaggaaggtttcaatttccacgagggtgagggcttttttggttgaggatctttaatgagatcccttttggtccattggaatataaatgcacagagtacatttggtcttggtgggaagaggcaagtgaaaggtcagagaagtgatttctcttttcctgaaaagaacccaattaatgtccagttaattccctgctctttctgagcacccagaggtgagtagggatttatgttgctattaggttgaaagggagcactcttccattttctcttttgttagcaaaaattgcaaaaaaagagttgtacattctttctgaggaaaatcaaaaacaaaccaaaacacaagggacctaacaaaactcaacagtgttactgtatttaaaaatatttttatacatgcatttcaggttattaaatgtaaaaaaaaaagatactcctgttttaaaagtagttaaatcattgatgatttattttaccaagttttagaagcaattttctaataagcttgtggcattatgaaatgttagaataatttttttagtaaattagtttaaatctttttaatgaatattgtatttttctagaataaaatatggcccctgactgtttactaatagataaaatccagttgtaatttctgttgttctttttaagaccgtaaaatgtggcttttgttagagagagctaaagctagacatcagaatcagacctttttttctctagttctgattgaactcaagatttcatgtgtggagctccatgccagccctagagcaatttctcaaaggttctttagattgctataagtaagtattaatactctctaagaattcataataaggtgctactcatatactatctcatactataagacaactgtcagactatctagtcttcttagtcctaaatgaatacattttaccatatcatctccaaattttgtcatagaatagaaaatgggtgattgacagagaccatttccatgacactattatacacatgctaatactttaacttaat

SEQ ID NO: 4244 - DNA, 1492 bp, Cricetulus griseus
tgagagttgagtattagacaaaataaatgtaatctctactcggtgatttagctccctgattgttgtagtcttcactttgtggagcattcatgctgaaaactgaagcaattaatggttgaatatgatcatatgactcttttcaagatgaacttgaagattatattaaagtacagaaagccagaggcttagagccaaagacgtgtttcagaaggatgagaggggactatttggaaagctgtgggtacagagaggagtttgattccagtcccagatataggatgtttgatcaaagactcccatcgggaaccaaccataggtacccacgatccttcagtagttcacagacagaagaccgcttgccccagtggttaccagctcatggaaagctgagattagactctctgagctactgtcaatttaccagggatggcttctcagaaaaaccagtccccctgaaccttagtcaacaagaatacaactgtggctcatatagtgtagaatctgtagttcacaagcacctctactcaggacacagtgccattgatcctcaagccagtcatagacaaatgcaccagaagaggaaaagacatctagaggagagcagagaaaaggagaagaacggcccaaacacgagaggaaaaggagttcagaggaaatggatttaaacaaacacagaagcatccaaagaaagaaaacaaaggcagaaacagaaactgtacaggacagtacagaaaagcttaagaatcgaaaagagagaaaaagccgagatgtagtctctaagaaagaggaccgtaagcgtagaaaggaaaaaaggaacaaggtgaagaaaggacggaggaggagatgctttgggaccagtctatccttggattttgaagctccttagtcagttctcctgaggctcaactgaaataacatgcaaggagcttggttatgtgcattcatgttcatatcactttcctatgtggacagaagtttcgacttctaatgacgttgaacatgaggaatttagtgtgattgctttccaacatggagattactttcctattttctaaaagctttattaatttttcttacatatgatagaatttccctttaagagagtggctctgctttgattcaccaaattgcagtggtagtggaattattttcctgtgggagatcatttatttaaaattggaggattaacgaatctgtttcttggttgggtttgttttagttttgagtcacatatttttatgctcactggatttctctatgaagcaatttagatacccttttttagatctaacttgcagtgtattttctgggttggaaagtgaaatacattataataatcttatcttacacatagttttaaaagtttcagagtcttcacacaaaatcagtttatattctgaaaatgtttataataaagtattttaacttctggaaaaaaaaaaaaaaaaaaaaaaaaaaaaaaaaaaaaaaaaaaaaaaaaaaaaaaaaaaaa

SEQ ID NO: 4245 - DNA, 1492 bp, Cricetulus griseus
  modified_base (451)..(451): a, c, t, g, unknown or other
  modified_base (677)..(677): a, c, t, g, unknown or other
acttgaaaccattccaggatggcttattttggagtgttctctttactggctatacaaagtgtggtgataggggctactttcccagatgaaaccatagctgagtggtcagtaaatatgtataaccatcttcgagccactggagaagatgaaaacattctcttttctccactgagcattgccctcgcaatgggagtgatggagcttggggctcaaggatctactttgaaagaaatccgccattcaatgggatacgatggcctgaaaaatggtgaagaattttctttcctgaaagatttttctaacatggtctctgccgaagaaagacaatacgtgatgaaaattgccaaattccctctttgtgcaaaatggatttcatatcaatgatgagttcttgcaaatgatgaaaaagtactttaatgcagaagttaatcatgtggatttcagtcaaaangtagctgtggccaactacatcaataagtgggtggagaattatacaaacagtctgttgaaagatttggtatctccaagggactttgatgctgtcactcatctggccctcatcaatgctgtgtacttcaaagggaattggaaatcacagtttagacctgaaaataccagaactttttccttcactaaagatgatgaaagtgaagtacagattccaatgatgtatcaanaaggagaatttattatggggaatttagtggatggatccaacgaggctggtgggcatctaccaagttctagaaataccctatgagggagatgagattagcatgatgctggtactgtccagacaggaagttccactggccacactggagcctctgctcaaagcacagctgattgaagaatggacaaactctgttaaaaaacaaaaggtggaagtataccttcccaggttcacagtggagcaggaaattgatttaaaagacatctttaaagcccttggagtcactgaaattttcatcaaagatgcaaatttgactgccatgtcagataagaaagagctgttcctctccaaagttgttcacaagtccttcatcgaggttaacgaagaagggtcagaggcagctgcagcctccggaatgattgcaattagcaggatggctgtgttgtaccctcaggttattgtggaccaccctatttttcttccttattaagaacaggaaactggtacaatcttgttcatgggacgagtcatgccaccctagaaacgatgaacacaagtggacatgacttgaggaactttgaatgctgacatttgaagaaaaagaaagcagtaataaagcacattttgtttgcaattggtatatagttaggattgtcgctttacagcattatttaaggtaatatttaaagtagttccgagtagaagtaatacatgtgacctataattcagcctgtcaagaaatgttaccagtattaaaattatggtcctgttgtgtcattgtgtctgttgtactgttgtttaaaataaaagtatatattg

SEQ ID NO: 4246 - DNA, 1492 bp, Cricetulus griseus
gtcgggcctgagccgagcagctgcgcgacatcatggatacgtccgggaagcaggcggaggcaatggcgctgctggctgaagcggagcgcaaggtgaagaactcacagtccttcttctccggcctcttcgggggctcatccaaaatagaagaagcgtgtgagatgtatgccagagcggcgaacatgttcaagatggccaagaactggagcgctgccgggaacgctttctgccaggctgcccagctgcacctacagctccagagcaagcatgatgcagctacctgcttcgtggacgcaggcaacgctttcaagaaagccgacccacaagaggccattaactgtctgatgagagcaatcgagatctatacagacatgggcagattcacgattgcagccaagcaccacatctccatcgctgagatctatgagacagaactggtggacgtggagaaggccatcgcccactatgagcagtctgcagactactacaaaggcgaagagtccaacagctcagccaacaagtgtctgctgaaggtggctggctacgccgcacagctggagcagtaccagaaggccatcgacatctatgagcaggtagggaccagcgccatggacagtcccctcctcaagtacagcgccaaagactacttcttcaaggcggctctctgccacttctgcatcgacatgctcaacgccaagcttgctgttcaaaagtatgaggagctcttcccggccttctcggattcgagggaatgcaagctggtgaaaaaactgctggaagcccacgaggaacagaatgtggacagctacacggaatcggtgaaggaatatgactccatctcaaggctggaccagtggctcaccaccatgctgctgcgcatcaagaagacgatccagggtgacgaggaggacctgcgctaggcctccagccactgccttccacccatctgtcagtcagaggtggggcccaacacctcccaccaggaatatgaaggtcgagtgggtgcaatgcgggccacatcttccagggcaccagacaggctctgctggctggatggtcacccgctgcatccctcaccctgccatttatttaagcccccaaaggtgtcctcctgccctggaaaccacctggacagactctccaacacagacctctctgtgtgcagcaggaacctggggtcagcatccggtcccatctccttactagctgtgtgctaaggctttttctatctctcctaccttgtcccccagcagagataacacaggtagccctgagacttgctcttcctggctggtggtgacctctacccctggagccttcccctgccccctacaatggcaacctctctcaggtcagacccagccctggaacacacaggggtgtctgggccttgccctacacctgcttctttccctgcatccaggtctgtctgttgacctgatgctgcagctggcccaaaaaggacaataaaaacctgccacttttgcatgag

SEQ ID NO: 4247 - DNA, 1492 bp, Cricetulus griseus
atgaccatccaatgggcagcggttgccagctttctgtatgccgagataggactcattttaatcttctgtctgccctttatccctcctcagagatggcagaagatttttttcatttagtgtctggtctaaaattgcaagtttttggaacaaagcttttcttaccattataatactattaatcgttctatttttagatgctgtgagagaagtaaggaagtattcctccactcaagtcactgagaagagctcagccggcaggcctagtgcctatgagcacacacagatgaagctctttaggtcccaaaggaatctttatatttcaggattctcattatttttttggctagtgttgagacgtctggtttcgcttattactcagctggcaaaggaaatatcaaacaaagcagtgcttaaaattcaagcagaaaataccaataaggctgccaagaaattcatggaagagaatgaaaagctaaaatgggtactaaaaaacaatggcaaggatgaagaacaaattttggaaactgaaaataaaaagctagtagaagaccaggagaaactgaaaactgaattgaagaaggcttcagatgcccttttaaaggcaacaaaacgatgtggtaactatgaagatgcagtcagagagactttcaaaagaatatgatcgactcctgaaagaacactcagaacttcagaaccgtttggaaaaagacaaaaagaaagtcctgtgaattaattttataaaagaagattgtcatacaccgtgtcaatttcagctctaattgaaaaaatataagcatgtgaatgccatatttatatattgctaatagcattggtatatagtggctctttccccataaaaggaaaaattcactagccatttgcttcccaaaatagttctgaagttgcatgaaaccattattagccttaaaagctttgatgtgttttcagtaataatcagtggtggtggtgaaaatgatgtttaaaaatggtactcagagtcagaaaatttgttcacagggaaataaccataaataaccacaattagccactgtattaatagaggagagtcagagagaacaatgaaaacaatggccgtagggtttcttcagcctcatatataatcaatattctattctttgcaagttcatctagtaatagaatttatgtccatttgtgtaacagtcgtaacattggactgaactatgttgcactgtggaattctccacttacaaagctcatttatgacatccaaaaggtcatgtttcttatgcttgtgaaagttactgactatatatatattaattacctcagtatacatgcactggtatcaaacagatctctcaacgatgtttctgtattttcaaagttaaatactggttttcatgcaaatattcatgtagaggtagtaattatagtaatataatttagattatttcaatgtttaactgtgaaaagccacttgtcttaaaatgatttaaatataaaagaaaat

SEQ ID NO: 4248 - DNA, 1492 bp, Cricetulus griseus
atgcagcccaccttctggatggccgccctcaagctgaggtggaccattacaccaaggcagtcacgaaattccgatccccatatgaggagcagctagaccagcagaggctggcagcgaggagggatgaggaagcccagaggctcagagaacaccaggctcaacagaagcaagcagggcatgaggaagtccagcagcacccagagcagctacggcagcaagttaattacaatgctgtagagaatggcattgtgcagggagctgaggaccagggaatccatgaagaagagggaggagcctatgaaagagataaccaacaccaagatgaagctgaaggagacccgggcaacagagcagaaagtcatgaaccaggacaccaagaagctgacacagaagctgaggcagatagggcagctgtggaggacataaacccagcagatgaccccaacaatcaaaggggaagatgaatttgaggaagctgagcaagtgagagaagaaaatttgcccgaggaaagtgaagagcaaaaacaaggtgaagcgaagcaagagaatgcagaaattgatgagcacttggtgatggcagggaatccagaccagcaggaggataaatgttgatgaacagtaccaggaagaaggagaggaggaggttcaggaagatttgactgaaagagaagaaaagggaattggagcataatgctgaagagacctatggtgaaaacgctgatgataaaataatgatggcgaagaacaaggagctcgagatgatgcccatcccaaaggaagagaggaacattatgaggaggaggaagaggaggaagaagatggggcagctgttgccatatgtttctcctttaagctctgtgccttgttatgtaaccatttggatcacagttgttgatatggaaacaggcaatgctatcgtttaataagattatttctcagaactatatagtgaaatatctatagcaatatgatagaaactccaccctcagtggttttactatttacccagaattgacctgcctttgcctatatataaggcatttaatggcttttgaataataatacatcccttaggggaaaattcaaagtggaaattttccctgaaatgagcacatattttagtttggatcatcaatattgttgaacatgtagaactgggccacaattcatctgtgtgtggtactttcaaaataataaaaatgaattgcattttttgctattattgtatgaatataattttagtttttaataaccacactcatatatggttttgattttcccagctgagcaattgtgtatgtgtgtgtgtgcataaaaatgttctgttcgaatgtgttgtggattaccagtaaccataaatcaaattttatctttatgtataaaagcccttatgtgatgtaaatgtataatattgtacataatactcaaaatacaattattttggtaaattagtttgtattttaatgtcccagttgcagtatttaattatttg

SEQ ID NO: 4249 - DNA, 1492 bp, Cricetulus griseus
  modified_base (397)..(397): a, c, t, g, unknown or other
taagtgtccttaacccaggagaaacgccccactgcattatggcctagagaacaagtgggataccagagtcaccaatggagacctctactgtcaccgatgtctgaagcacactttggccacagtaccctgtggtggctgcagctatgccagatattgcagccaagaatgcatgcagaaggcgtgggagtgctaccatagcacagagtgtcctctaggggggctgcttctcacacttggggtcttctgccatgttgccctgaggataactcttctagccagatttgaagatgttgacagagttgtaaggatgctttgtgaggagactggtaacaaagcatctgtctacctgaaaagaagaatccggtcaagacacttcattgtacaaagtcgggggganagtagaaaacagcataataggtagccattctgcgacacatgctacagctgcagtgcaatgctcaggcgagaacgtcattaccaacagcaggcaggttcgccttgccaccaggcatcttccctcgttgtcagcctcctgaaccactcctgcagcccaacactagtgtgtccttcactagcactgtcgccaccatccgggcaacacagcagatcagaaaaggaacaagagattggtgtcactgctatgggcctcatgagagccggatgggtgttgctgagagaacagaagaagctgagttctcagtacttctttgactgcatctgtccagcttgtcacactgagacgctcagagcagctgcagagcccaagtgggaagccttctgttgtaacacatgcagagcgctcatgcagggaaatgatgtactgagctgcaacaacaaatcttgcacagaatctgtcagcagggaccacctcggattcccgcctcccggaccttcagcagcaggtttacatggcccagaagcttctcagagatggtaaactagagaaagccgttcaacagttattgggatgccgggaggccgccgagagcttcctatcagcagaacacactgtggtgggggaaattgaagacagcctggcccaggcctatgctgccttaggagactggcaaacgtctgctacccatgtacggaagagtgttcgtgtagttgaagctcgccatggaccttccagtgttgaaatcggccatgagctcttcaaactggcccaggtcctgttcaatgggttggcagtgcctgaagctctgaatgccatatggaaagcagaaaagatcctgttggttcactgtggccctgagagcgatgaggtccaggagctccgggagatgaaatcctgtttattaggctcatcattcatccctgtgggcctttggtgtagaatgtacattccagctcacaagaagggaactctggcagatgaggtaaagaagctatgttggtttgaagttgtcatcagaaagaacaggacctaccagctgtcctaagctgtgtctaaaaaataataataataataataaataaataaataaataaa

SEQ ID NO: 4250 - DNA, 1492 bp, Cricetulus griseus
cggggtccgcaatcggccggccatggacgaagcggaccggcagctcctgcggcgatgtcgggtgcgcctggtgagcgagctgcaggtcgccgagctctgggacgctctgctgagtcgagagctcttctcgggggacatgatcgaggacatccagagggcaggctctgggtctcggcgggatcaagccaggcagctggtcacagatcttgagacccgagggaagcaggcccttcctctcttcatctcctgcttagaggacacaggccaagacaccctggcttcattcttgcgaagtagtcggcaagcagccaagcaggatccagaggctgctaaacccctggaccacctggtgcctgtggtcctgggaccaatgggaatcgtatcaaaggagcagaaagtagtgaagttggagccatcgaagcctgccctgggaaacctcaccccagtggtgctggggccggaaggggtctggcctgctacgctcagaccagaggttctcagaccagaaacacccaggccagtggacatcagttctggtggtacctatgatgtctgtgctgcagagaagatcaggagtagtgcagatatggcatacatcctggatgcagacccctgtggctactgcctcatcatcaacaatgtgaacttctgtccttcctcggggctcggcacacgcactggctccagtgtggactgtgagaagcttcagttccgcttccgctggctgcacttcatggtggaagtgcagaatgacctgactgccaagaaaatggtcgcggctttgatggagatggcagggcgggaccaccgtgccctggactgctttgtggtggtcatcctctctcatggctgccaggccagccacctgcagttcccaggtgccgtctatggcacagacggatgctccgtgtcggtcgagaagattgtgaacatcttcagtgggactggctgtcctagcctgggagggaagccgaagctgttcttcatccaggcctgtggtggcgagcagaaagaccatggctttgaggtggcctgcacttcctctcgaggcagggacttagacagtgactctgagccagatgctgtcccataccaggaaggcccaaggccctttgaccagctggatgccgtgtcaagtttgcccacccccagcgacatccttgtatcctattccaccttcccaggttttgtctcctggagagacaagaagagcggctcctggtacatagagaccttggatggtgtcctggagcagtgggctcactctgaagacctgcagtccctccttctcagggtcgcccatgcagtttctgagaaagggatttataaacagattcctggctgttttaacttcctccggaaaaagctgttttttaaaacttaatgagactggggctgctccttgcctgaatgttcccctaaaccttcatggcctggaggtgactgagactggactgtcctgcaaagccagggttttggaaccgtggcaggc

SEQ ID NO: 4251 - DNA, 1492 bp, Cricetulus griseus
tgcgcccccgcccagcggccctcgccgccgggccgctgccgccatgaagaagttcttccaggagatcaaggctgacatcaagttcaagagtgcggggccgggccagaagctcacggactccgcaggacagaagacccccaaagaaaagtcgccacagcaggccctccagcagccccgccagggccccaccgatgaggcacagatggctgctgctgctgccttggctagactggaacagaagcagccccgagctcggggccccacatctcaggactccatccggaaccaggtgagaaaggaacttcaggcagaagccacctccagcaacagcccaggggctcccgggaccaacttggcacctgaacccaaagaggaaatctctccccacctggcagtgcctggtgtatacttcatctgcccgctcacaggtgtcaccttgaggagggatcaacgggatgcccacatcaaggaggccatcctgtcgcacttctccacagaccccgtagctgcctccatcatgaagatacatacgttcaacagagaccgggaccgagtgaagctgggagtggacaccatcgccaaatacctggacaacattcatttgcacccagaggaggaaaagtaccagaaaatcaaactgcagaataaggtgttccaggagcgcatcaactgcctggagggtacccatgagttcttcgaagccatcggcttcaagaagatgacactgccagtaccagatcaggaaggttctgaggagttctatgtgctgggtgaggccacacgagcacagccgcagagcctggagcagcacaagcagcagctgcttagtgcagagccagtgcgagccatgctggaccggcagcgccgagtcttccgaccctcagccctggcctcacactttgagctccccgccgacttcttcagcctcacagcagaggaggtgaaacgcgagcaaaggctcagaactgaggccgtggagcggctgagctcactaaggaccaaggccatgcgcgaaaaggaggagcagcgggagctgcgcaagtacacctatgccctactgcgtgtgcgcctgcccgatggctgcttgctgcaggggaccttctatgcccgggagcggctgcctgtgctcttccagtttgtgcgcgaagcattgcagaatgactggctgccctttgagctgagggcctcaggtggacagaggctggtggaggacgaggccctggccctgaacgagtgtggactggtaccctctgccctgctgaccttctcctgggatgcttcagtgttggaggacatgagggctgcaggagccgagccagccacatgtgtgttgaggcctgagctgcttgcagccatcgagcagctctcctgaataaaagcaggctcggcccagcatgcgctgtgtcataccgtcccccaaacccattccttaccctgacgtccccaccaaatagaagggacactagtagcagtagagttgggaacagggtcc

SEQ ID NO: 4252 - DNA, 1491 bp, Cricetulus griseus
  modified_base (1218)..(1218): a, c, t, g, unknown or other
ctgtcctatattgaggatgtctgccgtgtagatggtaagattgattaacaataaaacaaaggatttataccgtgacctgatatccatcttttgacaaactcctgtttgcccacacatgcttcctgccatgtacagttcttcatgttttcctttgcagcttcaaattgggatttgcagaagcatttttggaacatctttggaaaaagttgcaggatccaaataaccccgccatcatcaggcaagctgctgcgaattacattggggagcttttttggcaagagctaaatttattcctcttatcaccgtaaagtcatgcctggatcttttggttaactggttgcacatgtatcttaataaccaggattcaggaacaaaggctttttgtgatgttgcactccatggaccattttattcagcctgccaagctgtgttctacactttcgtttttagacacaagcagattttgagtggaaacttgaaggaaggtttacgatatcttcagagcctaaactttgagcgtgttgtgctgagccagctgaaccctctgaagatctgcctaccatcagtggttaattttttgctgctgtcacaaacaagtaccagcttgtgttctgctataccatcatggagaggaacagtcgtcagatgcttcctgttattcgaagtacagctggtggagactctgtgcagacctgcaccaacccactggataccttttttccctttgacccttgtgtgcttaagaggtcaaagaagtttattgatcctatttatcagatttgggaagacatgagtgctgaagagctacaagaatttaagaaacctactaaaaaggagcctgtggaagatgaagacgatgactttttgaaaggtgaagtgccccagatggatgcaggaattggtcttaccccaagttcctttgacacccacttccgaagtccttccagtagtgtgggctccccacctgtactgtacatgccagaccagtccccactcatctcaaggatctgtgattgagctctgctgtgctccccagagcccacaagccccaccactggaccccacattggactagtctgtgcctcttacgtccagcttccatgttggacttgggccagtgtctgaagggacccaggttgtgtgtttgcagtttgctcgctatggacagaagggaagattgagtgtcatttgtactatttcacagtgaacatttttttnttttttggtttcttgcagaccttccctgggatccttacatgtaaactttgtaattgtaaaaatggccctttagtatatttaattttttttgccacttatatttatttaaaggcaagcaatattttcttggtcacagtattttttaatggaatttctctcaaggtttattatatactcttatgtaatgacactgatgcagataccctctggatttcagtctacctgttaatgcctttttggaacaatgaaatttttattgctttaaaaagcttt

SEQ ID NO: 4253 - DNA, 1491 bp, Cricetulus griseus
atctcctgaagaggaagagaaacggagaatccgaagggaaaggaataagatggctgcagccaaatgccggaatcggaggagggaactgactgatactctccaagcggagacagaccaacttgaagacgagaagtctgcattgcagactgagattgccaatatgctcaaagagaaggagaaactggagttcattttggcagcccaccgacctgcttgcaagatcccggatgacctgggcttcccagaagagatgtctgtggcttccctggatttgactgggggtctgcctgaggccactaccccagagtccgaggaggccttctcactgcctcttctcaatgacgctgagcccaagacatcactggagccagtcaagagcatcagcaatatggagctgaaggctgagccctttgatgacttcttgttcccaccatcatccaggcccagtggctctgagacgacggccagatctgtgccagacatggacctatccggttccttctacgcagcagactgggagcctctgcacagtagctccctggggatggggcccatggtcacagagctggagcccctgtgtaccccggtggtcacctgtactcccagctgcacaacttacacgtcttcctttgtcttcacctaccccgaggctgactccttccccagctgtgcagctgcccaccgaaagggcagcagcagcaacgagccctcctctgactcgctcagctcacccacactgctggccctgtgagcagtcagggaaggggaggcagtcggcgtctagaaatgccactgcctgagctggtgcattgcagagaggagaaacacgtcttccctcgagggttcctgtagacctaggggaggaccttatctgtgagtgaaacacaccaggctgtgggcctccaggacttgaaagcatcctcctctggactcaagtcctcacctcttccggagatgtaaaaacaaaaaacaaaaaccgcatggagtgtattgttcctagtgacacctggagagttggtagttagtagcatgagagccaggcctgggtctgtcctcttttcttccttctccttagtcttcccatagcattaactaagtctgtcgggttcattattgggaattaacctggtgctggattgtatctagtgcagctgattttaacaatacctactgtgttcctggcaatagcgtgtcccaattagaaatgaccaatattaaactaagaaaaaaatagaactttattttccagtagatagaactaagtagctatatccatgtactgtagtttctcttcagcgtcaatcttcatcgtgatgtcactgatcatgcattgttgaggtgatctgaatgtgctgacattaacagttttccatgaaaacgtttttattgttgttttcactttatttattaagatggattctcagatatttattatttttattttatttttttctatcctgtaggttctttcgtactatgtgaaaagtgaat

SEQ ID NO: 4254 - DNA, 1491 bp, Cricetulus griseus
tcactggcgctgggtctgaaccggtagatcgggaggaggcggcgtgtgggcgtcgggacgcacggccgtcgccatgccgttcctgcacggctttcgcaggatcatcttcgagtaccagcccctggtggacgctatcctgggcgccttgggcatccaggacctggagcggcaggagcccctggacgattatgctgccggcgaggagagccgcatcctggtcctcactgagctgctggagcagaaggcccactctccattctaccaggaaggtgtgagcaatgctttgctgaagatggctgagctggggctgactcgggcagctgctgtccttctgcagaggtggggccaacctctaattttgaagaccctgttacctattacacagccctgcatatcgctgtcctgagaaaccagcctgacatggtggagttgctggtgcgccgatggggcgtggacatcaaccggagggaccggatccatgagagcagccccttagatctggccagcgaggaacctgaacgtctgccctgcctgcagcgcctcttggatcttggagcagatgtcaatgcagcagacaaaaatgggaagacagcactgctgcatgctctggctagcagtgatggagtgcagatccacaacacagacaacatccggctcctcctggagggaggggcagatgtcaaggccaccaccaaagatggggacactgtgttcacatgtattatcttcctccttggtgagactgtctgtggggacaaggaggaggccccgatgatcaaccgcttctgcttccaagttacacagcttttgctggcccatggggctgatcccagtgagtgcccagcccatgagtcgctcacacacatctgcctcaagagcttcaagctgcactttcccctcctgcgcttcctgctggagtctggggccgcctacaactgctccctgcatggtgcatcctgttggtctggcttcagcctcatttttgagaggctgtgctcccacccaggctgtgctgaagatgatagccacattgagcttctgcataaggctgagactgtgctggacctcatggtgactagctcccagaggctccagctacctgagaacttcaacatccacccagtgggtagcttggcagggaagatccaagccctgcatgcctccctgaggcagctagagagctacccaccacctctcaaacatctgtgccgtgtgtccatccggctatgcctgcggccatggcctgtggacaccaaggtcaaagccctgcccctgcctgaccggctcaagtggtacctgctcagtgcacacagtggtacagaagacaactgctgatggaccctggaacagagtggtcagggttggctgaagccaacctgcaggtagacctggtacttgtcacagcctctggagggtcttttatctgggcaagcttttgccctttactgaaatgaaacaactagggtagtgccctgggggccaaaggcatgg

SEQ ID NO: 4255 - DNA, 1491 bp, Cricetulus griseus
ctagctgagctgaagagcagagggaaaaagatggccaaaagtacccatcagccgtgatgagcttacaggaattgatcctttgggtgaagatgccaccataccaagtttcaggaacgtaaccattggtcctaaccctgaggacacttgttactttgtttagagcgcctcggtttgcatctactcctttccatgagataccgtccttgcagggcatcccttccgatcccgagagactgttgcaggaagaggatctggatgggaagaccactgaggttcatcacactgtttataaccagaccctcagcatcaagaagctgagcccaattattgaagacagtcgtgaagctacacactcatccggcttctctggatcctctgcttccgttacaagtacctcctccatcaaaggcctgcagctccatgagaaactggagctcactaatgatgcggcagaaaatgctattcagtcaccctggtgttcacaatatcgactacaactactaaaatccctcccagagtcaagtacttttgcagaattctctatggaagatagaccaatgcctaccctggaaacggggaaggaaattgagttaggtaacgaaaactactgcattaagcaagaatacctaatatgtgaagattacaagttattctgggtggcaccaagacactcaacagagttaaccatgatcaaggcatcttttcaacctgtcccatgggatttttatatcaacctcaagttaaaggaacgtctaaatgaggactgtgatcagctttgtagctattttcagtaccaagatggccatatcgtttggtaccaatatataaagtgttccacccttcaggatcttctccaacacagtgaatttgtgactcatgaaataatagtcctgattatttataacctcttgacaatagtggagaagcttcacaaagctgaaatagttcatggagacttgagtcccaggagtctgatcctaagaaacagaatccacgatccttatgattgcaataagaacgatcaggctgtgaagatcgtggacttttcctacagtgttgacctgagggtgcaactagatgctttttccttcaatggctttcggactgtacagaccctggaaggacaaaacatcctggagaactgttctccctaccaggtagatctattgggtatagcaaacctagcacacttactgttgttcaaggaacacctacatgtcttctgggatgggctcctctggaaacttagccagaatacttcagagctaaaggatggtgacttatggaataaattctttatgcggattctgaatgcccatgatgagtccacggtgtctgttctgagggaacttgcagcagaaatgaatggggtttttgataccacgttccacagtcacctggacaaagccttgtggaaggtggggaaggtaattagtcctggagctttgctccttcagcaagaccagcagtcaagcctctcccagagccctg

SEQ ID NO: 4256 - DNA, 1491 bp, Cricetulus griseus
tattaaattagctggcaacttgggagtagaagatgtgaatttattatgtggagaagaactctcttacccaaatgtgtttctcgtcttcctaaatggcaacatcttaggtgtcattcgagaccataaaaagcttgtcagtacatttcggctgatgcgaagagcgggatatatcaatgaatttgtttctatctccacgaatcttacagaccgatgtgtttatatttcctctgatggaggacggttgtgcaggccttacataattgtcaagaagcaaaagccagcagtgacagttaagcacatggaagagttggctcaaggctacaggaactttgaagatttcttacatgagagtctagttgaatacttagatgtgaatgaagaaatgattgcaacattgcactctatgaacatacgattaataagataccaccacttggagattgaacccttcactcttctttaaaaatgctaagtgcacattgaaacgatacaccaatcagacctttgataaggtgatgggtcccatgttggatgctgctaccagaaaacccatctggcgacatgaaattttagatgcagatggcatttgttctccaggtgagaaagtagaaaacaaacaagtacttgtaaacaagtccatgccgatgtccctatcacgtacaaaggtgcaacagattcctacattgagaaagtgatgatctcttccaatgctgaggatgccttcctcatcaaaatgctgctgagacagacgcggcgtccagagatcggagacaagttcagcagtcgtcatggacaaaaaggtgtttgtggcctgatcgtccctcaagaagacatgccattctgtgattctggaatctgtcccgacatcataatgaacccacatggcttcccatcaagaatgacggtcggaaagttaattgagttgctggccggcaaggcaggtgtgttagacggcaagttccactatggcacggcctttggagggagtaaagtaaaggatgtgtgtgaagacctcgttcgccatggttataactacctggggaaggactatgtcacttcgggcatcacaggtgagcccttagaagcatacatctattttggacctgtgtactatcagaaactgaaacacatggtactggataaaatgcatgcccgggcccgaggaccacgagctgttcttaccaggcagcccactgaaggacgatctcgtgatggcggcttgcgtcttggagaaatggaacgcgactgtttaatcggctatggagcaagcatgcttttgctggagagactaatgatctcaagtgatgcctttgaagttgatgtctgtgggcagtgtggactcctgggatattctggctggtgccactactgcaagtcatcgtgccatgtgtcctccctccgcatcccatatgcctgcaagctgctcttccaggagttgcagtccatgaacattatccccaggttgaaactggccaagtacaacgagtaagg

SEQ ID NO: 4257 - DNA, 1491 bp, Cricetulus griseus
ggatctttgggcaaacaaaagtgaaaacgaagaaacctcagagagatcaccccagtctccagatgttggggagatcccccataactccggggtagaagatgcccccatctctaaggtgggtgtcctggctgcaaatatggaagccaaggcctctcctcagagagagaaggaagataagcctgctgagaccaagaagctgaggattgcctggccgcccccagctgagctgggcagctcaggaagtaccatggaggaaggggttcaagggctctaagcccaagtggcctcctgaggatgaaaccagcaagaccgaggctcttggggatgtagatctggacctgaagaagctgaggcgatcttcttcgctgaaggagaggagccgcccattcacggtagccgcttcatttcgaacctcttcgctcaagagccccaagacattgtcacctctcaggaaaggttggagcatgtcggagcagaatgaggagtctggaggcgggatagtcacagcagggaaacaaacagaaaatgccaaagcccctgggaagaaagagaatgtgaggaaatcacgctggcagcgggaggagaggagcaaggacattcatggtgttgagctggagagtgagaatttcatagaaaatggagcgaacatctatgaaggtgatagcggtgacctcgtgcagcagtctccactagatcccaagtctccaagttggtccggctttgtagacaccactcctactgaagagttcacaacccagaatcaaaaatctcatgatgtggggttccgggagggagaagtggtcagagagctgtcagtggaggaacagataaagagaaaccggtactatgatgaggatgaagatgaagaataacaggccgtcatggtgctggccttaaattcctgtcagcaccagtagtcactgccctttatcaagtggtgcctgagacaggcagccaggcgctagctgtcatttatgtgggagcgactttggaaaggaattcctgagttccaagacagccgggactacacagagaaaccctgtctcaaaaccaaaaaaagaaagtccattcagtgaagatgtgccataagagctaagcagggggaaggctctcattggtgtagcccgtcgtccactgcattccccaaagtgaatattcaagtgtctagacagtggcacattttcacactacaaataccattgtggaattggagacaaacaacagatttagatgcctacatatcatgaccagaagcactttagtataaagggcacagtgtagatatttttaccaatttcattttttagtactcaactgttgaaatcaaatatttagtctttcaaattctttaatgctttttctccctctggtagatatgggaatttgcatttgtagagatttagctctattttagagatgtaaaataatgtttccttatagtcttgtttagcctaaaacattttttattcaataaagcttttaatttacatt

SEQ ID NO: 4258 - DNA, 1490 bp, Cricetulus griseus
agaagatcctgatcaagcatgtgacagtcatcggcggtgggctgatgggcgcgggcatcgcgcaggtggctgcagcaactggccatacggtagtattggtggaccaaacagaggacatcctggcaaaatccaagaagggaattgaggacagcctgaggaggatggcaaagaagaagttcacagaaaaccctaaggcgggtgatgagtttgtggcgaagaccctgagctgcctctctaccagcactgacgcagcatccgtggtgcatagcacagacttggtggtggaggccatcgtggagaatctcaaggtgaagaatgagcttttccagcggctggacaagtttgctgcagaacatacagtctttgccagcaacacctcttctctgcagatcacaagcatagccaattccaccacccgacaagaccgatttgccggcctccactttttcaacccagtccccatgatgaagcttgtggagatcattaaaacaccgatgactagccagaagacgttcgagtccctggtcgacttttgtaaaaccttaggaaagcaccctgtatcttgcaaggacactcctggatttatcgtgaaccgtctcttggtgccatatctcatagaggccatcaggctacacgagcgaggcgatgcatctaaagaggatattgatactgccatgaagttgggagctgggtacccgatgggtccatttgagcttcttgactacgttgggctggatactacaaagttcatcttggatgggtggcatgaaatggacccagagaaccccctctttcagcccagtccttccatgaataatctggtggcccagaagaagttgggcaagaagacaggagaaggattttacaaatacaagtgatgcttcaagagtctatggggaatatcccagccagccatgggacaaggatgagcgcaccctgggtggtgcttgcaaggcttgctgcagtctgctcagtgggccctcctttgcaagtctgtctgaagtaatcatttgactagttgcagtaataagattcctccactgagatctgattctctgcttttgtctgttcaaatgagtatgccatgttgcttggtattgaaccctgggggtaggaaccatcgtgcctacaggtgcatctaagggcagcaaccagcatctgaggccttgcctacctgggaacatttgcagcctgcagcctcaagccttagcctacattctgggctacatcagaaaaggctctgcctttgtttacttctcatcaggacagggctcctggagtggtggttgagtacctgtgagcttggtttctggggaaaggcccatctttgtggccattcaaatcttaaccatcactgtccaattcttctttttttttccatgagaaatcagtgataccaagtgcctatgaattgactctactaaaatgcaatcttttactctgtaaaaattggaacataaataaattttacataacataaaatcaaaaaa

SEQ ID NO: 4259 - DNA, 1490 bp, Cricetulus griseus
gacaagatggcggcgacggcgtcgcaaggcgggagaagcggcggtggtggaggcagtagtggggctggcggcggccccagctgcgggacaagcagcagccgcagtggtttgttggataagtggaagattgatgataagcctgtaaaaattgataagtgggatggatcagctgtgaaaaactctttggatgattccgccaaaaaggtacttctggaaaaatacaagtatgtggaaaactttggtctaattgacggtcgcctcaccatctgtaccatctcctgcttctttgctatagtggctttgatttgggattacatgcacccctttccagagtccaagccagttttggctttgtgtgtcatatcctattttgtgatgatggggattctgaccatttacacctcatataaggagaagagcatctttcttgtggcccacagaaaagatcctacaggaatggatcctgatgatatttggcaactgtcctccagtctcaaaaggtttgatgataaatacaccctgaagttgaccttcatcagtggaaggacaaagcagcagcgggaagccgagttcactaagtccattgctaagttctttgatcacagcgggacactagtcatggatgcatatgaacctgaaatctccaggctccatgacagtctcgccacagaaagaaaaataaaatagccaattccaaaatctctctttctgctggatcggacgaattactggtgggtagagaagaaacagaaagcttaaacttggtcaagtatgaaatgttttaaaaagcccctatttagtctattctggttaaatagaatttcctatcaagatatgcaaagttgtatctttgatggctagctgtagcctccatggtctgctgagtaggggtttttgttgttttccttaagaagcatttttgtaaaagccaagcatactttttcctttgtacttaaaagtactttatttagtaaagctttgtgccatgcagtgtttgaacgcttagttcttaggaactgctaaccttgctgggcatggtgttcacttacaatgccagcccgtagaaggctgaggaaggggggttgagtttgaggccattctggactgtagagccaggccttgtcttggggcctgggtattgttaacttgttgctaactttgtgttaatccctgcttcagcagctatttccttcaatccaggatacaatttctatgtatgacagctttcctttacacgccatttttgtgggtgtgtatatagatttgacttggggagacttattttaaaaaaaatacaaaatagccttttaatttgttaaaatagacctgcctattacattttgtgctcttaaccaattaaagaagccagtgacatttttagttttatattctctgttttccactagtatgttcctgttgatttgtttgtgccctttattaactgccatttttctaaaatttttttcaataaatgaaagaagatgtgaaaa

SEQ ID NO: 4260 - DNA, 1489 bp, Cricetulus griseus
  modified_base (470)..(470): a, c, t, g, unknown or other
agctgcttcagttgattggcaagtgctgccttaacaagctctccagcgatgaggcagtgaagagagtcttagctggggataagggggacccgagaggacggaccttacggacctccaaagcacatgagactgataacaagaatgtgaaggaagaagagtccagaactcataaagatgataaaagaactccgaggtgaaggagagaagcacaagcgaagagcacaaacagaaggaagaactgaaagaagaaaacagaccccgggagaaggagagggacaaggagaaggcaaaggagcctgacagagaccgacacagagaccctgagaagacaaaacagagaaggagatcgagaggatccagacaagccagagaaaagtcagcaagctcaggggagatgtctaaaaagttgtcagtcactggaagcgatccccacgtgacgcagaaggagacgctggacctattggccaggntaaacggtgtcagagaatgccgaagtccccagtgaacttccctccaatctcaggagagtacctcggcctggaagtgcacgaccagcacctcccagggtcaaacgacaagagagcactgagacgctggtgggagacaggtcaggaagtggtaaaaccgtactccaatgtgatcatcgactcacagaactctgacaatgaagaggatgaacagtttgtggtggaagctgcccctcaccttgcagaaatgtcagaaattgagatggtgccggcaggggacctggaggatgaggagaagcacggtgggcttgtgaaaaagatcttggagacgaagaaggactatgagaaattgcagcagtctgtcaagccgggagagaaggagcgctcactcctctttgagtcagcatggaagaaggagaaggacattgtttccaaggagatagagaagctcagagtgtccatccagaccctgtgtaagagtgcacttcccctgggaaagatcatggactacatccaggaggacgtcgacgccatgcagaatgaactgcagttgtggcacagtgagaacaggcagcacgccgaggccctgagcaaggagcagagcatcacggacagtgcggtggagcccctgaaggcggagctatctgagctggagcagcagatcagggaccagcaggacaagatctgtgctgtgaaggccaacatcctgaagaatgaggagaagatccagaaaatggtgcacagtatcaacctgacgtcacgaaggtgaacagccagccctgcggagatggagccgtcttcctcatgatgggagaaggggaaggagacagacattctgccccagtctgctgagagcatggactgcagatgcctggacccagctaaagtcagagctttcggtttaggcactaaacttattaaaaggctgtgttttttactccagctgcagtacttgctactttagttttcagcttgcctttgtgggagggcttatttctcttggtttttttttttgttgtttg

SEQ ID NO: 4261 - DNA, 1489 bp, Cricetulus griseus
ggccaggaagctgggaaggaaccgccggggccatggacggggctgtgatggagggtccgctctttctacagagtcagcgcttcgggaccaagaggtggaggaaaacctgggctgtgctctacccagctagtcctcacggcgtagcgcgtctggagttctttgaccacaagggctctggagggggtcgaggcggctctcgccgtctggactgcaagatgatccgcttggctgagtgtgtgagcgtggcccctgtgtcagtggagagtccccccgaacccggcgccactgccttccgcctggacaccgcgcagcgctcgcacctgctggcggcggacgccccgtccagcgccgcctgggtgcagagtttatgcagaaacgcttttccgaaaggcggctgggctttggcgcagacggagaacccgcctaagtttctgccttggagatgctggagaattccctgtatagccccacctgggaaggctcccagttctgggtaaccacgcagaagactgaggcttctgaacgctgtggcctgcaaggctcctatatactgagggtggaggctgagaagctgaccctcctgactttggggacccagagtcaaatcctggagccactccttttctggccctacactctgttgcgacgctatggccgggacaaggtaatgttctcttttgaagctggtcgccgctgcccctcaggcgccggaaccttcactttccagactacacagggaaatgacatctttcaggcagttgaggctgccatccagaagcagaaagcccagggaaaggtgggacaggcacaagatatcctcagaactgagtcccatgaaggggaggcagaggtgaaggtgacttcccctcctgctcctcaggagcccctggacagccccccagccctatatgctgagcctttagactccttgcgaattcccccaggcccttctcaggactctctgtactcagaccctctgggtagcacccctgctagggcaggggaggggatgcattcgaagaaacctctctattgggacttgtatgggcacgtgcagcagcggttgctgaaagccaagctgacagactccaaagaggaccccatctatgatgaacccgagggcctggccccagcccctccccggggcctttatgatctgccgcaggaacctaaggatgcatggtggtgccaggctcggctgaaggaggagggctatgagctcccatacaaccctgctacagatgactatgctgtgccacctccgcgaaactccaagcctgtccctgctcccaagccgcagggcttggtccttcctgaacctggtaccacaggaggcagtggcagcaaagaccacagctcagatatggctctgtacagccaggtccagaagagtgggacgtcagggggttgggactgtgggttttctagagtagggaatgacaggacaggagtcaagtcagagggctccacctgagacagttgctgatag

SEQ ID NO: 4262 - DNA, 1489 bp, Cricetulus griseus
ctgcgatccggctgctggggcgaacgggttggtcctagtttggaggctgcggccctcgccgctcgttgtctcgcagcgagcgagctcgatgctgcctgtagacgatgctatcaacgggctaaacgaggagcagaagcagcttcgtcagactatatctaagttccttcatgagaacctggtccccaaggcccaggaaattgaccatagcaacgagttcaaggacctgagagagttctggaaacagctggggagcctgggagtcctgggcatcacagcccctgttcagtatggcggctctggcctgggctacctagaacatgtgttggtgatggaagagatatcccgggcttctggagcagtgggactcagctatggcgcccactccaacctctgcgtcaaccagattgtccgcaatgggaatgaggcacagaaagagaagtaccttcccaagctgatcagtggtgaattcatcggagccctggccatgagtgagcccaatgctggctctgatgttgtctccatgagactaaaagcagaaaagaaaggagatcactacattctgaatggcaacaagttctggatcaccaatggcccagatgctgatgtcctcgttgtctatgccaagacagatttgtctgccgtgcctgcttctcggggcatcacagccttcattgtggagaagggtatgcctggttttagtacttccaagaagcttgacaagctgggcatgaggggctccaacacctgcgagctaatctttgaagactgcaaagttcctgctgctaatatcctgggccaagagagtaagggtgtctacgtactgatgagcgggctggacctagaacgcctggtgctggcaggtggaccccttgggatcatgcaggctgtcctggaccacaccattccctatctgcatgttagggaagcctttggccagaaaatcggccatttccagctgatgcagggaaagatggctgacatgtacacccgcctcatggcgtgtcggcagtatgtctacaacgttgccaaggcctgtgatgaaggccacatcattggcaaggactgtgccggtgtgattctgtacacagccgagtgcgccacacaggtagccctggacggcattcagtgtttaggtggaaatggctacatcaatgacttccccatgggccgcttccttcgagatgccaaactgtatgagatcggagctgggaccagtgaagtgaggcggctgatcattggcagagcgttcaatgcagacttccgctagccccgtggcctatggccccctggtcctagccccaaggcctttctttggaagcagaggcatggcagccctctcacctgtcccaggaagctctacagctcagcctccctcctcacatcagccctctgcccgcatgaggtcggactccctggtgtacctaaactgacggcgtcactctgtcacaggctagcactgggtctgctcatgtgaccttctgctgctgac

SEQ ID NO: 4263 - DNA, 1489 bp, Cricetulus griseus
ggtctctggaacttgagatgcctgaagaactgcactaaggactccaagtcgccatcctctgtgctttcttctctccaaaattgacgatccctttcctgtctcctcaaactcactactgttcaaggtgccatggtctccaaattcaggagtgaatggagtactgtcctgtcccacctggtgctggcagcggtgtctctgcacgcagcggtgagctctgtaccagtgtactaacggtcacttgatgtgcgctggctgttttatccacctactagcagatgcccggctgaaggaggagcaggccacatgtcccaactgtcgttgtgagatcagtaagagcctctgctgccggaacctggccgtggagaaagctgtgagcgagctgccttcagagtgtggcttctgtcttcgtcagttccctcgctccctcctagagaggcaccagaaagaggaatgccaggacagggtaacacagtgcaagtacaagcgtattggctgcccatggcacggccctttccatgagctgacagtgcatgaagctgcatgtgctcacccaaccaagacaggcaatgagctgatggaaatcctagatgagatggatcagagccaccgcaaggagatgcagctctataatagcatcttcagcctgctcagctttgagaagattggctacacagaggttcagttccggccttatcgcactgatgacttcattacacgcctgtactatgaaacaccacggttcacagtactgaaccagacatgggtcctgaaggctcgtgtgaatgactcggagcgcaaccccaacctgtcgtgcaagcgcacactttccttccagctactcctcaagagcaaggtcacggcgcccctggagtgctcttttcttctgctcaagggcccatacgatgatgtgaggatcagccctgtcatctaccactttgtcttcaccaatgagagcaatgagacagactatgtgccgctgcccatcatcgactctgtggagtgcaacaagctgctggctgccaagaacattaatctgcggctcttcctgttccaaatacagaagtaggacaggcccagaccacctgaggagcagagggctgcagtccagtagtgctgtcccacccctccctggcttggcagcagcttcacacaactatctgatcattttagcaaaagaggcgaacaaacaaaatcaaacactgagaaagtctgcatgcgtgtgcaacggggtccctgcctctggctcaccttcctcccctttgcctcccacctcctgcaggcagccagaggctgggctgaccacagtggaaacagtactctgggcacctcaggtacaggtggtgaggagggcaagaagccaaccacccttaccccagcctcccatcctcacatcgaggtggcacggtggttccctggccaggctcgaggggccctggctaacttcagacagcatatttgattgcaattaaaaaggcagccttgtttccta

SEQ ID NO: 4264 - DNA, 1488 bp, Cricetulus griseus
gcgagtcgaggaaagcggcgggaagttcgtactacgctgtggacggcgggctgacaactcgggagaaaatgccacgtgtaaaagcagctcaggctggaagacagggtcctgccaagaggcgccttgcagagcagtttgctgctggggagatcataaccgacatgtctaaaaaggaatggaaactaggattgcctattggccaaggaggctttggctgcatatatcttgcggacacaaattcttccaaaccggttggcagtgacgcaccctgtgttgtgaaagtggaacccagtgacaatggacctcttttcactgaattaaagttctaccagcgggctgctaaaccagagcaaattcagaaatggattcatacacataaattgaagtaccttggtgttcctaagtattggggatctggtctacatgataaaaatggaaaaagttacaggtttatgataatggaccgctttgggagtgaccttcagaaaatatatgaagcaaatgccagaaggttttctaggaaaactgtcttgcagctaagcttaagaattctggatatcctggaatacatccacgagcatgagtatgtgcatggggacatcaaggcctccaaccttcttctgagctacaagaaccctgaccaggtgtacttggtagactatggacttgcttatcggtactgcccagatggagttcataaagagtacaaagaagatcccaaaaggtgccatgatggcacactggagttcaccagcatcgatgcgcacaatggtgtggccccatcacgacgtggagatttggaaatacttggttattgcatgatccagtggctcagtggctgtcttccttgggaggataatttgaaagatcctaactacgtaagagattctaaaattagatacagggacaatgttgcagctttgatggagaaatgctttcctgagaaaaacaagccaggtgaaattgctaagtacatggaaactgtgaaattactggactacactgagaaacctgtttatcaggatttacgtgacattctttcacaaggactaaaagccataggaagtaaagatgatggcaaactggattttagtgctgtggagaatggaagtatggagacagaaccagcctcaaagaagaggaagaaagaagcagaagacagcactgtgtgtggtgtggaagacatggaatgctcggacacaccggtgggatacgccatacagactcgttcgttcaagaacccgaaagaaagtccagaagtaaaagatgccgggaaccaactttcctgcctattcattgactttttttttctccttttctaatttatgttttattttcatgtgagtcttctggggttgtagtaataattaaatgcttattttttaaaaaaacttcttttaaaaatgaataattttgtgtactttattgaagggtagtttataaaatacctgaatccttagttgttacaacctacgtggtcttggggct

SEQ ID NO: 4265 - DNA, 1488 bp, Cricetulus griseus
gaagaagataaaagagaagactgttttctgatgtttgatttgctgctgaagttatgtaatccaaaggaattgttgttgggtttgcttgaactcattgaagaaccctctggaaaacagatatcccaaattattcttcttttacttcaaccattacagacagttcttcagaaactccctaacaacaaggcatattcagttggattagcactatccaccctttggagtcaactatctcttcttcctgttccatactcagaagaacaaatacagacagacgattatggcctttgtcaatgttgcaaggctttaatagagttcataagaccttttgtggaagaagtaattgataacaaagaaaacaaggaaaatagaaaagttaaaagatgagctactgaaattttgtttcaaaagcttgaaatgccccttgctgacagcacaattccttgaacagtctgaagatgttggaaatgacccttttcggtgttttgcatgtgaaataataggatttttatcacaaattggacatcctgtccccaaaattattcttaatcatggaagaaaaaaaagaaacttgggataaccttgaatttgaggaagaagacgacaaacaactggcagactctgtggcctctctgacatatctagtatttgttcagggcattggtattggtcagcttccaatggtcttaagcccatcataccttttgcagctgaacatggaacacattgaactgtttctgcaaagaacagaacagtctattttctccaaaggattgggaactttctggagaatagcttattgagattagaagacagcagcctcctttatcagtacttagagattaagagttttcttgctgtgcctcagggcttagtcaaagtaatgacactttgccccattgagacattgagaaaaaagggtttagccatgcttcagctgtatatcgacaagttggattcacaaggcaaatatacattatttaggtgcttattaaatacaagtaatcactcaggtgtggaaggatttataattcaaaatatcaaaaatcagattgacgcatcatttaagaaaacatataacaaatggtttgcaggaccacagctgatttctctgttggacttggtactgtttctccctgagggtgctgaaacagatttactgcagaactcagataggattatggcttcactgaatttattgaggtatttggttatcaaagataatgaaaatgacaatcaaactggattatggacagatcttggaaagattgaaaataatttttaaagccacttcatataggacttaatatgtcaaaagcacattatgaagcagaaattaaaaacagccaacaaaataagccaagtagcctcaacgtgtaaaaggtgtttgttctgtgactgtaggtggagaagaaattcctagtatgcctcctgaaatgcaacttaaggtcctacattcaagtctcttttcactatttgacttgattg

SEQ ID NO: 4266 - DNA, 1488 bp, Cricetulus griseus
gattgtctggcggcctggggcggccccgtggcgctgaccctctgcctgcggggacggaggcgcgcgccatggcggtgtctgagagtcagctgaagaagatgatgtccaagtacaaatacagagatctaactgtccgtcagactgtcaatgtcatcgctatgtacaaagatctcaaacctgtattggattcgtatgtttttaatgatggcagttccagggagctggtgaacctcactggaacaatccctgtgcgttacagaggtaatacatataatattccaatatgcctgtggctgctggacacatacccatataacccccctatctgttttgtgaaacctactagttcaatgacgattaaaacaggaaagcatgtggatgcaaatgggaaaatctaccttccttatctacatgactggaaacatccacggtcagagttgctggagcttattcagatcatgattgtgatatttggagaggagcctccagtattctcccgtcccactatttctgcatcctacccaccatacacagcaacagggccaccaaatacctcctacatgccaggcatgccaagtggaatctccgcatatccatctggataccctcccaatcccagtgcttatcctggctgtccttacccacctgctggcccataccctgccacaacaagctcccagtacccttcccagcctcctgtgaccactgtcggtcccagcagagacggcaccattagtgaggacaccattcgagcatccctcatctcagcagtcagtgacaaactgagatggcggatgaaggaagaaatggatggtgcccaggcagagctcaatgccttgaaacggacagaggaagatctgaaaaagggccaccagaaactggaagagatggttacccgcttagatcaagaagtcgctgaagttgataaaaacatagaacttttgaaaaagaaggatgaagaactaagttctgctctggagaaaatggaaaatcagtctgaaaataatgacattgatgaagttatcattcccacagccccactgtataaacagattctaaatctgtatgcagaggaaaatgctattgaagacactatcttttatctgggagaagccttgaggcggggagtaatagacctggatgtgttcctgaagcatgtccgcctcctgtcccggaaacagttccagctgagggcacttatgcaaaaagcaagaaagactgcaggtcttagtgacctctactgacttccagactcggctggaggtagacctcttcctaaagccttttcttttcctttctctcatcagtagaacccagaataagttattgcagtttatcattcaagtgttaaatattttgaatcaataatatattttctgtttcctttgggtaaagactggcttttattaatgcactttctaccctctgtaagctttctgtgctgtgttgggactgactgggctaaataaaatttgttgcataattttt

SEQ ID NO: 4267 - DNA, 1487 bp, Cricetulus griseus
acttttcaagggccgctgccacgttcccgtgcagtgggccggggggcggggcttgaacggcgaaggggcggggcttttatctgaatagtgaggatagctcctggttactgtggggcggggccggtagagagcgcggccacggcatcgcagcgcttcgtgaactggccagccgcgaggctccgcctttgctcacgtgtcctcatgccagctccgccccacgccggaagttccggtggcgggtcgccgaccgggcggagctgatcgctgcgcgggctgcgagagctaggtggccgggcgcggagcccaagccgtgccgcgcggcgccatgaagggcaaggaggaaaaggagggcggcgcgcggctgggcactggcggtggcagccctgataagagcccgagtgcgcaggagctcaaggagcaggggaaccggctcttcgtgggccgcaagtaccaggaggcggcggcctgctacggccgcgccatcacccggaacccacttgtggcagtgtactacaccaaccgggccctgtgctatctgaagatgcagcagcctgaacaggcacttgctgactgccggagagccctggagctggatgggcagtctgtgaaggcacacttcttcctggggcagtgccagctagagatggagagttatgatgaggccattgccaatctgcagcgagcctatagtttggccaaggagcagcgactcaactttggagatgatatccctagtgcccttcgcattgctaagaagaagcgctggaacagtatcgaggaacggcgcattcaccaggagagtgagctgcactcttatctcaccaggctcattgctgctgagcgagagagggaactggaagagtgtcagcggaaccacgagggtgatgaggatgatggccacatccgggcccagcaggcctgcattgaggccaagcacgataaatacatggcagacatggatgagctcttctctcaggtggacgagaaaagaaagaagcgagatatccctgactacttgtgtggcaagatcagctttgagctgatgcgggagccctgcatcacacccagtggtatcacttatgatcgcaaggacattgaggagcacctgcagcgtgtgggccactttgaccccgtgacccggagccctctgacccaggaacagctcatccccaacttggccatgaaggaagtcattgatgcattcatctctgagaatggctgggtagaggactactaaggccccatatcctgcctggcactctggcccaggagggtctggaaacagaagctccagtccctgtatatagtttgtgtccctgggcctgcccccatcagtccttgctgatgggttctgaactgctccccttctcggcatcccttgctgggccatgagcctcccccgtcccccttctgggctggaaagcgggtaagggtgggctgaggttgctgctgctgccactgtcctgtaataaagtctgtgagcacta

SEQ ID NO: 4268 - DNA, 1487 bp, Cricetulus griseus
gagtcaccggccttggtctcagcccggtgggatatatctgcaacttgaagataaagcaaaaatacttctttgaaatagatggaattttgtcactttctgtgaactaaagcgattcaatgtctcttttggattgtttctgtgcttcacgaacacgagttgaatcactcagacctgaaaaacagtctgaaatcagtgtccatcaatacctggttgatgagacagccgtttcctcctggtcacctccatcagctggagccagtgaagtgatatgttccactaatgtttctcactatgaactgcaagtggaaataggaagagggtttgacaacctgacctctgttcacctcgcacctgagacaggatttacatggcttataatgtgaagtcagatatttacagtgttgggatcacagcatgtgaattagccagtgggcaggtacctttccaggacatgcacaggactcagatgttattacagaagctgaaaggtcctccatacagcccactggatatcagtatttttccacagtcagactctagaatgagaaattcccagtcaggagtagactccgggattggagaaagtgtgcttgtctcgactggaactcacacagtcaatagtgaacggcttcacacaccatccacaaaaacgttctctcctgccttttttagcctggtgcagctgtgtttgcagcaagatcctgagaaaaggccatcagcaagcagtttaatgtcccatgtattcttcaagcagatgaaagaagaaagccaagattccatactctcactgttgccgcctgtttataacaggccgtcagtggcagtgccaccagtgtcaccatggagtgagctggaatgcgagtttcctgatgacagagacccagactgggaattctagggttgctgaatcatttcatgtcctctatacttgacagcttctccatgctgcttttcttctgtattgttaggtacaaatgccagatctatacttgaaaatacagttggtgcactggagatgatcaagttaaaaaccactctgtttgtgggcgtggtttcacaccctctgctcagatcagagtacctttgagccagctagttctcttctacattttgctgtcctctggggaataagcccttcctctgaggacagtgattccaaggacatcctttcttccagatttctctagccttttttgtattagctattgttagatgaacaggctggtttattctggtacaaagcccttttttggagaagggaaaatgtttgtactatcccttttacatatggtaatatcaaactgagccttgctcacattaaataattcaacttaaaatataaagagaagatgcaatttgcaattttaaaagggagagggctaaagtaacacttctacctgagtaaattatagagccttaaatcatgccaccctgtgggagcgcaaataaataatgtataaaattaaaaaaaaaaaaaaaaaaaaaaa

SEQ ID NO: 4269 - DNA, 1487 bp, Cricetulus griseus
gtaacggagacttgttcccggccctgccgtcctccgccgcggtccctgggctgcgccgccgttgccgggacgcgccgccgagcccctcgtcgtcgcctccagccctgcggcctccgttcgcctcgccttccgcacgcccaccatgacgaacactgagaagaagtccttccatcagagcctggccgagtggaagctgttcatctacaacccgaccagcggagcgttcctggggcgcaccgccaagagctggggtctgatcttgctcttctacctagttttttatgggttcttggctgcactcttcacattcacaatgtgggccatgctacagaccctgaatgatgaggttccgaaataccgagaccagattcctagtccaggacttatggtttttccaaaaccaccgtctgccttggagtatacatacagcatgtctaagccacttacttatgaaaagttcactgaagacctgaagaggttcctagagccatattctctagaagaacagaagaacctcacaaactgtcctgatggagcaccttttaagcagaatggtccagtttatcaagcatgtcagtttccagtttccttgcttcaaaattgtagtggtatgagtgatactgatttcggctattccaaaggacaaccttgtgttcttgtgaaaatgaacagaataatcgaattaatgccagacggatctccacagataatatgtgatacaaaggatgcaggcatagcaaatatattaacttatcctgaccgtggacttatagacttaaagtatttcccatattacgggaaaaaacggcacgttgggtatcgacagcctctagttgccgtccaggtcatctttgaatctaatgctaccaagaaagaagtaacggttgagtgcaaaattggaggaacatacaacctaaaaacccaggatgaccgggacaagtttttgggacgagttgtgttcaaagtcctagtgagcacctaggagtaggggtctccaaagaatacatgttgtgtcatgttgtgtcagctggactgccattctaggattatgaagccaccttggaggaggtggtgtggtacacacactgggatgacatcatagcgtgcttccagatcatagtgttcagtgtcctctgaagtaactgcctgctgcctctgctgccctttgaaccagtgtacggtcgccagatggggaccagtgagctcctaattccaaacctgcagagtgggagtctcgtcttctgtgtgtaattgccaaacgtctaaagcttaatgtgctgtgctgtgtaaatattttatggatttaacactggtaactgtcatattttgatgccaacaaagttttagggataaaatggtaccttgccaacataaagtgacttttagctgcaagaaatgtgtgagaagttctgtatgtgagaaggaaaaagaaaataaaagtggatctgaaagtattagcttcgattctgtgtatgtgtgagtgtgtg

SEQ ID NO: 4270 - DNA, 1487 bp, Cricetulus griseus
aggaatgtgtttctgctcttctgaatttcaaccatgttgtcaaactacttacaaaattttctaaaagccacaagctttcatccatatccagcgtcatgctgttgcttattaagcaaacgcaagttttctggaactatgccagcagccatgttgcgtaggcgagttgtcatcacaggcatcggactagtgacaccacttggtgttgggactcaacttgtttgggatcggcttctcctaggagaaagtggaattgtttctgtagttggtgatgagtacaagagtattccttgcagtgtagctgcttatgtgccaagaggtactggtgaaggtcaattcaatgaacaaaactttgtgtccaaatcagacatcagggccatgtcatctcccaccatcctggccatcgcggcagcagggttggccctaaaggactctggctggcatccgaagtcagaagctgatcaggtggccactggtgtggccattggcatgggtatggttcctcttgaagttgtttctgaaactgctttgatgtttcagaccaaaggctataataaagtcagcccattctttgtccctaagattctgataaatatggctgcaggccaggtcagcattcgctataaaactcaagggccccaatcacacagtgtccaccgcctgcacaacaggagcacatgctgtgggagactcctttagatttatagcccatggtgatgcagatgtgatggtggctgggggcacagattcttgcattagtccattatctcttgctgggttttccagagcccgggctctgagcacaaacccggatcccaagctggcctgtcgaccattccatccagagcgagatgggtttgtcatgggcgagggtgctgctgtgctggtgttggaagaacgtgagcatgctgttcagagaggagcccggatgtatgcagaagtcctgggctatggactctccggtgacgctggtcacataactgcccctgattctgaaggagacggtgccttcagatgcatggctgctgctgtaaaagatgcaggtgtgttgcctgaacagatatcctatgtcaatgcacatgccacctccacgccactgggtgatgctgctgaaaacagagccatcaagaggctctttagggaccatgctggcacccttgccatatcctccacaaagggagccaccgggcatctgctgggggctgcaggggctgttgaggcagcttttactgccctggcttgttaccatcaaaaactaccaccaactctaaacctgaattgcacagagccagaatttgatctcaattatgttccactggaggcacaggaatggaaaactgaggggcgatgtattggactcaccaattcctttgggttcggtggtactaatgcaacactttgtattgctggcatgtaaacattggtcttttaattgtcataaatgtataaatacacacacacacacacacacacacacacacacacacaca

SEQ ID NO: 4271 - DNA, 1487 bp, Cricetulus griseus
gcggacccatccctgcgtcccgggccgcgaccctgctcctgcagcgccccgagaaagaggccggccggatgggccgctgagcccgagtcggggaccgtgtggagccccctggagctgagatcaggatgttccgcttcatgagggacgtggagcctgaagatcccatgttcctgatggacccctttgccattcaccgtcagcatatgagccgcatgctgtcaggtggctttggatacagccccttccttagcatcacagatggtaacatgccagcaaccaggcctgccagccgcaggatgcagactggggctgtctctcctttcgggatgttgggaatgtctggtggcttcatggacatgtttggaatgatgaacgacatgattggaaacatggaacacatggctgctggaggcaactgccagaccttttcttcctccactgtcatctcctactccaacactggggatggcgccccaaaagtgtaccaggagacatctgagatgcgctctgccccaggagggatccgggagacacggaggaccgtccgggattcagacagtggtctagagcagatgtccatcgggcatcacattcgggacagggctcacatcctccagcgctcccgaaatcaccgcacaggggaccaggaagagcgacaggactatatcaacctggatgaaagtgaggcagccgcatttgatgatgaatggcgaagggagacatcacgattccggcagcagcgtcctctggaatttcgacgccatgaggcttctgtgggtgggggacgaagggccgaggggcctccccgtctggctatccagggacctgaggactccccttcccgacagtcccgtcgctatgactggtgagagccccaggctctcagcctctccagggtgagaggctgagagatcatcccgtgaaataacgttgtcctttccagcctcatcccaatttaatattaaattaacaggcaagctggcccccacctctccctgggggtctcagggagagccttttactgccccctttacctactttttccatcttttatcccctcaccacgatgaccccacccatcttgtatccactaacttgagttttcatttcctgctccatctccaagcctcctcatcttcctctgagcccctgccacacattgaaggttttggggtgcaagctctgggtttaggggtcaccatccctcagctctcctggatccttgctcacctcttcctcagagtcacactgcagatgccacagtcgtatgagggctgtggagggagtggactagttcccacctctttgtcccttctcccaccccacatcacaaaaacactttcctatacccttctctgcctttataaaaataaatgatttgtgcaacttgtaactaggtgtttatggaataaaggagaataggaaaaaaaaaaaaaaaaaaaaaaaaaaaaaaaaaaaaaaaaaaaaaaaaaaaaaaaaaaaaaaaa

SEQ ID NO: 4272 - DNA, 1487 bp, Cricetulus griseus
ttcttcatgcaagagcagtgtactaaaggaagagaggtaactgtgctgagcagtgactgaaagccgcaagcattggacagatttccagaagacacaagctttctgagcattccatattgaaagaagagatttttagacatgaaaaaaatgcctttgtttagtaaatcacacaaaaatccagcagaaattgtgaaaatcctgaaagacaacctggccattttggaaaagcaagacaaaaagacagacaaggcttcagaagaagtgtcgaaatctctgcaatcaatgaaggaaattctgtgtggtacaaatgacaaggagccccctacagaaccagtggctcagctggcacaagagctctacagcagtggactgctggtgacactgatagccgacctgcagctgatagactttgagggaaaaaaagatgtgacccagatattcaacaacatcctgagaagacagatcggtgcacggagtcctactgtggagtacatcagttctcaccctcatatcctgtctatgcttctcaaaggatatgaagccccgcagattgccttacgctgtgggattatgctaagagaatgtattcgacatgaaccacttgccaaaatcatcctcttttctaatcagttcagagatttcttcaagtatgtggagttgtcgacatttgatatcgcttcagatgcctttgctacttttaaggatttgttaacaagacataaagtgttggtagcggacttcttagagcaaaattatgacactatttttgaagactatgagaaactgctgcagtcagagaattacgtgacaaagagacaatctttaaagctgctaggtgagctgatcctggaccgccacaattttgctattatgaccaagtacatcagcaagccagagaacctgaaactgatgatgaacctgcttcgagacaagagccccaacatccaatttgaagccttccatgtctttaaggtgtttgtggccagccctcacaaaacgcagccaatcgtggagatactgttaaaaaatcagcctaaactcattgaatttctgagcagcttccagaaggaaaggacagatgacgagcagtttgctgatgagaagaactacctgattaaacagattcgagacttgaagaaagcagccccgtgaagacgggccctgccctgacagccctttgtctccattgcccaatgtgtacagtgctgcttcaacagtctccgtttttgggaaggctttggaggtgcctgttttctcaattgattgttcaaggtagatggaatataaacatttgaatgggaaaaaaatcaacctagaataatatattgattttaatcaagtctatgattgcttatgtgaaatcagccattatattaaacattgataaaagcaggtataactccagagctggaccttggtcacccaggccaccaagtagaaggagcacaagtatctcttggaacagaatggggagggaacccatctgt

SEQ ID NO: 4273 - DNA, 1486 bp, Cricetulus griseus
gcgatggcaggggccgggccggcgccgggcctcccggttgcgggagggcccgtggtcccggggccgggtgttgggctcccgggcaagagcggcgaggagcgcttgaaagaaatggaggcggagatggccctgttcgagcaggaagtcctgggagccccggtgaccggaatccccgccgcggtgcccgcggtgcccaccgtagaagccatgcaggtccctgcagccccagtgatccgcccgattatcgccaccaacacgtaccagcaggttcaacagaccctggaagcccgggcagctgctgcagccacagtagtccctcccatggtgggaggccctccttttgtgggcccagttggctttggccctgctgatcgcagtcacctggacagtcctgaggctcgagaagccatgttcctgagacgagcagctgtggcccctcagagggcccctatcctgcgtccagccttcgtcccccacgtgctacagagagcagattctgctctctcttctgcagcaggtggcccccgacctatggccctgaggcccccacaccaggccctggttggaccccctctgcctgggcctcctggaccacccatgatgctgccacctatggctcgggccccaggaccacccctgggctctatggctgctctaagacctcccctggaagagcctgcagcccctcgagagctgggccttggccttgggttaggcctgaaggagaaggaagaggcagcggtggccgcagcagccgggctggaggatgctagtgcagcagtggccgtgggagcaggaggagccccaactggccctgcagtcattggccccagcctcccgctggccctagccatgcccttgcctgagccggagcccctgcccctcccactcgaggtggtacgtggcctgctgcctccacttcgaattcctgagctcctgtccctgcgtccacgcccccggcccccgcggcctgaaccacctcctggcctcatggccctagaggtcccagagccgctgggtgaggacaagaagaaaggcaaaccggagaaactgaagcgctgcattcgcacagcagccgggagcagctgggaggaccccagtctgctggagtgggatgccgatgacttccggatcttctgtggggacctgggcaatgaggtgaatgatgacatcttggctcgtgccttcagccggttcccatccttccttaaggctaaggtgatccgtgacaagcgcacaggcaaaaccaagggctatggctttgtcagcttcaaggaccccagtgactatgtgcgcgccatgcgtgagatgaacgggaagtacgtgggctcacggcccatcaagcttcgaaaaagcatgtggaaggaccggaacctggatgtggtccgcaagaagcagaaggaaaagaaaagttgggcctcagatagggtctgtggcttggcacttgctcccacccagccaggcgctagctccttcccacagatgt

SEQ ID NO: 4274 - DNA, 1486 bp, Cricetulus griseus
  modified_base (354)..(354): a, c, t, g, unknown or other
ttcatgagctttgtgacaaccacctttgtgatggaggccatggctgcagccaacgcccagctccgctggaagaggatggaaacccacaaggaagaggaagatgaagactcctccacggcctcagatagtgacatcctcacccaagacaactatgagcgggcagagaaacggcccatcctgtctgtgcagagacgttcatcagccaacctttttgaaatcacagaccgggtggaaatgggacagatggcttccatgttcttcaataaagtgggggtcaacttgttctatttctgcatcattatttacctgtacggagacctcgccatctacgcggcagctgtgcccttctccctnaggtgacctgcagtgtgtctgggaatgactctattacaggagcctatgcgggcaccggcatccagtatgtcatccctgccttcctggtgtacctctgccgcaaggacacccagctgacctttggctatgggactatcaacaagcacaggtccccgttccgccacaccctctgggtggcctttgtgctactgtgggctttctcctgcttcttctttgtcacagccaacatcgtcctcagtgagacccagctctgatatcaggatgtatctgacaacaggaggtagggacagcccagcgccagcctcccggactcaaggcagtttttaactgccacccagtctccatgagcctgctggactggggctcttggagaaggccttccacgtctccagctggtgccctctcccgacccagctgtcacacacattcctccactcctgccactggaggctggctcccttctctgtgcagtgggggagacagtgctggctggtactgctgctatttatactagacccagtgtcccctcctgcatcctcgaccgtccactagcagctgctgcctcttcaaaggcgagttcccaggccctggctctcctaacctgcttgtgatgggcagggcacatttcctgacagtcctgacagctgctaagttcctagacagagctgcctctggggtgaagggtgtcagacccccaccctccctcttaattccagtgccttgctcgtctctccctcatgagggaacttgcgccagccaccccttcccttctacaccctgccatatttaaagcttgagctctgctatgctgttggatgccctgtgacccaggggtctgtgcagaaccctcaaggaatgtggggaccactggtggcacccgctagctctggccccagcatccccccgagggcaggccaggtcaaggtgggagtgagcattcaccaggcccagctgtgcacagagcacagtgccaggaaccctggcttcacctcacctgaggcgggtagctggggcagatggcaggtgacagcccgcaggacactgctgaggaacagaaagtggcagtgggcaccaggccaggcccaaggccacacagctgtcctcaccacatgggaccaagagcctcagcaac

SEQ ID NO: 4275 - DNA, 1486 bp, Cricetulus griseus
gcctttagccagctgtgtgagcaaatgatgagagaatccatgattatgcattataaccaccttctgttcagtctgaatgctgtaataaagcttggagtccctcagaatactctgatggtacagactctgctgagggtgattcaggaacgcatcaatgagtgtgatgagagatgtctttcaattctgtcaactgttttagatacattggaaaccaagcatgaatgtgaatgcgcttcgagcagggtttcgaatcctagttgatcagcaagtttggaagatagaacatatcttcacattacaaacagtgatgaaatttatcgggaaagacacaccacttgctcttaagaagaaattggagatgaaaaccttgaaggagttagacagattttctgccttgaatagccagcacatgtttgaagtactagctgccatggattaccgctctgttgtccttctgaatgaatgcagtaagaaggtcatagataatatccatggttgtccttctaaagtactgatcagcatactgcagtcctgtaaagccctccgataccaaaataaagatctcttcaagaggatagcagactatgtggctacaacttttgaaatttggaagttgaatcaagttatctttttcctcttgggatttgaaaaccttggttttcgaccttctgctttgatggacaagctgatggagaaagtaatggaggatcctgactctctaaacaaaaagaacattgtttctatccttcacgtgtattcttctctcaatcatgcccacaaggaccagaacagagagttcctagaagcaatggcaagtgctctgactgtttatcttcaccacatctcttccgaaaacctattgagtgctgtgtattcattttgcctgatgaattattttccccagaatctcattaaccagcttatcaaaaagaacatcatcaacgaactgctgacttcaggtgacacagagaagaatattcctaagcttcatgttttgaatacttgtctgaaacttgatgaaagcgcctattacaaagctgtacacataccattgccacagctgcctctgcccctgccataccccagtgacagggtcgcagaggtgctcagccatctcctaaaaggggaagggtgcttctcaagaaatgtgcagttgccacacaattatcacattgattttgaaatcagaatggataataacaggacccaagtattttcattttctgatgtagatgcaacttctggcacaaacatgcagagagtagcagtgctgtgtgttcctaagtctgcttattgtttggattcaaaccaccccagaggattgttggctatgaaaattcgacatttgaatacaatgggtttccatgtgatcttgatcaataactgggagctgaggaaactaaggatggaggatgccgtggcgtttgtgaagatgaagatctactcagatggcgcttttccaaccactgacacaactgtgtaaagc

SEQ ID NO: 4276 - DNA, 1486 bp, Cricetulus griseus
cagagcctgctggaggcagcgagcaggaacgaagcacctacatctgcaacaagaggcagcagattctgcggctagtcagccggtgggtggccctgtacggtcccatgctccactcagaccccgtggccaccagcttcctccagaaactctcagacctggtgagcagggatgcccgacttagcaacttgctgaaggaacagtggccggagaggcggcggcaccacaggttggagaatggctgtgggaatgcatctcctcagaccaaggcccgaaatgcacctgtttggctccctagccaggaggaatccctcccaagcagcactggtgccatccgagttggggacaaagttccctacgacatctgcagacccgatcactcggtggtgaccctacagctgcctgtgacggcctctgtgagagaggtgatggcagctctggcccatgaggatcactggaccaagggacacctgcgggatgtcaccaccgcaaacctggagcgcttcatgcgccgtttcaatgagctgcagtactgggtggccactgagctctgtctgtgctcagttcccggccccagggctcagctgcttcggaagttcatcaagctggcagcccacctcaaggagcagaagaatctcaactccttctttgcggtcatgtttggcctcagcaactctgccatcagccgcctggcccacacctgggagcgtctaccccataaagtacggaagctgtactccgccttggagaggctgctggacccctcatggaaccaccgagtttatcgattggcactcactaagctctcccctcctgtcatcccttttatgcctctgctactcaaagacatgaccttcatccacgagggaaaccacacgctcgtagagaacctcatcaactttgagaagatgcgaatgatggccagagccgtgcgaatgctccatcactgccggagtcacaacactgtgcctctgtcaccactcagaagccgagtatcccacatccacgaggacagccaggcatcaaggatttccacatgctctgagcagtccctgagcacccggagtccagctagcacctgggcctatgtccagcagctgaaggtcatcgacaaccagcgggaactgtcccgcctctcccgggagctggagccatggagggagggactgggcagagcaggcacttctctcagagaaagccagagcctggtggggcccaagaggttcaggaggccagccacggctgggcagggctcttcgtggagaggactcaaggccctggagtgggcagtgttgtgtgtgtgtgtgtgtgtgtgtgtgtgtgtgtggggtggggccgttgcctgggaaagggtggggaggttctgcttttctctccacacatctgagataaacagctgggtgtaggcagggctgttgcctagagtggtggtccctgtggcgctgcattgttcccataaattaaacaaaagaataaaaaaaaaaaaaaa

SEQ ID NO: 4277 - DNA, 1486 bp, Cricetulus griseus
gaaggagctccttcccccaaattatgatgatgatgatgatgaacgagctgatgactctcttttcatgatgaaggagttggcaggtgccaaggtggaaaggccttcctctccattctccatggctccacaagcttccctttcctcctagtgccaccaagacttgatcttctacaacagcgaccatctgttccctgctagctcttcagttctggggactacttccaaggctgcttctggctctcttcataaagacaaaccattgccaatacctcccacacttcgagatctttccaccaccacctcctccagaccggccttactctgttgggacagaacacggcctcagagaccgtcccctgccttgtacaccaggcgattgtccatctagagacaactcgccccctgtcccctctacgccgaaaacagtacctttggggaagggaatttggctacagcccccaccagtactggccctgaggagtcagaaaaatgaggatgatggctacgatgtgcctaagccgcctgtgccggctgtactggctcgccggactctgtccgacatctctaatgccagctcctcctttggctggttatctctggatggtgatcctacaacaaacttcaatgagggttcccaagttcctgagcggccccctaaaccattccctcggagaatcaactctgaacgaaaagcaagcagctgtcagcaaggtggtgccactgctaatccttctgccactgccccctcaccacagctctcgagtgagattgagcgtctcatgagtcagggctactcgtaccaggacattcagaaagctttggtcattgcccacaacaacattgagatggccaaaaacatcctccgggaatttgtttctatttcttctcctgcccacgtagctacctagcacatctctccctgccatggcttcagaggacccatgagccgggcttttactcaaggagcacctaggaaagcgtggcttcttttgggacatcacagtgaggtcccacccaccttttctgtgggtatcgacacccatggttccaagatttcaaagcagtggaatgaaaatggagcagctagtgtattcactgttgtattggtcttaagagtgtgtttgtaagtccttcagtccccattaggagagagtggatttttattaaatggtaacctacccctggaacagtacagaaagcagtagaagtgctgtgctgtagtcctagttaaggacttaagactttcctgtaaagggtgtctgtctgtctgtctgtctgtctgtctgtctttgaattctcctaattacctaatgactggtttgagatagaggccttcatatacattccgtgtcttccccaggaaatagtctgtggggtctgttgccttggtgcccaggtatgtgtttctgatatagatcatgagtctttctacctaacaggaacagaaagaacaacatttgtttctagggtggctttccagcccaaa

SEQ ID NO: 4278 - DNA, 1486 bp, Cricetulus griseus
tgggcccacggatcccggggccacggtgcgagtgcgcttcgctcccagccccacaggcttcttgcacctgggtggcctccggactgccctctacaactacatctttgccaagaagcaccaagggagcttcattctgaggctggaggacactgatcagagccgactggtaccaagggcagcagaaaacattgaggacatgctggagtgggcaggcatcccacctgacgagagtccccgtcggggtggtcctgcagggccctacatccaatcacagcggctggcactgtatgcacaggcctcagacgcattgctgaagtctggagctgcctatccctgtttctgttcaccacagcggctggagctcctgaagaaggaagccctaaggaaccggcagacaccccggtatgacaatcgttgccggaacctgagccaggcacaggtagcccagaagctggccatggaccccaagcctgctatccgcttccgcctggaggaagcagcaccagccttccaggaccttgtatatggctggactcagcatgaagtcgccagtgtggagggggatccagttatcctgaagagtgatggcttccccacctaccacctagcctgtgtggtggatgaccaccacatgaacatcagccatgtgctgcggggctctgagtggctcgtctccacctctaagcacctgctcctctaccaggccctgggctggcagccacctcaatttgctcatctgcccctgctcctcaacagggatggtagcaagctgtctaagaggcaaaaggacattttcctggagcattttgctgccgctggttttctgcctgaagccttgcttgacatcatcaccaactgtggctcggggtttgcagagaaccaaatgggcaggaccctgccggagctgataacacagtttgacctgacccggtatcacctgccactcagccctgctagacctggagaaactcccagaattcaataggctgcacctgcaacggctggtaagcaatgagacccagagaccccagttggtggagaagctgcagaccctagtaaaggaggcatttgggaatcaactgcaagacaaggatgttctggacccagcatatctggagagaatcatcctgctgcgacagggccacatcagccgccttcaggatctgctctccccagtgtactcctacttatggactcgccctgctgtccatagatcacagctgggcattgactcggaaaaggtggacgtgattgtcaaacgcttgctggggcttttagggagatcaggtttgaacctaactcaggatgtggtgaacagagaactgaagaagctgtcagaaggcttggaagacaccaagtacagcagtgtgatgaagctcctccgaatgaccctcagtggacagctgcaaggaccccctgtggctgagatgatggtgtccttgggcccaaaggaagtacaggagcgaatccagaaggtgctttctag

SEQ ID NO: 4279 - DNA, 1486 bp, Cricetulus griseus
cagagagcatcgagtctggacacaagaggttcccctaacgcggcaccactttcagcggcagcgggcagccagtgagagcatggagcaagagggggacgccccccactgcggacttcattcagtacattgccagcgcaggcgattcggtggccttcccacccccccgccccctttcctggccagccccaccagcccgccccccacctctcggcaggctagaggcagccgaggcggcgggaggagcaagccccgagactcccccggagcacagtttggggcccgagcatgcgcagcagcaggacccgcagcaagagcaggacgtcgagcatgcacagtgcagctaccgtgacctgtggagccttcgtgcttccctcgagctcccacgcggccactgcatcggaccacagcagcagcgggaacgaccgcgactccgtacgcagcggcgacagctcaagcctcaggctccggggcggcggcgtagcacccgccttcccacccccaaccggagtctcctccctgctctgccggcctaaggacggtgaagcccgccgcctgctgcagatggacagtgggtatgcgagcatcgagggccgcggcgcgggagacgaagcctccgaatttcccgctccagcccgcagccctccacgcagcccgcgagcctggccacgcaggccacgccgtgactacagcatagacgagaagacggacgcgcttttccacgagtttctgcgccacgacccgcatttcgatgatgcaccacgccatcgcgcacgagcgcaccctcacgcccatgcgcgtaaacagtggcagcaaagaggccggcagcacagcgaccccggcggcgcacgcgtggccacgccccccggggtggtcgcgtcccgctcgtgcgcccttgcggcgtggcgacagcgtcgattgtcctcccgaaggccgtgcactgccgaaccacgggggacgacacgtccatcccggtcatcgaggaggagcccggcagcggaagcggtagttgcccaggctctgggctgtgtgtcgagcccgccggggcgctgctggacaagctggcagccagcctcgacgagagactcttcgcgccccgtctccctgagcctgttgcctcatccccggtgctgatcgtcgctgctgctgcccccacgtcccctgaccacagcccggcctaaagctctgtgaactcgacccgcctctcggcagcttctctggtggtatgtggggccgctgcggggacggcggcgacagcggggaacccagggttgccgtgcatgtgcacacagcccagtcccaactgcgcacgtggcagtgttacctcgggcacttcgcgggtcgcagcggcctcccagggcgcgaggccccaggaccctgactcagctgcagggaggatgcagagttccgactctccagtccttacttgatggaccatggcacccagcctctaaaagaaaaagaaaccaaaaaaaaaaaaaaaaaaaaa

SEQ ID NO: 4280 - DNA, 1485 bp, Cricetulus griseus
cgcgctcacctgcgccatggcgagtaccgacgaggtgcagaccccggccgccgtttccttcgactacctggtgatcggcggcggctcgggagggctggccagcgcgcggcgggcggcggagctcggcgctagggccgcggtggtggagagtcacaagctgggtggcacttgcgtgaatgtcggatgtgtccccaaaaaggtaatgtggaacacagctgtccactcagaattcatgcacgatcacatggattatggctttcagaattgtgagagtaaattcaattggcatgtcatcaaggagaagcgtgatgcctatgtgagccgcctgaacactatctaccagaacaatttaaccaagtcccacatagaaatcatccatggctatgcagcatttgcagatggtcctcagcccacggttgaagtcaatgggaaaaagtacactgcacctcacatcctgattgccacaggtggtgtgcccacagttcctcaagagagccagatcccaggtgccagcttgggaataaccagtgatgggtttttcagctggaggacctgcctagccgcagtgtcattgtgggtgcgggttacattgccgtggagatagctggcatcctctctgccctgggctccaagacatctcttatgataaggcatgataaggttcttagaaactttgattcactcatcagttccaactgcactgaggagctggagaacgctggcgtggaagtgctgaagttctcacaggtaaaggaagtaaaaaagacaccatccggcttggaactcctcatggttactgctgttcctggtaggaaacccaccacaaccatgattccagatgttgactgcctgctctgggccattggacgtgacccaaattctaggggcctgaatttaaataaactggggattcagacagatgaaaaaggccatatcatcgtagacgaattccagaataccaatgtgaaaggcgtctatgctgtgggagatgtctgtgggagagcacttctcaccccagttgcaatagctgctggccggaaactggcccatagactttttgaatgcaaagaagattccaaattagactatgacaacatccctaccgtggtcttcagccacccccctattgggacagtggggctcactgaagatgaagccgttcataaatatggaaaagagagtgtgaaaatctactcaactacctttaccccaatgtatcatgctgtgaccacaaggaagaccaaatgtgtgatgaaaatggtttgtgccaacaaagaggaaaaggtggtcgggatccacatgcaggggattgggtgtgatgaaatgcttcaaggctttgctgtagcagtgaaaatgggggccaccaaggccgactttgacaacacggttgccattcaccctacctcttcagaagagctggttacactccgttgagcgcccagggactaaaatttattactaactaaaaaaaaaaaaaaaaaaaaa

SEQ ID NO: 4281 - DNA, 1485 bp, Cricetulus griseus
gttcagcggagggtgcaggaactagtgcgattcacccagcaactacagagaagttcaccccaatgtgcttgctaaggaactgagcccgaggggattctccaccaggacaaggaccttgtggtcattaataaaccgtatggtctcccctgtccacggtggccctggagtccagctctgcatcagtgatgtactacccaccctggcaaagatgcttcgtggccacaaggcagagcctttgcatctgtgccaccgtctggacaaagaaaccacaggtgtaatggtgttggcttgggagaaggatatggcacatcaagtccaggaactgtttagaactcgccaggtggaaaagaagtactgggccatcactgttcgtgtccccttgccctcggcaggaagtggttgatatccccatccagcaacaccacaagatgacgctgtccccgagttaccgtatggacaatggggaaaatgggtaaaggttcgggccagccggaatgcccatgttgctgtaactcagtaccaggtgcttagcagcactccctcttctgccctcgtggagctacagcctgttactggaataaaacatcagcttcgagttcacctatcttttggtttggattgcccaatccttggtgatcacaagtactcagactggaataggttggcccctcagaaacttcctgctggcacactgaagaagctgggactacatcagacaaaggcccgctatatccccctccacctgcatgccaggcagctcatcctgcctgctctgggctccaggacagaggaactcctcctggcctgcaagcttcctcacttctttgcacattccctacatcgtctgggtttggagatgccaaatcaggatcaaagcaaaggcagtgaggccaggcgtgtagaagcacagtgaaggctgctgggcaggttggccctagagctctgctgtatgtcatggattctgctgccttctcacttggaagagactacagaagagccaggtgggataagttgaagaaacttgaccacttcaggactttaatgaagaatgaagttgtatttactgtcagtctgactgtagtgtggaaaagcctgctggaagtctctccttgagaggtctctttaccaagatggaagaggacctaggaccagacagattggaccagtaaaggagagtcaaaggatggaatgtgtggccaggaactgtcttcatccaaccagaagaaaagcttctgagctatcaggacggctcccttggttggttaggtgaggtaaatgatgggcagatgacctgagtaagtgaggctggtagggtggaaggcagtagctgggacaacagactacgcacacaaactaatggttattggctccagctggttgttgccctgtgggcaaattttctgttttctcttagagaaccaggaaatccagattatttctgtgaaatctcccaacctgttgctaactaaataaaaacattctaaa

SEQ ID NO: 4282 - DNA, 1485 bp, Cricetulus griseus
ctctgctgagagatctggtcacaatgaagttcctcatgctcctcgtggtcttgcaggtgtctgcctgtggggccattcctataaatgaaaccgaatttgctgaaaggtacttgacaaaattttatgaccttaaaaaggacagaattcaaaaaacaaaatggaaagccaagagaaacctccttgaagaaaaaatccaggaaatgcagcagttctttgggctcaaagcaactgggcaactggacagccagactctgatgataatgcacacacctcgatgtggagttcctgatgtggagaatctcagagaattgccggggatgcaaaaatggacgaagcatcacctcacctacaggatctataattacacccctgacatgaagcgtgaggacgttgacagggcatttcagaaagcttttcgagtctggagtgatgtgaccccgttgagattcaggaagatttatacaggccaggcggacattatgatactgtttgcatctggagctcatggagacttcagtgcttttgatggcagaggtggcacaatagcacatgctttttaccctggacccggtatccaaggagacgcacattttgatgaggcagagacctggagtaaaggttctcgaggcacaaacctgttcctcgttgctgttcatgaacttggccattccttggggctgcggcattccaacaatccaaactcagtaatgtaccctagctatagttatgttaaccccaacacattccgccttcctgctgatgacatacaaagtattcagtctctctatggatccccagtgaaaaacccacccttgagaaatcctgtcattccatcagcagcaactatctgtcagcaaagcttgagctttgatgccgtcacaacagtgggagacaaaatccttttctttaaagacaggttcgtctggtggatgttgcctgggagtccagccaccgtcacttcaatttcttccatgtggccaaccatcccatctggtattcaagctgcttatgaaatcaaaggcagaaatcaactctttctttttaaagatgacaagtactggttaataaacaacttagtagcacagccacactatcccagaaacatatcctctctgggcttccctgcgtttgtgaaaaacattgatgcagccatctttgacccatctcatcataaggtctacttcttctcggatagacgatattggagatacgatgtgaggaagcagtccatggaccctacttatcccaaacttatttccttgcacttctcaggaattaagcctaaaattgatgcaggcttctctttcaaaggacactactacttcttccaaggagccaatcaattggaatatgaccccctgtcgaatcgtgtcaccaaaaggctcaaaagtacgagctggtttgtttgtttgaaatgatgcagttgaggatcttcgctagttcttcagtttaataagtatttatcacatctgcactttatgctca

SEQ ID NO: 4283 - DNA, 1484 bp, Cricetulus griseus
ggcttggagcccgccagcccgtatctccggcgccagctacgccgctgtggctgtcactatggcccattacaaagccgccgactcgaagcgcgagcagttccggaggtacttggagaagtcgggggtgctggacacgctgacgaaagtgttggtagccttatatgaagaaccagagaagcccaccagtgctctggattttttaaagcatcacttaggagctgccaccccggaaaacccagaaatagagctgcttcgtctagaattggcagaaatgaaagagaaatatgaagcttctgtagaagaaaataaaaaactgaaagcaaagcttgctcagtatgagccacctcaggaggagaagcgtgctgaataggattcttctcagttgaaaagacactgaaaactggttttgtatcacttgaatagcttgtatagtatataatctttcctgaaaagatgctataaacttttaatatgttaaatccactcatcacactttaatgttataaacacatatacatagaatcaccaataaaaactcaatataactttctttgggtcttaaagcaggagaatccaaagcaaatatcggagaaaagctaaagagccacataacttttcactttcaaagacattttatttattatccaattaggaatgatggtactggttgtattttaactaggagatttaacatggagctattccttggttgaggacttgagcatagtaggcacactcattcttgacagtgtatacccagtagacagctggacagatttgtgatgtatgatgcttctgcatggatccccatgcgtcttgctcctttatataatatggaacaaagaactcttctttgccaccactttgccttagataacttgtgtgtgccagtgtgaactctgacaccacattttctttctatgcaatcatgcccatctgataatgctgccttgctgtgctgtgtgctttagtgtgtcctggttgcacagtagtctgtgttgttttcagtttgcttaatgctgcagctatcctgattgtaatttacatagcttccaacatgactacactcttaccctgccttacttagttagttccttagttgagcacagaagagataatataaaattctgggttcatgcaccagctgggacggaaagggggatgaaccattatgtcacagatgattataatatgtaattatatagtgcttttttccccccctcaaaggtatttttttgagcctcgaattaattttatctttattatccctgtgaagtaggtagggcaagtatgaggcgaggttgggtgctgaatttttaggccaaagactgatatttatatgaatttgttgctaactgggcaggtcagttaatggcttggagattcactttcttgtctgtaccatgagaacttgtgctgcctacctcacagggttgttgtgaggtcaaacgagagaatgtacatagaaagatgtgtaaataggt

SEQ ID NO: 4284 - DNA, 1484 bp, Cricetulus griseus
agattcggttgggtcctgctaatcgactccaaggcaatgctgcggaagacagtgttcttactggtcctggtggcccaggtgctgatgctggagaatgggctccttcgaacaccacccatgggctggctggcctgggaacgtttccgctgtaacattaattgtgaccaggacccaaagaactgtatcagtgaacggctcttcatggaaatggctgaccgactagcccaggatggatggcgagacctgggttatgtgtacctcaacatcgatgactgctggattggtgggcgtgattccaaaggccgcctggtgcctgatcccaagcgcttccctcatgggattgccttcctagctgactatgctcattccctaggtctgaagctaggcatctatgaggacatgggcaaaatgacctgcatgggttaccccggcaccactctagacaaaatagagctggatgctggaacctttgctgaatggaaggtggacatgctgaagctggatggctgtttctccacttccaaagagcgtgcagtggggtatcccaagatggctgctgccctgaatgccacaggccgtcccatcgccttttcttgcagctggccagcctatgaagggggcctaccccccaaggtgaactacactctgattgccaacatctgtaatctctggcgcaacttcgacgatattcaggactcctggaggagtgtgctctccattgtggactggtttgtgaaataccaggacatattgcagccagtggcgggtcctggacactggaacgacccagacatgctactcatcgggaactacggcctcagctttgaggagtccagggcacagatggccctttggacagtgctagcagcccccctcttcatgtccacagaccttcgtaccatctccccccagaacatagacattcttcagaatccacttatgatcaagatcaatcaggatcgattaggcatccagggacgcaggatcttcaagagtaaatcccaaattgaggtgttcaagcggcatctgtctaatggggcgagtgccctggtctacttcagccgcaggacagacatgccttaccacttccattgctccctcttggaactgaactatcccaaatccagagtgtatgagggccagaatgtcttcacgggggatgtcatcagtggcctcaagagtgaaagcaacttcaccgtgatcatcaatccttcgggggttgtgatgtggtacctatatcctatcaagaaccaggggttttccaaacagatgtcccagttgtgaggacccaagaatgacaggctatgacagccccactgagcctggaccacagaagccttggcatgccaaggatgtggtagggctctgtccttcccaggctgctcggtgatgtgaccccatcatacccaaagtgcatttgcagggcccagtttcatgccgtgattggccttcctactggagaaggcctttgcagttgacaccct

SEQ ID NO: 4285 - DNA, 1483 bp, Cricetulus griseus
gagaaggagaagaccagaagaggtgaagattgagccagctcaggccgtcgctgaagtggaacctctacctgaagactactatacgcgaccagtgaacttaacggaggtgaccacccttcagcagcgcctcctacagcctgatttccagccagtctctgcttcacagctttatcctcgacacaagcaccttctgatcaaacggtccctgcgctgtcggaaatgtgaacacaacttaagcaagccagaatttaatccaacatctatcaagttcaaaatccagttggttgctgtcaattatattccagaagtgagaatcatgtcaattcccaaccttcgctacatgaaggagagccaggtcctcctgactcttacaaatccagtagagaacctgacccatgtgactctgttggagtgtgaagagggggaccctgataatatcaacagcactgctaaggtggtggtgcctcccaaagaaagtgaccagggcacagaggtcatctggctcactcagcaaacagcctagctccatcccagtaaaaggggtggctgttcctcagagggacattagatttactccctgagaaatgggccatgtacctgtcacggtttgactgaaagaacctagaatggtaattcagagcagacctgctattcatgccccagcattggtctctgtgttccagctgctgtccgaattccattaaggataactagtaattataacccttcacttgccatgactttcatttgaccattgacttccattggacagagaagtaggattgtcatggtgtctttaactttgtgatgacaggacaggacttccttaaggcactccatttgtctcttgtaaaggactacagaatgcctaccaattgctgttcattttcctcagtagtacatgggactttaaggatttgagttgcaagcaattacatgtcatgaagttcaatttgttttaataataccataacatccagagactaatgctgccacagggcttttttttttttttttttttttgtctgtttaagaagtcaagttaacttacaaataacagttgttggctgtttcaaggtgaatttagctcaagttggtttggtattcttagaaaaggttcagtatctgtgactggtgaaataggatttgtgtctatcgcccttcttgtattattagatctggtgcagggtttttattactggtcagtgcacaccaggacacaagagttgggcgtcttagcacttgaagctacaatttggaaacttaaggctaagttactttgggtttgtgaatggatttacacaccaaaagtttcttttgttctgagcatatgtataagcatactgcactaaatgccattgcatctttgtaataagcatccttcttggtcccttttgggaaggaaaggcactccttgacttatgaataacaggtttctgttttgccttattgcttaatgtagtgaaataaagcagacaaagct

SEQ ID NO: 4286 - DNA, 1483 bp, Cricetulus griseus
aggatggagttcgtgaagtgcctaggccaccctgaggagttctacaacctgctgcgattccgcatgggaggccggcggaatttcataaccaagatggaccaggactcgctcagcagcagcttgaagacctgctacaagtatctgaatcagaccagtcgcagcttcgccgcggttatccaggcgctggatggggaaattcgccatgcagtgtgtgtgttttatctggttctccgagctctggacaccgtggaagatgacatgagcatcagtgtggagaagaagatcccgatgctgcgcaactttcacactttcctctatgaacccgagtggcggttcacggagagcacacagaaggaccggcaagtgctggaggacttccccacgatctccttggagtttagaaatctggctgagaaatatcaaacagtgattgctgacatctgccagaaaatgggatgtgggatggcagaatttgtggacaagcatgtgacctccaaacaggactgggacaagtattgtcactacgttgctggactggtaggaattggcctttctcgtctgttctcgacctcagagtttgaagatcccttagttggtgaagacacagagtgtgccaattcaatgggtctattcctgcagaaaacaaatatcattcgtgattatctggaggaccaacaagaaggaagagcattttggcctcaagaggtgtggggcagatatgttaagaagctggaagactttgctaagccagaaaacatagatgtggccgtgcagtgcttgaatgaactcataaccaacaccctgcaccatatcccccacgtcatcacctacctgtcaaggctccggaaccaaagtgtgtttaacttctgtgctattccacaggtaatggccatcgctacactggctgcctgttacaacaatcagcaggttttcaaaggggtagtgaagattcggaaggggcaagcagttaccctcatgatggatgccaccaacatgccagctgtcaaagctatcatacaccagtacatagaagagattcatcaccggatccccagctcagacccatcttctagcaaaaccaaggaggtcatctccgccatcaggacacagagccttcccaactgtcaactcatctcccgaagccactactcccccatttacctgtcgtttgtcatgctcttggctgccctgagctggcagtacctgagcaccctgtcccaggtcacagaagactatgtgcagacaggagaacactgattttatttggctggaagccaacgttcacatgaaatggttttacctttcttccaggtggattttgacttccctttcgttttccctactttaatctctcagagaactgtgtgtgggacctttagaaactgcagaggaaaagacaccttgcccccagcagcctggtgcttgttgggccgtggtccctctgccttttgtagccattggcagcatgctcactgctgcactt

SEQ ID NO: 4287 - DNA, 1482 bp, Cricetulus griseus
ggcggtggagatggaggagagcgagtacgagtcggttctctgtgtcaagccggaggtccatgtctaccgcatcccgccgcgggccaacaaccgtggctacagggcatcagaatggcagctggaccagccatggtggagtggccggctacggatcactgcgaaagggcaggtggcctacatcaagctggaggacaggacctcaggggagctcttcgcccaggccccagtggaccagtttcctggcacagctgtggagagcgtgactgactccagcaggtacttcgtggtccgcattgaagatggaaatgggcgacgtgcttttattgggattggctttggggaccgaggggacgcctttgacttcaacgtggcattgcaagaccattttaagtgggtgaaacaacagagtgagtttgcaaaacaagcccagaacccagacgaaggccccaaattggacctgggcttcaaggagggccagaccatcaagatcaacatcgcaaacatgagaaagaaggaagcagcacctgggacgccaagaaccaggcctgccagcacaggagggctgaacctgctgccccctcctccagggagcaagacctccactcttatccctccccctggggagcagttgtcttttgggggctctgcagcccagccagcagttatttctgtttcaggaggtgccacagaaccctggccacagtctaagcctgctgccaccaccactgctgatatctggggcgacttcaccaaatccacagggtcgtcgtcctccaaccagtctcagccaggcaccggctgggtccagttttgatgcacaactttttcttcatgacttctgggaaggagctgcctcatccaggcccacagaaggaggcaaaaggctccttggctagcccctggagcgtcattgtcctctccttgcctggctctcctgacagcctgagcacaagaagcggtaaattggcaccatgacatgccactgttgtgggggttcaggtcctgcacagccagaagacaggagcaaacactccagggccccccagcccgcccctcctcctcatgggagggacccagacctgccttctttcacgaagtgatccttattaaacacaacccctaaagcacagaatgggttgagtttgtggcctgggttcagctctgcccgtcgggttggcaggagtcccagatttcactgtcaggctggggactctgcacactgtccacagtagcccttgtcgggtgccttccagaggagtcctttctggttgctagcaagtttttgagctgcatcttgagtgggctgtcagggacactggaaggataagcagctttttgaaaatgttaatacatgctctgctaatatgctgaccagcactaacgtgcccttgcgagggacccaccctggtgaggggctctcacacacccttctccctgccctgagccccagaggcagcagtgagagtcagcctccatacctgg

SEQ ID NO: 4288 - DNA, 1482 bp, Cricetulus griseus
ccagacttgctgtggtcaagttcaccatgagagggtgtggaccatgtttgaggattgctcctgcattcagctctatgagtaataagtatccacaggcagttttcctggaagtagatgtacatcagtgccagggaacagctgccaccaacaatatatcagcaacacctacatttttgttttttcgaaacaaagtgagaatcgatcagtatcaaggagcagatgctgtgggactagaagagaaaatcaagcagcatctagaaaatgatcctggaagcaatgaggacacagacattccgaagggctatatggatttaatgcctttcattaacaaagctggctgtgaatgtcttaatgaaagtgatgagcatggttttgacaactgtttacgaaaagacatgtccttcttggaatctgattgtgatgagcagctacttattactgtggcattcaatcaacctgtcaagctttattccatgaaatttcaaggaccagataatggtcagggtcctaagtatgtaaaaatttttatcaacctaccccgctctatggattttgaggaggcagagaggagtgagccaactcaagccctggaactgacagaagatgacattaaagaagatggcattgttcctctccgttacgttaaatttcagaatgttaacagtgtaactttatttgttcagtctaatcaaggtgaagaagagacaacgagaatttcgtattttactttcattggtactccagtccaggcaacaaatatgaatgacttcaaacgagtagttggcaaaaaaggagaaagccattagggtacaaaagacactggaagacttactgcagtcagatttgcagctcctggataattgcttgattctcttcggaaactgttaatcttttatttgttgccattaccaataaatcattgcttttgttcagatggcatcacttgtgtttctattgtaatcttgatacatgcagttgtaaataaaagtcattacttttgccaagcttaaattttgtcattctatataagtgtattctcttcttttttgtttgaattattggcttaaactttttgggttagaagagctgtgtctggaatcacattggctaaaagctagtcttttagaggaacagaatgttagaggaattaagagtactgtttgcacacatagagtgttttgatacatggatctgaaacctatctacacatgtggaatgttttgatgcatggatttgaaatagctaaccatgtttgagtaagaattgacttgcattttttcaagacatctgggtgtctagactttataaatttgaagttaatgttgaagtagtcctcttctgaaatttgtgtcattaagtaatgttcagttcatttgtatgtgagtacagtaactggtctgtggtgatgtctgtattttatgtatttcacagttttgttgatttagaacaaaaggaagacaacaaataaaagtttaataatac

SEQ ID NO: 4289 - DNA, 1482 bp, Cricetulus griseus
cgagggacttgtcacggggatctgggcgtaccgggcagccctggtagtgtctggcgactcccggggggacagccagtgtcaccgctcgggagcccggcgccgtcggccgcggggaaccccgctgctctctcccagcgagggagggggccggagggagccccggtctcgccccgcccctgggcttgttaccgcgggggcgggagtgagggtttcttctggggggagtggagatcgggggactcggcggtgccctctcgagcggcggccgtgtccccgcggcgccgggctgccgagcggaggcgcggcggccgtggctgttgcatgtgtggctgctggatgcggaggcggcggcggcggcggcggcgaggagcagcagcggcggcggcggcggcggcgaggagcagcagcggcggcaggatgttagggcagcagcagcagctgtactcgtcggccgcgctcctgaccggagagcggagccggctgctcacctgctacgtgcaggactacctggagtgtgtggagtcgctgccccacgacatgcagaggaacgtgtcggtgctgcgggagctggacaacaaataccaagaaactttaaaggaaattgatgatgtctatgaaaaatataagaaagaagacgattcaaaccagaaaaaacgcctacagcaacatctgcagagagcgttaatcaatagccaagaattgggagatgaaaaaattcagattgtcacgcaaatgctcgaattggtggaaaatcgggcaagacaaatggagcttcactcacagtgtttccaagatcctgctgaaagtgaccgagctgcagacaaagcaaagatggattctagtcaaccggaaagattctagaagacctcgaagacagcgcaccagtgagagccgtgacttatgtcacatgacaaatggaattgaagactgtgatgatcagccaccaaaagaaaagaaatccaaatctgctaagaaaaagaaacgctccaaggccaagcaggaaagggaagcctcacctgttgagtttgcaatagatcccaatgaaccaacttactgtttatgtaaccaagtgtcttacggggaaatgataggctgtgacaatgaacagtgtcccattgaatggtttcacttttcatgtgtttcactcacctacaaaccaaaggggaagtggtattgcccaaagtgcaggggagacaatgagaaaacaatggacaaaagtactgaaaagacaaaaaaggagagaagatcgaggtagtgaaggccatctgtgttttaaaaagggttgtttgtcttttatataactggtttactttcagaaaatgttttagggtaaatgcataagactatgcaattaatttttaatcattagtattaatggtgtattaaaagttcttgtactttttgaacattttaaagatgtgtcttgatattttccttgtgacccactgctgggacatttagccacagacctgtcagtgggaa

SEQ ID NO: 4290 - DNA, 1482 bp, Cricetulus griseus
gaatgtagatgtcaatgtgcaccccaccaagcatgaagtccactttctgcatgaggagagcatcctggagcgggtgcagcagcacgttgagggcaagctgttgggctccaattcgtccaggatgtatttcacccagaccttgcttccgggacttgctggaccctccggggaggtggttaaatccacagtgggtgtggcttcctcatctgctagtggaagtggtgacaaggtctacgcttaccagatggtccgcacagactcccgggaccagaagcttgacgcctttctccagcctgtgagcaaggttctgcccagcccaccccaggagcctgaggacgtggagatgttggagctcccaatcccctctgaagcagctgcctcaagtcagaacttggaggatacggtacaaggggttgcagaagcggcacagaaagcagcagccccttccagtccaagcaaccccagaaagagacatcgggaagattctgatgtggaaatgatggaaaatgactcccggaaggaaatgacagctgcttgtcaccctcggaggaggattattaacctcaccagtgtgttgagtctccaggaagaaattaatgagcgcggccatgagactctccgagagatgctccggaaccattcttttgtgggctgtgtgaatcctcagtgggccttggcacagcaccagaccaagctgtacctcctcaacaccaccaagcttagtgaagaactgttctaccagatactcatttatgattttgccaattttggtgttctgaggttatcggaaccagcgcctctctttgacctcgccatgctggccttagacagtcctgaaagtggctggacagaggaagatggccctaaggaaggacttgcagagtacattgttgagtttctgaagaagaaagctgagatgcttgcagactatttctctttggaaattgatgaggaaggaaacctgattggattaccccttctgattgacaactatgtaccccctttggagggactgcctctcttcatccttcgactggccacagaggtgaattgggatgaagagaaggaatgttttgaaagcctcagtaaagaatgtgctgtgttttactcggttcggaagcagtatatactggaggagtcaaccctctcaggccagcagagtgacatgcccggctccactccaaagccctggaagtggactgtggagcacattatctataaagccttccgctcacaccttctgcctccgaagcatttcacagaggatggaaacgtcctgcagcttgccaacctgccggacctatacaaagtctttgagaggtgttaagtccagtcatagccaccttagtgattgtgcactcaccgtccaagttgaagcatgcttgacggacaaggaagccactggatagtggccgtgctcaagggtttccagtgctcacagtttctgctttgtatcccagtgttgttgctgcaacttaatgt

SEQ ID NO: 4291 - DNA, 1482 bp, Cricetulus griseus
tcgctgttgccgctgctaccgttgagttgtgaggagcttagcggcagtccctactggccaccatgtccgcccaggcgcagatgcgggccctgctggaccagcttatgggcacggctcgggacggagatgaaaccagacagagggtcaagtttacagatgaccgagtctgcaagagtcaccttctggattgctgcccccatgacatccttgctgggacgcgcatggatttaggagaatgtaccaaaatccacgacttggccctccgagcagattatgaaattgcaagtaaagaaagagacctgttttttgaattagatgcaatggatcacttagagtccttcattgcagagtgtgaccggagaactgaacttgccaagaagcggctggcagaaacacaggaggagatcagtgcagaagtttctgcaaaggctgaaaaggtacatgagttgaatgaagaaataggaaaacttcttgctaaagcagagcaactaggagctgaaggaaatgtggatgagtcccagaagatccttatggaagtggaaaaagttcgtgcaaagaaaaaagaagcagaggaagaatatagaaattccatgcctgcatccagttttcaacagcaaaagctccgagtctgcgaggtttgttcagcttaccttggtctccatgacaatgaccgtcgtcttgcagatcacttcgggggcaagttacacttggggttcattcagatccgagagaagcttgatcagttgaggaaaactgtggccgaaaagcaggagaagagaaatcaggatcgcttgaggagaagagaggagagagagcgagaggagcggctgagcaggaggtctggatcaagaacccgagatcgcaggaggtcacgatcccgggatcggcgacggaggcgatctagatctacctcccgagagcggcgaaagttttcccgttccaggtctcgagatagacaccggcgacatcgcagtcgttcccggagccatagccggggtcaccgccgggcttccagggaccggagtgcaaaatacaagtaactactcagacttcctcagtagctgcagccaggagcaagccctttctcttgtgttttcaagtctgctggggtctgtcatgctggccttttggctactacatctagtagggacaaggttgggcttgtggggaggcaggctctggatgtttagaaccctgtgttggtgccctggttaataaagagtggcacccagtgcttggaatagtgtaaggctgttgagctctcacatggccctctgcggagaccactgcacttggctgggctttatgtactttaacttggtaaagagcagctaaggtttttgtcttgaacaggtcctgcttacttacctctcttgtaactttggttttgttttaagactaggccctcacttgtaacctaggttgcttgaactcaagatcctcctgcaaactttccttattaaaatcttttctttttaattt

SEQ ID NO: 4292 - DNA, 1482 bp, Cricetulus griseus
cggaagtgaaggcaggttcccgcctgcgtccccgccgccgccgccatacgcgctcgcagtgcttagctcttctgtcgggaaactggtgtctcttcccttgctgttcctcagccccctctctcccccttgctttctcaccttctctgggaccactcacccaaagacctcccttctcccctgccggcccaattatggcagagaatgatgtggacaatgagctcttggactatgaagacgacgaggtggagacagcagcaggtggagatgggacggaagctcctgccaagaaagacgtgaagggctcctacgtctccatccacagctccggctttcgagacttcctgctcaagccagagttgctccgggccatcgtggactgtggctttgagcatccatcagaggtccagcatgaatgcatcccacaggccattctggggatggatgtcctgtgccaggccaagtcaggcatggggaagacagcagtgtttgtcctggccacactgcagcagctggagccaatcactgggcaggtgtctgtgctggtgatgtgtcacactagggagttggcttttcagatcagcaaggaatacgagcgcttctcaaagtacatgccgaatgtcaaggtggcagtgttttttggtggtctgtctatcaagaaggatgaagaggtgctgaagaagaactgcccacacatcgtcgtggggactcctggccgaattctagccctggctcgaaataagagcctgaacctcaagcacattaaacactttatcttggacgaatgtgacaagatgcttgaacagctcgacatgcgtcgggatgtccaggaaatttttcgcatgaccccccatgagaagcaggtcatgatgttcagtgctaccttgagcaaagagatccggccagtctgccgcaagttcatgcaagatcctatggagatcttcgtggatgatgagaccaagttgacgctgcacgggttgcagcaatactacgtgaaactgaaggacaacgagaagaaccggaagctctttgaccttctcgatgtcctcgagttcaaccaggtggtgatctttgtgaagtccgtgcagcggtgcatcgccctggcccagcttctggtggagcagaacttccccgccattgctatccaccgcggcatgccccaggaggagaggctctctcggtatcagcagttcaaggatttccagcggaggattcttgtggccaccaacctgtttggtcgaggcatggacattgagcgtgtgaacatcgccttcaactatgacatgccagaggactcagacacctacctgcaccgggtggccagagcaggccggtttggcaccaagggcttggccatcacatttgtgtcagatgagaatgatgctaagatcctcaatgacgtgcaggaccgctttgaggtcaacatcagtgagctccccgatgagatcgacatctcctcctacattgaacagacacggtagagga

SEQ ID NO: 4293 - DNA, 1482 bp, Cricetulus griseus
gctttctcttcttgggcgtgctggtgtccatcatcatgctgagccccggagtggagagtcagctttacaagctaccctgggtgtgtgaagacacgacccagcaacccgtggtcctgcacggccccctggactgcggctccctgctgggtttccgcgctgtctaccgcatgtgcttcgccaccgcggcctttttcttcttcttcatgctggtcatgatctgtgtccgcagcagccgggacccgcgagcggccatccagaatgggttttggtttttaaattcctgatcctcgtgggtatcactgtgggtgccttctacatccctgatggctcctttcccaagatctggttctactttggcgtcgtgggctccttcctcttcatcctcatacagctgatcctgttcattgactttgcccactcctggaatcagcggtggctgtgcaaggccgaggagtgtgactccccagcctggtacgcaggccttttcttcttcacactcctcttctatctgctgtccattgctgctgtggcattgatgttcatctactacacggagcctggtgcctgccatgagggcaaggtcttcatcagcctcaacctcaccttctgcgtctgtgtctccattgttgctgtcctgcccaaggtccagaatgcccagcccaactcaggtctgctgcaggcatccatcgtcacactgtacaccatgtttgtcacctggttggccctatccaacgtccccgaccaaaaatgcaaccctcacctgcctactaaaaatggaacaagccaggtggacctggaggattacagcaccatgtggtgggatgccccgagcatcgtgggccttgtcgtcttcctcctgtgcaccttcttcattagcctgcgatcctctgaccaccggcaggtgaacagcctgatgcagacggaggagtgtcccgtggagactgtgcagcagcagcaggtggccgtcagtgggggccgagcctatgacaacgagcaggatggtgtcacctacagctattccttcttccacttctgcctggtgctggcctctctgcatgtcatgatgacactcaccaactggtacagccctggtgagacccggaagatgatcagcacgtggacctccgtgtgggtgaagatctgtgccagctgggcggggctgttgctctacctgtggaccctggtggcccccctgctcctgcccgacagagacttcagctgagaaggccctgcagcctgcccacctggtgccttgggactcaacaagggccagcccacccttggccacacccacccaccctcttccagggcctgcccgagtcaggcccctccattctcagtgcctccagggtctgtgggacattgtgctcaagtcccagctccccctgcccatggccatgcacactcacccttgggacagaagtaacccttgttctcagggtccccagaagagggcatggaaggagagagtggcccagagct

SEQ ID NO: 4294 - DNA, 1482 bp, Cricetulus griseus
gtttggagcatgtggacatactctgagccttgatgagttccagtatgtggtacattatgcagagcattcagagcaaatactccctctcagaacgcctgatccgaacaatcgctgccatccgctccttcccacatgacaacgtagaggatctcatcagagggggagcagacgtgaactgcacccacggcacactggaagccccgtgcactgcgcctgcatggtgtcagatgcggactgtgtggagttactcctagaaaagggagcagaggtcaatgctctggatggttacaaccgaacagccctccactatgctgcagagaaagatgaggcttgtgtggaggtcctgttggaatatggtgcaaaccccaatgcactggatggcaacagagacaccccgcttcactgggcagcctttaagaacaatcatgaatgtgtacgcactctcctagagagtggagcctctgtcaatgccctggattacaacaacgatacaccactcagttgggctgccatgaagggaaatcttgagagtgtcagcatccttcttgaatatggtgctgaggtcaaagtcatcaacttgaaaggccagacacccatctcccgcctggtggctctgctagttagaggacttggaacaaagaaagaagactcctgctttgagctcctccatagagctgttggacactttgaattaaggaaaaatggcaccatgccaagagaagtgaccaaagaccagcagctatgtgaaaaactgactgtattgtgctcagcaccaggaactcttaagacacttgcccgctatgctgtacgccatagcctaggtcctctctacctgcccaatgcggtgaaaggtcttccactgccagcttctttgaaggactacctattactcatagaatagcctggaggagacatgtccgccatcatgcagacaactctgggtgaggtccttgccatcctgtctctttctcatggaacacagaagagagcctgttcctgccatgtggtttatgggttttttgaggcagcacatcacagcagtaatgtgtgcaccgtctcccctcctcataccaagcaaccaaacccaaattgtttgttttttggtttttgtttgtttgtttgttttccctttccctcttggaacttttgctttttattgagctatagaaaatggtagggaaagtggaactgggaacagaatataaaatgggcttctttggaattggcctgcctacccaaaaaggacctgtttcagtgaacaatattcttccttttcatgttcttaaactagatgaagttgatactgaccttaagttatctgtatgcaagtttggaaagcactttttaaaaagctggctggaactacccccagatgaatagggcagtctggcacagctaacttgaaacactatgcctgcttttgtccttccctgttgccggggtttgcccatttgaaaaagaataaataaataattctagaag

SEQ ID NO: 4295 - DNA, 1482 bp, Cricetulus griseus
atggcgtccgccctggagcagttcgtgaacagtgtccgacagctctcagcgcaagggcaaatgactcagctctgtgagctgatcaacaagagtggagagctccttgcgaagaacttgtcccacttggacactgtgcttggggctctagatgttcaagaacactccttgggtgtccttgctgttctgtttgtgaagttttcaatgcccagtgttcctgactttgaaaccctgttctcacaggttcagcttttcattagtacatgtaatggcgagcacattcgatatgcaacagatacgtttgctgggctttgccatcagctaacaaatgcacttgtggaaagaaaacagccccttcgaggaattggcatccttaagcaagccatagacaagatgcagatgaatacaaaccagctgacctcagtacatgccgatctctgccagctttgtttactagcgaagtgctttaaacctgcccttccatatcttgatgtggatatgatggatatctgtaaagagaatggagcctatgatgcaaaacactttctgtgctactattattatggaggaatgatctatacggggctgaagaactttgaaagagcactctacttttatgagcaggctattactactcctgccatggctgtcagccacatcatgttggaatcctataaaaagtatattttagtgtctttgatattacttggcaaagtacaacagctgcctaaatacacatctcagattgtgggtagatttattaagcctctcagcaatgcttaccatgagttagcacaagtttattcaaccaataacccatcggagctccggaacctggtgaacaagcacagtgaaactttcactcgagataacaacatgggcctggtgaagcagtgcctgtcatctctctataagaagaacatccagaggctaacaaagacctttttaacactgtcattacaagatatggcaagtcgtgtgcagttatctggacctcaggaggcagaaaaatatgttctacacatgatagaagatggagaaatttttgcaagtattaatcagaaggatggtatggtcagtttccatgataatcctgaaaaatacaataacccagccatgcttcataacattgatcaagagatgctaaagtgcatagagctggatgagcggctgaaggccatggaccaggagatcacagtgaatccccagttcgttcaaaagagtatgggctcacaagaagatgattcaggaaacaagccctccagttactcttgaaactaacgcccatcctgagttaacagaattgtcaccttggcctggtgagtgtgaagagggcagcaggaagtgccatgccagtcccatgccggttccacctggacattcagaaattcagttttaacatcttcagtcctattgctttcagaaaaccagtctctgcaaagaaaaaaaaaaaaaaatcaaactttagagtctgatgtggattta

SEQ ID NO: 4296 - DNA, 1481 bp, Cricetulus griseus
cttcccccgctgtcgcctcagcaccatggacgccaccaagcaagtggttaactttgggcccgggcctgccaagctgccacactcggtattgttagagatacagaaacagctagtagactacaaaggacttggcatcagtgtgcttgaaatgagtcacaggtcatcagattttgccaagattattaacaacacagagaatcttgtgagggaattgctagatgttcccaacaactacaaggtgatctttgtacaaggaggcgggtctggccaattcagtgctgtccccttaaatctgattggcttgaaagctggaaggtgtgctgactatgtggtgactggaacttggtcagctaaggctgcagaagaagccaagaagtttgggactgtgaatattgtccaccctaaacttggaagttacacaaaaattccagacccaagcacctggaacctcaacccggatgcctcctatgtgtacttctgtgcaaacgagactgtgcatggggtggagtttgacttcatacctgatgtcaagggagcagtgctggtctgtgacatgtcctcaaacttcttatccaggccagtggacgtttccaagtttggtgtgatttttgctggtgctcaaaagaatgttggctctgctggggtgacggtggtgatcgtccgtgatgacctgctgggcttcgcccttagagagtgtccttcggtccttgactacaaagtgcaggctgggaacaactctttgtataacacacctccgtgtttcagcatctacgtcatgggcatggtcctggaatggatcaagaacaatggtggagccacagccatggagaagctcagcttcgtcaaatcccaaatgatttatgagattattgataattctcaaggattttatgtgtgtccagtggaacgccagaatagaagcaggatgaatattccatttcgcattggcaatgccaaaggagacgaagctttagaaaagcgctttcttgataaggcggtggaactcaatatgatctccttgaagggacacaggtcagtgggaggcatccgtgcttctctgtataatgctgtcacaactgaagacgttgagaagctggctgccttcatgaagaattttttggagatgcatcagctgtgaacatgactagctatgctctgcctgtgagcagcacgcagagttcagaataacttctggttggctacaaaaacttaacagacatggattttttttccccaaacacatgcttgttacagattctttttgaaagaataatgactaaacatccagggctctgcagggcggatgagactaccagcttatgaccaccttcattttgacttgacctggaagcagtttcaaagctttcctgttgcttttctaacgaatccagcctggcatgtctctgcccctgtctctaggtggattgcctggatctgacagcagtgagtttgcgtggggttctgcagctattggttaaagt

SEQ ID NO: 4297 - DNA, 1481 bp, Cricetulus griseus
tatggcggcccacattggctcgatggccggctcgctgtgcgtccgctggtggagtaccgggtcgcttgcgaccggacgaggccctctggttgcctgtcggcgatgggcgggctcctcggccgacaccgtgtacgatgtggtggtgtcaggaggaggcctggtgggcgctgccatggcttgtgccttgggacatgatattaattttcgtgacaagaaaatcctgttgctggaagcaggtccaaaaaaagtactggagaaattgtcagaaacttacagcaacagagtcagctccatttcccctggttctgcaacccttctcagcagttttggtgcatgggaccatgtctgcaacatgcggtacaaagctttccggcgtatgcaggtgtgggattcctgctcagaagccttgataatgttcgataaggacaacttagatgacatgggctacatagtggaaaatgacgtcatcatgcatgctctcaccaagcagctagaggctgtggccgaccgagtgaaggttctctacgggagcaaagctgttggctatgcctggcctggtcctttttccatggcagactccagcccttgggtccatattaccctaggtgatggcagcaccctccagaccaaactgttgattggtgctgacgggcacaactcaggagtaaggcgagcttctgggatccagaatgtcagctggccctatgaccagtctgctgtggtggccactctgcatttatcagaggccacagaaaacaatgtagcctggcagagatttctccccgctgggcctattgctctgcttccgctctcggataccttgagttctttggtttggtccacatcacatgaccatgcagcagagctggtcagcatggatgaggaagagtttgtggatgccatcaactctgccttttggagtgatgctaaccacacagacttcgttgactcagccagcaccatgatgcgctatgttgtctcccttctgaagcccactaagttctcagctcgtcagctgcccccaagtatagccaaggtggatgctaaaagcagagccctctttcctctggggctgggacatgctgctgaatacgtccgacctcgggtggctctcattggtgatgcagcccacagagtccatccacttgcaggacaaggtgtcaacatgggcttcggggatatttccagcttggttcgtcatctcagttcagcagccttcaacgggaaggacttaggttccatgagccacctcacaggctatgaaacagacagacagcgtcataatactgctcttctggctgctactgacctattgaaaaggctctattcaaccaatgccactccactggtgctgctcaggacgtggggcttgcaggccactaacgcagtgtctcctctcaaagaacagataatggcctttgccagcaaatgagtgctcctcttctggagatcatgttgatgacaaagaacatttagcgctg

SEQ ID NO: 4298 - DNA, 1481 bp, Cricetulus griseus
cgggtctggatcctgcttcctcggccaccgctgctgccgccgccagccacgacaagggacccgaggccgaggagggcgtcgagctgcaggaaggcggggacggcccgggggccgaggagcagacggcggtggccatcgccagcgtccagcaggcggcgttcggcgaccacaacatccagtaccagttccgcacagagaataatggaggccaggtgacataccgcgtagtccaggtgactgatggtcagctggacggccagggcgacgcggctggcgccgtcagcgtcgtgtccaccgctgccttcgcggggggcagcaggctgtgagccaggtgggtgtggacggggcagcccagcgcccggcccggccgctgcctctgtacccccaggtcccgcggcacccttcccgctggctgtaattcaaaatccattcagcaatggtggcagcccggccgcagaagctgtcagcggggaggcacggtttgcatatttcccagcatccagtgtgggagataccacggctgtgtctgtgcagaccacagaccagagcctgcaggccggaggccagttctatgtcatgatgacaccccaggatgtacttcagacagggacacagaggacaattgcaccccggacacacccctattctccaaaaatcgatggaaccaggactcctcgagatgagagaagaagagctcagcacaatgaagtggagcggagacggagggacaagattaacaactggattgtccagctttcaaaaatcattccagattgtcacgcagacaacagcaagacaggagcgagtaaagggggcatcctgtccaaggcctgtgactatatccgggaactacgccagaccaaccagcgactgcaggagaccttcaaggaggccgagcggctgcagatggacaatgagctcctgaggcagcagatcgaggagctgaagaatgagaacgccctgcttcgagcccagctgcagcagcacaacctggaaatggtgggcgagagcacccggcagtgacgcccccggcccaccctgccgctgctggccgctgctgcccctcccccagcccttagcacagagagggaggcgcccctccccaagctgcgtttttatagtagatttttaacaaagacaaggagacataatgcatttctgtggatacattgcccactaccctgctccatgcagaaaacctgcccacctgcccagcctcccttctcagccctcaccagctcctcacttgtactgggctcacaggaggagcaagggaggaggacagaggccccgctgcccgctgcccccttggtctctagaggtattgagacagggtgcttatgggaaggagggagctttgggggtgccttccctggggcctggacctatgcagggaggccacgtccccacccctctcgtttctggatccctgctcccctctgggtgtgtgggtgtgtgtgtgtgtatgcgcgtgcgtgtgt

SEQ ID NO: 4299 - DNA, 1481 bp, Cricetulus griseus
gcggctgcgggcggcggcggcggcggcgcgctggaggcggccatggccaagcagtacgactcagtggaatgcccgttttgcgatgaggtcaccaaatacgaaaacttagccagatcggccaaggcacaccagaaggtggctctgaagaaagtgttgatggagaatgagaaggaggggttccctattacagccttgcgggaaatcaagattctacagctcctgaaacacgagaatgtggtcaacctaattgagatttgtcgaaccaaagcttccccctataaccgttgcaagggcagtatctatctggtgtttgacttctgtgagcatgaccttgctgggctgctgagcaacgtcttagtaaagttcacgctgtctgagatcaagagggtgatgcagatgctgctgaacggcctctactacatccacaggaacaagatcctgcacagggacatgaaggcggccaacgtgctcatcacccgggatggggtcttgaagctggcagattttgggctggcccgtgccttcagcctagccaagaacagccagcccaaccgctataccaaccgagtggtgacattgtggtaccggcccccagagctgttgctcggagagcgggactacggcccacccattgacctgtggggtgctgggtgcatcatggcagagatgtggactcgcagccctatcatgcagggcaacacggagcagcaccagcttgccctcatcagccagctctgtggctccatcaccccagaggtgtggccaaacgtagacaagtatgagctgtttgaaaagctagaactggtcaaaggccaaaagcggaaggtgaaggaccggctgaaggcctatgtacgtgacccctatgctctggacctcattgacaagctgctggtgctggaccctgcacaacgaattgacagtgacgacgccctcaaccatgacttcttctggtcagaccccatgccctcagacctaaagggcatgctgtctacccacttgacgtctatgtttgagtatctagcaccaccacgacgaaagggtagccagatcacccagcagtctaccaaccagagccgaaatccagccactaccaaccagacagaatttgagcgtgtcttctgaggcaggcactagggctcttcttaggttggtggtagattgcttcctctgctatgcctgcctgcccctctctggagggtctcagcttggacaggaagtgaggtggtaaaggcctcacccactgtgactttctaagaactcctggcacgatgggaggagggcacaggcccctcaccattcccagccctgcctggggatgagaaatttgagggacagaggcacctcagaaatgggctacttttggcagacctcgagcatggggctgataagaactcttgttttcttcaaaaggagaattttatcgtgtttgttcagttcagagacattcctgaatgcagtttgattggttaaaattaaaagtt

SEQ ID NO: 4300 - DNA, 1481 bp, Cricetulus griseus
agaggaaatagaagaaggaaactcacttgactcctcagtccagcaagtggtggggagtggaggccagagggtcattaccatagtgactgatggcgtccctctgggtaacatccaaacctcaatccctgctggaagcattggccagccctttattgtaactatgcaagatggacagcaagttctaactgtacctgctggtcaggttgcagaggagacaataattgaagatagaagaagaggaagaagagaagcagctggaaaactcagccaccttaagggcatctaagggaccaaaagaccaggaccaaatctctcagctcacatcattgctttaaacagagtactgggcattgcgggtctatttttttataactttattatcaaagaattttaagtatagtacatataatacatatacaccaagagccttaataattttaccttgagattttctaagtgacctgaaatttagtccctagatttatgaaactgataacagaagtaggaagcctcctcctgagggccaacctgggtctccagagtgagtgccgggacaggctccaaagctacacagagaaaccctgtctcaaaaaaaaactagcctcagactcacagctgtctttataccatggtctcccatgtcttgggattacagacatgagtcaccatgccagactggcgctagctccattttatgtggtgcctccacccctttcagagttcatactctatttcctgtcactttacttaacaggagaccaaaagcaaggacatgcgttagaattaatagctttgtgcctctggtgctgtccatttaaaggttttaacctctctagggctagggggaagaagatattcctaaactctgtagtagtaatttggcttgtcagtagcaggaaattgtgatctccgtgtcttccctgcccctaccccactactactgtctctgccgtcccacggctctcgtcttcggaaggcttggccagcactggaacataattagtcggtcatctctaactgtgggactccttgtcttgctctccttcccaaccacatattttgttctgagatgatttgtttcggggaattaactaggtcatactctctatctatgttcccacttggtttctgaagtcttgcaatgtcaactgttacagtagcaactccactccctggccttgcccaatgtgtctttctgccaaggccatgtagaggtgggtgcccaagaaacttcacagtgtcctcttgtttttcagattgtctgacagctttatttacagtaaaattttaggaaacacttaaataaaatattcttttatttagggtaaatagttccattgtgatgagcaagcttgtgtgtacatgtgtgtgaatgagccatttatgtacatataccaatacagatctatattatatatacacagttttgtactatcatttaaaataaagacatttcttaataaaaaaaaaaaaaaaaaaaa

SEQ ID NO: 4301 - DNA, 1481 bp, Cricetulus griseus
  modified_base (1471)..(1471): a, c, t, g, unknown or other
gaggaggaggaggaggaaggaagagggggcgtgccccatcctgcagccccaccagcgcgctcctggagaacatgcacgttgagcagctagcccgatgccttccagccagggtacaaggctatccatggagactggcatacagcacaatagaacatggaacaagcttgaaaactctctacaggaaatcagcatctttagatagtcctgttctactggtcatcaaagacatggataaccagagcatatgcaactcatcccttcaagttcagtgaccactattacggcacaggcgagacctttctctacaccttcagtcctaatttcaaggtctttaagtggagtggtgaaaactcatattttatcaatggagacatcagttctttagaactcggtggtggagggggacggtttggtctgtggctagatgctgacttataccatggacgcagtaactcttgcagcacttttaataatgatatcctctccaaaaaaagaagacttcatagttcaggacctagaggtatggacatttgagtgacatttaggctgccttaacacataatattaaaaagactgggttagacaagccctcttactggaagaagagccccagccctggctgcctcatcctacagcaatgctttctttctgccatcatctcagagcatgataacaatgcagaaagattctgaaaggtacccactgagggcagatgctgaagacagaaatctgaagtccagagactgtggacttccactgctttcaaatccacatcttgagaaaacagagtgtttatagatgtatgagttgaatgcaatttttatttttggtaactgtgaaaaaaaaatactgtggaaatatatacctgccttgtgtatttatcaacataatttaccaaatgtatagttattgtttgccatggatggaaagctgaatctgatttagaagaactgaaaggacgtggacaacttaaagggaatacctgactttttaactcttttatttattatttctagtatattgtcagaaatatgttgccctgttataaaagccaaagactactaatgggaaaaattaaataatagccaaagctgaaaagtagtctatcacaaatgatttctccagtgattattaaaaggaaaattagcacactgtgtttacatatctgtttacattaagaatattttctttaaagttttattccattttagactccttataagaaacaaattgtccagtggcctctgtcaggtcaacaattgttatactcactgccattccatgctagtttaaatgaatgctctaaaattttaaatctgtagaccaggcacactttttcaccgagattctcccattgagattcttggttaaaacacacataatttgaacttggtctgctcatacacatgagttggtgagatcccaggaatatcttgtggtgattatgttcacttcagtgtgtaaaaaaaanaaaaaaaaaa

SEQ ID NO: 4302 - DNA, 1481 bp, Cricetulus griseus
tgagaaaattgttttcatcccaaaatatcgttagaaaagacagtcccagcgctcggaggcttagctgacaggaggggaagggtgcgtggctgcgagactcagaaccactgggagccctgaagccagtgttggccccggcgccccacgagcgcgcgattcctccccggcccgagcatgggaaccccgaaaccgcggatcttgccctggctggtgtcgcagctggacctggggcagctgaaaggcgtggcctggctggatgagagccgcactcggttccggatcccctggaagcatggcctgcggcaggacgcccagatggctgactttggcatcttccaggcctgggccgaagccagtggtgcctacaccccaggaaaggataagccagacctgtcaacctggaagaggaacttccggtcagccctgaaccggaaagaagtgttgcgattagctgatgacaagagcaaggacccttttgatcctcataaagtgtatgagtttgtgactccagcagcaagagactttgtacatctggacacctctcctgataccaatggcaaaagcagtctgtctgatccccaggaagacctcttggaattactggatggcatgatcttggaacccctcctccaggatggggggtcctcaggagaggctattgctcctgatcactctcaactactgccaagccccaatttggacaacatcctaaacatggcaccccaggaaaacccactgaggcagctgctagctgaggaacaatgggagttcgaagtgaccgctttctatcgaggccgccaggtcttccagcagacactcttttgcccaggaggcctgcggctggtgggcaccacagccgataacaggacactgcctgggcagccagtcaccctgccagaccctgaggagtttctgacagacaggcttgcgagggagtacgtgaggcatgtactcaaggggctgggcaaggggctggcactgtggaggtcagggcagtgtctctgggcccagcgtctgggccactcccattccttctgggctctgggtgaggagctgcttccagacagtgggcgagggcctgacggagaggtccccaaggacaaggatggaggcgtgttcgaccttgggccctttgtagcagatctgattgccttcatggaaggaagtggacactccccacgctacactctgtggttctgtgtaggggagacgtggccccaggaccagccgtgggtcaagaggcttgtgatggtcaaggttgtccccacatgtcttaaggagctgttagagatggcccgggaagggggagcctcctcactgagaaccgtggacttgcacatctccaacagccagcctgtctccctcacttctgaccaatacaaggcctacctccaggacttggtggaggacatggacttccaggccactggagacacctaagccctgcttagctgccaccaataaagcagtttatgccacca

SEQ ID NO: 4303 - DNA, 1481 bp, Cricetulus griseus
cctgggggcctgtccctggttggccgaagtgctgggggggagccagggcctgaggctggcagggcagctgacagtggtgaacggcctctggcaaccagcccacctgggaccgtgaagtcagaggagcaccaacggcagaatattaacaaatttgaacgcagacaagcccgacccccagatgcctctgcagctcggggtggtgaggaggccaatgacctgcaacagaagctggaagaagtgcggcaacccccaccccgggtccgaccagtcccttccctggtgcctcgcccccccaaacatcactggtcaagtttgtggggaacatctataccctcaagtgcaggttctgtgaagtggaattccagggcccactctccatccaggaagattgggtgcggcatttacagcggcacatcctggagatgaacttctccaaagcagaccctccgcctgaggagccccaggcgccacaggcacagacagccgctgtcgaggcgccctaacgtacaagcattccagatccctcttgtaccgcctgtccctcctgtttctctttgtcctcttcccccattccctctttcgtttccgtttccaaaggagcaagccaaaacctcaaaccggcgccctttgggggccgggcacactacaacctgggcgccgggagccagctagccaccctccccctagcctgaggactctggggccacaagggtaccctccttgagcccacctggttggtccagcaggggttgtagccaggcctttggtggtggccaatctggttacaggggagaacagcacttccctgtgtctagcgaccaggcagggctatgtctgccatccgtggccatttgcaaagaccccaaagacccctgtttcctcttgtccccatgaatatctgcacccactcatgcacaggcaaacgcacccgcacacgcacacgcacctcgtgagacttgggatctgttctagcccccacagttcccaagtcaaacgaccaaccacatcatgccacggtgcttgctcaggggaatccacgctccctctgctaacccactagggcctgggagcccccactgagcccacaatgccacggaaactcttgttagctgccccccaaaaaggggccttcctagcttggaaagagctcagagctgacagctgcctcctgccatgtcagagcctcaggggctccagggctgggagggtagagtgaggggtgggactctcctcccccacccctaccaccctccccttttcactgttgctttctatgtatagctccctagatctttcacttttttaaaaaatgcgttttgtgtagagaataaggaacgtggatctttttattttgcaatcctgggctagctagataccgggagctaattgaccttttaacctttttcagtggccatcttttggttaacaatgtacctagaaatatgtaaattagattaaatttctcttctggaaatacccca

SEQ ID NO: 4304 - DNA, 1480 bp, Cricetulus griseus
  modified_base (255)..(255): a, c, t, g, unknown or other
cgggcctcgcccgccacgcagccgccgccgctgctgcctccctcggccacgggtcccgacgcgactgtggtcggatcggcgtccgaccccgctgctgcccccgtcagccacagccgcggccaagatggagccggagaataagtacctgcccgaactcatggctgagaaggactccctcgacccgtctttcactcacgccatgcagctgttgtccgtagaaattgagaagattcagaagggtgagtcaaaaaaagntgacgaggagaattacttggatttgttttctcataagaacatgaagctgaaagaacgggtactgatacctgtcaagcagtatccaaagttcaattttgtggggaagattcttggaccacaaggaaatacaatcaaaagacttcaagaagagactggtgcaaagatctctgtcttggggaagggttcaatgagagacaaagccaaggaggaagaacttcgaaagggtggagaccctaaatatgcccatttaaatatggatctccacgtcttcattgaagtctttggacccccttgtgaagcttatgctcttatggcccatgctatggaggaagtcaagaaatttctagtaccagatatgatggatgatatctgccaggagcaatttctagaattgtcctacttgaatggagttcctgaaccctctcgtggtcgtggggtaccagtgagaggaagaggagctgcccctcctcctccacctgttcccaggggtcgtggtgttggaccacctcgaggagctttggtccgtggaaccccagtaagaggctccatcaccagaggtgccactgtgactcgaggagtgccacccccacccaccgtgagaggtgctccaacacccagagctcggacagcaggcatccagagaatacctttacctccacctcctgcaccagagacatatgaagactatggatatgacgatacatatgcagaccagagttatgaaggatatgaaggctattacagccagagccaaggggagtcagaatattatgactatggacatggggaggttcaagattcttatgaagcttatggacaagatgactggaatgggaccaggccatcactgaaggcccccccagctaggccagtgaagggatcatacagagagcacccatatggacgttattaaaaacaaacaggaggggaaaatatcagttatgagcaaagttgttactgatttcttgtatcccaggattcctgttgctttacccacaacagacaagtaattgtctaagtgtttttcttcgtggtccctttcttttcccaaccttcctccattcttaactctgcattctggcttctgtatgtagtattttaaaatgagttaaaatagatttaggatatcgaattaattttttaagtgtgtagatgcttttttctttgttgtttaaatataaacagtgtaccttttataataaaagaagttgagtaaaaaaaaaac

SEQ ID NO: 4305 - DNA, 1480 bp, Cricetulus griseus
cgcgcgtggtctggaaagaggcctgttacccttgaagaatggcagaggcagtcttccgtgccccgaagaggaaaagaagagtatatgagcgttatgagtcaccactgcccatcccctttggtcaggaccaaggtcccaggaaggaattccgaatattccgagctgaaatgattagcaacaacgtggtagtcagggacgcagaggacatggagcagctgtatggaagggttactttggaaaaggcattctttcaagaagccgtccaaacttcacaatctccaatcccaagctggctgccagatggaaaggtgtgcagacagatatgcctataatcacctcagagaagtatcagcatcgagtggaatgggccatggatttcatgcgtaggcaaggccaggaggagagcactgtgcaaaagatcttgacagactacacagagccacttgagctcccttgcagaaaagggaaagaagaggtccctcagcatgacccgctcaactctgaggccaactccaccctagaaggcagagtgggaaaggacgaactctctgttaccactggaggtgctggacagtcagatgacttgcagggtctcaacacacactcagactgcctgcaagaggggcctggccaagccacactcaccgtggctagtccatctagctttaatggacatgtgatagaagacaccacagttctgccccaggtcccctgccgtattgctcaggatggcctttggcctgaagacagcagccaggcagcaggagagaaaagggctgctcatgagtatgtactcgtagaggaagagctgtgtgatgtccaggaggaagacgaggccccagatgagaagttgctgcaaagaaagagactggtgtgcagaagaaatccatacaggatctttgagtatctacagctcagcctagaagaggctttcttcctgacatacgccctgggatgtttaagtatttactatgagaaggagcctttaacaatagcaaagctctggcaagccttcactgcagtccagcccaccttcaggactacctacatggcttaccattacttccgaagcaaaggctgggtgcccaaagtggggctcaagtatggaaccgatctgttgctgtatcggaaaggccctccattttaccacgcaagctattctgtcatcgttgagctagtagacgacaactttgagggctccctccgaagacctttcagctggaagtcactggccgccttgagcagagtctcaggcaacgtctctaaggagctgatgctgtgctacttgattaagccctctaccatgactagcgaagacatggaaaccccagagtgcatgaagaggatacaggttcaggaggtgattctcagccgttgggtttcttcacgagagagaagtgaccaagatgagctttgacctttcagcctcagactcctcagttcactgagaagtcaaaaaaaaaaaaaaaaaaaaaaaaaa

SEQ ID NO: 4306 - DNA, 1480 bp, Cricetulus griseus
aaaaacctcaagatgatgataatcttgggagtgatttgcgccatcatcctcatcatcatcatcgtttacttcagcacttaaaatccctgaggagtctgccctgcctaagaagggcctctctcccacccccagccgttcctccacctctcagccatatctttcagcccccctcccttggatccgtgtgtgtgtgtgtccgtgtgtgtgccccctgtaaatagccactctctctcatcctctgtccccttttcctcttctcctgatagccctaagtcccttcatttgcatctgctaatgcaatagccccttttcttcccttggatttaactgacccttcccctagcttccctaaacaattcctgaccctcccaagacaaaaaagcaaacctccacagaaacaaacaaacactcctacctgctttcttttctgaagagttagtctccattggtcctctaatcacacttcatttgcacgacattacctgcaggtggtggggagcctgggcttttggggaaccaggctctgggccccagaattgccccctcccagcccctctagtctagtttacctcctttaccccattttccaaacctgttgtaccctcctctccctcccccagccggtgtgtaagtgtcttggagttcagtgtgtcatgatggaccaataattctgccactcggagtctctccctacattcctgctccccagttttcatgtggggcactcaactgacattcccagggggtctccctccctcccatctgcctgatttgcctcctcctcccaccaggagaattggggattgaccacaatctgattctttgaggaggggtggctccagtgtgtgtgtgtcatcactgccttggggaggagtaggacaaaatagaatccccccaattcctgcctgaaacctctggcctcatcttgctagaggtcggactgaaaactttcctccccaatctggggaggggtgttgcccccatcactgcccagctcctttgactgcccccctgtattcagggcgggggtattagtcactgccaatatgtgtatgggacttgctggatgatggggatcctggcctttctccagggctgttgagcccagagagagagggggagagagagagagtgcaagctattccctttttgggtgaaatgacagaggaaggatctgatcttttttaaatggcacagtttttaggggtctgagggtatacagctccttaacctgccaacgggggggggaagatacccacagacttccccccacacaaaggttttctgtgtggaggggaaccaaggagatctaaactgtggtgtgaaagggtaggagagatgctgggggtgggggtgcttgtgttctagacccccaatattatcccagtgtcccctgccttccttcttcccctaccccatgcccccgattctgtggcgcatccagattgtgaaaatgtacaataaacgtgtaatgaagtaa

SEQ ID NO: 4307 - DNA, 1480 bp, Cricetulus griseus
tcagaaggtgctgagttacctgcagactggagtattaaaacccgactccttgtcacctctcatcagcccttttcctgggcagaccatttgaaggcccaggaagaagcccgaggtctcgtccagcattgtagggcagcagaagttactttaccccagagtgtacaggatcccaaactctcaactgagctacgttgtgccttccagcagacccttgtctactggcttcaccctgccttttcatggctgccactattccctcgaattggagctgataggaaaatggctggaaagacaagtccgtggtcaacggatgaaactctgcaacatactctcatgagtgactggtctgtgagttttacttctttgtataatctgttgaagacaaagctttgcccctttttctacgtttgtacctaccagtttactgtcctgttccgggcagccgggttagccggaagtgaggtgatcacagcactcatatcgcctacaactagaggtctaagagaagctatgaaaaatgaaggtattgaattctctctgcctttgctagaagaaagtggccataagagaaaagtacgagaagcgaccctggaatgtgaggaggagcaagctgtcagtgatgaagatgaagaggagagcttttcttggctggaagagataggtgtgcaggatcaaattaaaaagccagacatgaactctatcaagctacttagagaaaaacatgaagggcaaatggatcatagacctgaatctgttgtcctggtgaaaggactcaacaccttcacattgctcaattttttgatgaactgcaagagcttagtggccacctcgggagcacaggcaggcctccctcccactcttttatccccggtggccttccgaggtgcctccatgcaaatgctgaaagcacggagcatgaatgtaaagacacacgctctttctggatacagagatcagtttagtttggagatcacaggtcccatcatgcctcatgctctgcattctgtgaccacgctactccgctcttcacagaggggatctttctcagctgggttgtatgcccatgagccaactgcagtgttcaatgtctgcctgccactggatagagacctgcacagaaaagttgctcataaggaccttgctaactgtgggctgcaccccaaaaccctggagcagctcagtcaaataccattgctggggaagtcttccttacggaatgtcgaaatgagtgactacatttttaattggagatcgtgaacaccaaagtaagcctaaagggaaactgaggaaaagcttcctagcaaggaaggaaattgacgatttttaagcctgtggctcttaaaagttcattttggaagaatatgttttaaaatgctgatgtgtttttaacattaacttttattacatgctttagcattaggtttaaaatcaacattttgcttttattatttttatgcattttcagatctgaagatgcaag

SEQ ID NO: 4308 - DNA, 1479 bp, Cricetulus griseus
accagacgcactgaggccttggagcgggagctggaaatagggcaagactgcctggaactggagttaggccagagtcgtgaagaactggacaagtttaaagacaaattccgcaggctgcagaacagctacacagcttcccagcggaccaaccaggagctggaggacaagttgcacacactgatcaagaaggctgagatggacagaaagaccctggactgggagattgtggagctgacaaacaagctgctggatgccaggaacaccatcaacaagctggaggagctcaatgagcgctaccggctggactgcaacttggctgtgcagctgctcaagtgcaacaaatcccacttccggaagcacaagtttgctgatctgccctgtgagctacaggacatggttaggagacatctgcgtgatggtcaagaggctgccagccccagccccagccctccttccagcctggccgcaggggccgtggtgcccacctcagtcatcgcccgggtgttggagaacccgagtctctcctgctcaattcagcccagtcagccagttctcggccgcccctggctgaggatgtattcgtgcatgtggacatgagttggggcaatggggactgctgctctgtgagtactgcaggaggctccccagaggaggagctgcccctgccagcctttgagaagttgagtccctaccctaccccatctccaccacacccattgtatcctggccggaaggtaatagagttttctgaggataagattcgaattcctcgaaacagccccctgcccaactgtacttatgccactcgccaggccatctccctgagcctggtggaggaggggagtgagcgggtccaccgcagcccagtgcctagcaaccctgcctcagcccaaggctcaccccatcaccagcctagtccagccccctcagcactcagtgccccagccagctctgccagctctgaggaggacctgctggccagctggcagcgtgcgtttgtggaccgcaccccgccccctgctgctgtggcccagcgcacagcctttggacgagatgcactcactgaactacagctacacttctcccccagtcactctgaggccccaccgccttccccacaccatgagagtggacttctgttaccaacagagcctgactctggctttcccagggaagaggaagaggaagtgctgaacctgcctgtcagccctgaggaagagcgccagagcctgcttcctgctaatgagggcacagaggaaggaccaagtgcttcccatattgatggcaaggcctggccactccccagttccagccgcccccaacgcagccccaagagaatgggagtacaccacctgcaccgcaaggacagcctaacgcaggcgcaggaacagggcaccctactcagctaagcccgcctgccttgctgctatcacctctcggggctacacatggctcctgaactctttgctcagacctggg

SEQ ID NO: 4309 - DNA, 1479 bp, Cricetulus griseus
  modified_base (536)..(536): a, c, t, g, unknown or other
caagaaattccagttcatatcaaagcatgtggaagatgaggacagtgatctgaaggaatgtgggaagcaggggtttgggcagatctgcagtgatagctcttcatgcaactacttggcctctagaagctcctggaactgtgatggagagatcctgcacagctctgccatcgaggtcagggtccactgccagctggtgcgcctctttgctcggggaattgaagaagtgtcttaagcaagagtcccaaagctgagaagccagctaccttgagcttgggagtgtgaaagttacttaagaaaaattctacagaccaattatgttgacatatccatttagatttagagatttattttgataggtaaatcttggttttagaaaagacagctttgtcaataattccatatacatacctggcaccctcggccttctctttacaccaaccttcatttatgatcaggatattgtcaagtggcccctgccgtatgccacaactgtaactcaatacagtgaggtcctccgcacagctgagcctccaganaggggccacatcactgcaagaagacaccgaaggtgacgtctcatcctcaggattctccacctctgctgccatcacagctgcatcctgtgaaacaatctagcgaagtacccactggaagtttcattctgtcaaccctggtagcctgtacactctggccagggcagtctgtcaatcactggccaaaaggaggctccatttagaatcaaagcacttggcacagctgggctttgcggggttgggggtgggcagagggcaactggcatgcatagagagtactttgagggtgctatacaaccctcagcctgaatgtcaccagtgggatggtgggttctgtttagcattcagtcccatccagataaaaagaggggcgtcaggacctgaggcagctgtgggtgctcctgactctcaggaatggcactctcccacaaggattcaggtcttcattggccttgctacacgctgcccatgccctagttcacccctgccactgccagttctacaggaggggatccagacagaggatactttgatagggtttagcagtacaagccacgttcagaatctcaagccttggcactatcatggagcatcatcatgagtgtcaagatacttatgacctttgacacttgtgcacaggataggagggagccccctgacattcccaagcagcagactatggtctccatgatgctttttagatgtgatatcccaaccccaggccttaggtattttaggagaaaaaagactaggagtaaagattagacagtggcaacttaggatcctgcagggggtctggtccatgttttaactcggagcactgacatgaggatggccgaatatgcctcctgatcttgctggcttcaagattagcaagtggcgtatttgatctgatatgtttgagaagacaaaaaaatataaagttaactttgggcagaaaaaaaaa

SEQ ID NO: 4310 - DNA, 1479 bp, Cricetulus griseus
gaccgcaggctcgcaccccggccatgtctaccttggaggctgcaaccacggcagacgccgccgagaccagctgcaggcccaagtccaacagtccgcgcacgatcccggtgattggggtggtgaccccgcaagaggatgtgcagggtattttcaagtctatggaccttaatcgcatcatcagactccttgaagtaaatgataaggatgacttagaagaaaaacaacttaatagtgtcacaaacctggtacaatattatcagaatggatttcctctaagggacctggcacaggtgtttaaaaatcctgagtctgtgcgcagataaaattagaaaagacaagcccctgtctttgtggaacccgcgtctgacctcataaaaactgtagtggcttgcctactttggaacttactggaaaaatcctcaaaggaggaattatacaacagcttagtaacttggaatgactgctggctttgaaagaagtatttaaaaatctgtttaccaagggccaaagtcattatgaccgtcagcttagaaatgatatattagttatcaccacaattatagctcagaaccctggagcaccaatgattgaatgtggctttaccagagatttgatactgtttgcaactttcaatgaagttaaaagtcaaaatcctttggtaaaaagtcttaagctttctaattcctatgaagattttgagttgaagaaattgctattcaatataattgtgatcttgtgtaaagatttaactactatacagctattaatcgatggcaaagttattttggcgctgtttacctatgtcaaaaagcctgagagactcaagatcatcgagtggtctgcggcgcagtatgaagagctacaactgcacgcgattgccaccttgtcctcagtggcgcctttgaagatggttgctaccctgcaaagtgagatgattgaaagccaagcacgccaagatgtgcaaaacgagcaaagagtatatgcaaagatacaggccacgcacaagcaaaagagaactggctaataaatcatgggaaaacttcttggctagaacatcaaatgctaaaacactaaagaaagcaaaagcgctccaggaaaaggctatagaatcctctaaatacagtgaacgaccaacaaaatgcactatttcaccaaacagttattaaaggccttaacacaacggtaccttcaggtcgggtggtgacagtggaaagcactcctactcggttactgggaggacctctggctgacacagacatggctcttaaaagactgcctgttcgaggaggagccttgcagagggtgaaagtgaagacactgaatgagccaaaaaagaccgcccctatctgataggctccagacctttatgaaatacgttctacttagaactgtttagctgaatgtatatttatatacaaatgtaaggcaaaaggttagaataaatattttagaaaatattataaaattaaagtcaggata

SEQ ID NO: 4311 - DNA, 1479 bp, Cricetulus griseus
gcggagccggagacaagagcagaggccgaactcgggatctgacaagatggccgggctgccccgcaggatcattaaggaaacccagcgtttgctggcagaaccagttcctggcattaaagcagaaccagatgagagcaacgcccgttattttcatgtggtcattgctggcccccaggattccccctttgagggagggacttttaaacttgaactattccttccagaagaatacccaatggcagcacctaaagtacgtttcatgaccaaaatttatcatcctaatgtagacaagttgggaagaatatgtttagatattttgaaagataagtggtccccagcactgcagattcgcacagttctgctatcaatccaggctttgttaagtgctcctaatccagatgatccgttagcaaatgatgtagccgagcagtggaagaccaatgaagcccaagccatagaaacagcgagagcatggactaggctatatgccatgaataatatttaagtcgatcagatcatcaagtgtacatcacttctcctgttctgccaagactcttcctttttttgtttgcatttaatggacacagtcttagaaacattacagaataaaagcccagacatcttcatctttggtgattacatgcacattagcaaatctatgtcttgtcctgattcactgttgtaaagcatgagcagaggctagaagtatcatctgggttgttgtgaaatgtttaaaagcagtgactctgcttggattcgtttccccatcatggtttaagtacaaagcactgtgaatgaaggtagttgtcagggttagctgcccaggggtatgggtgtttttattttatttttagggggaaaatagttttatttaattttatggtctcctttcccctccctctcttttgggatctaattgccgtggttaaatgcagctaaccagttttttagaatatgctctctagccaagtctaactttagacgctgtagatggacaagcttgattgtctgaaccaaaatgggaacattaaataaacatcacagccctcactaataacattgtgactttgctgttaagtgtagattctctgccccacccccaaaaagaagaaaaaaagcttgtgaccattttgtatggcttgtctggaaacttctgtaaatcttatgttttagtaaaatattttttgttattactacttttgccttttgtactagtttattttactgttgtttatttcactttcccaatgtgacaatcgtatttaaaattaaaactgatggaaacattcagaattatctattaaaatttacattttctaacatgtaagagcttttgatgactggtaactggatctttccacataaatgcattttgttaacaaatatttagaataaaattgctaatggccctacctgatactgtaaattttaaagctctctttcagcagttgttacaattcttgggcagataacatcttt

SEQ ID NO: 4312 - DNA, 1478 bp, Cricetulus griseus
tttttgtggagaagtctcgcgcgtcctttccgccatggcacaactccaggcacgtttctacaccgagaacaagaaatatgcaatagatgatgttcctttctcaatccctgctgcctctgaagttgctgaccttagtaacatcatcaataaattgctggacaccaaaaatgagctccacaaacatgtcgagtttgatttccttatcaggggccagtttcttcgcatgcccttggtcaaacacatggaactggaaaacatttcatcggaagaggttgtggaactagaatacgtggaaaaatacacggcaccccagccagagcaatgcatgttccatgatgactggataagctcaattgaaggggcagaagaatggatcctgtctggttcttatgataagacttctcggatctggtccttggaaggaaagtcaataatgacaattgtgggacatacagatgttgtgaaagatgtggcttgggtgaaaaaagacaatttatcctgcttattactgagtgcttcaatggatcagactattctcttatgggaatggaatgtggagaagaacaaagtgaaagccctacactgctgcagaggtcatgctgggagtgtggattctatagcagtcaatagctccggaactaaattttgcagtggctcctgggataagatgctaaagatctggtctacagtccctacagatgaagaagatgaaatggaagaatccacaaatcggccaagaaagaagcagaaaacagagcaattgggactaaccaggactcccttggtgaccctctctggccacacagaagcaatttcctcagtactttggtcagatgttgaagaaatctgcagtgcatcttgggatcacacaattagaatatgggatgctgagtctggtggtcttaagtcaactttgacaggaaataaagtgtttaattgtatttcctattctcccctttgtaaacgtttggcatctggaagcacagacaggcatattagactctgggatccccgaactaaagatggttctttggtgtcgctgtccctcacctcacatacaggctgggttacatcagtgaagtggtctcctacccatgaacagcagctgatttcaggctctttagataacattgtcaagctgtgggatacaagaagttctaaggctcctctctatgatctagctgctcatgaagataaagttctaactgtggactggacagacacagggctacttctgagtggaggagcagacaacaaattatattcctacagatactcacctactacttcccatgtaggggcttgaaaatgaatgattgatcaaagactttcttgttgggttttgttttgtttttatttagtgtcttactattgtgtcataaacagtgtgaatgaaattgtagagagctggggatatagctcagttgggagagggcttgcctaaaatgtgcaaaaaccctgagtactatctccagcac

SEQ ID NO: 4313 - DNA, 1478 bp, Cricetulus griseus
ttcacatggaggtggctcacaagcagagtgagtctcagctctgccaggtttgcaatgagctttttcctgctaacgtctaccaggttcacatggaagtggttcacaagcagagtgagtccaaatctggtgagaaacttgaacctgaaaagcttgctgcatgtgccccatttctgaagtggatgagggagaagaccgtgcgctgcctctcttgtaagtgcctggtctcacaggaagagctgatgcaccatttgctcatgcatggcttggggtgcctgttttgtccctgcacttttcatgatgtccggggccttgtggagcacagcaggactaagcacctgggcaagaagaggctgtctatggactacagtaacagaggtttccagctggacttagatgctgatgggaacctgctcgttcccccatctggattccattaccatactgccacgagagaagcttggagagcgagagatgcctatgagctacatctgaaggagaggcaccatgtcatgcccacagtccacacaatgctcagtctccagcctttaagtgcatccactgctgtggggtctacactggaaacatgaccttaggagccattgctgtccatttgctccgttgtagaagtgctcccaaggacagcagctcagacctgcaagtccagccaggttttattgagagcagtgaactgttgttggttaacggggaagtaatccctgactccacttttgctgtgaagagaaagctaccagaaggccacctggggacagaagaccagggggatggggacaagccccagctcactctagacaccattgcaatcccgggttcagagagagggctgagtgctatgcctttgaagagacagaggaatgaaggcaggacagaggggccaggggccagtgacgattctctgcagctgttagcattggactcccaccaagtatggaagccgctcctatgaggacaaaaaacagtttcttagagattatttccacaagagaccgtatcctagtagaaaagaagtggaactactgtcttcactcttatgggtgtggaaaattgacgtggcttcattttttgggaaaagaaggtatatttgcatgaaagcaataaaaaactcataagccctctgtacttctaggttttgatatgtctgaaactaaaaaaatgttaaaacaatagaactgaactttgagtgtgactcacaaaacctgtagaagaagactaggtctgaagtctggatgactttggattgttctaagtgtctgaggccccttcaaggtgctccaggtgctcagaaaagcctggtaaggaagcacacacttccacagatggactgttccctgcagcttggtttgacaactgtttcagtttttccctctgtcatgtaaattaaatctttgttattccatgcacgccttgtttcccaggagtgtatcaatagtaacaacctggaatctacaaatacttgtttt

SEQ ID NO: 4314 - DNA, 1478 bp, Cricetulus griseus
gttgcccgtggagaccgccgcaggtaggcggaaattgccgaggctggcggccagtgccgaggcggcgcgcgggaaggtctggcggccatggcggccccagggcccgcgagtcgcttctggtgctcatgtcccgaagtgccctccgccacgttcttcaccgccctgctctcgctgctggtgtcggggccccgcctgttcctgctgcagtcgcctctggcgccttcggggctgtcgctgcgctccgaggccctgcgcaactggcaagtttacaggttggtgacctacatcttcgtctatgagaaccccatctccctgctctgtggcgccatcatcatttggcgctttgctggcaactttgagaggaccgtgggcactgtccgccattgcttcttcaccttgatctttaccatcttctctgccatcatctacctgtcgttcgagtctgtatcatcgctgtccaagctgggtgaggtggaggatgccagagggtttacccctgtggcttttgccatgctgggagtcacctccgtccgctctcggatgaggcgggccctggtgtttggtgtggtggtgccttcagtcctcgtgccctggctgctgctgtgtgcctcctggctcattcctcagacctccttcctgagtaatgtctctggccttttgattggcctgtcatatggcctcacctactgctactccctcgacctctctgagcgagtagccctgaagcttgatcagaagttccccttcagtgccatgaggaggattcccctgttcaagtatatctcaggttcttctgcggaaagaagagcagcacagagccgaaagctgaaccctccacctggctcctaccccacacagagttgccaccctcatctaaccccaagtcaccctgtcacccagatgcagcatgccaatggccagaaattggcctcctggcctccgggacacatgcccagcctgcctccataccagcctgcttctggcctgtgttatgtgcagaatcactttggtcctaaccccaatgccaccagtgtgtacccagcttctgcagggacctcccagggggtgcaggctcccttccccatcagctgtcctggcactgtatattctggggcgttgggcaccccaggggctacaggctccaagcaatcttccaaggttgccatgccctagccagtccacagaaaaggctcctacatgttaggcagagaaaggtcctacccaagtgaggaatttcttaagaattatttattgaagccagggcgtgctggcctgtcatcccagctgcttggattatttattaaatacctccgtgtgccagctctgttgagtactttgataaatgtccctatatatctgtgtcgtttgccctcaaggcagctctagacttctgccagacagtggtgacctgcagcagcatactgttggtccaccctgtgagttaacctttgtataaaaaccagcctccaacctgacca

SEQ ID NO: 4315 - DNA, 1478 bp, Cricetulus griseus
catgtctattctcaaggtacttgcccgagagatctttgactcccgtgggaaccccactgttgaagttgatctctacacctcaaaaggtctcttccgagcggctgtgcccagcggtgcctccactggcatctacgaggccctagaactccgagacaatgataagactcgctacatggggaagggtgtctcaaaggctgttgagcacatcaataaaactatcggacctgctctggttagcaagaaactggacgtggtggaccaagagaagatcgacaaattgatgattgaaatggacggcaccgagaataaatctaaatttggtgcaaatgccatcctgggagtatccctggcagtctgcaaagctggtgccgcagaaaagggggtacccctgtaccgccacatcgctgacttggctggcaaccctgaagttattctgcccgtccccgctttcaacgtgatcaatggtggttcccacgctggcaacaagctggccatgcaggagttcatgatccttcccgtgggcgcgtccaccttccgggaagccatgcgcattggggcagaggtttaccacaacctgaagaatgtcatcaaggagaaatacgggaaggatgccaccaatgtgggtgatgagggcggtttcgcgcccaacatcctggagaacaaagaagctctggagctgctgaagactgcaatcgggaaggctggctacacagagcaggttgtcatcgggatggacgtggctgcctctgagttcttcaggtctggcaaatatgacctagacttcaagtctccggatgaccccagcaggcacatcacacctgaccagctggctgacctgtataagtccttcatccaggagtatccagtggtgtccatcgaggacccctttgaccaggacgactgggaggcctggaagaatttcacagctagtgcaggcatccaggtggttggggatgatctcacagtaaccaaccctaagaggattgccaaggctgtcagtgagaagtcctgcaactgcctcctgctcaaagtcaaccagattggctcctgtgaccgagtctctgcaggcgtgtaagctggctcagtccaatggctggggtgtcatggtgtcccatcgctccggggagacagaggacactttcattgccgacctggtggtagggctctgcactgggcagatcaagactggtgccccttgccgatctgagcgtctggccaagtacaatcagatccttagaatcgaggaagagctgggcagcaaggccaagtttgctggcagaagcttcaggaaccccctggccaagtaaagtgtgtggagatcctgaaaacacctgccgcttagcccctgtccctggtgtcatcaacgaggctcaaggcagcctagtgcttgtccctcccatgccaccttttccttaggcagtcttgtaatcatgtgattggctaagtcgttgttccagtgtaatctgtagggtggccac

SEQ ID NO: 4316 - DNA, 1477 bp, Cricetulus griseus
ctgagctggagaatgcacggcaggagatgctgaatcatgctactcaaagggtcatggaggctgagcagaccaagacaaggagtgaactggtacacaaggagacagcagccaggtacaatgctgccatgggccgtatgcggcagctggagaagaaactcaagcgagccatcaacaagtccaagccttaattttgagctcaaaggcaaagtactacgtgcagctcgagcaactgaagaaaacagtggatgaccttcaggccaagctggccctggccaaaggcgagtataaggcagccctgaagagcctggagaggatctcagatgagatacatgagcggcgacgttccaatgccatggcctcgggctgtggcgtggggctgagggcagcatcacatcagtggagaaggaccaacaagtccatctgaaattcctgaccagttccctgcagtggcaagacccggcagcttggatctgcccagccctgtgtccctgtctgaatttggaatgatgtttccaatactgggccctcgaagtgaatgcagtggggcctcctcccctgaatgtgaggtggaacgaggagacagagcagaaggggctgagaataaaacgagtgacaaagccaacaacaaccgcattttcggcaacagcaacagtggtggtagcaggggcaggagccaaagcagcacatcccttgagggccagaccttggaaaccccgtatgtaagcaactctctctacaatgctcaaaaggaagagatggggattattgctgacataaaaaatggtgcagattggctgagtccaggctatgacccatgtgcaaatcacatttatacatgaaactcaagaaacatcgtgccaataatcatttaacataagccaaatagtatgcatttactctaaactgcactaaccaagtttcagtgatcttgagggctgaagaatttccctctgataagagctcttgggctggtgtgtttttcagagcagagccattgcagataaactgtgaccagggtcacagcctttgcagaacattccctgtagcggcagtgtggaagcaataactagtttctgtgaaagaacctgagccaggaggagaactggacacttagccagactggggtcaccagcctacatctctatcccctctgccccctctgtttggggaaactgagatgttttctccattatatcacagggcaccaaaataattttcaaactcacacaatagcatagaggggatttgtggctgtgggaggctctatagcctgactttagcctgccagccaagggggggtatattctaagacaagtgcatgtgaagaatggttgccactgttctatctagactgacaagaagttaatttctctgtaggctgtaacttctacaataattgcaattatttaaggtttatgctgcacctagtattccttagaggaaacggtccttaaagctaggaaagggagtgggcatg

SEQ ID NO: 4317 - DNA, 1477 bp, Cricetulus griseus
ccccatggccccgtcccggcgggcagctcggcctccgcgccgcttactctggcatcagctctgtggctggcttctccatcttcttcgtctggaccgtggtctaccgacagccggggactgcggcaatggggggtctcgcaggtgtcctggcattgtgggtcttggtgactcatgtgatgtacatgcaggattactggaggacctggctcaaagggctgcgaggcttcttcttcgtgggtgttctcttctcagccgtctccatctctgccttctgcaccttcctggcattggccatcacccagcaccagagtctcaaagacccgaccagctactacctctcctgcgtctggagcttcatctctctcaagtgggccttcctactcagcctctacgcccaccgctaccgggctgactttgctgacatcagcatcctcagtgatttctgacccagggaatgagatcactccagcctgggggtccctcaggacctgtactcagcttctgagtcagcaagtgagcctgccccaaaccctggggactccagaaccgtggcagagcataggcagccgggtcagtttagtaccccagaaagccatctggtcccctttctgggggaagacagaactgttgaaggggtcactgccagcctgcccattagcctggctagagggcagcttagctctttccaaatggatctattttcttagcactctgaggaaccttgtaagtaggaccacgataatgaactcaacttccttgctgccccagacttcattgaagcatatgtgtgggaggaagcatctggaaagtttcatcaagtaaggaatctccactcagagatctccaaatcccaccccagcacctctgctctgttgtcctcaagggtcaggtagttgacttcatcagttcctagggaagtgacaattggctctttcctcaagctgcaaaactgaacagaatccagtgtctctcctcctgtcttcccatccagagtttgtttcccatgagggtgctagagccagccaaccattcctgtgtcacatatgctcacatgaccacatattaccagagctggactccttggatgaggctagacctgaggaccactggaaacatacccctgcacctacaagggttttgggatagggggcaagctggtgggggctagagagctctacagctgtagtcttgagtctccagcctttggacatgggcccaaggccttacctaagtagagagggagggcaggggctgctatatacatccttttatgttaggttgccgttttgcacatctacttttccacccaggtcctgcccctcgctctctgccttacctgtgtcactgtcactttagcagaaatacagcggccatttttatcagcctcagggtgtttcttggcgagggaggggacttgagaggggactataagagtggacaaggaggggggctctacctatctgaatatttctctaag

SEQ ID NO: 4318 - DNA, 1477 bp, Cricetulus griseus
gtccggagcccgaggccgggagccctggctgtgcgggactgctcgggtcgcgcgccgcctcggacacccgcgcgcagatgccctattttagcctagtgaagactttaacatcggttttcccaaatgtgcatagtatatcacagtttcctcaaaggacgccagcagtgtgctgttgtagtcaaacacagagtggtgagcaatacaccgatccttttaaacttggctggagagacttgaaaggtctgtatgaagacattagaaaggagctgtgcatcaccaccaaagaattgaaggacatgtccgaatactacttcgatggcaaaggaaaagcctttagaccgattattgtggtgctaatggcccgagcgtgtaatattcatcataataactcccgagatatgcaagccaaccagcgctccgtagccttaattgcagaaatgatccacactgctagtctggttcatgatgacgttattgacgatgcaagttctcgaagaggaaaacatacagttaataaaatctggggtgaaaaaaaggctgttcttgctggagatttaattctttctgcagcgtccatagttctggcacggattggaaacacagctgttacatctattttaacccaagttattgaagatttagtgcgtggtgaatttcttcagctagggtcgaaagaaaatgagaatgaaaggtttgcccactaccttgaaaagaccttcaagaagacggccagtctgatagccaacagttgtaaagcagtctctgtcctgagttgccctgacccagtagtccatgagattgcctatcagtatgggaaaaacattggaatagcttttcagctcatagatgatgtattggacttcacctcatgttctgaccagatgggcaagccaacatctgcagacctgaagctaggcttagccacaggccctgtcttgtttgcttgccagcagttcccagaaatgaatgctatgataatgagacggttcagtttgccaggggatgtggacagagccagacaatatgtattacagagtgatggcgtgcaacaaacaacctacctcgcccagcagtactgccacgaagcagtgagagagatcaggaaacttagagcatccacagaaagggatgccctcatccaactttctgaaagtgtgctcacaagagataaatgacaattcttcctgttctttctggcagctattttaccagactgtgcctaatgaattttgtgaaacactatttgcttcatgtgcagataaccaaaaatcactttaggaaataatttcaaccttattgatgggcaatttttttattggcaaagtttttcagaaaactttttaaatgtaattaaaccagtgtcattatagtccaataaattctaatcgaggtatcctgatggttatgtgtggtcctgtttacattgttaatgcccacatggaaagccattacacaaataaataatcaatgttaaaaa

SEQ ID NO: 4319 - DNA, 1476 bp, Cricetulus griseus
cggcggcggcggcggcggcggcggcggcggcggcacgcgctctgcccggcggaggctgcaaccccaattcaagtcacacaacaccaatgaggtgctggagaagctgtttcagatcgtgcctggcgagaacccctaccgcttccgggatccccaacagtgccggcgctgtgctgtggtgggaaactcaggcaaccttcggggctctggctatgggcaagatgtggacggccataactttatcatgagggagagtgccaagaacctgcctgccaatgtcagcttcgtgctggtacccttcaaggccctggacctaatgtggattgccagcgccctctctacaggacagatccgattcacctatgctccagtgaagtccttccttcgagtggacaaagaaaaggtccagatttacaacccagccttcttcaagtacatccatgacaggtggacagagcatcatggacggtacccttccacaggaatgctggtgctcttctttgcactacatgtgtgtgatgaggtgaacgtgtatgggttcggggctgacagccgaggcaattggcaccactactgggagaacaaccggtatgcgggcgagttccggaagacaggcgtgcatgacgccgacttcgaggcccacatcattgacatgctggccaaggccagcaagatcgaggtctaccgagggaactgagctgcccgtgctaccgttgggcggagcttctctttctcagccaatcatgcgactcaaggagaacttccggcgccgctgtctccaccaatcatggccttgggaggcggcggggcctcgatcccccccccctcacgtgtgccctcacttctactgtcccccaccaccttctcagcgtctgacctttggccctggctttctctctagctctcttgttgatttggagacaaaatgacaccgccgggagggacacactgctgctcactcaggcacacacagcccctatatctttggccctaaggcgagagcagcacagtggacagcaggctggagaggagagcccagctgcctgtgcatgtacctttttctttgtcaccccaaagaggagcaggcagcctcttgcttgggggtaggatttgctttgggcttatactttagttaccctgaagctgccagggatggctgcccaagtttgcttgacaattctttgcaggccttgcagatggcctggagctttgctggggaggagcagattggtggctgccatgcatgcctcctcctgtctgtatctttaccctgcttaactcacctgttctaacccactttccagcccctaacgggctggtgagtaaagaattaggggttacaactggaagctacttgcatgactcgacccaagtcaaggttgagattcagtgggtgaaagggcttcagtgatggtctcaggccacagaaagtactcccccttccctgcagtgtccacataaatatatcccatttttaat

SEQ ID NO: 4320 - DNA, 1476 bp, Cricetulus griseus
cgcccttccttttccctggggaatgagaccctgagggtgccactggcactgttcgccctgaacaggcagcgcctgtgtgagcggctgaggaagaatgcagcggtacaggccggctcccttgtcgtgttgcaaggcggggaagagacgcagcgttactgcaccgatacctccatcatcttccgccaggagtctttctttcactgggccttcggtgtcgtcgagtcaggctgctatggtgtcatcagcgtggacactggaaagtcaaccctgtttgtgcccaggcttccttccagctacgccacctggatgggaaagatccattccaaggagcatttcaaggagaagtatgccgtggacgatgtccagtacaccgacgagattgccagtgtcctgacctcccagaaaccctctgccctcctcaccttgcgtggtgtcaacacagacagtggcagtgtctgcagagaggcctcctttgagggcatcagcaagttcaatgtcaacaacacgattcttcacccagagatcgtggaatgccgggtgttcaagacagacatggagctggaggttttgcgctacacaaaccggatctccagtgaggcccaccgtgaggtaatgaaggctgtaaaagtgggaatgaaagagtaccagatggaaagcctgttccaacactactgttactcccggggcggcatgcgccatacctcctacacctgtatctgctgcagtggtgagaacgcggctgtgctgcactacggccatgccggggcccccaacgaccggacgatccaggatggagatatgtgcctgtttgacatgggtggagagtactattgcttcgcttctgacatcacctgctccttccctgccaatggcaagttcacggaggaccagaaggccatttacgaggcggtgctgaagagctgccgaactgtgatgagcacaatgaagccaggtgtctggtggcctgacatgcaccggctggccgaccgtatccacctggaggaactgacccgcattggcctcctgagtggcagtgtagacgccatgctccaggtccacctgggggcagtcttcatgccacatgggctcggtcacttcctgggcctcgatgtgcacgacgtgggcggctaccctgagggtgtggagcgcattgatgagcctggcctgcggagcctgcgcacagcaaggcacctggagccgggcatggtgctgactgtggagccgggaatctacttcatcgaccacctcttggaccaggccctggcagacccagcccaagcctgcttctttaaccatgaggtcctgcagcgcttccgcaactttggcggggtccggatcgaggaggacgtcgtagtgactaacagtggcatggagctgctgacctgtgtgcctcggaccgtggaggaaattgaagcctgcatggcaggctgtgacaaggccttcacgccctcctctggccccaaggagagccagctg

SEQ ID NO: 4321 - DNA, 1476 bp, Cricetulus griseus
ggcgggacagcggaggatgagtcccgggcctattctaaccccactttttctccttccgcacagcgggtttccgcttccctccagggcactgggtgaggcagtgaggccgaggctcgacgaggtagcgccgctatgtggcccccggacgcagagccggagcctgatccagagtccccggaccgcccccgaagtggcaggacagtgcccgggctcagcgccctgctgcccgcgcgcgccttcctctgctcgctcaaaggtcgcctcctgctggccgagtcgggtgtttctttcattaccttcatctgctatgtggtgtcctccgcatctgccttcctcacagtccctctgctggagtttctgttggctgtttatttcctctttgccgatgccatgcagctgaatgacaagtggcagggcctgtgctggcccatgatggacttcctgcgctgcgtcactgctgccctcatctacttcgtcatctccatcactgctgttgccaaatactcagatggggcttacaaagcagctggagtttttggcttttttgccacaattgtgtttgcaattgacttctacctgatcttcaatgaagtggccaaatttctcaagcaaggagactctaccaatgagaccacagccaataggacagaagaagataattccaactcggactcagactcggactgaaggcctgtctgtgcctggcaactggagccactcaggcctcccatccataccttcctgatgggacttcaggagcatggcagtggattcccacagaagagccgacagaggaatcagtctctcgaggtgacactcctgagcctcactctcaaaattggctgtgctggcttagtactgctcagctagcacattagggcactctgaatatcctaccttctcccatttccgtcctaaagaccttttaacctcactgccccacagacgcagacacatcaactggaaccagtcactacagttcatgtggtagcacagggtggggcagggctctttcactaacagggacagacagaaaccacagcaggctgcctgcactttgtggagataactttcaggaatctttgttcaagaagtttcccttctcactgtgaaacaggggaaaacctaactagccaagtcctccattgtaggtctgagaccttttcagaaaaaggcccagagacctgtttaccggggctaacagacagggagccaaccagtgcagtggcagtgacaaagtcacaaatggctgggcaggcccagtcaagccctcttctcctggggatgctacaagagaaagtgtttcctctggacacctggacaggcctactggtaacatggccttcatttgaccgctagctgatagcgtgtatgtcgttgatattttctaactttttttctaacttttttgtatttttttaattcaaaagcaatgtaacaaatggcattttctgtgacccaagaggtcccatgaat

SEQ ID NO: 4322 - DNA, 1476 bp, Cricetulus griseus
tcacactgcggttcctgctgcagcacctgggccgtgtggcccgcagagcacctgtgcaggccacagctgtccactcgctggccagcgcctttgggccgctcctactgcgcacacctccgccagggggtgacactgatgggagtgagcctgggccaggcttcccagtgctgctgttggagaggctgctgcaggaacacgtggatgagcaggatgccgccccccagccactgccacccaaaccctctaaggcaaacgccggcccccacagctcctggcgtaatggagggaacccgcctcgcttcaggatgcagagtggtactgggggggacgatctccagggaagaggtgaatgagagactccgggacacgcccgatggcacattcttggtccgagatgcatccagcaagatccaaggagagtacacgctcaccctcaggaaaggcgggaacaacaagctgatcaaagtcttccaccgggatggccactacggcttctccgagcccctcaccttctgctccgtggtggagctcatttcccactaccgccacgagtcgctggcccagtacaacgccaagctggacacacgcctgctctaccctgtgtccaagtaccagcaggaccaggtggtgaaggaggacaggtgtggaggctggtgggtgcccagctcaaggtctaccaccagcagtaccaggacaagagccgcgaatacgatcagctgtatgaggaatacacacggacctccccatagaggccttcaatgagaccatcaagatcttcgaagaacagggccagacgcaggaaaagtgcagcaaggagtatttggagcgcttccggcgagagggcaatgagaaggagatgcagaggatcttgctaaactctgagcggctcaagtcacgcatcgcagaaatccatgagagccgcacaaaactggaacaggacctgcgggcgcaggcctcggacaaccgtgagatcgacaagcgcatgaacagcctcaagccggacctcatgcagctgcgcaagatccgggaccagtacctcgtgtggctcacccagaaaggtgcccgacagaggaagatcaacgagtggctggggatcaagaacgagactgaggaccagtattcactgatggaggatgaggacgccctcccccaccacgaggagcgcacgtggtacgtgggcaagatcaaccgcacacaggcagaggagatgctgagtggcaaacgggacgggaccttcctcatccgggagagcagccagcgaggctgttacgcatgctccgtggtggtggatggcgacaccaagcactgtgtcatctaccgcacggccacaggcttcggcttcgcggagccctacaacctgtacgcgtcactgaaggagctggtgctgcactaccagcacgcctccctcgtgcagcacaatgatgcgctcacggtcaccctcgcgcaccctgtgcgcgcccccgggcctggcccacc

SEQ ID NO: 4323 - DNA, 1476 bp, Cricetulus griseus
gagcattatggatccaagcttgttgagagacagagagctattcaaaaacgagctctttccacccctgtggtagaaaaacgtgctgtgccttctgagttgccctcggcctcatccaagaagaagaaagcaaaagttgaacatggaggatcatcaggctctaaacaaaatgcagatcatagcaatggatcggttaacttgaaagcgctatctggaagctctggatataagtttggtgttcttgctaagattgtgaattacatgaaaacacggcatcaacgaggagatacacatcctttaactttggaggagattttggatgagacacagcacttagatattggactcaagcagaaacaatggctaatgactgaggctttagtcaacaatcctaagattgaagtcatagatgggaaatacgccttcaagccaaagtacaacctgaaagataagaaggccttgctcaggcttctggataaccacgaccagcgaggactaggagggatcctgctagaggacatagaagaagggctccccaattcccagaaagcagtcaaggctttaggggaccagatactgtttgtaaatcgtcctgataagaagaaaatacttttcttcaatgataaaagctgtcagttttctgtggatgaagaattccagaaactgtggaggagcgtcactgtggattcaatggatgaggagaaaattgaagactatctcaagcgacagggtatttcttctatgcaggaatctggaccaaagaaagtggcctctattcagagaagaaagaagcctgcttcacagaagaagcgccggtttaagactcacaatgaacacttggctggagtgctgaaggattactcggacattacccctggcaaataggcagcatttttatcctcaaacaaggttgcagacaccatcagggtctttcctcatgcttgggatctgaagactctgccttcccgtctgctcctcaggactgaggagaggagcagttcagtttacagaacaggagtgcattaccaaatccagctttgtcacccagccaggctagtgggaacagttcctgttcctgttaacgtcctgggtttgttttttttttttccctagaaagacacttagcatggcatgcaggtgtctttgtttatcttgatttctagatggttcttgattcctgttttctctattgctttagaacagattggcagatagtgctggatgcaatatttctttattccaagagaaaatatttataataaaatcatttgtaggaggatctttaagaagttaggaaattcagtttgtttctcttaattcttgaaaatagcagggaacagtggcagtcattggttggtagggcaggtgtttgggacgtcacaaagatgagtcagtgctgttggcaagtgtgtgggtttcatctttggaacacagggtatgactctggttaataagctaagcaataaaattacactaaat

SEQ ID NO: 4324 - DNA, 1476 bp, Cricetulus griseus
cccccgccgcagccatgtcgttcttcccggagctttatttcaacgtggacaatggctacttggagggattagtgcgcggcctgaaagccggggtgctcagccaggcggactacctcaacctggtgcagtgcgagactctggaggacttgaagctgcaccttcagagtacagattatggcaacttcctggccaatgaagcatcacctctgacagtgtcagtcatcgatgacaagctcaaggagaagatggtagtagagttccgccacatgagaaaccatgcctatgagccgcttgccagcttcctggacttcattacttatagctacatgattgacaacgtgatcctgctcatcacaggcacattgcaccagcgttcaatcgctgaacttgtgcccaagtgccacccactaggcagctttgagcagatggaggccgtgaacatcgcacagacacctgcagagctctacaatgccattctggtggacacgcccctggctgcttttttccaggattgcatctcagagcaggaccttgatgagatgaacatcgagataatccgcaatacgctgtacaaggcctatctggagtccttctacaagttctgcactctattgggtggaaccacagctgatgccatgtgtcctatcctagagtttgaagcagaccgccgcgccttcatcatcaccatcaactctttcggcacagagctgtccaaggaggaccgtgccaagctctttccacactgtggccgactctaccctgagggcttggctcagctggctcgggctgatgactatgaacaggtcaagaatgtagctgattactacccggaatacaaactgctctttgagggtgcaggtagcaatcctggagacaagactctggaggaccgattctttgagcatgaggtgaagctgaacaagttggccttcctgaaccagttccactttggtgtcttttatgcctttgtgaagctaaaagaacaggaatgtcgcaacattgtgtggattgctgagtgcatcgcccagcgccatcgcgccaagatcgacaactatatccccatcttctagtgttctaactcaaggttcccaaatgcactgtgtgtgtctctgtgtgctgtggtggagctcatggctcacttgtctgacctggtacagtgtagcacattgttctggggttgcccaccttccacaactccctctggaactgctcttagacctacaaagggattagggacctctcccctgatgaagaatggaccaatatcccctccagagcaaagagccccccagccctatgtttacagccattgacatgtctaagaaacttgtgtcattttcatgtccctccctaacctgagaacctctggggcagtgggaagattagagagtgtgtgtctttggggtatgggggaagtagctttgcagccctctctttcagctctgaccctctgagacaataaaattcccctacttt

SEQ ID NO: 4325 - DNA, 1476 bp, Cricetulus griseus
aaggagaagacacacatcaacattgtggtcattggccatgtggactcaggcaagtccaccacaacaggccatctcatttacaaatgcggggcatcgacaaaaggaccatcgagaagtttgagaaggaggcagcagagatggggaaggggtcctttaaatatgcctgggtgctggacaagctgaaggcagagagggagcgtggcatcaccatcgacatctccctctggaagttcgagaccaccaagtactacattaccatcattgatgtctccaagaacgggcaaaccgggacatgccctcctgggcctagtacctctgggcgtaaagcagctcattgtgggtgttaacaagatggactccacggaaccagcctacagtgagaagcgctatgatgagattgtcaaggaggtcagcgcctacatcaagaagattggctacaacccagccacagtgccctttgtgcccatctcaggctggcatggggacaacatgctggagccctcacccaatatgccatggttcaagggctggaaagtagagcgcaaggaaggaaatgcaagtggcgtgtccctgctagaagccctggacacaatcctgcccccaacccgccccactgacaagccccttcgcctcccactgcaggacgtgtacaagattggtggcattgggactgtgcctgtgggccgagtggagactggtatccttcggcctggtatggtggtgacctttgcaccagtaaacatcaccacagaggtgaagtctgtggaaatgcaccacgaggcgctcagcgaggccctgcctggtgacaatgtgggcttcaatgtgaagaatgtgtccgtcaaggatattcgccggggcaaatgtctgtggggacagcaaatctgacccacctcaggaggctgcccagttcacctcccaggtcatcatcctgaaccaccctgggcaaatcagcgctggctactcaccagttatcgactgtcacacagcccacattgcctgcaagtttgcggagctgaaggagaagattgaccggcgttctggcaagaagctggaggacaatcccaagtctctgaaatctggtgatgcagccatcgttgagatggtccccggaaagcccatgtgtgtggagagtttctcacagtacccacctctcggccgcttcgccgtgcgcgatatgcggcagactgtggccgtgggcgtcatcaagaacgtggagaagaagagcggcggcgctggcaaggtcaccaagtccgcacagaaggcgcagaaagcgggcaagtgaagcgcgggcgcccgcggcgtggccctccccgacggtgccgcgccgcgcccccagcccggtccccggaactcggccccgccccctccccaggcgtggcccttccaccccgcccccccgccacggcgacgccaaaaaaaaaaaaaaaaaaaaaaaaaaaaaaaaaaaaaaaaaaaaaaaaaaaaaaaaaaaaaaaa

SEQ ID NO: 4326 - DNA, 1476 bp, Cricetulus griseus
cgagacaccatgcagaatattgtacagattttggagtcagtgcagttgaaatgggaactgtttcagagctggacagacttttcaaggctccatctttccaataagttggccatttttggaattggctataacacccgctggaaagaggacatccgttaccactatgccgagatcagctcacaggtgccccttggcaagcgtcttcgggagtacttcaactccgagaagcccgagggacggataattatgacccgagtgcaaaaaatgaactggaagaacgtttactacaaatttttagagatcaccatcagtgaagctaggtgcttagagctgcacatggaaattgactggatacccattgcccactccaagccaaccggtgggaatgttgttcagtatttactgccaggagggattccgaaaagtccaggtctttatgccattggctatgaagaatgcattgagaggccactttcaccagatgtggagcgccaggccctggacccaggaaaagagggcagggttggcctggaaaccctctcagcacaagcctcattacaggtagaagtagaacccacccggatcatctactgctaccttggtattgctgaggtcaggactctgcagcagtgtttgttttacatttccaagcaaataccaaaaccttcagtaaagattgggttggcattaatgggtttttgtctcagaactgtattgtggatcctggagtttcccctaaatccatctatattaaatttgtagaagtagagagggattttctttccgctggctcattagttgagtgcctggaaaaagccatcggataccccttaaaatttaacaactgagtgtcatccttcataaggatttgggcgtgtgcattctttcccctagttccgttacccagactaccccacatccagatgctgccatcagactcttcatgggaactattttccatgatgagaccagtgcaacctctaaagaatcatagtagactctgggcaaaaaaaagcagacctcacctgatatgctcattttgagcaagcaggtcttgcatggtgggtcagttcttttttaaaaaaaggtaacatcgatttttaaatggattttagagccctaatataaacaaatgtaggtacattccatattggacaaaacttatactttgagtttcatatgaaattgaaaattgtatttttttcacgtttcatttttacacatctctataagtattacttacaaccttgaataaataagcaatagataatggcaagtaaatcttgagtcacagtaaataaggctgtttttcaatattacctttagctactattgtatacaatttagagtttcattttttcaccaaccaagtgttttgctatttccaatcagtgttgcctgcaaaagtactttttgttttatgtgatgtaccaacttttatggttgtgtttgccattttaaaattaaaaaaaaaaa

SEQ ID NO: 4327 - DNA, 1475 bp, Cricetulus griseus
  modified_base (78)..(78): a, c, t, g, unknown or other
acgaatgcactgacagctcctgtttcaatggtggcacgtgtgttgatgggatcaactccttctcttgcttgtgccctngggtttcactggtccttctgctccatgatatcaatgagtgcaactctaacccgtgcctgaatgaggggacatgtgttgatggcctgggtacctaccgctgcacctgtcctttgggctacaccggcaaaaactgtcagaccctggtgaacctctgcagccgatctccgtgtaaaaacaaaggaacttgtgttcaggaaaaggcaaggccccactgcctgtgtcctcctgggtgggacggtgcatactgtgatgtgctcaacgtgtcctgcaaggccgcagccttgcagaaaggagtacctgttgaacacttgtgccagcactcgggtgtctgtatcaatgctggcaatacccatcactgccagtgcccactgggctacacggggagctactgcgaggagcagcttgacgagtgtgcgtccaatccatgccagcatggtgccacctgtaccgacttcataggaggatacagatgtgagtgtgttccaggatatcagggtgtcaactgcgagtatgaagtggacgagtgcactcaccagggggaggatataaattgttcttctgtgtgttggcctattcagtataaacgtgtactctaggagacctgggtactatgatactcccattgtgttgtaaagcaggaaaagtaggagaatgttggaatgaccaagagataagctaactggctcaagaagcaattgcccacctgcaggccctccactgactgccactgtgaagcacattcatccccaaattctgggactcattgatccagcagatgaagggactcttggctgctgcactgatcctcagagattgccttttttttttttttttttattcccttcctttgacttccacatgcctttgagaatttttttaatttgttctttttttgttttaagcattgttttctgacttatgtgatggtgggggaattgaaggaaagagactgagttaaagatttcaatgaaaggcttcagcacaggtctgccacagcacttgattgaacttggtcgctcgaaagccttgcatagaaaagaaccaaaggtgtaataaggtctgttagcgtgtggtttcagaacctagacttgaaccagcgccttgaatgtatgaggactatttggaaggacacatgtctatgtcctgaggcccccacccataactattttggtactatggcaacttccttgtgtacatttccctgaaaagtgacattatatctgtttgtatgagaaactcagtaaccagaaaatgactgcatgctcctgactataaacataggaaggaaaatgcgtacttgtttttacttttaaaaaatttcattctaacaagtagtttaagatgaaatttatatgaaaacatttttatcaaaaaataaaaaaggttccatgtacaaa

SEQ ID NO: 4328 - DNA, 1475 bp, Cricetulus griseus
catcttgcagcgcggtcctccgccgcggcgtcgcggtcccgggcgagccgcagcgggctggtgccatgatccggcaggacctctccacatcctaccaggagctcagtgaggagttggaccaggtcgttgagaactcagagcaggcagacgagcgggacaaggagccagtccaagtccaaggtccaggggtcttgccaggcgtggacagcgagtctgcctccagcaccatccgcttcagcaaggcctgcctaaagaacgtcttctccgtcctgctcatcctcatctacctgctgctcatggctgtggccgtcttcctggtctaccagaccatcactgacttccgagagaagctcaaacaccctgtcatgtctgtgtcttacaaggaggtggaccgctatgatgccccagggattgccctctaccccggtcaggctcaactgctcagctgtaagcaccactatgaggtcatcccacctcttgccagccctggccagcccggagacaggaactgcaccacccagagggtcaattacacgaatcccttctccaatcataccatgcagtcggccctgattgtccaggggccacaggacgtgaggaagcgggagctggtgttcctgcagttccgcctgagccagagcaacgaggacttcagtgccatcgactacctgctcttctcctctttccaggagttcatgcgcagctcagacaaggcgggcttcatgcaggcctgtgagagtgcctactccagctggaagttctcgggaggcttccgcacctgggtcaagatgtcactggtgaagaccaaagaggaggacggacgtgaagctgttgagttccggcaagagaccagcgtggttaattatattgaccagaggcctgctgccgagaaaaacactcagttgttctttgtggtcttcgaatggaaagatcccttcatccagaaggtccaggatataatcacggccaatccttggaacaccatcgcactcctctgtggggctttccttgcattatttaaagcagccgagtttgccaaactgagtgtgaagtggatgatcaaaatcaggaaacgatacctaaaaagaagaggccaggcaacaaaccacataagctgaagcaaggcaaaatacaaacatagactttattaaatggtgctcaatccccagtgaagagcgtccgctataaaacagtttccatacagtggcgaggcaagaggctggaatggtactgataacgacctgggagaaacacctgaccaggtaggaacacaccaggcttctacagctgctgaagggggatatttgggtaacgaagtcagaattttggtttctttcccccagctttaatactttgggcttcagaagcctggaaaactaaggtgttgcaaaacccagagtatggcagtatctttaaagaggctgggcttctaccccaccacctctctaggagaggctcagggaggacaacacctc

SEQ ID NO: 4329 - DNA, 1475 bp, Cricetulus griseus
gggttcggtgaggtctctgggtctaagagtgctaggctagactgatcctcgtcctaagctcgatcccgctagccaacccctgcccgccacgggctttcctgctgggtgcttgtcatcatgtcctatattccggtggccgaggactccgactttcccatccaaaacctgccctatggcgttttctccactcaaagccacccaaagccacggattggtgtggctatcggtgaccagatcttggacctcagtgtcattaaacacctcttcactggccctgttctctccaaacaccagcatgtctttgatgagacaactctcaacagcttcatgggcctgggccaagctgcctggaaggaggcaagagcatccttgcagaacttgctgtctgccagccaagccaggctcagagatgacaaggagcttcgacagcgtgcattcacctcccaggcttctgccaagatgcaccttcctgcttccataggagactacacggacttctactcctctcggccgcatgccactaatgttggcattatgttcaggggcaaggagaatgcgctgatgcccaattggctccacttacctgtgggataccatggccgagcttcctccatcgtggtatctggcaccccaatccgaaggcccatgggacagatgagacctgataactcaaagcctcctgtgtacggtgccagcaagctcctggacatggagttggaaatggctttctttgtcggccccgggaacagatttggagagccaatccccatttccaaagcccacgagcacattttcgggatggtcctcatgaacgactggagtgcacgagacatccagcagtgggaatatgtcccccttggaccatttctggggaagagctttgggaccaccatctccccatgggtggtgcccatggatgctctcatgccctttgtggtgtccaaccccgagcaggaccccaagcccttgccatatctctgccacaagcagccgtacacatttgatatcaacttgtctgttgccttgaaaggagaaggaatgagccaggcggctaccatctgcaggtccaattttaagaatatgtactggaccatgctgcagcaactcacacaccactctgttaatggatgcaatctgagacctggagacctcctggcttctggaaccatcagtggatcagaacctggaagctttggctctatgctggaactgtcctggaggggaacaaaggccatcgatctgggccaggggcagaccaggaccttcttgctggatggcgatgaagtcatcataacaggtcactgccagggagacggctaccgtgttggttttggccagtgtgctgggaaagtgctgcctgccctcacaccagcctgaggctccagaaaccacaagccacagccttgcctgccagggaccatgctgctgctgcccttcattcaagaatgaataaatccatttcgcttgtagggaaa

SEQ ID NO: 4330 - DNA, 1475 bp, Cricetulus griseus
ggatctgtccctgccggtccccggcggaccccgcctgccccggcggcgcggccatgaagctgaagctgaagaacgtgtttcttgcctacttcctggtgtcgatcgccggcctcctctacgctctggtgcagcttggccagccatgtgactgcctccctccgcttcgagctgcagctgagcagcttcgacagaaggacctgaggatttcccagttgcaagctgatctccgtcgaccaccccctgtcccagcccagccccctgagcccgaggctctgcccactatctatgtcattacccccacctatgccaggctggtacagaaggcagagctggttcggctgtcccagaccctgagcctggtgccccgtctacactggctgctggtggaggacgctgagagccctaccccgctggtctcggggctgctggctgcctctggtctcctcttcacacacctggctgtcctaaaccccaaggctcagcggcttagggaaggcgagccaggatgggttcggccccgaggagtagaacagcgcaacaaggccctggactggctccgaggcaaagggggtgctgttggcggggagaaagacccaccaccaccagggacccagggagtggtgtattttgctgatgatgacaacacctacagccgggagctctttaaggagatgcgttggactcgtggtgtctcagtgtggcctgtggggctggtgggcggcctgcgatttgagggtcctcgggtacaggatggccgggttgtgggtttccacacagcatgggaacccaacaggccctttcccctggacatggcgggatttgctgttgccctgcccttgctgttggctaagcccaatgcccagtttgatgcaactgcaccccggggccacttggagagtagtctcctgagccatcttgtggatcccaaggacctagagccacgggctgccaactgtactcaggtactagtgtggcacacacggacagagaaacctaagatgaagcaggaggagcagctgcagcggcagggccagggctcagacccagccattgaggtgtgatggcagcctcaccctgacttctaccttattttaggcacataccttgtgggactgggctccaggccagtccaggatgtggttttttaaaaagacctgacccctcagaaccagaggcagcccctccaaccacagggtgtggcccagctgcttccctcccttcccccagcctgccatgtggcactgcccacaggctggggacaagcagttgtattgagccaggtcagccccatctggggtggagcaggacagatggactcaggagggagggtggctgagggaactgggtaacttattggggacaagcatgcactggggggctagaggagctgggctggaccctccccacctgagcatgcggatcctcttcctacctctagaataaagaatctcaacctaggaaaaaaaaaaaaaaaa

SEQ ID NO: 4331 - DNA, 1475 bp, Cricetulus griseus
gcaatggcggcacagggagcaacagccgcagttgctgcaacgacttcgggaattgtgggggagggcgagcccgggcccggggaaaatgcggcagtcgaggggcctgccgggtctccgggccgcgtctctccgccgaccccggcgcgtggcgaaccagaagtcaccgtggaaatcggagaaacgtacctgtgccggcggcccgatagcacctggcattcagcagaagtgatccagtctagagtgaatgaccaggagggccgagaagaattctatgtacactatgtaggcttcaacaggcgactggacgaatgggtggacaagaaccgactagcactgaccaagacagtgaaggatgccgtgcaaaagaactctgagaaatacctgagtgagctggcggagcagcctgagcgcaagatcactcgaaaccaaaaacgaaagcatgatgagatcaaccacgtacagaagacctatgcagagatggaccccaccacagcagccttggaaaaggaacatgaggcgatcaccaaagtgaaatatgtagacaagatccacattgggaactatgaaattgatgcctggtatttctcacctttcccagaagactatgggaagcagcccaagctttggctctgcgagtactgcctcaagtacatgaagtatgagaagagctaccgcttccacctgggccagtgtcagtggcggcagccccctgggaaggagatctatcgcaagagcaacatctctgtgtatgaagtggacggcaaagaccataagatatattgtcagaacctgtgtctgctggctaagcttttcctggaccacaagaccttgtattttgacgtggagccctttgtcttttacattttgacggaagtagataggcaaggggcccacattgtcggctacttttccaaggagaaggaatcccccgatggaaacaatgtagcctgtatcctcaccctgcccccctaccagaggcgtggctatgggaagtttctcattgctttcagttatgagctctccaagctggagagtactgtaggctctccagagaagccactgagtgacctgggaaaactcagctaccgaagctactggtcatgggtcttgctagagatcctgcgagacttccggggcacattgtctatcaaagatctcagccaaatgaccagcatcacccagaatgacatcatcagcaccctgcagtccctcaacatggtcaagtactggaagggccagcacgtgatctgtgtcacacctaagctggtagaggaacacctcaaaagtgcccagtataagaaaccacctattacagtggactctgtctgcctcaagtgggcacccccaagcacaaacaagtcaagctttctaagaagtgagtcgcctgtgccctgctttggaccagcgttttctggcctctaacctgtaaatatgtgtacagacctgttttgtgtcttattttaataaagttaaat

SEQ ID NO: 4332 - DNA, 1474 bp, Cricetulus griseus
ccagctccaactatagtggacagcagatgaaattgctcaattgtgctatgcacactatagtgtcaaactgcccaagcagggaagcctgagccaaaccgtgaatggaccttgctggcagccgtggtgaaggatacagtctccagctaaccaagtttgtgacgccactgataaggaagtgccagtgacaaaggaagttgtctcaatgggaacaggaacgaaatgtataggccagtccaagatgaggaagagcggagacatcctcaatgacagccatgctgagatcatagccagaaggagtttccagagataccttctccatcagctccatttggcagccgtcctgaaagaagatagtgtctttagtgccagggactcaaagaggactgtggaagctcagacctgacctgtcttttgtatcagaaattgggccatcaactcacctgtagaaaagagtaacaatctagaggattccaaaaataaaagggattgtgaagaccctggcagttctgtagccaaaaagatgaggcttggaactcctgccatgacactgtccaactccatagctcaccatgagacacaggaaagtggttcaatcaaaccagatgtcagcagctccaatcttaccaaggaagaactggacactgccaatggaatagctccaggtagtttcaaagtggtggatgtgtatagaacaggagccaagtgtgttcctggagaaactggagacttgagaaagccaggggctgcctaccaccaggtggggctgcttcgtgtaaagcccggcaggggagacaggacatgctccatgtcctgcagtgacaagatggcaaggtggaatgtccttggatgccagggtgcactgctaatgcacttcctggaagagcctatctacctgtctgctgtggtcattgggaagtgcccatacagccaggaagccatgaggagagcattgactggcaggtgtcaggaggtcttggctttacccagaggctttggagttcctgaattgaaaatagagcagtcgagtttactgtttgaacagagccgctgtgcagtgcaaatgcaaagagctgacataccaggccggctcgttccttgtggggcagctatcagctggagtgctgttcctgagcatcctttggatgtgactgccaatggctttccacagggaataacaaagaaagaaatcgggagccctcgggccagatcccgaatcagcaaggtggaactctttagatcattccagaagctgctaagcagcattacagaagacaagcaaccagactctgtcagggtgcagaagctggacacctatcaggagtacaaggaggctgcatctgcctaccaggaagcctggagcgcactccggaagaaaccatcgtttgcatcctggatcagaaacccacctgactaccaccagtttaaatgaactcttgctgctaccaggaccattcatattgatctgccttctccc

SEQ ID NO: 4333 - DNA, 1474 bp, Cricetulus griseus
cagtgaccaaaacccattcccaggcatcatccttgaccagtacagaagaccttgccagcagctgctctcccagtgctgtggtggccaacggcaaagacgttgagatacttttgcccaccagcagctagtcccttggagtgagtctccacacttgacattccatcagatgtcatccaagagctcagagttaaaccttggagtcagatcatattatttattttgatagtagctacagccatctgtataatacattcagtgtatttaccttttggtatatttttttttaagtagaaactgagtactttgggttttatgactcacctctttgtactaagctagaaggggaccccacagacggcggtgatctgctgtcagtttgggagctagaattactcagcactcatttcaaattatgcagaagcagttcatgcagatttttatcccagatgaacatgctttaaaagtgcctgaaataagactgccacatgaatgtgattctccggcagagccgaaagacagagcatttattgcagaaaatgagatcctctgaatctgaatgtcaaaagccaacactgcttttaatcctctccgactgttcaataccagctttgtgttccaaaccaaggtttgcatacgtggagtggaaatccttctaaaggggcgtgatctctgccaggctgagccttgcgcttcattaagcccttgagaaaccctcctgagcactaagcagttagggtgctgattttcttgtacttttgaaaaattaagtcattctcagtttcctgcatcagttctagaatagagtgaaatcacatctccattccaaaccaccttcaagcatcgactgttgggaacttctggttctggttgcttttacttgaataggaaatgacctaatgagctctttattctgtaatcaaaaagcaataacttaaaagtcactctttgtaatattgtaggtcagaattatacagggtttaccaaattgttaacatttaattctccatgctgccagcacttgtaactgtggaaccaaatggtgtctaccaaaacaatggaggcatgtgaaactccccaaagcaatccagcattgaatttattcctattgcgattccaaaacagagcagtgatggtcaaaagctgaaccttctaatcaggagagactccaatgccagaacgtccttacctctcttgctttaaatggtaatcttaaaagttgcattgtactcttcctctttttggagatagatatatatatagagagagaaatgctataaggaagtttatttcttaggttcactgaacaatatttcttttacagtgtaatatgggggtggggatatgcaaaagaaatgtgtatttttgctagttgcctatcttctgagataataagcacaatcctgaaatggatccaataattcagttagatgttatagattagtatttaagtttgcagtaggggtgtgtgtgtgtg

SEQ ID NO: 4334 - DNA, 1474 bp, Cricetulus griseus
cgctatccaagtgctctgcaggttactatagagaccggcgagcgctgggcctgcgaactccaaagaggcgagcagccgcgccccagtggactcttgggacccaaacgccatgtctttccgcgacctccgcaatttcacagagatgatgagagccttgggatacccacgacatatttctatggagaatttccgctcacccaacttcgggcttgtctctgaagtgcttctgtggcttgtgaaaagatatgagccacagactgacatcccttctgacattgagacggaacaagaccgagttttcttcattaaggcaattgcccagttcatggccacaaaggcacatataaaactcaatactaagaagctttatcaagcagatgggtatgccgtgaaagaactgttgaagatcacatctgttctttataatgctatgaagaccaaagggatggagggctctaaagtaggagaggaagatatcagcaaattcaagtttgatcttggctctaagattgcagacttaaaagcagccagacaacttgcttctgaaattactgccaaaggagcatctctgtatgacctgctgggcaaagaggttgagctgagggaaatgagaacagaagccattgctagacctctaagaaataaacgagaactgaaaaagtgatgagaattgacaataaaagataatttggcacaggttcagaagactaaagacctactcaataatgtggcctctgatgaagctaacttggaaagccaaaattgaaaagagaaaattagaactggaaagaaatcggaagcgactacagaccctgcagagtgtcaggccagcctttatggatgagtatgagaagattgaggaagaattgcaaaagcagtatgacatttatctagagaaattccggaacttggcttacctggagcagcaacttgaggatcatcacaggatggagcaggagaggtttgaagaagctgaaaatactctccgtctaatgcagaataagctaaaggaagaggaaaagcggctgctcaagagtggaagtaatgatgactcagacatagacatccaagaggacgatgaatctgatagtgagctagaggagagacggctatctaagcctcggacagccatggaggtgctcatgcaaggaaggcccagcaaacgcatcgtgggcacaatgcaaggtggagactcagatgaagatgaagactcagaggacagtgaaattgacatggaagatgatgaagaagatgatgacgatttggaagatgagagcattgctctctcaccagctaagcccagtcgtagggtccggaaacctgaaccctggatgagagtgacaatgacttctgaccttcttgccaagggacacagccgagagttaagagcctcagatttctaggtaaacagggaatcagcagactggaaaggtacatgtattttttttttcacttacaccatctgggcttaacc

SEQ ID NO: 4335 - DNA, 1474 bp, Cricetulus griseus
gtggacccatggtctccttttgggatttctcctgctacaattgctaaggttttgatgataagtactttctggtagaaatggatgaccttcgaccagaagaccatacaagacgatcatttgtatgccatgctaacagtcctggcattttcctgtgcagtggagtctaaagaatggtttacacatcaaccctcctccaggtttccgaagccaagattttgactgggctgactacctcaaacagtgtggtgctgaagctgctccccagaagtgcttccctccgtcaatttctgagcaccagtttaagaagaacatgaaactggaggcagtgaaccctcttcttcctgaagaagtgtgcattgccaccattactgcagtgagaggttcctacctgtggctccagctagaaggttctaagaaacctatacccgaatttattgtaagtgtggaatcaatggatatattccttgggctggtgtgaaaccaacggccatcctctcagtactcctcgccgggcaagagtgcataaacagagaaaaatcgcagtggtccaaccagaaaaacaaatattgtcttcaagaactgtccatgggggcctgaagaatcagctgaactccacacactcagtgatgaccaatggaaaatattgttgtccaaagatatatttcaaccaccgttgcttctcagggccgtatcttaacaagggaagaattgctgagctgcctcaatgtgtaaggacctgggaactgtgttctggtacttagagaggtcctcactttactcatcaatgcagcctacaaaccccagcccgtgtccttcgtgagctccagctggacaaggattctgtgtggcatggatgtggagaagtcctaaaggccaaatataaaggaaagagttaccgagctactgttgagatagtgaaaacagacagatcgagtgactgaattctgccggcaaacatgtatcaaactagaatgttgtcctaacctctttggtccacggatggttctggatacatgttctgagaattgctctgttcttacaaagactaaatacacacattattatgaaaaagaaaaaaaagtctcagatgaggaaaataagcctccttcaccaaaggaaataaggattgaagttgatgaaaggcttcacctggacagtaacccactgaagtggagtgtggcggatgttgtgcggttcatcagatccactgactgtgctccactggcaagaatattccttgaccaggaaatcgatgggcaggcccttttgctccttacccttcccactgttcaagagtgcatggacttaaagttgggccctgctatcaagctttgccatcacatagagaggatcaagtttgctttttatgagcagtttgccaactgagaaggacaagcagagtgagctgggtctttgaagcacagtgcagcaaaccctttcgccctgctctacaagtggttgctgtggtcctggg

SEQ ID NO: 4336 - DNA, 1474 bp, Cricetulus griseus
  modified_base (1450)..(1450): a, c, t, g, unknown or other
tgctgataacagcggaatcccccgtctacctctctccttggtcctggaatagcgctaccgatcactaagtagccctaagacatactaaaccctcagctgctcagtagtttttcttatgaaagtcaagtaaaaggggcataagcaaaaaaatattttttgcgtgaaggattccaaaaataaaattctctggggattgagaagaaagaaaaagagaaagaaaatgccagctgatataatggagaaaaattcctcgtccccggtggctgctaccccagccagtgtcaacacgacaccggacaaaccaaagaccgcctctgagcacagaaagtcatcaaagcctatcatggagaagagacgaagggcaagaataaacgaaagtctgagccagctgaaaacactgattttggatgcacttaagaaagatagctcccggcattccaagctggagaaggcagacattctggagatgacagtgaagcacctccggaacctgcagcgggcgcagatgaccgccgcgctcagcacagacccgagtgtgttggggaagtaccgcgccggcttcagcgagtgcatgaacgaggtgacccgcttcctgtccacgtgtgagggcgttaacaccgaggtgcgcactcggctgctgggccacctggccaactgcatgacccagatcaacgccatgacctaccccgggcagccgcaccccgccttgcaggcgccgccgccgcccccgtcaggacccggcggcccccagcacgcgccgttcgcgccgccgccaccgctcgtgcccatccccgggggcgcggcgccccctcccggcagcgcaccctgcaagttgggcagccaggctggagaggctgccaaggtttttggcggtttccaggtggtgccggctcctgacggccaatttgccttcctcatccccaacggggccttcgcccacagcggcccagtcatcccagtctacaccagcaacagcgggacctcggttggtcctaacgcagtgtctccttccagcggttcctccctcactgcggactccatgtggaggccgtggcggaactgaggggctcaggccattgctcaccctaaatttcctagcccacctctctcttccgacggacactaaaaacgacttggatattaggagagaagacttttataatttggtggctactttgttgctttttttaatttctaaaaagttactttttgtagagagctgtattaagtgactgaccatgcactgcatttgtatatattttatatgttcatattggattgcgcctttgtattataaaagttgagatgacatttcgttttttacacgagatttcttttttatgtgatgccaaagatgtttgaaaatgctcttaaaatatcttcctttggggaagtttattggagaaagtataataaaagagtgaaggaaaactaaaaaaaaaaaaaaaanaaaaaaaaaaaaataaaaaaaaaa

SEQ ID NO: 4337 - DNA, 1473 bp, Cricetulus griseus
gagtcaggtgccggcgagcctgtctttaggcgtggcggcgggctccagacccgggaagaccctcgagagtcggcccgtcggatgcccgagctgcctcggcggtgaccgtcgtcgtcttcctgcagcacattgtcccccagcagaaggtccatggccgacaaaggctccgggggcggccccctccccctggcgctgcccccggcctcccagggatgctcgtcagggggcagcggctcctcggcgggggttcaggcaacccccggcctccccgcaacctccaaggcctgctgcagatggctattaccgcgggctcccaggagccggaccccccgccagaacccatgagcgaggagagacgccagtggctgcaggaagccatgtcggcggccttccggggccagcgcgaggaggtggagcagatgaagagctgtctccgggtgctgtcccagcccatacccccagctgctggcgaagctgagctggccaccgaccagcaggatcgagaaggggcgctagagctgctggcagacctgtgtgagaacatggacaatgcggcagatttctgccagctgtcgggcatgcacctgctggtgggccggtacctggaggccggggctgcagggctgcgctggagggcagcacagctcatcggcacatgcagccagaatgttgcagccatccaggagcaggtgttgggcttgggtgccctgcgcaagctgctccgactgctcgaccgggactcctgcgacacggtacgcgtcaaggccctcttcgccatctcctgtctcgtccgagagcaagaggctgggctgctgcagttcctccgcctggatggcttctctgtgctcatgcgggctatgcagcagcacgtgcagaaactcaaggtcaagtcggcattcctgctgcagaacctgctggtgggccacccggagcacaaaggaaccctttgctctatggggatggtccagcagctggtggcccttgtgaggacagaccacagccctttccacgagcatgtgcttggagccctgtgcagcctagtgacggactttccccagggtgtgcgagaatgccgggagcctgagctgggcctggaggagctgctccgtcaccgctgccagctgctgcagcagcacgaggagtaccaggaggagctggagttctgtgaaaagctgttacagacatgtttctccagccctaccgacgacagcatggatcggtgagaccaggtggcttcttgcattctctccgtgggaaccccaggcctcctgcctccctccttcccaggcgtcctctcccaagggattgccaggccttgttcaggcctgggcctgggcctgccagcccatctctgggcagccccctggagggggtgccgagaaaggtgctggccctttggattcccctgccttgctttctgtcaccctttctggtcatgtccacactgctcttccaataaaagcatttctcctg

SEQ ID NO: 4338 - DNA, 1472 bp, Cricetulus griseus
gcggcggcggcggcggcggcggcacccggggtgtttgcggggcggcgcgcggcgtgtggggcggtgctgttggccgagctgctggagcgcgccgccttttacggcgtcacggccaacttggtgctgttcctgaatggcgcgccgttcaactgggagggcgcgcaggccagccaggcgctgttgctcttcatgggcctcacctacctgggctctcccttcgggggatggctcgccgacgcgctgctcggccgggcgcgcgccatcctgctcagcctggcgctctacttgctgggcatgctcgccttcccgctgctggccgcgccccgctcgcgcgccgcgctctgcgggacccgtccttactggacagtgtacttccaaatgcagaccacatatgttttacagagtcttcatttgaagattccagaaatctcaagtatcaccaccacccaccacacgctgcctgcagcctggctcaccatgttcgatgcagtcctcatcctcctgctcatcccactgaaggacaagctagtggacccagtgctcaggagacatggcctgcttcccatcctccctcaagaggattgctgtggggatgttcttcgtcatgtgctctgcctttgctgcaggaatcctggagagtaaaaggctggacctggtaaaggagaagaccatcaaccagaccattggtggtgtggtatacctgctgacctgcccatctggtggcagatcccacagtatgtgctcattggcatcagtgtggaatttgcatactcagctgctcccaagtccatgcagagcgccatcatgggactcttctttttcttctctggcattgggtcctttgtgggctcaggactgttagctctggtgtctctcaaggccattgggtggatgagcagccatacagactttgggaacatcaatagctgccacctgcattactacttcttcctgctggctgccatccagggagctacactgctgctcttcctcatcgtgtctgtgaagtatgatcgccagcgagccagagcggatggggggccagccagtacaaggacctgatgcagacagccagcatactcacgggttctgcagactgtaaggcctcagtgcctactaactgccagggcggtgtcagcaggcccattgagggagtgttggtgttacaacttctgaacttgcatgttgtctggactggcttcccctccctcctgcccagatgagtgtggtgagtgccttactgtgatctgtctcctgtgcacgtgggcctgccagggagatcctgggcagccactgttctgctgctggcatccttattccttacactgttacttcttcctcatagcatctcctttatttaagattagcaagcacttccatcaaggggggtagagggtcctctttagagatgaaagtgtggtcgatgacgtgagggtccctaggagcagcatctgctcccctcatagtctctt

SEQ ID NO: 4339 - DNA, 1472 bp, Cricetulus griseus
  modified_base (1460)..(1460): a, c, t, g, unknown or other
ataaggacaatgaggatgaaagctcttccactactaatctttgtgtagaagatcttcagaaaataaggattcaatagtatgattaaagataggttgtctcaaactgtcaggcagaattctaagtccttttttgatccggttcggaaatgtaatggacaacctgaccttttcaacaaccaaagcacttcacaggaggagtgatgaggtggtaccaagtagaaggcatggagtggctgaggatgctttgggaaaatggaattaatggcattttagcagatgaaatgggtttgggaaagactgttcagtgcattgctacaattgcattgatgattcagaggggagtacctggaccttttcttgtttgtggccctttgtctacacttcctaactggatggctgaattcaaaagatttacaccagaaattcctactatgttgtaatcatggaacccggcaggaacgtagaaaattggtaaggaatatccacaaaaaacaagggacactgcagattcatcctgtggtaatcacatcatttgaaatagccatgagagaccagaatgctttacagcattgctattggaaatacttaatagtagatgaaggacacaggattaagaatatgaagtgccggctaatcagggagttaaaacggttcaatgctgataacaaacttcttttgactggtactcccttgcaaaacaatttatcagaactttggtcattgctaaactttttgttgccagatgtatttgatgacttgaaaagctttgagtcttggtttgacatcactagtctgtctgaaactgctgaagacattatagctaaagagagagaacagaacgttttacatatgcttcaccagatttttaactccttttctccctgagaagactgaagtctgatgttgctcttgaagtccctcctaagcgagaactaaaagaaaaactggaaaagcttatcatccataaaaatcatttcaaaggtggtcagtctgggttaagtcaatctaagaatttcttagatcctaaggaattaatggagttattaaaaatctagagattacgaaagggaagtaaaaggatcaagagagaaggtcattagtgatgaagacctagagttgttactagatcgaagtgatctcatagatcaaatgaaggcttcaagaaccaaattaaagaaaaaaacagggatattcaagatacttgaaaaattctgaagattccagtgctgaatgtttgttttaaagcggagcgaaatggcttttaacaacttttgtttatatccattctggtagcttacctactggctttgacgtctagattgttcactttacattttggattatatcagtttatataatgtaactagtattgttacatccttgaaatgataattttctgggatttattaagtacacaattcctattaaatttgtttttcagttattattattataaaaanaaaaaaaaaaaa

SEQ ID NO: 4340 - DNA, 1472 bp, Cricetulus griseus
  modified_base (204)..(204): a, c, t, g, unknown or other
  modified_base (211)..(211): a, c, t, g, unknown or other
gccatggggacggggctgttcccggggaggctgtgatgggttgacaggtgcgtgacagtgggagctgctctcggcacaagcatgtacggcaaaggcaagagtaacagcagcgccgtcccgtccgacagccaggcccgggagaagttagcgctctacgtgtatgaatatctgctccatgtaggagctcagaaatcagcccaaacntttttancagagataagatgggaaaaaacatcacattgggggagccgccaggattcttacattcttggtggtgtgtattttgggatctctactgtgcagctccagagagacgggaaacatgtgaacactcaagtgaagcaaaagccttccatgattatccttttatgtcacctcggtaccctggaggcccaaggcccccactgaggatacctaatcaggcacttggaggtgtcccaggaagtcagccattactccccagtggaatggacccaacacgacaacaaggacatccaaatatgggtggaccaatgcagagaatgactcctccaagaggaatggtgcccttaggaccacagaactatggaggtgcaatgagacccccactgaatgctttaggtggccccggaatgcctgcaatgaacatgggtccaggtggtggtagaccttggccaaacccaacaaatgccaattcaataccgtactcctcagcatctcctgggaattatgtaggtcctccaggaggtggagggccaccaggaacgcccatcatgcctagtccagcagattcaaccaattctggagacaacatgtatactttaatgaatgcagtacctcctgggcctaacagacctaattttccaatgggccctgcatcagatggtcccatgggtggattaggaggaatggagtcccatcacatgaatggctctttaggctcaggagatatggacagtatttccaagaattctcccaataatatgagcctgagtaaccagccgggcaccccaagggatgacggtgaaatggggggaaatttcttaaacccttttcagagtgagagttactccccaagcatgaccatgagtgtgtgatccattaccaagtctccttatgaaaaccatcaggagtcggcccttcacagaactactacggaagaaaactgctcatcagtgtacagttgaaggaatctcagccaaccaaaccaaccctttagctcctgctctctcccctattttgtgaagaaagcgggtccaaatgtgattcaaacaactgtacggagtggcacattagaattgccctaaaatgaactgcaaataatcatctgtgtatgtatatgtgtgggaacgagaatgtatcgtatatgcagatccatatgcacatatacgcatacatgcattgacccacaggacattgtaagatattatcacatgacatcttaagtagaagtaagtagggacttttattccattcctttttttcacgtttac

SEQ ID NO: 4341 - DNA, 1472 bp, Cricetulus griseus
gagcaggcttggcagctgacgtgaagatggctcccgtcgtagccttcatctcatcctgtggattctgcagtcacagaacaccagaagggaatttgtggtgcaacgaaaacaatgttaacagtatgtcagacctgagctctggcgtctgcgacagcaggttactaaagcagttacatgcatgttgcattttcctcatctggtataaataactgtatttttacctgatgttttaaacttttgtaagggagtttaatgaattcacatgaggggtaatctgagtcccacagtgccccactctgtactgtattttgccatttaactgtaggcaggtattctgcagggtttcttaacatgaaactaccaagcttgagtcagcccatagtcaaatcagataacccacgtgagagctgctgtatgtgtctaattctcagttataaacatctgaccagtgcttcagcgtgtaaataagagtgcgcataactcaactaaggaaccaagcaatcaacttgcctaactgcagcccgagtagctgagcttctgctgtttttcttttttttttcttttctttctttcattttttttttttttccttttctcgtgtgtgtgtgtgtgtgtgtgtgtgtgtgtgtgtgtgtgtgtgtgtgtgtggaggctcaaacttgatgctcttgcctcaaccttccagtgctgaaattacaggcttgtgcaaccagccacacctggcaagagatatctgtgaacctttggccctcaggagaatgactgagatagattggggagttcttccagctgcacacataccatcccatgcacctgagccctcagaatgcccaccatgcacacagaggcccattctccccagtaccaagtcctctcctcactttagttcctgggcagtgcttgcttaatgttctcctggaatcccaagggcctgaggccttaggctcctgttaaggtctctgccccaggcatggtgctcaatatcgtagccaaataagttactttccttgaatatccaggaattttaaattaaagcaatggggacttaccaccttaccctggaactccaatgtaactgccttagtgttcccctgtgttgtcgtctttgatgtaaaacccagagcatctggagccagaggctgcagttctccatatgcacagtagcctttgccttcactcaatagtcctgacttaggctggtgtagatgggccatgagatttgtcctgaggaagagactgcaaagacatgtgaagttttttagtcctaaatgctgttttgtttactttctgtcgagaggatatttacccctgtcaaattcaaactatagtactgtgtaattatgtataaaggttttttatttatttgaaatagattagatatacatttttaaatttaacatctggctggacagtgttctattaactcattgaatgtgtttcctttgtcttgtgttaataaatattgatgcttg

SEQ ID NO: 4342 - DNA, 1472 bp, Cricetulus griseus
tcaggtagcacaaattgcagagacagatgattctgcagaatcagaagtaatcgattctcataaacgtagagaaattctttcacgaagaccctcatatagaaaaatactgaatgaactttcctctgatgtgcctggtattcccaagattgaagaagaaaaatcagaggaagaaggaacaccgcctaacattgctaccatggcagtaccaactagcatatatcagactagcacggggcaatacactgccacaggtgacatgccaacttaccagatcagggctcctactactgctttgccacaaggtgtggtgatggctgcctcaccaggaagtctgcacagtccccagcaactagcagaagaagcaactcgcaagcgggagctgaggctgatgaaaaacagggaagctgcccgggagtgtcgcaggaagaagaaagaatatgtcaaatgtcttgaaaatcgtgtggctgtgcttgaaaaccaaaacaagaccctcattgaggaactcaaggccctcaaagatctttattgccataaagcagagtaactgtgtttgacttggaccttgtttactgtgaactctaatcgaggcaggcgatgcagcatcctcctaatggccatgtggacttgtagatgggtcacttaacccttgcttaagaatccagtttggcttagggtgtgaattgggaatactgttccatgggttgcaatgcagctctactcatgttaccaagcttgctctattgtcaatagcatgcaacatatgttttgtttgcccttctgcttctactttttccagggaagctgctaaagaatgtcgacgtcgaaagaaagaatatgtaaagtgtctggagagtcgagttgcagtgctggaagttcagaacaagaagcttatagaggaacttgaaaccttgaaagacatttgctctcccaaaacagattagtagaaatatttaactatgaactgattacagcatgtacagttgcttttgaatgcaatacaatatatagccggcaagaattatggccttttcctttgtatcattcatctgactttctaatatctaacattcctaaaatgcttcattgtatttaagtagctcttacctctaaggtctatttttttttagaagagacaaactgtaaaaaaaatgtatgtaacaaattcttaaaatgaaatatttgtaagacttgtttcagtgcaacatatttgcagttcccagtctctctgtcacgaatagtgtcctatgcaataaaaatgttgcaggttttaagaatcatttcaggaaggatgatcaaaggcagtgcatccagcagtacaataaaaaatcaaaccacagacatacctacaggaaagaatagaaaggaatgtgtatcttgatgacaatggctatgtgagaagaatagcctagaaatgaacttgtgcatttatagatttataatcgtcactttgtaaaagaaaataattgtattgc

SEQ ID NO: 4343 - DNA, 1472 bp, Cricetulus griseus
ctgaagtacaagctaacacgaggactgctgtgttcaacttgaaacacagcttttccttacgtttggggctctatgggttggcttccttgactgaatttctgtcagttaactaaattctggactcagtggattttctggagaccagaaaatgagacgattgtcctgaagaatctactagaaacttttaagcaacacgtttcatgcttcttttgaagatttcagagaagaaaatatttgtaagaccacaaaaagaaacaaataattttcgaataaactggctgttgctgagaccacatctgaataccaaaggcgaccgctgcagacaaaaggactccctgtaagctgtacagcctgacaatggtaagctccaacggctcccactgcccttacgatgactcctttaagtacactttgtatgggtgcatgttcagcatggtgtttgtgcttgggctgatatccaattgtgttgcgatatacattttcatctgtgccctcaaagtgagaaatgaaactacaacgtacatgattaacctggcaatgtcagatttgcttttcgtctttactttaccatttcggattttttactttgcaacacggaattggccatttggagatcttctctgtaagatttcagtaatgctgttttacaccaacatgtatggaagcattctgttcttaacctgtatcagtgtagatcgatttctggcaatcgtctacccatttaagtcgaagactttaagaactaaacgaaatgcaaagattgtttgcattgctgtgtggttcacagtgatgggaggaagtgcacccgcggttttctttcagtcgacccactctcagggtaacaatacctcagaagcctgctttgagaactttccagcagccacatggaaaacctatctctccaggatcgtgattttcatagaaatagtggggttttttatccccttaattttgaacgtcacttgttctagtatggtgctaagaactttaaataaacctgttacattaagtagaagcaaaatgaacaaaactaaagttttaaaaatgatttttgtacacttggtcatattctgtttctgttttgtgccctataacatcaatcttattttatactctctcatgagaacacagactttcgttaactgctctgtggtagctgcagtgaggacaatgtacccaatcactctctgcattgctgtttccaactgttgctttgaccccattgtttactacttcacttcagacacaattcagaactcaataaaaatgaaaaattggtctgttagaagaactgaatccaggttctctgaagttcagggcaccgagaattttatccaacacaacctacaaactttaaagagtaaaatatttgatagtgaatctgcaatataagctgcctgactaaaccactgggactgctccgtgttcaactgtgaaaactgtgctcttggaaactgtttctccagctccaa

SEQ ID NO: 4344 - DNA, 1471 bp, Cricetulus griseus
  modified_base (577)..(577): a, c, t, g, unknown or other
gagattctcaatgggatcaaagtccttaagctgtatgcctgggagctggcgttccaggacaaggtcatggacatcaggaaggaggagctgaaggtgctcaagaagtctgcatacctggcagctgtgggcaccttcacctgggtctgcacacctttcctggtggccctgtcaacctttgctgtgtatgtgaccgtggatgagaacaacattctagatgcaaagaaagcctttgtgtccctagccctgttcaatatcttgcgcttcccactcaacatcctgcccatggtcatcagcagcattgtgcaggccagcgtctccctcaagcgtctcaggatctttctgtctcatgaggagctggatccagacagcattgagaggttgtcgatcaaggatggtgggggatggaatagcatcactgtgaagaacgcatcattcacatggggtgtactgtaactctgacatctacctcttcgatgaccccctctcggctgtggatgcacatgttgggaagcacatctttgagaaggtggttggtcccatgggcctactgaagagcaagctcaagaacataaacgtnaccatcgagggtggagaaaaggttgggtattgtgggccgtacaggagctgggaagtcttctctcaccctgggtttgttccggatcaatgagtctgcaggtggcgacatcatcatcgatggggtgaacattgctaagattggcctgcacagcttgcgcttcaaaatcaccatcatcccccaggatcctgttttgttctcaggttctctccgcatgaacctggaccctttcaatcggtattctgatgaagaagtctggatggccctggagctcgctcacctgaagggcttcgtgtcagctttgccagataagctgaatcatgagtgtgcagaaggtggagagaacctaagtgttgggcagcgccagcttgtgtgcctggcccgggctctgctgaggaagacaaaagattctagtgttggacgaggctacagcagctgtggacctagagacagatgacctcattcagtccaccatcaggacacagtttgaagactgtactgtgctcactattgctcaccgccttaataccatcatggactagtacaagggtgatcgtcttggacaaaggagaagtccgggagtgcggttcaccctccgagctcttgcagcagaggggcatcttctatagcatggctaaggatgctggcttggtgtgagctgggtactggcatatctggtaagaactatagggccagcatcccaggtatccaggggtgagccggcaaccctgggaacccaagcctcccgacagaaaccaaaaaataagaaaaccaagctaaaagagaagcaaaacgcacaaagcagcagccaccatctggccccatcctgaatctgaccttgaagaaactgggagacagatgtactccactttaaacacacgcctggcctctgggacc

SEQ ID NO: 4345 - DNA, 1471 bp, Cricetulus griseus
ctgctaactcagctgctgcttccagcactttccccccacacaatgctgcctgctgtcctaacctccctcctggggccattccttgtggcctgggtactgcctcttgcccgaggccagacccccaactacaccagacccgtgttcctgtgtggaggggacgtgacgggagagtcgggttacgtggcaagtgagggtttccccaacctctaccccccaaataagaagtgcatctggacaatcacggtgcctgagggccagactgtgtccctgtccttccgagtctttgatatggagctccacccttcctgccgctatgacgctctagaggtctttgctgggtctgggacctcgggccagcgacttggacgcttctgtggcaccttcaggcctgcgcctgtagtcgcccctggcaaccaggtgactttaaggatgacaacggacgagggcactgggggacgaggcttcctgctctggtacagcggtcgagccacctcaggcactgagcaccagttttgcggggggcggatggagaaggcccagggaaccctgaccacgcccaattggcctgagtcggattaccccccaggcatcagctgttcctggcacatcattgcaccctcagaccaggtgatcatgctaacctttgggaagttcgatgtggagcctgacacgtactgccgatatgactctgtcagcgtgttcaatggtgctgtgagtgatgactcgaagaggctggggaaattttgcggagacaaggcccctagccccatctcttccgaagggaatgagctcttggtccaatttgtatcggatctcagtgtcaccgcagatggcttctcagcctcctacaagaccctgcctcgggatgccgtggaaaaggagctagctccaagcccaggggaggatgtgcagcttggtccccagtcccgctctgacccaaagacaggaactgggcccaaagtcaaaccacccagcaaacctaaattccaacctgcagagaaacctgaggtttctcctgatacccaggagactccagtggccccggatccacccagtgccacctgtccaaagcagtacaagcggctaggcaccttgcagagcaacttttgtgccagtagtctagtggtgactggaacagtgaagaccatggtccgaggcccaggggagggactcactgtcaccatcagtctccttggtgtttacaaaagcggaggactagacctgccctctccacccactgacacctctctgaaactctatgtgccctgcaggcagatgccccccatgaagaaaggagccagctatctgttgatgggtcaggtggaagaaaacagaggccccatccttcctccagagagcttcctggttccttacaagcccaaccaggaccagatcctcaataacctaaggaaaaggaagtgtccctcccaacctaggccagctgcctgaggtcctagccagatgcagcctc

SEQ ID NO: 4346 - DNA, 1471 bp, Cricetulus griseus
tgctcgagaccttgatgacgccctttcctgcaggcctctcactgatggcacctttgaagtgggcgtccacatcgctgacgtgagttacttcgttccggagggatcctctctgaatatggtggctgctgagagagccacaagtgtctacttggttcagaaggtggtccccatgcttcccaggcttctgtgtgaggaactgtgcagcctcaaccccatgactgacaagctgaccttctctgtgatctggaagctgacccctgaaggcaagatccttgaggagtggtttggccgcactgtcatccgttcctgcaccaagctgagctatgaccatgcccagagcatgatcgaaaatccaactgagaagcttcccgaggaagagctgccccccgtttcccctgagcacagcagtgaggaggtgcaccaagccgtcctgaacctgcacagcatcgcaaagcagcttcgccagcagcgctttgtggatggtgcactccgtttagatcagttgaagcttgcttttacgctggaccatgaaactggaatgcctcaaggatgtcacatctatgagtaccgagacagcaacaagcttgtagaagagttcatgctcctggccaacatggcagtggcccacaagatcttccgcaccttcccggagcaagccttgctgcgccggcacccaccaccacagacaaagatgctcagtgacctggtggagttctgtgaccagatgggactgcccatggatgtcagctctgcaggggctctcaataaaagcctgaccaaaacatttggagatgacaagtactctctggcccggaaggaggtgctcaccaacatgtactcccggcccatgcagatggcgctgtacttctgctctgggatgctgcaggaccaggcgcagttccggcactatgctctcaacgtccccctctacacacacttcacctctcccatccgccgcttcgctgacgtcatagtgcaccgcctcctggctgctgctctgggctacagtgagcggccggatgtggagcctgataccctacaaaagcaagctgaccactgcaatgaccgcccgccgatggcttcctaagcgtgtgcaggaacttagcattggcctcttctttgctgttctagtgagggagagtgggcccccctggagtctgaagccatggtgatgggtgtcctgaaccaagccttcgatgtgctggtactgcgctttggggtgcagaagcgcatctactgcaacgcactgccccttcgatcctaccactttcagaaggtggggaagaagccagagctcactctcctctgggaacctgagggtcttgaagaggagccaacacagcaggtcatcaccatcttcagcctggtggatgtggtcctgcaggcagaggccacagccctcaagtacagtgctatcctgaagccaccgggccaagtgtgaaaaaaaaaaaaaaaaacaaaaaaaaaaaaa

SEQ ID NO: 4347 - DNA, 1470 bp, Cricetulus griseus
tctttggctctgggtggaacgtgtctgccatgtacagctccagccactctgaagaggaacataagatggtgctttggaatgacagtaccatcaggcacagtaggactttgcagctggacccgaacatccctggagttttccgaggcccctacccttttggcattgaccctatttggaacctagccacaaaccgcctcaccttcctcaattccttcaagatgaaaatgtctgtgattttaggaattattcacatgacttttggtgtcactctgggaatatttaaccacttgcattttaggaagaagttcaacatctacctcggtgtccgtccctgagattcctgttcatgctctgctatctttgggtacctgatcttcatgatcatctacaagtggctagcatactcggcagagacctctagagaggcccccagcatcctgattgagttcattaacatgttcctgttcccatccagcgagacacatggcctttacccagggcaggcacatgtccagagagtgttgctggccctcaccgtgctgtcagtccctgtgctcttcttaggaaagccactcttcctgctgtggctgcacaatgggcgcagttgctttggcatgagccggagcggttacacacttgtaaggaaggacagtgaggaagaggtttctttgctgggcagccaggacatagaagaggggagcaaccgcatggaagaaggctgccgggaagtgacatgtgaggagtttaactttggggagatcctgatgacgcagaccatccattccatcgagtattgcctgggctgcatctccaacaccgcatcctacctgaggctttgggccctcagcctggcacatgcacagctgtctgatgtactgtgggccatgctgatgcgtgtgggcctgcgtgtggacaccacctacggggtcttgctgctgctacctgtcatggctttctttgcagttttgactatttttatccttctggtcatggaaggactttctgcatttctccatgccatacgccttcactgggttgaatttcagaacaaattctacgttggtgcaggcaccaaatttgttcctttctccttcagtctgctctcctccaagttcagtaatgatgacaacatagcatgatccacattgctgcagccatccggcttagagatttatggagaactatcatgttacagaattcactcaagtcagatttctgacaggaatattccacccttgttgattgccttatgattcagccaaatgattctgtaagatacgcctctcctcatgttgaagattttgtaaagctcaccacttcggacacagaaatttcattggtttttattatgagcaaatataaattatgccaacgttacattaaagttattttttaaagtgtaagattagaggagaaaaaccagttggatggctagctaaaatgttttagatacttgattcccctttcaac

SEQ ID NO: 4348 - DNA, 1470 bp, Cricetulus griseus
ccgccgtccccgttctcggtcggtccgccgttaggccgcgcctcaggcccagtccgtggcgacgccggcaggtgatgccaaatacagccatgaagaaaaaggtgctgttgatggggaagagcgggtcggggaagaccagcatgaggtcgatcatctttgcaaattacattgcgcgcgacaccaggcgcctgggtgccaccatcgacgtggagcactcccacgttcgattcctggggaacctggtgctgaacctgtgggactgtggcggccaggacacctttatggaaaattacttcaccagccagcgggacaacatcttccgtaacgtggaggttctgatatacgtgtttgacgtagagagccgcgaactggaaaaagacatgcattattaccagtcgtgtctggaagccatcctccagaattcacctgatgccaaaatcttctgcctagtgcacaaaatggatctggttcaggaagatcaacgtgacctgatttttaaagagcgagaggaagacctgaggcgtttgtctcgcccgctggagtgcgcctgttttcgaacgtccatctgggatgagacgctctacaaagcctggtccagcatcgtctatcagctgatccccaacgttcagcagctggagatgaacctaaggaattttgcccagattattgaggctgatgaagttctgctgttcgagagagcgacgttcttggtgatttcccactaccagtgcaaagagcagcgtgatgtgcaccgctttgagaagatcagcaacatcatcaagcagttcaagctgagctgcagtaaattggccgcttctttccagagcatggaagtgaggaattccaacttcgctgccttcatcgacatcttcacatcaaacacgtatgtgatggtggtcatgtcagatccatccatcccttctgcagctactctgatcaacattcgtaatgccaggaaacactttgagaagctagagagagtagatggccccaagcacagcctcctcatgcgttgagtaatgccaaatgttctttagtaaaatgccgaattacttttttttttcctttgcatcccttgtttttgatattcataatgtcgtgtgcttaaaaagtgagctttgaaatgtgtgcttactatcccatctcatccctagtgttagcattggacgctatgtactcagctacccagtagagcttcaagacggcctttatgaaaagttggtgtggtgtagcactaaagtaggtggtttgtgtgtgtgtgtgtgtgttctggttacctggttataatagataagaatattaaagcagttatcttctgtattatcagatcacaaaggtggaatgttactattttatcagcaagatattaaaatgtatttctaaatcctcggtttcaatcatgaataaacatttattattagcaacttaaaaaaaaaaaaaaaaaaaaaaaaaaaaaaaaaaaaaaaaaaa

SEQ ID NO: 4349 - DNA, 1470 bp, Cricetulus griseus
gacaaaggagcaaggagcagtcgctgctgctttggaaagagccactgttactgagattgccaaaatgctttggagtttttaactgaatctaagaaagtccaaaatagatttgagactgtaaaggcggaagctgcagcgagggggactcagtgccaatgcatcaacaaaaaagacaaccagagttagtggaaggaaatcttcctgtttttgtgtttcccacggagctgatattttacgcagatgatcagtcaacacataagcaagtgttgacgctgtacaatccctatgagtttgccttaaagttcaaagttttatgtacgactccaaataagtatgttgttgttgacgccgcaggtgcagtgaagcctcagtgctgtgtggatattgtgattcgtcatagagatgttcgatcctgtcactatggtgtgatagacaaattccgcctccaagtctcagagcaaagccagaggaaggctttaggaaggaaagaggttatcgctactcttctcccatccgcgaaagaacaacagaaggaagaagaggagaaaagaataaaggaacatttaaccgaaagtgtattctttgagcagtcatgtcaaccagaaaacagaagtgtctcttcaggacctagtttgctaactgtcttactgggagtggtatgtattgcggccctgatgctgcctactctgggggatatggaatcgctggtgcctctctacctccacttaagtgtgaatcaaaaattagtggctgcttatatcttaggtcttatcacaatggctatacttagaacatgaacaaggattaaaactgacttctgaaggaaatttatcttaaatatgaatgtggactgccttttatctctatttcactccattaacacactacaaaatactgaatgatttcaaataactgcaaatgtgtagtatatattttcaattagtctataattttatttgaaggactctagcactttatgttacagacaacaaaaagatacttctgagtgaaacatagggaattatttgaagaaattcttttaaaatctatacctgttgtgcaaataactttaaatgttatttttcatcttttttttttttaattcactttgataagggtcatgggtccttcaaagtttaagacctaaatgagcaactgaccagcttgaaaattctaaaggaaggtaggcattttgtaaacttagtatgttcatcctggctttacctctggttaacccttaatgttattaaggaaaaaataaccttttggttttctcccaagtcccttgcttgcctgagtgtaagtgatttgccctgattaggaatgtcagatgacagttagtttccaaggacatgattttttttcacctttaaactctaagccaagtagagaaagccctagatatctgtgtctattttgtatcactcactgagacattttttaagtttttatttattaaaaaaattaacc

SEQ ID NO: 4350 - DNA, 1470 bp, Cricetulus griseus
gcactggtggcccggggcaattgtaccttctacgagaaagtgcggctggcccaagccagtggggcccgtgcactgctgattgtcagcaaggagaagctggtccctcccggaggcaacaaaacacagtatgaggagataagcatccctgtggccctgcttagtcacagggacctgcgagacatctacaagcgctttggccatgcggtgatggtggcactgtatgcgcccaaggaaccggtgatggactacaacatggtcatcatcttcctcatggctgtgggcaccgtcgccctcggtggctactgggccggcagccgcgatgtaaagagatcatgaagcataagcgagatgatgggcccgagaagcatgaggatggaggcggtggacgtgacgccggtcatgatctgtgtgtttgttgtcatgtgccttctgcctgtacatgttgaagactatccgcctgcctaccttcaaggcctgcacgatgctgctgttggtgctcttcttctacgatgtcttcttcgtcttcatcacccccttcctgaccaagagtggcaacagcatcatggtggaggtggccaccgggccctcgaactcatccacccaggagaagctgcccatggtgctgaaggtacccaggctgaacacctcgcccctcgccctgtgtgaccggcccttctccctcctgggctttggagacatcttggtgccagggctgctggtggcttactgccacaggttcgacatccaggtgcaatcttccaggatctactttatggcctgtaccattgcctacggcctgggtcttctggtaacatttgtggcacttgtcctcatgcaacgtggccagcccgcgctgctctacctggtcccctgcacactgataagcagctgcaccgtggctctgtggcgccaggaactgggtgtcttctggacaggcagcggctttgcgaaggatgtacctcagtcctcatggactccaatggaggggcctgtgcctcgaagggactcagatgcccccatctcccagcaccctccaggtgaagagccagctaagagacccctgtgggtcactgttccaagccagtaaatgtctcttgctccaggttctgcggtctgcagcagagtgggaattggccatgcataaatggggccatgtccccagcaaatagtcctcagctcggatgtgcaagtcttccatgccatggccactgccctctgccccaacagtggcttctggacctggcatctgtcctctacctcaccagccaggctctggactccatgacggatctgcctgcagggagcccactacacatgctgcatgtcgtctctgaggcagaagccacagtcctcacactcgagatggagcctatgacctgtgtccactcacacttgcatggaaaagtgtgctgcacggtgacaggcagtggcagctgggcagtcctcctagagcttgggggaggggacagg

SEQ ID NO: 4351 - DNA, 1470 bp, Cricetulus griseus
gaggccgtcaccctgcgccgggactgcccagtgccgctccccgggacggagacctcctcgtccggaatcgattcgttggtattaacgcatctgacatcaactactctgctggccgctatgacccatccgtgaagccccctttgacataggttttgaagggattggtgaggtggtggccttaggcctctctgctagtgctaggtacacggtgggccaggctgtggcttatgtggctccaggttcctttgctgagtatacagtggtgcctgctaacattgccattcccctgccttcagtgaaacctgagtatctcactctgctagttagtggcaccactgcctacatcagcctgaaagagctcggagggctgtcagaagggaagaaagttttggtgacagcagccgctgggggaacaggccagtttgctgtgcaactttcaaaaatagccaagtgccatgtcattggaacctgctcttcggacaaaaagttagcttttctgaaatccattgggtgtgatcgccccatcaactacaaagcagaggccgtgcatgcagtcctgaagcaagaataccctgacggtgtcgatgtagtctacgagtctgttgggggagccatgtttgacctggctttggatgccttagccaccaaagggcgtttgataataattgggtttatctctggctaccaaagccctgcaggtctttcacctataaaagcaggagctctgccggccaagctcctgaagaagtctgccagtctccaggggttctttctgaaccactacttctccaagtaccaggctgccatggaacacttgctagagctatatgctcatggggaactggtttgtgaggtggacctggggcacctggctccagagggaaggttcattggcctggactccatattccgggctgttgactatatgtacactgggaaaaatactggaaaacttgtggttgaattacctcactgtgtcagcagtaagctatgacaacagaacaatgacacaaaccaaaggagaaagaaaaggaattctccatgtcttagaatgaacaaaatgtatcttgaaacaaaagtatagtgttaatgaattctgctcccccgtctccttgggggtaaaaataatgtgcctcaataaaagttctctctatagctaagaaggtaaaactgcttgcccttcaccttcggtgtccaagggctgcctgccacttttgtcacagaatcaaaaccccacggtgggtgcctttctaattgaaggtgaagcctgtcagattattttccagtcttgggtttcagtacatcaaatgtgctcaataaatggggatgcaattaagagtactcttgtgaaaagttggggccagatttaattctttccctgcatctgaggagcagagagatcctgtttctgagtagctgtttagtatctattttacaagatttactcatttccaggtacctaatgtagct

SEQ ID NO: 4352 - DNA, 1470 bp, Cricetulus griseus
  modified_base (352)..(352): a, c, t, g, unknown or other
  modified_base (808)..(808): a, c, t, g, unknown or other
tacgtgactacatggctgtgctcatcaaggaagacgggaccctccagcttcggtatcagttgggcaccagtccctacgtgtaccagctaaccactcggccagtgactgatggccagccccacagtgtcaacatcacacgggtctaccgaaacctcttcatccaggtggactacttcccgttgacagaacagaagttctctctgctggtggacagccagctggactcacccaaggccttatatcgtggggcgtgtgatggagacaggagtcattgacccagagatccagcggtacaacactccaggtttctcaggctgcctgtctggtgtccggttcaacatgtggctccctnaagacccatttccgaacgccgcgccccatggcagcaaaactccccttcctccttcaggccctgcccaggcccctgctcctactccagctcccacccaggttccagccccagccccagccccagccccagccccagcctctggtccgggccccagggaccagaaccttccccagatcttggaggagtccaggtctgaatgagtcataagggcttcagggaccaagtccaactcctctaagtccccccaactccttcctttcccatatcctgccagggacattttggctcttcttagcaggctctgttcaccgggaggattcccctcttgccaagttcggtgggcagagctacagatggggaccaaaaggggagttgggccaagcctcactgcctaaaccaatgccctgcttacccctttccccccccccaggctcctggctgttggccggccccacnggaaaagccccatggggctgagacaggcctttcctgccatctctgtcccagctgctgctggcagggattaacaacggagggcaggggcgatgaattgcctcccttcctgtgcactgtcagcagggacagatgtggggccccacctcaccccacccccttctgtttttacagagaccaagaggcctcagtttagcactttagtacctccgctgcttcacacgctttagccaaagccataaaaagcctgcaagtagaaaaaatgatgcagacaccttgcctagctagccctctactcttccacccttttccaaaatatgcaatagccttggtgcctgtgcctgtcccccttcaatgcatgaggaacccgcttccctctgctcagagacgctgctgtttgcccaggaggtcatattctttatatatatttttggttgcggtctctctctagagaaactatatattattctaatttttaaattatgtttatatataaaagaactcagtgggctgtcctgtgctgtgctgagtctgtggtaagcgccttccatgctggatgtctcctgagtcctgccagccactcaccaacttgctgggcctccactcaaagtcagggcagagcccgctcgtgccctcacctgagcaggtccaataaagcagagtgg

SEQ ID NO: 4353 - DNA, 1470 bp, Cricetulus griseus
ccgaggccggcgggatgcagcctccgggcccgcccccggcctatgcgcctgctaacggggacttcacctttgtctcctcggcggacgcggaagatctcagtggttctatagcagctccagatgtcaaattaaaccttggtggaggtggagaatttatcaaagaatctacagctactacatttctgagacaaagagggtatggctggcttttggaagttgaagatgaggaccctgaagataacaagccacttttggaagaattggacattgacctaaaggatatttactacaaaattcgttgtgttttgatgccaatgccatcgcttggttttaatagacaagtggtgagagacaatcctgacttttggggtccactggctgttgtccttttcttttcaatgatatcattatatggacagtttagggtggtctcatggattataaccatttggatatttggttcactgacaattttcttactggctagagttcttggtggagaagttgcatatggccaagtgcttggagtgataggatattcattactccctctcattgtaatagccccggtacttttggtggttggatcttttgaaatggtgtctacacttataaaactgtttggtgtgttttgggctgcctacagtgctgcctcattactcgtaggtgaagaattcaagaccaaaaagcctctcctcatttatccaatctttttattgtacatttattttttgtccttgtatactggggtgtgatccaagttgtacatgaattgaaagatggtgttacaattgtattaagctgggaattcttgctgaaggggttggaaaaaacaaaactagtgaaattttatacattccaaatagaaaggcaggtttaaaatctttttaaaacaatattttttgtatttaagtaattgcagttatctgggatttttttttttttcagattgtgtcaatattcacctgaacacttgtgccaaaagcacctagataattgtatctcacttgaagtataaatttgacaacatcctgaaaaatatgaaagtgcaatttttttctttaaagaatttcctcctgcaccacagattctgtagatacctatttatatttatacatatatatttatgaaataattcttattcacaaaatatatttctgaatagcctaaaaattaagatactaaatctgatgctaaactttccttaatttggccactaatgtcttttatttaaaatttaaaatttgtttttaaattgtgtaatttttgaaataatagttgtgatatggatttgatttgtgtgtatgtgttcttaaaaacagttttgaatgtctaaacatttgatttaaagtttctgtttatctttttgaccaaaggagcaagagatataattgatatggcattcattaaaatcattaatatataggaaaaataatatttatagcatcagtaaatattttttaagtggta

SEQ ID NO: 4354 - DNA, 1470 bp, Cricetulus griseus
ggttatgcccaggggtggggaagcagtaggtccctggaggaagggaagaataagaatccagaggttcctggccgctactctgaatcgagtaccggatctcttagatcccagaagcgcagaaaaaagggaagggtgtcccatcccgcttcctggcttttcgctttagccatggcggaggcaggggccgggctgagtgagaccgtcactgagacaacggttactgagacaacggttaccgtgacaaccgagcccgagaatcggagcctaaccattaaacttcggaaacggaagccagagaaaaaggtggaatggacaagtgacactgtggacaatgaacacatggggcgccgctcatcaaaatgctgctgtatttatgagaaacctcgggcctttggtgagagctccaccgagagtgaggaggatgaagaagaaggttgtggtcacacacactgtgtgcggggtcaccgcaaaggacggcgtcattcaaccccaggacccactccaaccactcccccccagcctcctgacccatctcagccccctccaggacctatgcagcactaaatccctctcaccatgtgtctgcctggccccaaatgtatccatctggctacatggggattcaacccatggtctgatcccttctcctgccccctccttccctctcctgcctgatagagaagaggaagaggagggtggatagagatcctggaattctgacttgctgctgttccagaacccaggcttctgggttctcccagcctctccttccctacagtttgctctgtgcctgggattcaggcatcttggtctcagtctgtcccttttgttctcactgccaaaacacctgtcctgggatccagttatcttggccacctgcacccttagcttgagtcccaagcatttaaattgggttttcaaccatcccagctttcactgccaggaccccagtcagattccaagcaatattgcaccccagctctgcatattaatcctggcttacagttcttccacttacgaagttatcctaaatcttagtccttgcctgtgggaatctaaggttttggggacaccatagggttcaaaaatagtcatgacctgaatatagcatttctgagctggctgagaccaatgacttagagcctacaagtttctcagcctttaatctttgagcttcatcgctgttgtctaaggggcctgggtcccttaaaggaaagagggagaaagcagagatgagggaacaggccctgcagtacactcctaccctttcctgcctgatgtctctgccagcccaggtgtcttgctctctcagccctccccaactggtgctgggatctgggtattgtcctccaggcctctagctgtgcacagtacagagatcagcaaaacccataccaccactgagatctcatttattgccacagatgcacaaaataaataacccaacattgaaaaaaaaaaaaaaaaaaa

SEQ ID NO: 4355 - DNA, 1470 bp, Cricetulus griseus
gagaaaagaagcaaggtcacttgttggagacaccttctggtcctggctccatctcttcagccagcatccgcctcaggaatgaagcaggcaactctgacttctcattctcctacactaactccaccatgtgggcatccatccatggtatggtgaataaacttgagcagctctgcaaataggacactgagcacgccaggcagtccgtgccactctgcatccatgttcccatgcaaagaggagtattactacaaacaactcacctccagcagagaaagggaatgcagggagactaatttgggggtttaattccattatcatgccagccgacatgactgaatgatgtagttaggatttttatcttagtctagtaaagatcaggcttggacctgaaaaatcattctcatctggcaggctcatttttgacatcggaaagggcagaaaccattttgccctactagtgtaataggaattatagcccgaagctgaagtccaaaagccataagaaggaattcagcgacggggcctgagaagcgacattattttgagttgctgtttttaggatcaccaaaaaaagcacacgtcattttacatgttaaagcaaacctgtgtgtcaccaagtaggcagcctgtcaatctgagaagctgccccacctgctatgaggttgggactcagtaccagttagagcctgcctggtctagttggcgctgtttttctcatagagtgcatgctgcctttcgcttgtttactctgcccgttgttctgtcgacattgttttccccagaggctacaggacagcagtgacttcagtgaaaccccaatctctgctgtggaacacttccccacacggtgtgccatgccagtgtcacatggacataccatttctgaacaccgtccgatggcaacataatggattagctcactgctgtgttctatcctttggcatctctgaccagcaatcagtgcataattcttacagcaagatcaagaaatgaacctgtagcgattatgtaaatgaacatgttggcctcttaacacctgttactagcagacttcctatgaggaagttagtttcgttttaatgaaatgcttcggttttttaatcttttttgtcgttcccctcaccaccactcccagtctcccaactgtgtgcttacttcccttgtttaatttaagtgaaacttcttgtccctgagagttgatatggcgggtggggtgggtgacttctggttttgtgtttatttagggcatccataggcctcaaggatatttcctttagggtcatattcctcagaaagtcttcagtctttgtttttattttgtttttcttaaaggatatttttaaagcttaaatttgtatattaatttaggactttatttagaagtataggctgccattggtggcagcagtatattctgaaatgtctcatagatatatatttttgaataaagatggtgttgttgaaacaaca

SEQ ID NO: 4356 - DNA, 1469 bp, Cricetulus griseus
ggcggcggccgtggcaggggcggggcgcggcgcgggtggcggcgcggaccccgggcaggaacggagccgggcccgaagttgggttggcgcggaacggagcgaaggccgaaggatggaaccaaatgaggagttggaagaggaggactctcccggtggccgtgaggatggcttcactgctgagcacctggctgcagaggccatggcagccgacatggacccctggctggtatttgatgcccgtactacacctgcctcagagctggatgcctggttggccaagtacccaccatctcaagttactcgctatggggacccgggttcacccaactctgaacctgtgggttggattgcagcctatgggcagggttacacccccaactcaggggatgttcaagggctgcaggcagcctgggaggctctgcagaccagtgggcggcccatcacgccaggtaccctgcgccagctggctatcacccaccatgtgctctctggcaagtggctgattcacttggcacctggcttcaagctggaccatgcctgggctggcattgccagggctgtagttgagggccgtcttcaggtggccaaggtgagcccacgggccaaggagggtgggcgccaggtcatctgtgtttacacggacgacttcacggaccgcttgggagtgctggaggcagattctgccatccgtgctgcgggcattaagtgcttgctcacttacaaacctgatgtctacacctacctgggcatctaccgagccaaccgctggcacctttgccccactctctatgagagccgtttccagcttggaggcaatgcccgtggctctcgagtgctggaccgtgccaacaatgtagaactgacctagtggggccacatgggagagaacaacttttgctctcctgctggggatggatccttctttcttctcttccttgtcccaagaaggccaaactccctagctctgaggactgattgatttgggaactgcctgtactcggtccctttgaacttctctctgtgccgggttgactccagcccccacaggctgggggctttggctccctgagggccgggccctcagccgccctctttgatgctgctccccgccactgcccaggaccacagcttgggtgcagatgctcaagaaagcctgccctggtcacctctgtcccctactatactcaacctgcatcttccttttctttcctccttcataagggagaaaacttagtgcttccagtccctgcccttggtgatattgtagcccaggtggcagggcccctacaggactgagcatgctgttggggcctatatatgtctggccaagagaggatgcagggtcatggacatagggcctgctcctccctgcaaactcatagcccgcatcaccaacatcccctccctgactaccttgacgtgtgcctgctcctggcatttcaataaaacccagcttgggtctgtgtctt

SEQ ID NO: 4357 - DNA, 1469 bp, Cricetulus griseus
cggaaggataaaaccaggggctatgagtacgttttggagcctgcacctgtcccactgcccctcgacagacctcaggagacgaaggtgttgcaggtgtcttgcggtcgagcacactcccttatcctgacagacagagaaggtgtcttcagcatggggaacaattcccacgggcagtgcggacggaaggtggtggaggacgaagtgtacagtgagagtcacacagtacacaggatgcaggactttgatggacaggtggtccaggttgtctgtggtcaggaccacagcctgttcctcacaaacaaaggggaagtctattcttgtggatggggtgctgatggacagacaggcctgggtcactacaacatcaccagcacacccaccaagctggccggagaccttgctggggtaacggttatccaggttgccacctacggtgattgctgcttggctgtgtcctccgatggaggggtctttggctggggaaattctgagtacctgcagctggcctctgtcacagactctactcaggttaatgtccctcggtgcctgcctttctccgaagtaggcaaggtgaagcaggtggcttgtggtggcacgggttgtgctgtattgaatgaagaaggacatgtctttgtctggggctatggaattcttgggaaaggaccaaacctcttggaaacggctcttccagaaatgatcccacctacgctcttcggcttgacggaattcaatcctcacatccaggtttcccagatccgatgcgggcttagccattttgctgcactcaccaacaacggtgaactgtttgtgtggggcaagaatatccgagggtgcttggggatcggacgcctcgaagaccagtatttcccgtggagggtgacaatgcccggtgagcctgtggatgtggcatgtggtgtggatcacatggtaactctggccaagtcattcatttgaatctccttctgggtccatcatggcacatttgatattaagagattggagacctgacaaggcacccaggaggaacttggtagtcccttgtcacaacagaacacacttgggcctcttgctggcccagctcagcaagacagctagctgacttcagctagggcctctctgatcagctgccaccccacaagttcccaggacagtctgggagcccagaatgccttggcttgagatttcacggggcggccagtgtgagccagcctcccaccatggtctacagcatcccagccttggaacctcctccgtgcctggctttgaacagtccagaagcccccgaagagagaatctgtaggccaaatgcttgtgggctgagggctgtggaatcttggctggacggccagctttggagtaagaagcctcagaaactgggaaaatacttgtttttaagaaagctgtgttttcctttcagagcagtgtttgactaagttttttttggaataaagtctatttctgccttttta

SEQ ID NO: 4358 - DNA, 1469 bp, Cricetulus griseus
tgagcaggaggccggggcatggacagccgcttgcaggagatccgggagcggcagaagttacggcggcagctcctggctcagcagttgggagctgaaagtgccgatagcattggtgctgtgttaaatagcaaagatgagcagagggaaattgctgaaacacgagaaaattgcagggcttcctatgatacagctgctccaaattcaaaacggaagtgcctggatgaaggagatacagatgaagacaaagtagaagaatataaggatgaactagaattgcagcaggagaagaaattgccatatgaagaagagatttacaaagattccagtacctttacttaagggaacgcttacaagcagacatagaagcctttgacatcagagaattgacacccaaatttgatgtgattcttctggagcctcctttggaagagtactatagagagactggcatcaccgcgaatgagaagtgctggacgtgggatgatattatgaagttagaaattgatgagattgcagcacctcggtcatttatattcctctggtgcggttccggggaaggactggacctcggtagagtatgtttacgaaagtggggttacagaagatgtgaagatatttgttggattaaaaccaataaaaacaaatacctggcaagacgaagactctagatccaaaggcagttttcagagaacaaaggaacattgcctcatggggatcaaaggaactgtgaagaggagcacagatggggactttattcatgctaatgttgacattgacttaataatcacagaagaacctgaaattggcaatatagaaaaacctgtagaaattttttcatataatagagcatttttgtcttggaagacgacgtcttcatctgtttggaagagatagtactatcaggccaggctggctcacagttggacctacgcttacaaatagtaactacaatgcagaaacatacgcatcctatttcagtgcccccaattcgtacttgactggatgtacagaggaaatcgagaggcttagaccaaagtcacctcctccaaaatccaagtctgaccgtggtggtggagctcccagaggtggcgggagagggggaacatctgctggccgtggtcgagaaagaaatcgatcgaatttccgaggagaaagaggtggctttaggggaggtcgtggaggcacacacagaggtggctttccacctcggtagtggagacttactttagaaactcactcccagcttgcactttgctttcgtttctcatgctgccagaaagactttagctacccccttccaccccttggcttggaaagcttcatgctgttgcatctccacaccttccctcgtgtctgaatgggtttggatatgccggataagataatacattattgctcttggtaactccttttttattttgctataatttttctaataaaactttaaaacttggaaaaaaaaaaaaaaa

SEQ ID NO: 4359 - DNA, 1469 bp, Cricetulus griseus
  modified_base (923)..(923): a, c, t, g, unknown or other
agtcagacttcactgaaagtagaaactctggagcaagagaacgggtggaaaagcttgtcccaggaacatttaaacggaaacgtcctttcccaactggaaaaggtgttctaccaccttccctcgggccgtcaggagaccgtggaagcagaagtgcggatgatagactttgctcatgtgttccctagcaacacagtagatgagggctatgtttacggtctgaagcatttgatttctgtacttaggagtattttagacagttgagcatcgctgcagtctatgaaggagtgggccaatcaccatggagagccgcaggcattagctgtgcacctgtaacgctctgtaaaaagtttgtattgtgagtcagcattttatttgttctttatactttttggtagtaaggtttaactttttatatttcttactcaggattcagtaactctcaagctcatctagggaacactatttaatcttaagaggcaatttggggtggtgtcaggctacatatatatatgatggataagtcaactcaagtacgaaaagccttgggcacactttagctcagtaaagtcttcatctacagctatttcgaacattttggaagccagcatcctgcctttctgaagactaggttttgtctgaataaaacaggaagtgattcttatctctgcttttcagggaagggattaacattcatttcttcttgtttacattttaccactgttgcccactttatgttaacttttcaattatgtctttttgatgatgtgatcaatgtgtttatgtaaccaacctgtggtcgtttttctagtctgtcctgtcttgtaagatgatgctgagatttgcctacgtttggggatgaggcttccatcactagccaaacgtatgtgaacacacagatacttaagaactaagcaaatgagganatgatttggactgatggttgtggatgtgaatacatttctcaaataaaaagtttaaattgtataatagttttataataaagtatttacattaattattttaatatggatggatgttgcataaattataattgttgctaaatatttaaatagtctttcaagagcgtgttgaaaatgtgtgtaagtggctctgacagccggggtgttaaattaagatgggatgctttgctttgtgtgcctgaaggggcctgtgcaccctgcctgtccatactacagcacccaaattgtgtccacagtaactacaggtggcagtgccagccctcccatacttgatgaatgaatgtattgctgtacttgggtgtaaatgtctaaatgtctctagttttctttttctagggtttgtaatttgtgccgttgacagcatattcttggagtgtaaaggtcatcactgtgtttctagactcatttaatgtgatataccaatttttataagtgatatttagataatcctaataactgtatactcgacaacttattaaaatgttttgc

SEQ ID NO: 4360 - DNA, 1468 bp, Cricetulus griseus
ccagcgagccagcgagccagcgagcgagcgcggcgggaacccgcagccacagcaaccccggagtcacagcaacagccgcagccgccgtccgcggagcccagcccagccggccatggcgctgtcgatgcccctgaacgggttgaaggaggaggacaaagagcccctcatcgagctcttcgtcaaggctggcagtgatggagagagcataggaaactgccccttttcacagaggctcttcatgattctttggcttaaaggagttgtgttcagtgtcacaaccgttgacctgaaaaggaagcctgcagatctgcagaacttggctcctgggacccacccaccgtttataaccttcaacagcgaagtcaaaacggatgtaaataagattgaggaatttcttgaagaagtcttgtgtccccccaagtacttaaagctttcaccaaaacacccagaatcaaacactgctggaatggacatctttgccaaattctctgcttacatcaagaactcaaggccagaggctaatgaagcactggagagggggctcttgaagacacttcagaaactggatgagtatctgaattctcccctccctgacgaaattgatgagaacagtatggaggacatcaagttttccacacggagatttctggatggcgatgagatgacactggcagactgcaacctgctgcccaagctgcacattgtcaaggtggtggccaaaaagtaccgcaactttgatattcctaaaggaatgacaggtatctggagatacctgacaaacgcctacagcagggatgagttcaccaacacctgtcccagcgacaaggaggtggaaatcgcatacagcgatgtcgccaagagacttaccaagtaaacagcactttcaagcgagatgccttcagattcccccaaaatacgctttcctaacagactgctctgcctcctctaaagtagaagtgtattttgcatgaacatgcagttactcaagactaggattaaagatagacaaagtgtagtagttatctccaatacacactcctaagcagtattattctaaaatcctctatccggcccacctgccctgcccatctgctctcctccaattcggaggtactccaccacaagctcgtcacacgagaggcagtttgctgtcacgctggagcccaatcatcatgtgcattcatagtgtgtagatggcagacttgaggtgcagtgttcaaccattagaatagtagccgtgacatcagtgggccccatccctgtggctcagggagatgccactaggaggatcagcactagaatttaggcatttatacttctgctgagttattacagagtctcgccagagttgcatgtagataggatttatttcttcatattttttcttctctctggaacatcaacaccagtatattgctggcagctattgtattaaaaaaaaagaaataaatatattttcactaccaaa

SEQ ID NO: 4361 - DNA, 1468 bp, Cricetulus griseus
tagccttagcccaagctataggtcgaactgaaggtacaccttatagaaaaatggagagacactgagagacacttggcaccacacgaaaaccccatcatatccttaaacaagtgggggcagtatgctagtgacgtacagctcatttttgcgacggactgggccgtctctcagcgagcggcccacctcagacagcgtggcccggatccctgaaagaactttgtaccgacagagcctgccccccttagccaaactgcggcctcaggtggacaagtcgatgaaaaggagggagcctaaaagaaaatctctgaccttcacaggaggcgccaaagggctgatggacatttttggaaaaggtaaagaagctgagtttaggcagaaagtgttgagtaattgcaggtccacagcagaagagctaaggaggctgatccggctccagacagataagctgctggccatcgagcagcagctggagtccagtgagacagagatacggttctgggagcagaagtacaattccagtctggaagaggaaattgtccgcctcgagcaaaagatcaaaaggaatgatgtagagatcgaggaggaggagttttgggaaaatgaactacagatcgaacaagaaaatgagaagcagctgcaggaccagctggatgagatccggcagaaagtcacggactgcgacagcaagctgaaggactacctggcgcagatccagaagatggaaagtggtcttgaagcagagaagctacacctggaagttgaggaggcgcaggtcaacgaggaggagatgaaggggaagattgaaaaggtcaggggggagatggacctccaggggcagcagagcctgcggctggagaacggcatcagagcggtggagaggtctctggggcaggccaccaagcggctacaggacaaggaacaggaactggagcagttgaccaaagagctgcgacaagtcaacctccagcagttcatccagcagacggggacaaaggtcaccgtgctgccagctgagcccactgaaatagaggcctcccaggcagacatagaaacagagacaccattccagtctgggtccctgaagcgacctggctcatcgaggcagctccccagtaatcttcgtattctgcagaaccccatctcctctggatttaatcctgaaggcatctatgtatgacactgtcttcaggagaaggatccagccaaggtaccaaggacagtaaatccttcagtttgtgccaactgaacagggtctgttcccaagccactgtgtcctctcccgatcacaaaccacgtggacgccctgtgcactgatgctgaacacggagcctgttcacacttcgcagtattgacatgttgtccagcagctgaaatgcaaagccttcgtttttatttgtagcattcagagagcattagaaaagtattaatctatgtttatacacgaataaaccctgcattgagagtaaag

SEQ ID NO: 4362 - DNA, 1468 bp, Cricetulus griseus
gcatggaccgtaacccgtcgcctccgcggcccagctgtgatcaggaggacgaggaggacctggccgggggagactgcattgggagcacggtctacagcaagcactggctcttcggcgtcctctgcgggctcatccagattgtcacacctgaaagtgacaagtccagctcggatgatgatgagcaacagatagagcttgctgaagaaatggaaaatgaaatctgcagagtctgggatatgtccatggatgaggatgtggctttatttcttcaagaatttaaggctgctgacatattcatgggagtactagccaaatccaagtgtccccgcttaagagaaatctgtgtgggaattttagggaatatggcttgtttccaggagatatgtgtgtccatcagcagctatgaggatcgtgggcaggtgcttctgcagtgtttgtgtgactcagacccacccactctgctagaaaccagcaggttgttgcttacttgcctttcccagacagaagtggccagtgtctgggttgaaaggatccggggccatccatctatttacactagtgtttgcttcatcatgtcaagttcaacaaatgttgacttgctggtgaaggtggggaggtcgtggacaagctctttgacttgaatgaaaaactcatgttggagtggattagaaaagggactcctcagcttccggaccaaccccaggaggactctgaagagcagcaagtgttttcgattgtaccctgtgtactggaaggtgccaagcaagtccgttctgaaaacctggaagggctggatgtttacatgcacatcttacagctacttaccacagtggatgacggagttcaagcaattgtgcagtgtcctgatactggaaaagacacgtgggatttactttttgacctcgtatgccatgaattctgccaagctggtgacccgcccatcatactgcaggagcagaagacagtgctagcctctgtcttctcagtgctgtctgtcatcagggcttcatggatgggacaggaacacctgaagacagaagaagtggatcttccactaattgacagcctaattcgggtgttacaaaatatgggccattgtcagaagaaactacagaagagcctacaaactgtggttcaactcaagatgacttccatatgaagatcctgaaggatatttcatgtgaattcctttctaatatttttcaggcattaacaaaggaaaccatgactaagggactgaaggagggccagttaagtaaaaagaaatgttcctgtgcatttcaaagcctcctgcctctctacagccctgtggtggaagacttcattaaagtcctacatgaggttgataaggctctggctgaggacctggaagaaagcttcccgagtgtgaaggctcagcttaaaacccaagtttgagtttctgctgtccagggaataaactctgttttctatgttttgaagttggcat

SEQ ID NO: 4363 - DNA, 1468 bp, Cricetulus griseus
acaggccttcgggtcaactcctaacatcaacggaagccctaccttttctcaccgatttgcacactcttcttgaagctggtaattcagtctccctccctatcgaagagctaaggacagcatcagcccactgcctaccagcagagtgagatgggacgaacatcaaaggataaacgggatgtctactaccgcctggccaaggagaatggctggcgggcccgaagcgccttcaagctacttcaacttgatgaggaattccaactcttccaaggtgtgaagcgagcagttgacctgtgtgcagccccaggcagctggagccaggtgctgagccagaagattgggggccagagttctggtcaggtggtagctgtggacttgcaggctatggctccactcccaggcgtgatacagatacagggggacatcactcagctttccactgccaaggagatcatccagcactttgagggctgccctgctgacctagtagtgtgtgacggggctcctgatgtcaccggcctccatgatgtggatgagtacatgcaggcccagcttctgctagctgccctcaacattgctacgcatgtcttgaagctagggggctgctttgtagccaagatattccgaggccgagatgtaacactgctctacggccaactgcgggtcttcttctccagtgtgctctgtgccaagcccaagagcagccggaattccagcattgaggcctttgctgtttgtcagggttatgaccctcctgagggcttcattccagacctgaccagacccctgctggactactcgtacgatttcaaccagctggatggtcctgcccgttttattgtgccctttgtgacctgtggggacctcagtgcctacgattccgatcgcagttatcctctggatctagaagatggctccgagtacaaatatactccacccacacagccccccatctcacccccataccaggaggcctgcaggttgaagaagaatgggcagctggccaaggagctcctcccccaagaatgctccatcggcagagtagacaagttgccccagcctaggtggaagacactgaaatcaattgctcaccttaacacattaagggttggcagtaaaagtcaaactcatacaagtcagaagccgctgcctgccaggaaaaccagaagctggcttgataagcttgtttgcagataccatctatgggccctgaacagacaagcctagaaggggggatcgttcaacaactctgacaagaaacaacattgaaaaagtctgcggagctgcaggaggaatttcacgagactgtgagcacatgcctcttctctcagcctctccccctgagtgctgagattacaggcatgtgccactacaaagtgagttccaggacagccagggttgctacacagagaaaccctgtctcaaaaaacaaaaaaacaaaacaaaaaaaaaacaaaaaaaaaaaaaaaaa

SEQ ID NO: 4364 - DNA, 1467 bp, Cricetulus griseus
gccgacggcggcgcggccggaaagccacaaagaaaactgacaaactgagaccagaagataaagatgacctagatgtgacagagctctctaatgaagaccttctggagcagcttgtgagatacggggtgaaccctggtcccattgtggggacaaccaggaagctgtatgagaaaaaactgttgaaactgagggaacaggggacagaatcccgatcttctactcctctgccaacagtctcttcctcagcggaaaatgcaagacaaaatggaagtaatgactctgacagatacagtgacaatgacgaagactctaaaatagagctcaagcttgagaagagagagccactaaagggcagagcaaagactccagtaacactcaagcaaagaagaattgagcacaaccagagctattctcaagctggagtaactgacactgaatggacaagtggaccctccaaaggcggatctctgcaggcattaactagggagtccacaagagggccaagaagaacgccaagaaaaagggtggaaacttcacaacattttcgtatagatggtgcagtaatttcagagagtactcccatagctgaaactataaaggcttcaagcaacgaatccttagttgtcaataggttcactggaaatttcaagcatgcatcttctattctgccaatcactgaattctcagacatatccagaagaacaccaaagaaaccattgccgagagccgaagtgggagaaaagacagaggaaagaagagtagaaagggatattcttaaggaaatgttcccctatgaagcatctactccaacaggaattagtgctagttgccgcagaccaatcaaaggggctgcaggccggccgctagagttcagtgacttccggatggaagaatcgttctcatcaaaatatgtccccaagtatgttcccttggcggatgtcaagtcagaaaagacgaagaagggacgttccattcccatgtggataaaaatgttgctgtttgttgtagtagcagtttttttgtttctggtctatcaagctatggaaaccaaccaaggaaatcccttcactaattttcttcaagatagtaaaatatccaactgaagaaatcacttcggcacattcaacttgatctcctgtttttaataactgtagaaaaacatttgtgtccactgttgcctgaagaactaacattgtggtttcacctcagtaaagtcagtgctgcattgaaaagcaaacgaaatgcatacatggacctcatttcaatattttggacgttggagatcacactgtgccatatgaataatttttttagctctggaacttttttgtaggctttattttttaatgtggacatcttatttcacttttggggaaaatgcattgttttgtgtatttgaaaaataaggtaaaacatggtgatgtaatgtgaagctacacattaaatacttggaattcttacagaaaa

SEQ ID NO: 4365 - DNA, 1467 bp, Cricetulus griseus
accaatgaactccttgcatacgcaagttctacactggataaatccatgtccagccccttcgagggccccaagattaaggagccagacattgaagggaaatacctgggcaaactctgcgtgtctgggatgctggacctctcggaggatgggatggatgctgatgaggaagatgagaacagtgatgactcggatgaggacctgcgggccttcaacttgcacagccttagctccgagtcagaagacgacacagagcatcccgtgcccattattgtcagtaatgatgatggccggcacttgcggagtttgtgagtttatgtagcaaattatgatctttattatcaactctgatttgatccatgaatttttatactaagcaataacgttatatagtcagcagaggacagttaagagcagagagtccgttccccgtacttggtgcagacctagcacgactgagctccgtagaaagcactggatcttgtgacatggagattacaaacagggcatttgaaagtaatttttgccaaaattgtcataactgaattttttgccgtgtggactttctgtatttttttttaattctttatctacctaataacttttttttgtttttttttttcaaattataggtgtaacaacttcagattcactgattgcaatcatgtggatccatagactatatatagccttcttacgaagtcagcctgggatagatttattgacgtctgagggctggccaccttccaccatgttgaggggattttaacaatacaattcccatttatatttatatctatattgctctcatcgttaattgccaaaacagcagcattttatatattgagttggggtggggggttgggtctttctgtggtgtcgcatggaagggaaggctttgtataacacttgtcaacacaccctcccagagtctcaagcaatatacagaaatctctgtagattaaattcctgccatttttgaaatgtgagcatgtgctttgccatcccatatgggttttgtctttttgttttgtttttgtgtttggctttctcaagacagggtgtctctgtgtagccctggctgccctagaactcgctctgaagaccaggctggcctccaactcacagagatcctcctgcctctgctcccaggcgctgccaccacacccagctggttttgttttaatgataatttggttgctgttgatgggctttctgtttcatcatgtccacagccagagacctgggtggggcagtcacacccaccaggcctgccacctactgggttgtacttaacacagtcagaaggggttcacggcaatataacagttaatgaacttggagtttaaattgtgtaaatttttaattgtaagatttttactgtatattgaagcttagtgtgattcaataaattgcttgtaattttaaaaactatttaatattcaaaataatatagttatatattaataa

SEQ ID NO: 4366 - DNA, 1467 bp, Cricetulus griseus
aggctcgtggagttcgagggccggagccgccgagatgaaggtgaagatgctgagccggaaccccgacgactacgtccgcgagaccaagctggacatccagagagttccaagaaactatgatcctaccttacatccttttgaagtcccacgagaatatgtaagagctttaaatgctaccaaattggaacgagtgtttgcaaaaccattccttgcatccctggatggtcaccgtgatggagtcaattgcctggcaaagcacccaaagagcctgacgactgttctttctggagcatgtgatggagaggttaagatttggaacctgactaaacgaaaatgtgttcgcacgatacaagcgcatgaaggttttgtacgagggatatgcactcgcttttgtgggacctcgttttttactgttggtgatgacaaaactgtcaagcagtggaaaatggatggaccaggctatggagaagaggaggagccactacacacaattctaggaaagacagtgtacactggcattgatcatcactggaaagaccccgcctttgccacgtgtggacagcaagtagacatttgggatgaacaaagaaccaaccctatatgctcaatgaactggggctttgacagtataagcagtgtgaaatttaaccctattgagacatatctcttgggaagctgtgcttctgataggaacatagtactgtatgacatgcggcaagcaactcccctgaagaaggtcgtcttggatatgagaacaaacacaatctgttggaaccctatggaagctttccattttaccgcagccaatgaggactataacttgtatactttcgatatgcgtgcactggacattcctgtcatggtccacatggatcacgtatctgcggtacttgatgtggactactctccgactggcaaagaatttgtgtctgctagtttcgataaatctattagaatctttcctgtggacaaaagccgaagcagggaagtctaccatacaaaacggatgcagcatgttatttgtgtgaaatggacctctgacagcaagtacattatgtgtgggtctgatgaaatgaacatccgtctgtggaaagccaatgcatcggagaaactgggtgtgcttacatcacgggaaaaagcagcaaacgattataaccagaagttaaaggaaaagtttcagtatcacccgcatgtcaaacggattgctcgacatcggcatctcccgaaatctatctacagccagattcaggagcagcgcgtcatgaaggaagctcgccgccgaaaggaaatgaatcgtcgtaaacatagcaagcctggatctgtgccaattgtgtcagagaggaagaagcacgtagtggcagttgtgaaataatgttttgtcttcctaccaagcttgatatataattatttgctgcttgtgattggaactctgtaaataaacgacccgactctggtttcatagtaaaa

SEQ ID NO: 4367 - DNA, 1466 bp, Cricetulus griseus
ggatcccagtcccgagctttcgccgcccttcgtgcccggtgtgtcccaggtagacaacaattccgatttctgggaagacgcccatcgtaagcatcctggcatcctgccgtttcccccccgcacgtgcggctgccgcaagcactggctgacgcagcacagttattgcttcttgagagacccgtccgcaatgtagagaagcaggtgcaggcgctcaccaactatctctggagccgacatttgccagtagagcctgaggagttgcaaagacgggctgcggatcttgagaaaaaattcctagaaagccaagactcaactcagacagaggagaaacttcgtggggcagtactgaatgccctgcgcagaactacctaccattggcagaaactcagttataatgaagagctgagtctgatatatatggcagcaagattggacggtggttttgcagcagtttctagggcattccatgagatccaggctcgagttccagagttccagccacaaacgttgatggactttggatccggcactggttctgtcacctgggctgctcacagtacttggggccagagcctccgtgaatatgtgtgtgtggacagttcagcagccatgttgggtttggctgaaaagctactaaaaggtggttcagaatcagggaagccctgtatcccaggtgtctttttcagacagtttctacctgtgtcacccaaggtccagtttgatgtggtcgtgtcagccttcgccctcagtgaactacccagcaaggctgaccgagttgaggtagttcggaacttgtggcgtaagacaagccattttctggtgttggtggagaacggaacaaaagctgggcaccatcttctcatggatgccaggaacctggtccttcaggaaaaagaaaagtcccctttggaccttcagcctggctttgtctttgccccatgtccccatgagcttccttgtcctcagctgacagcctccaagtccctggcctgtagtttctcccagccataccatcctatccccttcagctggaataagaagccaaaagaggaaacattctctgtagtaatccttgccagggggtcgccaaaggagactaaccgctggccccgtatcactcagcctgtccttaaacggcctcgccatgtgcattgtcacctctgttgtccagatgggaacatgcagcatgctgtggtcacagcacgtcggcatggcagggatttgtatcgctgtgcccgagtcagctcctggggagaccttttacctgtgatagatccacctgcgtttcctccgtcccctgctgaagagcccactgagagttgacaaggatgtgtaaccagtgtttcctcccatcacacctgccaaggccaaagctacctggtgtccaggaagagagtgctggtacccctgtgcttgtagttgtttgaaattttaataataaatcttttaagaacaaaaaaaaaaaa

SEQ ID NO: 4368 - DNA, 1466 bp, Cricetulus griseus
tttgtccttcctcagccgcgggccctcacagctcggaaatggctggagaaatttctggtggaatataagagtgcagtggagaagaaattggccgagtacaaatgtaacaccaatacagcgatcgaactgaaattagttcgatttcctgaagatcttgagaatgacattagaactttctttcctgagtatacccatcagctctttggggatgatgaaactgcttttggttacaaaggtctgaagatcctgctctactatattgctggtagcctatcaacaatgttccgtgttgaatatgcatctaaagttgatgagaactttgactgtgtggaggcagatgatgttgaagggaaaatcagacaaatcattccacctgggttttgcacaaacacaaatgattttctttctttgctggaaaaggaagctgatttcaagccatttggaaccctactccatacatactcagtttcttgtccaacaggaggagaaaactttacttttcagatctataaggctgacatgacatgtagaggctttcgagaatatcatgaaaggcttcagacctttttgatgtggtttattgaaactgctagctttattgacgtggatgatgaaagatggcactactttctagtatttgagaagtataataaggatggagctacgctctttgcgaccgtaggctacatgacagtctataattactatgtgtacccagacaaaacccggccacgtgtaagtcagatgctgatactgactccatttcaaggtcagggccatggtgctcaacttcttgaaacagttcatagatactacattgcatctccttcagttcttgatataacagctgaagatccatccaaaagctatgtaaaactaagagactttgtgcttgtgaagctttgtcaagatttgccctgtttctcccgggaaagattaatgcaaggattcaatgaagatatggcaatacaagcacaacagaagttcaaaataaataagcaacatgctagacgtgtttatgaaattcttcgactgctggtaactgacatgagtgatgctgaacaatacagaagctacagactggacattaaaagaagactaattagcccttataagaaaaagcagagagatcttgccaagatgaggaaatgcctgagaccagaagagctgaccaaccagatgaaccagatagagataagcgtgcagcacgagctgctagaagagcgcttccaggagttggtggaggactaccggcgtgtcatcgagcgactcgctcaggagtgaagcccctgcttcccaggacacctgcagatttttgtgcattgtgctgtgaaacctgaccaccctaaagttatctattgttctccttagtggaatattccttttgagagattgtatattttaaaatactgtctagagtttatgaacatatattgcattaataaaagatggcttgtgaaatacca

SEQ ID NO: 4369 - DNA, 1466 bp, Cricetulus griseus
gtttgtgttagttctttgcaattctattggtacacccttggaccctaaatacattgaccttgtaccactgtttgttgcaatgaccaaaacccatgtgatagcagcttcaaaagaagcattttatacctggcagtatcgtgtggcaaagaagctcaccgcattggaaattaatcagatcacacggtcaagaaaagaagggagagaaaggatttatcatgttgatgatgttccttctggatctgtggatggggtgtttgattacagtaaagccattcaaggtactctggggatgcagatgacagtctcctggaacaagcccacaatgccattggagactactttgccgatcgacaaaagtggctgaatgctgtacaatattacttaaaaggcaggaatcaggagcgcctagccgaatgctactatatgctagaagattatgagggcttagagaatcttgccaattcacttccagaaaaccacaagttgcttccagaaatagcacagatgtttgtgagagttggaatgtgtgaacaagccgtgagcgcattcttgaagtgtaaccaaccaaaggcagcggtggacacctgcgtacacctcaaccaatggaacaaagctgttgaattggcaaaaagtcacagcatgaaggaaattggatctctgttagctaggtatgcatcacatttactggagaagaacaagactctggatgccattgagctctataggaaagccagctattttttgatgcagctaaactgatgtataagattgcagatgaagaggcaaagaaaaggacgaagcctttgcgtgtgaagaagctgtacgtactgtcagccttgctcatcgaacagtatcatgaacaaatgaaaaatgcacagcgtgggaaagttaaagggaagaattcagaggccacttctgctttggctggcttactggaagaggaagttctttctacaactagtcggttcacagacaatgcctggagaggagctgaggcctaccactttttcattctcgcccagcggcagctctacgagggatatgttgacactgcattgaagacagctcttcatctgagagactatgaagacatcattccctcagttgagatctactcgttgctagcactctgtgcttgtgcaagcagagcttttggtacctgttcaaaagcttttattaaactggaatcattagagaccctcagtgcagaacagaaacaacagtatgaagaccttgccctggaaatcttcaccaaacacaccccaaaagacaacaggaagtcggagttgaacagccttcttgaaggtggagaaggaaaactgccaacatgcattgccaccggaagcccgatcattgagtaccagttctgggtgtgcaaagtgtgcaagcactacgttcttgctcaggaaatcagcaactataacttctgtcctttatgccacagttcagtagaataaaggagagaa

SEQ ID NO: 4370 - DNA, 1466 bp, Cricetulus griseus
tcatccggggagctgctggagccagccacagctcgccagttctcttgacaagcaggcctctcccagccagacccaaagcctcacccatgagcctgtcggtagaactcaggatctaggcaagaaaatccatgctgagccccagaagacctcggaagatatccgaacagaggctcttgccaaggaaattgtccatcaagacaaatctctggcagacattttggacccggactccagaaggaagacaacgatggacctgatggagggtctgttccccagagatgctaatgtgcttaaggaaagtggcgcaaagaggaaagcatttgaagaaaccctcagacagacagggtatgaagtcaagaggagcgatgacaaggaagcggtgggtatgctggtcaactgtcctgcctactacagtgtgtctgcagccaaggcagagctgctgaacaaatcaaagaggaggaggagcaagaggacgtcaacgagaaaaaggctgagctcatcggaagcctcacccacaagctcgagaccctccaggaagccaaagggagcctgctcatggacatcaagctgaacaatgccctgggagaagaggtggaggccctgatcagtgagctctgcaagcccaatgagtttgacaagtacaagatgttcataggggacttggacaaggtggtcaacctactgctctcactctctggacgcctcgcccgagtggagaatgtccttagtggcctaggtgaagacgcaagtaaagaagaaaggagctctctgaatgagaagaggaagattctggctgggcagcatgaggatgctcgtgagctcaaggagaacctggaccggagggagcgcgcagtgctggccatcctggccaattacctgtcagccgagcagctccaggactaccagcacttcgtgaaaatgaagtccacactcctcatcgagcagcggaagctggatgacaagatcaaattgggccaggagcaggtcaagtgtctgctggagtcacttccctcggacttcaggcccaaggcaggggccatctccctgcccccagccctcaccggccatgtgactcccgtgggggactctgtattcaggggcaatttcccaaccttgacctctccactttaaccctctcctgaaagacccacccaaaagataccacactcaacactatttaatctaaaagatgtctcactgcaactgcagtttgaactgtgggttactggggggcttcaaaaagacacacacacacacacacacacacacacacacacacacacacacacacattaagaaaactgtaaaaccttgaacattttgttatttatatttttaaaatgaaaaagatcaatatgtgtttgtgtgctaaccacttatttgattctgttttgtggtggatgtagacaattacgtgtgagctttgtattttatgaaaaccttaatgaagaattccaaagatagtc

SEQ ID NO: 4371 - DNA, 1466 bp, Cricetulus griseus
  modified_base (500)..(500): a, c, t, g, unknown or other
  modified_base (590)..(590): a, c, t, g, unknown or other
  modified_base (602)..(602): a, c, t, g, unknown or other
tctcaagacagttcctctgggagacaggggaggaccccacagaggggtctgaagaagcacaggagctccagatggacacacctgaagaccaagatttgctagtctgcccaaatggcatggcgaatgagaccccagtgcctgagcctgagacctttgaggcgtcggaaccaccagccaagaggtcaaaaagctcagaggagtccacagagaaagggcctacagggcagccacaagcaaaagtccagccccagatccagatgacagcaccaaagcaaacacagaccccagatcagctgcctgagccaccagaagcccaagtcctgccacatttccagccacaagtctgcagatccaggcccagcaggaacagacatcagagaagacccaggaccagcctcagacctggccacaggggtcagctcccccaccagagcaagcgtcagttctggcctgtgccacagaaccgcaaccgtcacctggtgctgcagaagctggggganaaccagaggaggtcttgccagagccagcaggtgcccaaagcaatgaagacaagagccaggaggcatccactgatggcctggacgtggganagtgtgaaaagngagcaagagagaagcacacactccaagcagacccttcagttcttctgctacatctgcaaggccggctgcagcagccagcaggagtttcaggaccacatgtcagacgctcagcaccaacagcggcttggggaaatgcagcactcgagccagacctgcctgctgtccctgctgcccatgcctcgagacatcctggagagagagacagaagagcctcctccaaaacgctggtgcaacacctgccaggtgtactacatgggagacctgatccagcaccgcaggacacaggaacacaagatcgccaaacaatccctgagacccttctgcaccatatgcaaccgttatttcaagacccctcgaaaagtttgtggagcatgtgaagtcccagggacacaaagataaggccaaggagctgaagacacttgaaaaggaacaaccagcccagaggaggaccacttcatcacagtggatgctgttggttgctttgagagtgatcaagaagaagaagaagaagaggaagaggaagaggaagaagaggaagagattgaggctgaggaggaattctgcaagcaggtgagatcaagagatacatctttagaggaatggaagggcccagagacttacagccccaacacggcatatggtgtggacttcctggtgcccgtgatgggctatgtctgccgtgtctgtcacaagttctatgacagtaactcaggattacggctctctcactgcaagtccctggcccactttgagaacctgcagaaatacaaagcagccaagaaccccagccctgccaccaggcccatgagccgcaggtgtgcgatcaacgcccgaaatgctttgactgcgctgttcacctctagc

SEQ ID NO: 4372 - DNA, 1466 bp, Cricetulus griseus
  modified_base (1457)..(1457): a, c, t, g, unknown or other
gcagctgcgccagcagttcgcgcgaggtggccgtactgctgcaggcagaggaccggctacgctatgcgctcgtgccgcgctaccgcggcctcttccaccacatcagcaagctggacggcggcgtgcgcttcctggtgcaactgcgcgccgatctgctggaggcgcaggccctgaagctggtggaggggccacacgtccgggaaatgaatggagtactaaaaaagcatgctgtccgagtggttctcctctggcttcctgagtctggagcgggtcacctggcactcaccctgtgaggtgcttcagaagatcagtgagagtgaggccgtgcatcctgtgaaaaactggatggacatgaagcggcgtgtggggccataccggagatgttacttcttctcccattgctccacccctggggaacccctggtggttctgcatgtggctctgaccagtgacatttccaataacatccagagcatcgtgaaggagtgccctccatctgaaacagaggagagaaacaggatctctgctgctatcttctactccatcagcctgacccagcagggcctgcagggggtggagctcgggaccttcctcataaagcgagtggtcaaggagcttcagaaggagtttcctcacttggaggccttctcaagtctgtcacctatacctggattcaccaagtggcttctgggtctcctgaatgtgcagggaaaggagcatgggaggaacgagatattcacagactcagaatgcaaagaaatctctgaggtcacaggcgacccagttcacgagagcatcaagggcttcctgagcagtggtgagtgggtgaagtcagagaagctggtgcaggcacttcaggggccactaatgaggctgtgtgcctggtacctgtatggtgagaagcaccgaggctatgccctcaatccagtggccaacttccatctgcagaatggagctgtgatgtggcgtatcaactggatggctgacagcagcctaaaaggcctcactagctcctgtggcctcatggtcaactaccgctactacctggaggatacaagcctcaacagcatcaactacctgggctccaagaacatcaaagcctctgagcaggtcctcagcctggtggcccagttccagaagaacagcaagctctagggaaaccttcctacagcctggtcccctgctcagaaaggaggctgtcttctgatgggccaggtttactcaccacaggagccttgtcagggaagccacagctgtgctgtgtctcttgacctcagcaggcactccggaggccccacctcggttgtcactgtgctggttgacttactgcttgctgctgcttgaggccagggttggcttatagggtttacatgagattccagttcataatgaactgaacagtaaagaacaagtttattctataaacattaaacatgattgttcactgtaaaaaaaanaaaaaaaaa

SEQ ID NO: 4373 - DNA, 1466 bp, Cricetulus griseus
cgcgggtttgctggcgcgtttttcagcgaagtcgcacgtgaaggatagcggtggctggagcaggacacaaacatggcaggctcacatggcagtccatcatggagcaggcatctgttcaaagctgtcctagtggtcctcgtgttcgtcctcctcttccactcatcgtcatcatcccagtcctatcgagacccacctggccaacagaagagggaggcctcagctgatcttttgacccagattggccgatctctgaaggagacgctggatacctggctggggccagagaccatgcatgtgatttcagagaccctgttacaggtgatgtgggccatctcatcagccatctctgtggcctgctttgccctgtctgggattgctgcccagttgttgagtgccctggggctagatggtgaaaatctcacccagtccttgaagctcagccccagccaagtccagacccttctactgtggggagcagcagcactggtcatctactggctgctgtccttgctcctaggcttggtcttggccttgctaggacggatcctggggggtctgaagcttgtcctctttgtggctggttttgtgggcctggtgaggtctgtgcctgacccctccacccgggccttgatgctcctggccttgctgactctctatgccttgctgagccggctcactggctccaggggctcggggacacacctggaagctaaggtgagagggctggagcgccaaatagaagagcttcgagggaggcagaggcgagcgaccaaggcaccccggagtatggaggaagaatgacagggatatcccacagtgacaccctcatcataccaaagagctgagctgcttctgggtctcatggccctccttgcagccccttgcccttgccttgcctgtgtccaaacccttcacccctttacccctgcactagtccctagctgagagaagagaacctgccttctgcaggtgctcagtcaagggatggctccctgccccttttctgctcccagcctgcatcccccagggcaggttggaggggcctcggctccagcttctgctctcagccagtaccactgccactgatctccatgatgattaacctgctgctgccttacaaaaggcctttccaggctgaagctaccatttcaccacactccagctctcttcttcctactcagactcccatcacaccaccatcccaagtccctcaagacccttgctgccttccttattgcacagcagtgggaagggacaggagaggctagactcgaggataagtgagaaacagggcccttggaggcctgcacatctgggttctgttacaagtgccttaatgggagtcaatagcaccctccagttgccctttgccacactgaatgtaggaaagtgtgctatggctactttgtgttcagaaagagtagtcccttgcagaatcccaactctcctgcagccaaagcaaaggc

SEQ ID NO: 4374 - DNA, 1465 bp, Cricetulus griseus
ggatcgtgcggacttgctctttgttctgctctcccggccgttaggtttcttttttctccaggaggaaaaatggcgtcggttgcagttgatccacaaccgagtgtggtgaccagggtggccaatttgcccttggtgagctctacctatgacctcgtgtcctctgcttatgtcagtacaaaggaccagtatccttatttgagatctgtgtgtgagatggcagagaaaggcgtgaagaccatgacctccgtggctgtgacaagtgcgatgcccatcatccagaagctggagccacagattgctgttgccaatacctatgcctgcaaggggctagacaagatcgaggaaagactgcctattctgaatcagccaacaactgagattgttgccaatgccaaaggtgctgtaactggcgcaaaagatgcagtgacgactactgtggcgggggccaaggattctgtagccagcactatcacaggggtggtggataagaccaaaggagcagttactggcagcgtggagaggaccaagtctgtggtcaatggcagcattaacacagttttggggagtcggatggtgcagcttgtgagcagcggagtagaaaatgcacttgccaagtcagagctgctggtagaccagtatctccctctcactcaggaggagctggagagagaagcaaaaaaggtggaaggatttgatatggttcagaagccaagttactatgtaaggctggggtccctgtccaccaagctccgctcccgggcgtatcagcaggctctcagcagagttaaagatgccaaacagaaaagccaggagaccatttctcagctccattccactgttcatctgattgaatttgccaggaaaaacatgcacagtgccaaccagaaaattcagggtgctcaggataagctctatgtctcgtggttggagtggaagagaagcatcggctacgatgacactgacgagtcccactgtgctgagcacatcgagtcacgtactctagctatcgcccgcaacctgacccagcagctccagactacatgccagactctcctgtccaacgtccaagggttaccacagaacgtccaagatcaggccagccacttgggggtgatggcgggtgacatctactcagtgttccgcaatgctgcctcctttaaggaagtgtctgatggcttcctcacgtctagcaaggggcagctgcagaaaatgaaggaatccttagatgatgtgatggattaccttgttaacaacacacctctcaactggctggtaggtcccttttatcctcagtcgactgagccagccagaaggtccagcagtctgagctcaaaacgtcacctaaacctagtccttgtcacttagtgcatgatcaggtgcacttacatgttcttgtctgtggcctttgtgctatctatcagctgtaaatgtctgtctgtactgaataaagattcattcatgtggc

SEQ ID NO: 4375 - DNA, 1465 bp, Cricetulus griseus
gaaaatgagccataagaagtacaaggctgcactgaagaaggagagacggaggaaacggaggcaggagctcgcccgattgagagatgcagaattggcgcagcaagaggaggaagaagatgcttttgctgaagaaaaacgattagaagaagaaaggctgatggaggaagagaggcaaaaattacatgaagaatggttactgagggaagagaaggcacaagaagaattcagggcaaagaagaaaaaagaagaggcagctcgaaaacggaaagaagaacaagagagaaagttaaaggcagaatgggaagagcagcagagaaaagagcgggaagaagaggagcagaaacaacaggagaagagagaaagaagaggaagctgtgcagaagatgctggatcaggctgaaaatgagttggaaaatggtggcacttggcagaacccagaaccgcccacggatgtaagagtactggagaaagatcgagccaattgtccattctacagtaaaacgggagcttgcagatttggcgataggtgttcacgtaaacataacttccccacatcaagtcccaccttgcttattaagagcatgtttaccacgtttggaatggagcaatgcaggagggatgactatgaccctgattcaagcctggaatacagtgaagaagagacctatcagcagttcctagacttctatcacgatgtactgccagagttcaagaacgtgggaaaagtggttcagtttaaggtcagctgcaacttggaaccgcatctgaggggcaatgtgtatgttcagtaccagtcggaagaagactgtcaagcagctttttctctttttaatggacgatggtatgcaggacgacagcttcagtgcgaattctgcccagtgacccggtggaaaatggcaatttgtggattatttgaagtacagcagtgtccaagaggaaaacattgcaactttcttcacgtgttcagaaatcccaacaacgaatttagggaagccaacagagacatctaccagtctccagattggactagttcgtccttcggtaagaattttgagaggagggaaaggaccagccactatgatgatatatactatggcaggtcaagaagacgaaggagcctgagtccagacctctcctacaagagaaacggtgagcctgacaggaagagcaggagtaatcacagggggaagaagtctcacaaacacgtgacgaaaagtcgtgagaggcgcagttcactgaccagaggaagaagaagggatcacagtccatgcccctggaatcagagccggaggaaccgcaggagccggagccggagccggtgccgcaggagccgcagccggagccggagccgaagccgcagccgcagtcggacccgaagccaaagcgggagccgaagtcggagtcagagtcggagccggagccggagccattatacacacacacacacacacacacacacacacac

SEQ ID NO: 4376 - DNA, 1465 bp, Cricetulus griseus
gaactacagactgagcaccagcaactggaggagcgggaccggcagctggccctgtgaagaatgcctggagctgaagacaagcctcctggcccgccaaaggggcacacagtcgtcactggaccgcctccgggccctgctgagactgatccagggtgagcagatgcttcaggtcgctatggcaactaccagccccaccccgcttctggccgggacctggaccaagccttccactaccaccatgcgcactgccctccagcacccccagagccacaactgaccccgcctggcctctgcctcattcttccctaactcatgctcttgctgcagcccacctcttcctattgccagtctctggaattttcctcatggagtgctgggctagacagagcagtcagccaccatgggaggcccctggcaggtttcacctcatgatggaagcctttagagcactctcctttgcaggagccaccaagaatcctgcccacttcttgccagttaaagacactatgaccaaaaagagcttcacactttttgtatagtcgttttgttttgttgtacgatccgtaatgtgaactgccacccctgcctgccttcctctgcatctggtagtctctgctcctggtaacctcccctcgagaggggccagatggagcgtccagagggatttagagatccagccaggaggcaaagagggtggtgcatttgggggcctggcctttggagactccagagccctccttctcaatgctgtctcctcatttgcaggaagtgcaggtccctaggtaccctgggggttcctgctaccttcttgccgtagtccatgcagcccactttgcaagccccaccctgtcctgagggacacagcacaacccatatgcgatcaggagccacagggctcccctgagcatatcacatggtgcccaattgcagtgagcagctcgcacgcatgcgccagggccacagccgcacacctgtgcccacagacacaagtgcagaatgggaaggctggctgggatcccaccaccagctactgtccctcttgtcatttttcacgactccgggagaaactgtgctgtaggatacaaatctattttaatacacattacactgggttgaacaagatttttatattcttttatcgatgaatgacgtgagctatgcgaggcgcacgtctttatatattggttacgaggtgccgattatgcattaccgcacggctggtgacgtaactgtcttcaggttcttttgttggttgaattttcttcttggatggattgagttcgattttgtaagaaatgtgggaggatgtggaaggttggacccgggagggggagctgctgatgtgtcttgagacttaggttttgggaccaaggaggaccgtccagtggatagtggctagagaaagtgtttgtcttaaatataccagtgtagtttttccttctgtatgatgcattaaaacccaatt

SEQ ID NO: 4377 - DNA, 1464 bp, Cricetulus griseus
agcacaccggagggagttctccgggccgccgccgccttcctgctgcggcaggggcgtggagggcaggggcggcagagctcaattgcaaacatggctcagagcagagacggcgggaacccattccccgactccgacgagcttgacaatcccttccaggacccagctgtgatccagcaccgacccagccagcagtatgccacgcttgatgtctacaacccttttgagaaccgagagcctccaccagcctatgagcctcctgccccagccccagccccagccccattgccgccacccgcagctccctctgtccagtcctcaagaaagctcagccccacagagcccaagaactatggctcctacagcactcaggcttctgctgttgcagccactgctgagctgctcaggaagcaggaggaactcaaccgaaaggcagaggagttggaccgccgggagcgagaactgcagcatgttgccctgggtggcacacatactcgacagaacaactggcctcccctaccatctttttgcccagttcagccttgctttttccaggacatctccatggagatccctcaagaatttcagaagacagtatccaccatgtactacctctggatgtgcagcactttggctcttctcctgaacttcctcgcctgcctggccaagttctgtgtggaaaccagcagtggctcaggctttgggctgtctatgctttggctcctccttttcactccctgctcctttgtctgctggtatcgcccgatgtataaggctttccggagtgatagttcattcaatttcttcgtttttttcttcattttcttcgtccaggatgtgttcttcgtcctccaggccattggcataccagggtggggcttcagtggctgggtctctgcaattgtgacggtgagcaccaacacggctgtagctgtgctcatgctcctggttgccctgctcttcactggcgtcgcggtgctgggaattgtgatgctgaagcggatccactccttgtaccgccgaacaggtgccagctttcagaaagcccagcaagaatttgctgccggagtcttctccaacccagcagttcgaactgctgccgccaatgcagccgcaggggctgctgaaaatgccttcagggtcccataacccccacccactgggatgtcctgaccctgccacctgtgggaactaagatagtccctatccctgaagtctcagggattcagggagacatcactacttattgacttctatagggctctgaattccacagccacgactctaaacctgacttggaggtgtggggagcccactgtgactcagtcattacttgcctttgtcccccatctggccacactgctgccacctctctctcacacacacaccccaaacccagtttccctctgctgtgccaaggatgtctcttccgttatttaaattaaaaaaaaaaaagtataactagaa

SEQ ID NO: 4378 - DNA, 1464 bp, Cricetulus griseus
cctgagtgaaccagccacacagccagctcctctagagacagataggcgccagtggcaagggattgaggcaatctttgaagcttaccaggaacacatagaagagcaaaacctggagcggcaggtgttacagacacagtgccggcggctggaggcacagaactacagcctcagcctgactgcagaacagctctctcacagcatggcggagctgcggagtcagaaacagaagatggtctcggagcgggagcggctccaggcggagctggaccacttacggaagtgccttgccttgcccaccatgcactggcctaggggctactttaagggatatccgaggtgacggtttcccttgcactaggctgaacctatagcatagaaatattatctattttattaccttgaatatttaatatttttcactgggaggtttgaagcttacaagttgagaacgtgccatgcatgaagcgaagaattccaggctccagagaggacatcaccttgactccaatgtaatcgagtcatctgtctcagctaagacacagtttctctttctgatggcagttttattccttcttcccccacattctttttctccaacactgatgcccaccgtgcatgtggctaagggagagccggctggttgtttcttgtgttgctgtgcctcgagagcccagcttgctcttcccgcagccctgggagttttaacctcttcctcccaggaggagtaagactaacttgcactgaagaaggctgggtgtgtacaagcaaagggctcacgattggtcaccttcctgcgccattggcaaagccacaggttctaggagcatgcaagctagtcaaggcttctccctggaacagctcttaggaaaagaggcaaacccacacccgaaggtaccttattttccttggggaagatgagtggagctgtccacagatagcccaccactggattgctaccgctgtgtgtggcgttttcatactgcaaactagatgcctcccacccctgcctcagacatccaggacccagcatggaaatggcccgcacagcaggctcagcacctctgaggtgtgcgttagccacttagcagcagtctgtactctttcaagtactcaagctttgacttcacttcttgccgtagcctgtccccactgtctgatccagtgcttaacttcaaccctagaggctgccttgacccgaggaggcatctcactagttttgtacttgtgtgtgccctacacctcactgctagggcagtggacccaggcaggagggaggacgggtgcctcggtcactctaggggcagtttagatgctgtgaaattaaacccgttctaagtgtacttgtttgaattaactgtattgtaatattatttgttgaatgtagtaattaggtatttatgaatatattgctgtaatttgacatcccaaaaataaaatcttcctaaatcataaaaaaaaaaaaaa

SEQ ID NO: 4379 - DNA, 1464 bp, Cricetulus griseus
ccgcccggcatgaacatcatggatttcaacgtgaagaagctggcggccgacgcgggcaccttcctcagccgggccgtgcagttcacagaagaaaagcttggccaagcagagaagacagaattggatgctcacttggaaaacctccttagcaaagcggaatgtaccaaaatatggacagaaaaaataatgaagcagactgaagtgctattgcagccaaatccaaatgccaggatagaagagttcgtctatgagaaactggatagaaaagcaccaagtcgcataaacaacccagaacttttgggacaatacatgattgatgcagggactgagtttggcccagggacagcttacggcaatgcccttattaaatgtggagaagcacagaagcgaattggaacagctgacagagagctgattcaaacatcagccttaaatttcctcactcctttaagaaactttatagaaggagattacaaaacaatcacaaaagaaagaaaactattacagaataagagactggatttggatgctgcaaaaacgagagttaaaaaggcaaaagctgcagaagctaaaagttcatctgaacaggaattacgaataactcaaagtgaatttgatcgtcaggcagagattacccgacttctgctggagggaatcagcagtacccacgcccatcatctccgctgtctgaatgactttgtagaagcccagatgacttactatgcacagtgttaccagtacatgttagacctccaaaaacaactgggaagttttccatccaattatctttctaacaacaatcagacttcagggacacctgtggcatctgcgttttcaaatgctattggcccttctgcgatggcttcaacaggtagcctagtaatcaactctccttccaacctcaacgaccttaaagaatcaagtggcagcaggaaggctagggttctctatgactatgacgctgcgaacagtactgaactgtcacttctggcagacgaggtaatcactgtgttcagtgtcgttggaatggattcagactggctaatgggggagagaggaaatcagaaaggcaaggtgccaattacctacttagaacttctcaattaaatagggaaatcatgaacgattacctatcatgacaccatatttatatacagtaactctaaagcaggcttaagtacctttcatgttcatgtcataaggaactgaaaagaaaaactacaagccatcagaaactggccattctgccaataaaattgcatggttaatacttcattacagaatttatgttagagatttcatgacaagaatgttttcttacacaattctctttttactgagatttcactaacaagccacttctacttttgagccccaatttaaaaacaaaaggattgttttctactgaatttttcattaacagcaagctttttcttttatgcaaaataaatttattgtgcatga

SEQ ID NO: 4380 - DNA, 1463 bp, Cricetulus griseus
gtgctcagcgtggggtctgccgcgcagcgtggatctgcgcgccgaggctcagaaaagcgtcgggggaaagcctgtcccgggctggcaggagttagaggtagtgtttctctcctgtccccttcccagcctaggaccccacccccacccgcgcctctgtgtctcttgccgaaccccctcggcgccttctgttttgaagtgagcccctggcgaggtcatgaagcttgtgaggaagaacatcgagaaggacaatgcgggccaggtcaccctcatccccgaggagcccgaggacatgtggcacacctacaatctggtgcaggtgggcgacagcctgcgcgcctccaccatccgcaaggtccagaccgagtcctccacgggcagcgtcgggagcaaccgcgtccgcaccaccctcactctttgcgtggaggccatcgactttgactctcaagcctgccagctgcgagttaaggggaccaatatccaagagaatgagtatgtcaagatgggagcttaccacaccatcgaactggagcccaaccgccagttcaccctggccaagaaacagtgggacagtgtggttctggagcgcatcgagcaggcttgtgacccagcgtggagcgctgatgtggcagctgtggtcatgcaggagggcctcgcccacgtctgcttagtgacacccagtatgaccctcacccgtgccaaggtggaggtgaacatacccaggaaacggaaaggcaactgctcccagcatgacaaggccctggagagattctatgaacaggtggtccaggccatccagcgccacatcaactttgatgttgtaaagtgcgttctggtggccagcccagggtttgttcgagagcagttctgcgactacatgtttcagcaagcggtgaagactgacaacaaagtgctcctggaaaaccggtccaaattccttcaggtacacgcctcctctggacacaagtactccctgaaagaggccctttgtgaccctactgtagctagccgcctttcagacacgaaagctgctggagaagtaaaagccttggatgacttctataaaatgttacagcacgaacctgaccgagccttctatggactcaagcaggtggagagggccaacgaagccttggcgatcgacacattgctcatcagtgatgagctcttccggcatcaggatgtggccacccggagccggtatgtcaggctggtggacagcgtgaaagataacgcaggcacggttcggatattctctagtctccatgtgtctggggaacagcttggccagttgacgggagttgctgccattcttcgattcccagtgccagaactttctgaccaagaggatgattccagttctgatgaggattaagactgacatttaatagttacttcttctcagtgtcccttgacaggtgcaaaagctgcacttgttgatcatgctgggatttctggtgtgttgg

SEQ ID NO: 4381 - DNA, 1463 bp, Cricetulus griseus
cagcctccacacccccacaacttcaaccgcttcccaccacgcttcatgcaggatgacttccctcctcgtcacccttttgagcggccaccctatcctccaccgctttgactatccccaaaggagacttccccgccagagatgggacccccgcatcaccaccctggccaccgcatgccacaccctggcatcaatgagcacccaccctgggctgggccccagcaccctgactttggccctcctccccacggcttcaatggccagcccccccacatgcggcgacagggcccacctcacatcaaccacgatgaccccagcctggtccccaatgtgccctacttcgatcttccagcagggttaatggctccccttgtgaagctggaggaccacgagtacaaacctctggaccccaaagacatccgcctgccaccccccatgccacccagcgagaggctgctggcagctgtggaggccttctacagcccaccctcccacgacaggccgaggaacagtgagggctgggagcagaatggcctctacgagttcttccgagccaagatgcgggctaggcggcgcaagggccaggagaagaggaacagcggcccctccaggtcacgcagcaggtccaagagccgaggtcgctcatcatcacgctccagctcacgctcctcgaagtcttcacgttcctcctcacggtcccgctcacggtcccggtcccgctcctcctcccgctccaggtccagaagccgaagccgatcacgctcctccagaagccgctcgcgctccaggtccagatccaggtccaagtcttattccccggggaggcggcgacgctccaggtctaggagccccaccccaccctccgcagctggcctgggttctaattcagcgcctcccataccagactccaggctcggagaagagaacaaaggacatcaaatgctggtgaagatgggttggagcgggtctggtggcctcggggcaaaggagcagggcatccaggaccccattaagggcggagatgtccgggacaagtgggaccagtacaagggtgtgggcgtggccctggacgacccttatgagaattaccgccgcaacaagagctactccttcattgcccgaatgaaggcccgagatgagttctccacgtttggggcacgaaaggaagagaaggaagactaacacaggcgtggtgcagaaactgctcacagagccctggtgccagttatttgtacagagacttttgaaatgttcttttcgataaaatgcagagccctctacaacttctcagcaccacataagacacttgacttttgttttagatttcccatagctgtgacgtgtgcagacgtgtctgacttgggataaacaagcaagacacatgtgctgttaacaactgattgtggattttactgttttgccttcaaataaagcctttcgtaaaagaaaaaaaaaaaaaaaaaaaa

SEQ ID NO: 4382 - DNA, 1463 bp, Cricetulus griseus
tgtttgtgtgtattgcagtaggacgatgtagatgattccatgattgaacatgaagaaaaggtcggactgctgtattggtgacaattgatgatgagctgtgtggcttgatagctattgctgatactgtgaaacctgaggcagagctggctgtccacattctgaaatctatgggcttagaagtagttctgatgactggagacaacagtaagacagctcgatctattgcttctcaggttggcattactaaggtgtttgctgaagttctaccttcccataaagttgctaaggtgaaacagcttcaagaggagggaaaacgggtagcaatggtaggagatggaatcaatgattctccagctctggcgatggcaaatgttggaattgccattggcacaggcacagatgtggccattgaagcagccgatgtggttttgataaggaatgaccttctggatgttgtggcaagtatcgacttgtcaaggaagacagttaagaggattcgaatcaattttgtctttgctctaatttataatctggttggaattcccattgctgctggagtttttctgcccattggtttggttttgcaaccctggatgggatccgcagcaatggctgcttcatctgtttctgtagtactttcttcccttttcctcaaactctacaggaaaccaacttatgacaagaccaaaaaacaaaaaaaagttataacatgaaatggagaatgggtttcttctattccaacccttttctctcttattccttcacacccccacacccaaaaacatttatattctccaatgctgtctttccagatttggaaaagacctaacttctatcttagctgtcttagagaggtaagacttttgatgaaggtgctattaacctagaaaagcaaacctgttttaataaagtatgagtgagttatatgtttaaactctattttagaccaatgcctatgccatcttaagagtttgagtttgaattatttgtttttttaataactagtggcccatcataacatgactcattgactcctagaagaaacagttaataatagagatgtataatagatttttcttgctctggacccaaattgagaatagaagttccccagctctcagccatgtattgtaaaactttggttagaatccaaaacaggagcggacaactttgtgcaatatttgtttgctgtaatctagtttgtattttctcatgcgcatgtaattgatatttctgccgaagatgtgccttcaactttataattatagtgttgtaaaaaatgttgtcaagtttcactgtgttaaatcatccagtcccctctaccagcaattccacattacccttgttgtgttatttggggttctttggatgttgtttcaactgtaaatccatgatgtactgagatcagaggcaacagcacacgttcaggtaggaggacaaaatctattgtcccttcagatccc

SEQ ID NO: 4383 - DNA, 1463 bp, Cricetulus griseus
gtgtaagaacatggagcacgtgcttcgagagaagccaaggctttttgggccctgcggcgtacctatgaggccattgccaagcacaatgaggtgcagacgacttggctggaaggccgcatccggtatgagtttgacaagctccgcgatttcctgagggtggaggaacaagccaccttgggtgccatgaaggaagagagcagaaagaagcacctgctggttgaggagaagatgaaacagctggcagaacagactgaggcactggctcgagagattgagcgtctacagatggaaataaaggaagatgacatgaccttcctcatgaaacacaagagccgaaaacgccggctcttttgcacagtggagccagctcctctccagcctggcttgctgatggatgcgtgcggatgaagatgcttggatctgttgaatcagtgcccttcagcttggatcccaatacagctgctggctggctcaaagtggctgatgacctcacgagtgtcatcaaccatggctaccgtgtgcaggtggagaatccagagcgcttctcctcagcaccctgcctgctgggctctcaggttttctcgaagggctcccactcttgggaggtggatgtgggtggcctgccaagctggcgagtgggtgtggtgagggtgcaggcacatgcacaggcacaggctcaggctgatgtaggtggtgaaggccactcacatagctgctaccacgatactcgttcgggcttctggtacctatgccgcacacagggtgtggacggagaccactgcatgacttcagacacagccacacgcccctctggtccaggctatcgccccgccgcctgcgtgtggagctggagtgtgaggagggtgagctgtccttctatgactctgagcgtcactgccacctgtataccttccatgcccactttggggaagtgaggccctacttctatctggggtcttctaggggtgacggtcccccagagcctctgcgtatctgccatctgcgtgtctccatcaaggaagagctggacatctgagctgttaagtagggtaatttcagtgatgtagactcttttagaaaaattttatttgactcacaactgacaatgttttctttcagtgcttttgtaaacacaaattcctattgtaacttgtacctgacctgatgctttccattgtaagatttcatagtgtgcagtgaatgtactgtttagtttgttagttggtggacatttggcttgttgcagcttttttagctattatgagtacagctgctataaaatttgtgtgcaagttttgtgtggacatgtctttttttttgtattctctgtcatataccttggagtctgttttccaggtcaggtggtaattatattaaaccctttgaggacttgccaaactgtttctgatagagctgtaccattttctactcccaccggcagcaggtgagggctagtttgtaac

SEQ ID NO: 4384 - DNA, 1462 bp, Cricetulus griseus
  modified_base (53)..(53): a, c, t, g, unknown or other
tgacccgcagtagcaggcctagtacctcagggtcagactatgagcgatgcccngtcaggcatccaactcgtgccaagcagagtcgtttgacatgtcttgatggttggggtacacggactaaagcaagagatggcagcctggctacagagcctccagagagccccagcatgcctaggacctcgggacccaacagggaaaattgcacagcaggccagcctttgcttctggtccagcctcctcccatccgggttcgagttcaagttcaggataaccttttcctcatccctgtcccacacagcagtgatgtccactctgtggcttggctaggagagcaagctgcccagcgctactaccaaacatgtgggctacttccaaggctcaccctacggaaggatggagcactattggctccacatgacctcatccccgatgtgctgcagagtaatgatgaggtgctggctgaagtaacttcatgggaccttccgcctctgactgaccgctaccgaagggcctgccagagcctgggccaaggagagcaccagcaagtgctgcaggccatggaacctggtccttcttgatctgtcttccaatcacttgagccaggaaggtctgcgccagcttgttgaaggctcctcaggccaagccactttacagaacttggaggaactggacttgagcatgaatccactaggagatggctgtggccaggctctggcctcccttctgcgggcctgtcccatgcttagtaccctgcacctacaggcctgtggcttcagtgccggcttcttccagagccaccaggctgctctgggtagcgccttccaagatgttgagcacctgaagaccttgtccttatcttacaacacgctcggtgctcctgccctggcgagggtgctgcagagtttaccggcccataccctcctgcgtttggagcttagctctgtggcagccagcaagagcaacttgagtctcgtagagcctgttgtcaaatacttgaccaaggaaggctgtgctctggcccacctaaccctgtctgcaaactccctgtgtgacaaggctgtgagagaactgagcagatgtctcccttgctgtccctcacttgtctctctggacctgtctgccaatcctgaggtcagctgtgccagtctggaggaactcttgtctatcctccaagagcggccccaaggactaagtttccttggcttgtcaggctgctccatccaggggcccctgaactccgacatctgggacaagatcttcatgcagctgcaggagctgcagttgtgcagcaaacgcctgagcacaagggaccgagatgcagtgtgtcggagactgccggccagcgcgtgctcactggaccaaggtcccaagctcttctttaaatgcctctgaccctggtcctgtcgtctcctttaataaataagctgctatctcaaaaaaaaaaaaaaaaaaaaaaaaaaaa

SEQ ID NO: 4385 - DNA, 1462 bp, Cricetulus griseus
ctgtgatcctcagctgtccgcacacacatgtttaaccaactgtgcctccctacatatgactcatatgaagaggtgcacaggatgctgcagctggccatcagtgagggttgcgagggctttggcatgctctgaccactcctctgtcacctgcttggctcccacactctctagaccaggagggaggaagctatattgggttcaccattatgtggtgattaaagagaacttgacagtctcttggaaggtgatagcatctcttttcgttagtgtttgagtgaaaatgacattaaggctcaagatcacatggacttcgaagtttctgtctttaaagaggctttgctataagccaccatttttgatgggatactcagaattttacaagccatctttattgccaaaaccagcaagtatgtggaatcccgagacaaggtagttcttatgacagtgccttggcctggaagcatgtctgagccctcctgtttccagaggaacaagccctcctgagctgctagaactccagcctgacctccttcgcagtcatcgtttgtcctttcttggcgtgggtgctgacctcacttatccttggggtgtaagacctggcaccagggcctctacaccccaggatcctccatgccacatggtcactgctctcctcagggaccaggacaaggtgctgctgcttgcccacactttcccatggaacatgtacgagatagtttagccattaccctgctgcctctcaggcctccattggggcttccaactggggtacatgggctggcttggctgtctggggcagtttgttcctgtcctggattctgcagtcctggctccagcacccctctctagatctatccttttaagctctagtcatagcactttttcagagtctccgaggcactgttgcagcccagctggggcagctctatcctagggtggtctttaggcaccaaagtctttaacaaaaacccctttagtactatgtgatttttctattccagattactctctcctaactattcagaagcagttttgctctcttttgcattttcttttacctttttgtctaatactgcttgggcactagccagtccagtggggaagacatacagaatgtgggagagataaaaggagatgttatttcctgagcaattttctattcatatcccttattttggccagttcttctgttaatgctttgtgacataggcacttgggaggccagctgctctcctggcttttggcttttcaatgtccttgaaggagacaagtcatgaaatgaaaaccaagaagagtgtcggcgtgattttagaaacttggcagagactgagctctctgcacattgtcaggcaaggtctggacgtcggtaactggagatgtaaatagtttgtacagtaaataaaatgcctacaataataaaaaaaaaaaaaaaaaaaaaaaaaaaaaaaaaaaaaaaaaaaaa

SEQ ID NO: 4386 - DNA, 1462 bp, Cricetulus griseus
ggactgctggcaacatggcgcccaaaaagaaagggaagaaaggcaaagccaagggcaacctggttgttgatggactcgcaccagaggacatgacgaaggagcaggtcgaggaacatgtttcgcgtatccgggaagagctggaccgagaacgagaggagcgcaactactttcagttagaacgtgacaaaatccacaccttctgggagataacaagaaggcagctggaggaaaagaaggctgagcttcgaaacaaagaccgtgagatggaggaggcagaggagaggcaccaggtggagattaaggtgtacaaacaagaaagtaaagcacctgttgtatgagcaccagaacaacctagccgaggtgaaggctgagggcactgtggtcatgaagctggcccagaaggagcaccgcatgcaggagggtgtactgagaaaggacatgcgggcactgaaagtggagctcaaggagcaggagctggctaacgaggtggtgataaagaaccttcgtctgaaacatgctgaggagatgaccaagatgcgaaatgactttgaaaggcaagttcgagaaattgagaccaagtatgataagaagatgaagatgctgagagatgagcttgacctgcggagaaagactgagatccatgaggtggaggagaggaagaatggccagatcagtacgctgatgcagcgtcatgaggaggccttcactgatatcaagaactactacaatgacatcactcttaacaacctggccctaatcaattccctcaaggaacagatggaggacatgcggaagaaagaagagcaacctggagagggagatggcggaggtggctctgcagaacaaacggctggcagaacctctgcagagagcaaaggaagagatgaatgagatgcagaagagaattgcgagctatgaacgggacaagcagatcttgatttgtacgaaggcacgtttaaaggttgctgagaaagatctgaaagacctgcagtgggagcatgaggtactggagcagcgattcatcaaggtgcagcaggagagagacgacctctatcgtaaattcactgcagccatccaggaggtgcagcaaaagacaggcttcaagaacctgttgttggagcgtaaactgcaggcactgaatgctgcagtggagaagagggaggtgcagttcaacgaggtgctggcagcctccaacttggatcctgcagcactaacgcttgtgtcccgaaaactggaggatgttctggaatcgaagaataccaccatcaaggacttacagtatgagctggcccgggtctgcaaggcccacaatgacctgttgcgtacatatgaggcgaagttattggccttcgggatccccctggacaatgtgggattcaagcccctggagacagcagtgattggacagacactgggacagggccctgcaggacttgtgggtgcccctacatagccaccttct

SEQ ID NO: 4387 - DNA, 1462 bp, Cricetulus griseus
tgaccgggggcgccggcttcattgcatcccatgtgattgcctccttagtggaagattatcccaactacatggtcataaatctagacaagctggattactgtgcaagcttgaagaatcttgaacccgtttctaacaagcagaactacaaatttatacagggcgacatttgtgactcccactttgtgaagctgctgtttgaaatggagaaaatagacatagtactccattttgctgcccagacacatgtagatctctcgtttgtccgtgcctttgagttcacatatgtcaatgtttatggcactcatgtgttggtaaatactgcttatgaagccagagtggagaaatttatctacgtcagcacagatgaagtgtatggaggcagtgtcgatcaggagtttgatgaatcatcacccaaacaacctacaaacccatatgcttcatctaaagcagctgctgagtgttttgtacagtcttactgggagcgatacaagtttccagttgtcatcaccagaagcagtaatgtttatggaccacaccagtatcccgaaaaggttattccaaaatttatatctttgctccaacacgacaggaaatgctgtattcatggatcagggcttcaaagaagaaacttcctttacgctgctgacgtggtggaagcattcctcactgtcctccaaaagggagagccagggggagatttataacattgggaccagctttgaaatgtcggttgtccagcttgcgaaggagctaatacagctgatcaaagagaccagttcagagtctgaaacggaaaggtgggtggactacgttaatgacagacctcacaatgacatgagatatccaatgaagtctgaaaagatccacagtttagggtggaagcccaaagtgccttgggaagaaggaataaagaaaacagttgagtggtaccgagagaatttccacaactggaagaatgcagaaaaggcattagagccctttcctgtccagccaccgtttatatagtcgccagttgtagagaagaggacattagcctacctcagcagcgatgcgaactccagtgcctaagtgaagagccagctctcaccccagtgtgaggatgcttccaggactgggttcggatgcagagtctccaggagttccagcattggcccaggattccgtgtggagacctgacggtctcaggttttaatgtcctgactaattttttaggtctgatgatgtgaaagtggaacaaaatggaagcatattgaacactttttcattttgataatttttggaaaattaagttagatgaatttttaaaggtaagatgtaaatctcacacatttttttaaatcagttaatttatataaaacctgtttcagaaattttgtcatgtctctactgtttacaatggttttatttataaaagtgtcaatatattttaatatattaaatacagattgtggctttcttatag

SEQ ID NO: 4388 - DNA, 1462 bp, Cricetulus griseus
ggatgtgaaaatgtggtgcctcgagagccattgattgccacagcagtgaagttcctacagaattctcgggtccggcagagcccacttgcaaccaggagagcatttcttaagaagaaagggctgacggacgatgagattgacctggctttccagcagtcgggcactgctacagaagagcctccatccttgggcctggctacgccagtggctcctgtccagaccccccacctcatcgcacagccatgcagccccggaagttcccgatggcgagattacggtgccttggccatcatcatggcaggaattgcatttggctttcaccagctctacaagaagtacctgctgccccttatcctgggaggcagagaggacaggaagcagctggagaggatggcatcgagtctctccgaactgagtggcagcgtggcccagacagtgactcaggtacagacaacgctggcctctgtccaagagctactgagacagcagcagcagaaggtccaagagctggcccatgagctggccgctgccaaggccaccacatcaaccaactggatcctggagtcccagaatatcaatgagctcaagtcggaaatcaactccttgaaagggcttctcttgaataggaggcagttcccgccctccccatcagccccgaagattccctcctggcagatcccagtgaagtcgccctcgccctccagccccgcggccgtgaaccaccacagcagcagcgacatctctcctgtcagcaacgagtccacatcatcctctcctgggaaggagagccacagccccgagggctccacggccacctaccacctgctgggcccccagcaggaggggggaaggggtggtggacgtcaagggccaggtgagggatggaggtgcgagggggaggaggagaagagggaggacgaaggaggaggaggaggaggaggacccctcctggacaggtgtcctgtccaggtgtgtcctctgaggatcttgactacctgacaccatgcatggccagagctcatgtcatctcctgcctcctgtcaccttagtgcagggggctgtggcccccatggtcttgctgtctcctactgtgccctggcttggcctggggcttctttttgcctgttccaaagccagagccctggacctgctcttcatctgtgggcctgccaggacccagcctccctacaaccaggtcctggctgacagatgccaccccacctgccctgttgtcctgtataccacacaagaccatcctcgcttgctgtgtcatggtttggctactcagtggtgaggtgtgcttctccctcctgcagtggagccaggcagcagggccttcctgaccaacagccacatctgtcctgcccactgagaaacatgttcatttatgtgatcatgtatagatttcagaatataagatatgactgtacatattgtaataaatatgagttgccataattaa

SEQ ID NO: 4389 - DNA, 1462 bp, Cricetulus griseus
acaggtgaacgcccgttccggtgcccttttgaaggctgtggccgctccttcaccacatcaaatatccgcaaggtgcatgtgcgcacccacacgggcgagcggccctacacctgcccggagcccccactgtggccgtggctttaccagtgccaccaactacaagaatcacgtgcgcatccagtacagggggagaagccatacgtttgcacggtgccaggctgtggaaagcgcttcactgagtattcgagcctctacaagcaccacgtggtgcacacacactgcaagccctatacgtgcagcagctgcggcaagacctaccggcagacctccaccctggccatgcacaagcgcagtgcgcacggggagctcgaggccacggaggagagtgagcaggccctgtacgagcagcagcagctggaggctgcctctgctgctgaggaaagcccgccaaccaaacgcgcccacattgcttacctctcagaggtgaaggaagagagcagtgacatcccaacccaagtagccatggtgaccgaggaagatggggccccccaggtggctctgatcactcaggatggtgcccagcaggtcagcctatcgccagaagacctgcaggccctggggagtgccatcagcgtggtgactcagcatggcagcaccaccctcaccatccccaatcatcacgacgaactggccacatcgggcacacacacggtcaccatggtcagcgccgatggcacccagactcagcccgtcacaatcattacctctggggccttggtaaccgaggactcaagtgtggcatctcttcatcaccaacaggtggcactgttggccacagccaacggaacacacatcgcagtgcagctagaggagcagcagaccctggaggaggccataagcgtagccacggctgccatacagcaaggggctgtgaccctggaaaccacagtatcagagagcggctgctgagcccaagaggactggctcccacgcaatgctggagaaggtgccatgctcacaggcagccttgcctctgggaaccctggctcggctgaccccaacaggaggaccacacaggcctctggggtgaggaggcagcaggaaaatggcctctgatggaaagggctgtgggccacacccaagatgagggccaggcagcagacagtggggggggacaaccagcatggtcaccaggctgccctggacaccggctttcctcccttgggggaatattcacttgtgtccactccctttctctgagagatggggcctaggtggacgaggactggtctccaccctgactggtcctaccatcaggggaaggtaggcagctcttctgctcagcgcctcccagcaataaccacctccaggggtagggtggccaagatgcctagccacttggcaccaggaacttcctgccaccacagtcagaattcattcctcaggggcctgtggctggagt

SEQ ID NO: 4390 - DNA, 1461 bp, Cricetulus griseus
gggatgtctggggctgctgctgctgctgctgagtgctgcggcccaggccgcgccctcggctcctcgccgctacaccccggactggcagagcctggactctcggccactgcccagatggtttgacgaggccaagttcggggtgtttgtgcactggggtgtgttctcggtgcccgcctggggcagcgagtggttctggtggcactggcagagcgagcggattccggcctatgagaacttcatgaaagaaaactacccgccgggcttcagctacgccgacttcggaccgcagttcacggcgcgcttcttccacccggaccagtgggccgcactcttccaggctgccggggccaagtatgtggtcctgaccacaaagcatcatgaaggcttcacaaactggccaagtcccgtgtcttggaactggaactcaaaggatgtggggccccatcgtgatttggtcggtgagttgggagctgctgttcggaagaggaatttacgatacggcctgtaccactctctcttggagtggttccatccactctacctacttgacaagaaaaatggcttcaagactcagtattttgttggtgcaaaaacaatgccagagctgtacgaccttgttaacagctacaagcccgacttgatctggtctgatggggactgggagagtcctgatacttactggaactccacggctttcctcgcttggctctataatgatagccctgtcaaggacgaggtggtggtgaatgaccgctggggtcagaactgctcctgtcaccatggagggtactacaactgtgaagataaatacacaccgcacagcttaccaaaacacaagtgggagatgtgtaccagcgtggactcggcatcctggggctacagacgggacatgaccctgtctaccattgccagcgaacaggaaatcattgaggaattgattcagacagtaagtttgggaggcaactatctcctcaacattggaccaactaaggatggactgatcgatcccatcttccaagaaaggcttcttgctgttggcaagtggctgcagatcaacggggaggccatctatgcctcccatccctggagagtgcagttcgaaaagaacataacagtcgtgtggtatacctctaaagactcggctgtctatgctacctttctgtactggccagaaaatgggatcataaaccttaaatctccccaaacgacctcagccacaaaggttacaatgctaggaatggaaggatatttgacctggacccaagatctccaggatgggttcctcatctctctgcccccattgccaccgactgctctccctgtggagtttgcctggactctaaagctgataaatgtgaagtgattgttggagttcaagggcagaccgcctgtgcaataaaagtagcttcccttccaaaaaaaaagatggaagtaaatttgtatgtcagattatttctacca

SEQ ID NO: 4391 - DNA, 1460 bp, Cricetulus griseus
gtcatagttgggttttgttcctgctggcgcggaatactcttgcgtgtaggaagcggctctaccgactgccgaggcctctgggattgtgccgggttgctagttagctcagttggcggcggagcggcggcccctggcgggtcaccatgtgggccttcccggagttgccgctgccgctgctggtgaatttgttcggctcgctgctgggatttgtggctactgtgaccctcatccctgccttccgtagccactttatcgccgcgcgcctctgtggccaggacctcaacaagctcagccggcagcagatcccagaatcccagggagtgatctgcggtgctgttttccttatcatcctcttctgcttcatccctttccccttcctgaactgctttgtggaggagcagtgtaaggcattcccccaccatgaatttgtggccctgataggtgccctccttgccatctgctgcatgatcttcctgggcttcgctgatgatgtactcaatctgcgctggcgccataagctgctgctgcccacagctgcctctctacctctcctcatggtttacttcactaactttggcaatacaaccattgtggtacccaagcccttccgctggattcttggcctgcatttggacttgggaatcctatactatgtctacatgggactgcttgcggtgttctgtaccaatgccatcaacatcctagcaggaattaatggcctagaggctggtcagtcactagtcatctctgcttctatcattgtcttcaacctggtagagctggaaggtgattatcgggatgatcatgtcttttccctctacttcatgataccatttttttttaccaccttgggattgctataccataactggtacccatcacaggtgtttgtgggagataccttctgttattttgctggcatgacctttgccgtggtgggaatcttgggacacttcagcaagaccatgctactcttctttattccacaagtgttcaatttcctctactcgctgcctcagctccttcacgccatcccctgccctcgacaccgcatacccagactcaatccgaagacgggcaaactggagatgagctattccaagttcaagaccaagaacctctctttcttgggcacctttattttaaaggtagcagagcgcctccagctagtgacagttcaccgaggcgagagtgaggatggtgccttcactgaatgtaacaacatgaccctcatcaacttgctactcaaaatctttgggcccatacatgagagaaacctcacactgctcctgctgcttttgcagatcctgagcagcgctgtcaccttctccattcgataccagcttgtccgactcttctatgatgtctgagttccctgaagactgactgcccatagcctccgttggagctcacccaggaccaacctgtctggtccaagactgccttctggtccaggcctc

SEQ ID NO: 4392 - DNA, 1460 bp, Cricetulus griseus
caggaatttttccagcagctactgcagggctgtctcctgcctactgtccaacagggccttgaccagatctggctgctccttaccatctgcttcgcctgccgcctcctttggaggctggggttaccgtcttacctgaagcatgcaagcaccgtggcaggtggcttcttcagcctctaccacttcttccagctgcacatggtttgggtcgtgctgctgagcctcctgtgctacctcgtgctgttcctctgccgacactcctcccaccgaggcgtcttcctctccatcaccatcctcatctacctactcatgggtgagatgcacatggtggacaccgtgacatggcacaagatgcgaggggcccagatgatcgtggccatgaaggcggtgtctctgggcttcgacctggaccggggcgaggtgggtgcagtgccctcacctgtggagttcatgggctacctctactttgtgggcaccatcgtctttgggccctggatatccttccacagctacctacaggctgtccaaggccgcccactgagccgccgatggctgaagaaggtggcccggagcctggcgctggccctgctgtgccttgtactgtccacttgtgtgggcccctacctcttcccctacttcatccccctcgacggtgatcgactccttcgcaagtggctacgggcctacgagagtgctgtctccttccacttcagcaactattttgtgggctttctgtctgaggccacagccacattggccggggctggcttcacggaggagaaggaccacctggaatgggacctgacagtctctagaccattgaatgtggagctgcccaggtccatggtggaagttgtcacaagctggaacctgcccatgtcttattggttaaataactatgttttcaagaatgctctccgcctggggaccttctcagccgtgctggtcacctatgcagccagtgccctcctgcatggcttcagtttccacctggctgctgtattgctgtccctggcatttatcacatatgtggaacacgtcctccgaaagcgcctggctcagatcctcagtgcctgcattttgtcgaagcgttgtctgccagactgttcacatcggcatcgcttgggcctgggggtacgagccttaaacttgctctttggggccctggctatcttccacctggcctacctgggctccctgtttgatgtcgatgtggacgacaccacagaggagcagggctacggcatggcatatactgtccacaagtggtcagagctcagctgggccagtcactgggtcacttttggatgctggatcttctaccgtctcataggctgaggcatatgaccttcataattcccttcaagactcctccttagggtaccagcccaaatgagggaagaccctttctcttctccttgacccctctccattcttgagccccagcacccctacacacaaca

SEQ ID NO: 4393 - DNA, 1460 bp, Cricetulus griseus
agttgcttcagattgctggaattagcccacatggcaatgccttaggagcatctatgcagcagcaggttaatcagcaaatgcctcaggaaaaacgaggaggcgaggtattggattcttctcatgatgacataaaacttgaaaaaagtaatattttgctgcttggaccaactgggtcaggtaaaaccctgctggcacaaactttagctaaatgccttgatgttccttttgctatctgtgactgtacgactctgactcaggctggatatgtaggtgaagatattgaatctgtgatcgccaaacttctccaagatgccaattataatgtagaaaaagcaacaacaaggaattgtctttctggatgaagtagataagattggcagtgtgccaggcattcatcaggttacgggatggtaggtggaggaaggcgttcagctaaaggtttattaaaacttctagaaggcacagtagtcaatgttccagaaaagaattctcgaaaacggcatctggtgcttttaatggcttagacagaatcatcagtaggaggaagaatgaaaaataatcttggatttggaacaccatctaatactgggaaagggcagaagggctgcagctgctgcagaccttgctaatcgaagtggagaatccaatactcatcaagacattgaagaaaagatcggttactccgtcatgtggaagccagagatctcattgaatttggcatgatacctgagtttgtgggacggttacctgtggtggttcctctgcatagcctagatgagaagacacttgtacaaatattaacagagccacgtaatgcaattattcctcaatatcaggccttattcagcatggataagtgtgaactgaatgttactgaggatgctttgaaagctatagctaaattggccctggaacggaaaacaggtgcacgaggtcttcggtccataatggaaaagctgttactagaaccaatgttcgaagttcctaattctgacattgtatgtgtggaagttgacaaggacgtagtagaaggaaaaaaggaaccaggatacatacgggctccatcaaaagagtcctctgaagaggagtatgactctggagttgaggaggatggatggcctcgccaagcagatgctgcaaacagctaaactgtcagagtcctgcctgtacatacagctttaccttgttctgtttagggtcataacagtttccgaagtctggcattaaaggcattgaatctatcttggatatcatacatggtcagaagcctttaagataagaatccgatcatgtatattattgtaacatcacattgatttatacagaaaacagtacatggactttaatgacacaatgtttagagataaaaatgtacattattttggttctgttttttaaaaatatgctttaactataaattcttaggaattcctttaagcaatgcaggtattgcaataact

SEQ ID NO: 4394 - DNA, 1460 bp, Cricetulus griseus
ggcagaaagccatggatcatatggaggaacttgtgtcgctgaagccctgtaaagctgcagagctggttgctactcacttctctggacagattgaagtagtcattgggcagcttcagaaccaggttttgcttttcaaatttttgaggagtcttcttgacccaagggagggtgttcattgtcaatcaggaactgctgcagatacctccatcagttacagagcagttcattgagctgctgtgtcagttcagcccagaccaagtcatagagacaaaccattcagatcacacaaaagtatcggctccatgaagttcactgcgtatctattggagaagaaaggggatgttcatggcgccttcctcctactgctggagagactgcagagcagactacaagagataacacggcaggatggaaacaccaaggaggctttcccactgaagggtgttgaagatgccatggtagagacgattgctctttgccagaggaattcccagagtttgaatcagcagcagcgagagggactatggtttccattgttggaggcaatgatggcaccacagaagctgtccagctcagctgctcctcatctgcactgtgaagctctgaagtctttgactatgcaagttctaaacagtatggcagcattcattgccctcccgtccatcttacaaaggatcctgcaggacccaatttatgggaaaggaaaacttggagaaatccagggccttattcttgggatgttggacacctttaactatgagcaaaccttgctggaaacaacgaccagccttctgaaccaagatctccattggtcactgtgtaacctgagggcttcggtctccagaggactcaaccccaaacaggactactgttctatatgtttacaacagtacaaaagacgccaagaaatggctgatgaaatcattgtcttcagctgtggccatttgtatcattcattctgcctacaaagcaaggaatgcaccttagaaactgagggccaaacaagatgggcgtgttacaagtgcagctcaagcaataaagccagcaagctcagtgaaaatcctgaaaacaagaaaggacgggtagcctcttcgcaggtaaaaatgtcaccatcatatcagtccaaaggggaccctcccaccaggaaggcaaactcagagcctgctctcgacccacaacaaatccaagcctttgaccagctctgccggctctaccgaggaagttctcggctggctctccttacggaactgtcccagaaccgcagtggtgacagctgtaggccgtttgcgggttcccagagcggccctgctttcagcagcatcttccagaaggagaacttccagctgcagcttgcacctccccctgtggctgaagactgaggcctcccgggaagagcacagcactgcaggaggcaggaggggcctcctggacggctccgcctctgcctcccacactcctgc

SEQ ID NO: 4395 - DNA, 1460 bp, Cricetulus griseus
ctgaagctctccccaccaggatatgcatctcctgtcactcagacatcacaggccagctccaagcaggactcttggaacagcctagtcctggctgacagtcatggggacataattactgcgtaactacccccctccctcttcaaattcctgctcggacttgggacctgggggccagcaaagtctgaggctgggggcaccctgggcagtccctttgtctgggaacaactcccaaagaacaactgggtagaacttgaagttgttgacaattgcttagggatgtgggtgctgggtttcttcaaacaccttttccaggtggagcactggaaagagcctgcattcttagagacaagcccaccttcactgtgaatacagcacagttaagactcttcaatgtagcaggagacttctttcttattctccacttgcctgtccaggactttcaccctaactctccaccccagtggttctaggtagtgggtttctctttatgctcctaaggtggctgtaggggcctgagcttcaagacaccatctacagcctgagcagggtgtctacttgatgtggactggacgtggcagccctgcccttgtccaacactccctttgaagcatggcatgtccctgcatgccccataccagatctgactccaaaagtgctgggtgcaatacagatgttactgagttctccctggggagatggtggagaaggcacatcacccatcacacaggatattcatcaaatcacagcccagcagtggtgccttcccttcttcctctcctgagaactccgacattaaaccccttgcctctccagcctgaacatctcctatcctctgcaaaactagagctcagctgtagcaggctaggggaacttggtgctgctcctagcatccttttttaccccccctctgaagattgtgtccaaagcacaatcctcttcccagggctccagcttgcttgttctgagcctgccaggccatggcctctcaacgcagacagttacctggatccgggcctttctacagcaaggatcctttgtccaggaaatacagagtgtttgcaagataaattcaaagcagaaacaacaaaaggaagtttgtgcaaggacaaaggtgactgactcatggaagatgtcttagggcctgatgggattgccatgcttgtagctgtcctagaattggccttctccctcacccattactggggttcccaaagattcttccttgtcctcatcacccacagagctgtagccaactatggcattaccccattgtaccccaaactcccagccccaccctaaaccttgctggccgtagcagagaatagctttgaaccaagatcctgttgtaatcatcatttacactgttttctccctcaaggccaccctccccatcgtccccccaaccccaccaacctgttaacattgtcttaaggtgaaatggctgtaaaatcagtatttaa

SEQ ID NO: 4396 - DNA, 1459 bp, Cricetulus griseus
gccaggcaggcgttccaggatggcaaccatgacatggcccgagagctgtaccagagtttgctgactcaggtggcttcagagcacttcacttctggctgaatagtctgaaggagttctctcacgccgagcagtgtctgactgggctgcaggaggagagcttcagttcagcactttcttgcattgctgagtctttgaaattctaccacaaggggatcgcctccttaacagctgccagcacgccactgaatcctttaagttttcagtgtgagtttgtaaaactcaggattgatcttctccaagccttctcgcaacttatttgtacttgtaacagcctaaagacaagccctccccctcgcaatcgccaccacaattgccatgaccttaggaaatgatcttcagagatgtggccgaatctccaatcagatgaagcaatccatggaagaattccgaagccttgcttcccggtaccgagacctctatcagacatcctttgacgccgactcagcaactctgaggaacgtggaactacagcagcagagctgcttattgatagcccatgccatagaagccctggtcttggacccagagtcagcaagcttccaggagtatggctccacgggaactgctcacgctgacagtgagtatgagagaagaatgatggccgtgtacagccatgtcctagaagaggtggagtcgctcaaccggaaatacgcccctgtttcctacatgcacacggcatgcctctgcaatgccatcatcgccttgctgaaagttcctctttcgtttcagagatactttttccagaaactgcagtctaccagcatcaagcttgctctgtcgccgtctccccggaacccagcagagcccattgctgtacagaataaccagcagctggccttgaaggtagaaggtgttgttcagcatggctctaaaccaggactcttccgaagaattcagtctgtgtgtctgagtgtttcttccacactgcagagtaaatccagccaagatttcaagattcccattgatagcataaccaatgagatggagcagagggttgagccgcacaatgattacttcagcacccagtttctgttgaactttgctgtccttggaacacacagcattacagtggagtcgtcagtgagagatgccaatggcatcgtgtggaaaactggccccagaactaccatgtttgtcaaatccctggaggacccctattcccagcaaattcgcctacagcagcagcaagcccagcagcctttacagccgcagccacagccgcagcctcgaagtgcctacaccaggttttaagtgtgctacaagcacactgcacattcccacactacacagccatcagactgcgagaagattctgtatctccgtgtgtgtgttaagtaaatgtcagtgtgagatccgtcactcactagtatctgtaatgtggcattctggagattgtttt

SEQ ID NO: 4397 - DNA, 1459 bp, Cricetulus griseus
cgacatgagttgctgttgggagccgcgggggccggccccggagccggacagccgcaggcgactccgggagctttgctgcaggcgggacctccaaggtgttcttcccttcaagccccaatcatgttgctctcaggacacgaaggagaagtgtactgctgcaagtttcaccccaatggatccaccttggcatcttcaggatttgaccgactcatattattgtggaatgtctatggtgactgcgataactatgccacattgaagggacacagtggagcagtaatggagctgcattataacacagatggcagcatgctcttctcagcatcgacagataaaactgtggctgtgtgggatagtgaaacaggcgagagggttaaaaggctgaagggtcacacttcctttgtgaactcatgttatccagccagacggggcccacagcttgtctgcactggcagtgacgatggtacagttaagctttgggacatccgcaagaaagcagctatccagacatttcagaacacataccaggtgttagctgtgaccttcaacgacacaagtgatcagattatctctggtggaatagacaacgatatcaaggtttgggacctgcgtcaaaacaagttaacctataccatgagaggccatgcagattctgtcaccggcctgagtttaagttctgagggatcttatctcttgtccaatgcaatggacaatacagtgcgagtctgggatgtccggccctttgctcccaaagagagatgtgtgaagatatttcaaggaaatgtgcacaactttgaaaagaacctcctccggtgttcttggtcacctgatggaagcaagatagctgctggctcagcagacaggtttgtgtacgtatgggacaccaccagcagaaggatcctgtataagctgcctggccatgctggctccatcaatgaagtggctttccaccctgacgagcctatcatcctctcagcatccagtgataagaggctgtatatgggtgagatccagtgaagatgtggatggaaggctcccaggctgtgtgacctgagactccagctgcacgactggccagagtcagatggtgtcccggctgatctgccttcagatgacagtcactagcaagcagctgggggtgatggccatactccagcaaccacttgtaccccatttaccagaacaactgtggcctctggtaccacttgccagatttcagggattggtctctttttaaaaaataagatttcttcagagggacaaacattagtttgaggtctcctgttttttaatctatgctggagacaggaaatgtcaattgaaatgtgttagttggatttgttttctgttttattttaaattgagtaactggcttgtattatttttctttctgtgtttgagtattttgtattattaaaaatccaaacagattacctttttgcaaaagaaaaaaaaaaaa

SEQ ID NO: 4398 - DNA, 1459 bp, Cricetulus griseus
cccgggatccccgactcaacgtgagacgcacaacccagactcatcatgcgtgagtgcatttcagtccatgtggggcaggcaggtgtccagatgggcaatgcctgctgggagctctactgtctggaacatgggattcagcctgatgggcagatgcccagcgataagaccattggtggaggggatgactccttcaccaccttcttctgtgaaactggagctggaaaacatgtgcctagggcagtctttgtggatctggagcctactgtaatcgatgagatccgaaatggcccataccgacagctcttccacccagagcagcttatcactgggaaagaagatgccgccaacaactatgcccgtggccactacaccattggcaaggagatcatcgacccagtgctggaccggatccgcaaactgtctgatcagtgcacaggacttcagggcttcctagtattccacagttttggagggggcaccggctctggcttcacctccctgctgatggagcggctttctgttgactatggcaagaagtccaagctggagttctccatctacccagctccacaagtgtccacagctgtggtggagccctataactccatcctgaccacccataccaccttggagcactcagactgtgccttcatggtggacaacgaggctatctatgacatctgccgccgtaacctggacattgagcgtccaacctatacaaacctcaaccgcctcatcagccaaatcgtctcctccatcacagcttccttgcgctttgatggggccctcaatgtggacctgacagagttccagaccaacctggtgccctaccctcgaatccacttccccctggccacctatgcacccgtcatttctgcagagaaggcctaccatgagcagctgtcagtggcagagatcaccaatgcctgctttgagcctgccaaccagatggtgaagtgtgaccctcggcatggcaagtacatggcctgctgcctgctctaccgtggggatgtggtgcccaaggatgtgaacgccgctatcgctgccatcaagaccaagcgcagcatccagtttgtggactggtgccccacaggcttcaaggttggtatcaactaccagccacccactgtggtgcctgggggtgacctggccaaggtgcagcgtgcagtgtgcatgctgagcaacaccactgccattgctgaggcctgggcccgcctggaccacaagtttgacttgatgtatgcaaagagggcttttgtacactggtatgtgggtgagggcatgggaggagggggagttctctgaggctcgagaggacatggctgccctggaaaaggattatgaggaagtaggcatcgactcctatgaggatgaggatgagggagaagaataagcagccgcttggagccggttttcattgtttattgcaaaatcctttcgaaataaaagtctccctgca

SEQ ID NO: 4399 - DNA, 1459 bp, Cricetulus griseus
aacaggtttgcatttcctcccttgtgaataatgtcaaagaacgaagagcctacaggaaatggggaagaagacaggtgtgttccctgcaagcaggtgaaggtggatgtatctgacagtatgtctgcattaaattttgacagccccactgctctttttgaaagtttaatctcacccatcaagatagagacttttttcaaggaattctgggaacaaaagccccttctcattcagaggaatgacccttcactggccacatattaccagtctctgttcaagactctcagatatgaataggatctgccttcaagggctgtactatggaaaagatgtgaatgtctgccggtgcatcaatggaaagaagaaggttttaaataagagcggcaaagtacagttccttcagctgagaaaagattttgatcagaagagggcaacaattcagtttcaccaaccacaaagatttaaggatgaactttggaagatccaggaaaagctggaatgttactttggctccttagtcggctcaaatgtatacatgactccagcgggatctcagggccttcctccccattatgatgatgtcgaggtttttatcctgcagctggagggagagaaacattggcgcctctactccccaactgtaccactggcacgtgagtacagtgtggagcctgaggcccggattggcacaccaacacatgacttcatattgaagcctggtgatttgttgtacttcccaagagggaccattcatcaggccaatactccttcaggcctggcccactctactcatgtgaccattagcacctaccagaacaattcatggggagatttccttttggattccctttccgggcttgtatttgacattgcaaaggaagatgtggcattgaggactgggataccccggcagatggtcatgcacgtggaaaccccaactgctgcactaagaaagttgagtggctttctaaggacccttgcaaaccagctggaggacagaaaagaactcctgtcatcagacatgaagaaggattttgtcatgcacagacttcccccttactacatggaaagtggaatagacctgttggaaccaggtataaagttcccaacgttggacagcacagtaagactgcaatttaaagaccacactgtcatcacagtaggaccagatgagaatcagtctgatgaagctccacaaaaggtgatttacatctatcattcactaaagaatctgagacagacacacatgatgggaaaagatgatgaagcagagcttcatggacttcgctttcctttatcacatctggatgctctgaagcaaatctggagtggttcagcagtgcctgtcgaggacttgaaacttcccacagatgaagaaaagaggaacctggtattgtctctctggacagagtgtttactccacgtagtctaatgcctctgtagagagaactgttaattttct

SEQ ID NO: 4400 - DNA, 1459 bp, Cricetulus griseus
agcttctgcagcttcagattctacagttcgactgtggtctaaaaagggactggaagtaaaataccttcagaccttgaactttggggaaggatgtgttctgactgtctgcctgtctgttttgcctgatactaatgtaccaatattagcgtgcggtgatgatgactccaaaattcacttatttattcaacaggatgaccagtttcagaaagtgctgtctctctgtggacatggaggactggataagaggagtggattggacaaccattggtagcgaccttctcctagcaagctgttcacagaaaggccaatcactggtgacttggcatgagattgcaaggcctcagatacatggatatgacctgaaatgtttagccatgattgatcggtttcagtttgtgtctggagcagatgaaaaagttcttcgcgtttttgctgctcctcgaaattttgtggaaaatttttgttccatttcagggcagtcactggatcacttgctttatgatgatgaccctgattttccagaaggagccactgtccctgcattggggctgtcaaataaagctgtctatccgggagacctgctccctcaggtatatgaagacaatgcgctctcaaataaccctgcctttgactatgacataatctttcagcctgccgtcctttctgtgcctcccactgaggatcatcttctgcagaacacattgtggcctgaagttcagaaactgtatggacatggccatgagatattttgtgttacttgtaacaattcaaagactctgcttgcctctgcttgcaaggcagctcagaaggaacacgcagcgatcattctctggagcacaatgtcttggaaacaagtgcagagtcttgttttccacaccctgactgtcacacagatggccttctctcctgatgacaagttcttactggctgtgtccagagatcgaacctggtctttgtggaagaggcaggatgtgacctcccccgagttcgacccatttttcagtctctttgcattcaccaacaagatcacttctgtgcacagtagaatcatctggtcttgtgactggagtcctgatagcaagtatttcttcactggaagtcgagacaaaaaggtggttgtctggggcgagtgcaactccaatgatgacctcgtggaacacaccattggtccctgctcctctgtcctggatgtgggcagttctgtgacagctgtcagtgtctgccctttgctgagcccagctcagagatacgtgattgcacttggattggagagtgggaagatttgtttatactcctggaaaaagaccagtcaagaagtcaatgactggaccctgtgtatagaaacaaatccaagccaaagtcacgcacttggtatcagaaggataagctggaagaactgcattgttatgtatatagatcacctttctttaccctcatgattgactgagtttccctatct

SEQ ID NO: 4401 - DNA, 1459 bp, Cricetulus griseus
tgcctgccagcacttgacccagctggagtctactttggattccctgccagctgcggatccaaggagccaccctcccgggcagtagaaactggggagtctaggggaccggacaactttgggcgtagaggaccccagaggagaggggcccgggtgcctaggcctgctaccaccgagctggccccaacaaggagccctctagaagcaccagctcaccagaacctacctgtgagggtctttgtggctctatttgactatgaccctgtctcaatgtcacccaaccctgatgctggagaagaggaactgcccttccgggagggccagatcctcaaggtgttcggagacaaagactcagatggtttctaccggggtgaaagtggaggccgcacaggctacatcccctgcaacatggtggctgaggtggccgtggacagtccagcagggagacaacagctgctccagcggggtttcttgcccccagatgttctcactgaggtcttgggggatggtctctctgtgtatccctcagcccatatgactgggcctccccccaagcctcgccggtctaagaaagagctggaaggcccacagccctgcccaggtccccctaagctgatccattctgccctcctgaaaacttcccgacctatggtggctgcatttgactacaacccccgggagaactcccccaatatggatgtggaggcagagctgcccttcagggcaggagatgtcattactgtgtttggaaatatggatgatgatggtttctactatggggaactgaatggacaaaggggtctggttccatccaacttcctggagggccctgggcctgaggcaggtggcctagagtctgggacatcccaagctgagagtcagagaacgaggaggagaagagtccagtgctagatggatgtatatatgtacatactcagtgcctcagtccagctcctccatctgcttcaccacacaagtcaggggaggagaaaggccatgccaaagcgggcctgaccccgccccatagtgctccacccctccctgcccaggccacctggcctctgtgtcatcccattcccccaaacccaggggaccagggggcagaaagcaggagttgggtttgccttattttgctcattggattcaacttctcttttgcatcattttcttccagtccctgttggggtcaggggctgagggaaaggacagatttatgcagctattttcatacatgcccttgttcagagtgggtaggggtctctttaccctaactctaaccatcccatccttcacctcttgtctgggcgagtctctttgcatgtttcctttgctgtggtgggagatgtttgattgaacccccacccctaccctggtctccagggatgtgggatggtgggggcatttgtttaaaaagacattttattataataaagtctattttcacaaaaaaaaaaaaaaaaaa

SEQ ID NO: 4402 - DNA, 1459 bp, Cricetulus griseus
ggctgccgctggcccgcctgctgcgctacctgcgagacgacgggctgtgccgtgcccaaggaggaggcggcctaccagctggcgctgcgctgggtgcgcgcagacccgccgcgccgcgccgcgcactggccgcagctgctggaggccgtgcgcctccccttcgtgcgccgcttctacctgctggcacacgtggaggccgagcctctggtggcgcgctgcccgccttgcctgcgcctgctgcgagaggcccgcgacttccaggcggcgcgctacgaccggcacgaccgcgggccctgcccccgcatgcgtccgcgcccgtccaccggcctagccgagatcctggtgctggtgggaggttgcgaccaggactgcgacgagttggtcacggtcgactgctacaatcctcagacgggccagtggcgctacctggccgagttccctgaccacttaggcgggggctacagtatcgtgtgctatgacccggatgctgacctatggtcactggtggactgtggccagctcccaccttggcctttgcacccaggactgtgaccctgaatggactcatgtacttcgtcagggatgactctgccgagtggacgtatacaaccccacaaagaatgaatgggacaagatcccatctatgaatcaggtacatgttgggggcagcctggccgtcctgggaggcaagctttatgtctctgggggatatgacaatacatttgaactctccgacgtggtggaggcatatgacccagagacccgggcatggagtgtggtgggacggcttccagagcccactttctggcacggcagtgtgagcatcttccgccagttcatgccacagacaccatcagggggccgtggctttgagctgaacagtggcagtgacgacatggatgcaggccgcctcaggccgccacagaacccgtgtgtgtgtgtgtgtgtgtgtgtgtgtgtgtgtgtgtgtgtgtgtgggacaggctaggaggcttcccagaggaagcttgcacagggcgcctctgtccacctgtgctccctagctactcaggtttccacatcacccactgggagtccaggacagtccctgcctcagcttcacctctgccacgggctctgggttgcaaccccaccgcttgacacgtctgcactaacagggattaaagttgggctacataggtatgggattgtccctgtcacatgtaaaaagcttctatatgtcaggataaaattaagttatgagaagttctgtgcctggtatctgatgctgacctataagggatttcttgtatttatgacatcagagacttattaatgaaggtcaccttccttaggtgaccagcactcagacacaccagtggctggggcagatttgtatatttatttttgtctactctataggcgtctatgtccagcattctaaggttttaggatgctcccctaacttttgaaataaaat

SEQ ID NO: 4403 - DNA, 1458 bp, Cricetulus griseus
ggctcccggccgctggctcgcacctgcagcagccacgccgcctttccacctcgtcccctctcctccaccggctcctcgtcgttgctcgaggactcggaggacgatctgctgagcgacagtgagagccggagccgcggcaacgtgcagctggaagccagcgaggacgtggggcagaaaagccactggcagaagatccgaaccatggtcaatctgccggtcatgagtcctttcaaaaagcgctactcctgggtgcagttagccgggcacacagggagtttcaaagctgcgggcaccagtggcctgatcctgaagcgcagctcggagccagaacactactgcctggtgcggctgatggcagatgtgctgcgcgggtgtgttcccactttccatggtgtagtggagcgggatggtgaaagctacttgcagttacaggacctgctcgatggctttgatgggccttgcgtgcttgactgcaagatgggtgtcaggacgttacctggaggaggagctgaccaaagcccgagagaggcccaagctgcggaaggacatgtacaagaagatgctggcggtgggaccctgaggcacctactgaggaggagcatgcgcagcgtgctgtcaccaaaccgcgctacatgcagtggcgcgaaggcatcagctccagcactacacttggcttccgcatcgagggcatcaagaaagccgacggatcttgcagcactgatttcaaaactacacgaagccgagagcaggtgactcgtgtctttgaggagttcatgcaaggcgatgctgaagtgctgaggaggtatctgaaccgcctacagcagatccgggacaccctggagatctcagatttctttagaaggcacgaggtgattggcagctcactcctcttcgtccatgaccattgccatcgtgctggtgtatggctcatcgattttggcaagaccacgcccctccccgatggccagatcctggatcatcggagaccctgggaggagggcaaccgtgaggatggctatttgctggggctggacaatctcattggcatcttggccagcctggctgagagatgaagctgagcccttgtcccacctgcttgggccggctggtcagacagatgtggacctgtggctgcatccccataatgcatgccaacaagagactggaaccccgctgggcgggcagttcacatggtcctgcaggaccaggtgccatccactaagggggtatactaccaataccaggagttggcctccacacaagcctgtttttagagctgaatgacactagtttacaggagggaaaggaaacaatgggcttctcccttgacccagctcttctcaagtggctttgcacctctctagagggaccagatccagaattttatttcacagtgtataagacttcctggtctacctctacactacagtggacacccttcctaataaaactcaaaga

SEQ ID NO: 4404 - DNA, 1458 bp, Cricetulus griseus
cctgggaatcagcgaggtatattcttagtaagagaaagtgaaaccactaaaggtgcttattccctctcgattcgtgattgggatgaggtaaggggtgacaatgtgaagcattacaaaatcaggaaacttgacaatggtggatactacatcacaaccagagctcagtttgatactctgacagaaactggtgaagcactacacagaacatgctgatggtttatgccacaagttaacaactgtgtgtccaactgtgaaaccccagactcaaggtctagcaaaagacgcttgggaaatccctcgagaatctttgcgactagaggttaaactaggtcaaggatgctttggtgaagtgtggatgggaacatggaatggaaccacaaaagtagcaatcaaaacactaaagccaggtacaatgatgccagaagctttccttcaagaagctcagataatgaaaaattaagacatgataaacttgttccactgtatgcggttgtttctgaagaaccaatttatattgtcactgagtttatgtcaaaagggagtttgttagatttccttaaagaaggagatggaaagtatttgaagcttccacagctggttgatatggctgctcagattgctgatggtatggcatatattgaaagaatgaactatattcatcgagatctccgagctgctaatattcttgtaggagaaaatcttgtatgcaaaatagcagattttggcttagcaagattaattgaagacaatgaatacacagcaagacaaggtgcaaaatttccaatcaagtggacagctcctgaggccgcactatatggccggtttacaataaagtcagatgtgtggtcatttggaattctgcagacagaactggtaacaaaggggagagtgccatatccaggtatggtaaatcgtgaagtgctggaacaagtggagccaaggtacaggatgccttgtcctcagggctgtccagaatccctccatgaattgatgaatctttgttggaagaaggaccctgatgagagaccaacatttgaatatattcagtctttcttggaagactacttcactgctacagaaccacagtaccaaccaggagaaaatttataatccaagtagcctgtgtgcacagatctgccaaaacatgaagacctcatgtgagttcctcatgcacaggaatgagaagatactcttcattctgcatgtttcttttggtaaactggaattccagattcattactgaatcctctgccaagagggtctcttgagaagagtgtcgtccttatttgccctgatgtctacagttcgtgacatgagtgttttaaagggcttcatgtgaactatggtattgtagttttcctaagcattctttaaagggtaaaaaattgtgcttatctactaattctgatcagaaaaataaggcaggaaaagctgatgatggcattctttagcttttaa

SEQ ID NO: 4405 - DNA, 1458 bp, Cricetulus griseus
  modified_base (1444)..(1444): a, c, t, g, unknown or other
gtgccgaggcgacagcgtgtgggacctgccaggtgccaccatgttgtcctccctgttggtgctgctcctggccataggcagaggacagacaactcggccatgttttcctggatgccagtgtgaggaagagacttttggcctctttgacagtttcagcctgactcgagtggactgcagcagcttgggcccccacattgtgcctgtgcccatccctctggacacagcccatctggacctgtcttccaaccggctagagaccgtgaatgagtcagtgctggcagggccaggctataccacactggctggcctggatctcagtcacaatctgctcaccagcatcgtgcccactgccttctcccgcctgcgttacctggagtcgctcgacctcagccacaatggcctggcagccttgccagctgagattttcaccagctcctccttgagtgacgtcaacctcagccataaccgactacgggaggtctcgactatctgccttctctacccacagccaggccgggcactgcaccgtagacctttcccacaaccttatccaccgcctcgctcccccatccagccagggccagtctgcctgtacctaccattcagagcctgaatctagcctggaaccggctccacactgtgcccgatctcccgagaccttcccctgcgttacctgagcctggatgggaaccctctggccaccatcaaccccggtgctttcatggggatggcaggcctcacccacctgtcactggccagcctacagagtgtactccagttagcaccccatggcttccgtgagctcccaggcctgcaggtcctggacttgtcaggcaaccccaagctcaagtgggcaggagctgaggtgttttcaggcctgggcttgctgcaggaactagacctgtcgggtaccagtctggtacccgtacctgagatgctgctccatcacctccctgctttacaaagtgttagtgtaggccaagatgtgcagtgccggcgcctggtgcgggagggtgcataccctcggcaacctggctccagccctaaggtagtcctacactgtggagacacccaggaatttgcagccaggggcccagacatcttgtgacaaatggtgtggcctggagccacttgacagactgctgccctgggcttgctcaggtcctgactaacttatattttaatatgccaatgcctgtgcagagtctacaggcctaggtgatggcatctcagtaaagttgtgggccagggatagctttcgtacctggggcctatacccagtaacaaaatctacccatttgtctccatggctcatttcccagaactatgagcagagggactttgatgccaaaccagactctggtcccttcctgagccctgccccagttgtccctaagtgccttccttttgcctggactgacctgaccatgatgttttttttttnttttttttaatgaa

SEQ ID NO: 4406 - DNA, 1458 bp, Cricetulus griseus
ggatccgacggggccgggtccccgggagcaccccagctgagaggagtattaacgggaacatccataggagtgcagaaactttcacaatgaaatctgaagccaaggatggagaggaggagagcctacaaactgccttcaagaaattaagagtggatgcatcagggtccatctcatctctgtctgttggagaaggcacaagtggcagagcatcagtcagaacagcagcagatgacatgaaacctaaaaccacgtgtgcgtctaaggacagttggcatgggtctacaaggaagtcttcacgaggagcagtgagaacccagcgtcgtcgacgctccaagtctcctgtccttcatcctcccaagttcatacattgcagcaccacagcatctcctcccagcagccagctcaagcacagaagccagactgagccacccgacggcagcagtgggctgggaatttcaagccccaaagagttcaacacaggagagacctctacttctcttgatgttaatcacacaggggcagtcattgagcctctgagaagttcagttccaaggctcccgtcagagagtaaaacagaagagccctctgatgctacccaagtctcccaagaaagtcttacagccagtgatctctctgactttcgatctgtttccaagctaagccagggcaagccatgtgcgtgtgtaggcaaggagtgccagtgcaagagatggcatgatatggaagtgtattccttttcaggtctgcagaatgtccctcctttggccccagaacgaaggtcacttgaggactgctctccatcactgcacaccagaactctgtctggctcccctcgatcctgttccgagcaagctcgtgtctatgtggatgatgtgaccattgaggacctgtcaggctacatggagtattacttgtatatccctaagaaaatgtcccacatggcagagatgatgtacacctgataatgagaagtggattcgtgtgctttaaactaatgcaaggttgtcagagggttagttaacggcagacctggtggccactctgtgagaagacatctctttctgctcactgtgcttgcaataaaaacttctcttggcatctcagttaatcttcattctgtcagtttactgagttcttacgtacccattaaggcaagcaggtcaaagaaaacctaaaaatgttctgagggctgaagaaacatgatgactggagactggcatcggtggggtgtgtgggattcttgtaagacagcatatatcagacctgcttaggatgtgacagccaagaaactgcaatgtgcttttgtaactgaactgaacactgtcatgttgtagatgccagcccactagtagtggagcttctcaaactcacttaaactgtctttggtttaactcgggtttatgtcattaaaggtttcttacgttattgttgagtcagagatctaaggtttagattcag

SEQ ID NO: 4407 - DNA, 1457 bp, Cricetulus griseus
  modified_base (121)..(121): a, c, t, g, unknown or other
  modified_base (1428)..(1428): a, c, t, g, unknown or other
ccggctgcggttaccggtgcgggtggaacaggtcgtcaacgggcgcggctggtggtcaccgtgagctgcggcgagcgcagcttcgctgggatcctgctggattgccgaaaaagtctggtcncttttggcctgtctccatctactctgctgcctctggctgacaacccctctgtcatcaactgtcatggccaggtgcctgaggcgggaactggagaagtgatgcagctgggaatgggacctctgcctcctcacaacaaagaccagtcccctgagaaggatcagcctcccaagacagctgggcccgagcctcccccaccactcataccacctctaccttctggggaacctgcctcccttcccaccctactttgagggtgcccctttcccccacccactatggctgaggaacacctaccagcagtgggtgccacagcctccaaggtggtcaagatcccatccagagtgcatggctccgtggagcccttctgcccccagaagtctctacagaatggcagccaggacttagaggtagcgagggatgtggagcccaagggtggtggtgacccgaccacccagcgggcattccattcccaagctgaagctgactcgtccagtgcctcccatctcagacttaccgcctcccaaaatccgcttgaagccccaccggctgagggatggagagcatgagcctttgtacagggctgagctggtacaggagatgaatggatgcccacgaggccccctggccagctcgcctgctctctttgctgatggctctacccatgggctggaggacttgtcttctggaagttccggtgaggacgatgacctcaagaggtttcctcaaggcaaacatgggacgtgatagcttggcttttcttgtcgactgccctgggaggagagcagattgtaccagtgagtctgtgtgcagcaccgacagcctggatgaattgaaatcatctggttcagaagtgacatctccagacacaggagacctgtcatctggtgacagtgcctccgttccttcatcttctgctgacactcgccagacagttcctcccctcacggtcaggctgcacacgcagagtgtctcacaatgtgtgactgaagatggaaggacggtggctgtaggggacgttgtgtggggtacagggcaccttcctgggcctggccctggctattcagctagagccactctgaaggcctgaggaaaccaaattgcacgtatgggcttctccttctccagcccttggatgtacggtgtctgtgcacttgagccaggaacctagttgcatctcctccacattccactcaaagcacgggtccctgggctcccagccctggcctgcaaggcctcttagatctgagatgctgctatgtcacctactgtgacggggagaggggagagggaaggcagaactgaaaacnggcctcgaggttaggacataccagctctg

SEQ ID NO: 4408 - DNA, 1457 bp, Cricetulus griseus
atttgcattctcagtgacacatttctcatcagaaatagttgccaaatttataaggaaaaatgattcccaatggatatttgatgtttgaagatgaaaattttattgaatcttctgttgccaaattaaaatgccctaaggaaaagtgggcagttctgtgatgttcgacttcaggtctgtggccatctgcagcaaagaagttgaagatggaccgagtaaaacaggtctgtggagattatttactatctagaatggatattactagctgcatctcttatcgaaattttgcaagttgtatgggagactcccgtttgttgaataaggttgatgcttatattcaggagcatttgttacaaatttcagaagaggaggaatttcttaagcttccgagactaaagttggaggtaatgcttgaagataacgtttgcttgcccagcaatggcaaattgtacacaaaggtaatcaactgggtgcagcgtagcatctgggagaatggagacagcctggaagagctcatggaagaggtttacgagaagaaacctcaagtgtattgacacgtaaagaagcagcagtcctgccccatttctcctaagaaagtccgctgtgggcagaggacgatgatgatttaatggtgtttactcctttacagggttcttactctaaagctttgtgattttcaatggtgttgttcatacatatagtcaattaacttgggactatttttaaaatatacacaaaatttgatggaaaagttgggactagtccatgtgtcagttggagcagtggagtaactttgagtgtaacactccacagaagccctctatgctcactgacatttacctattctgttaggcctcagtcactaccattactgcattctaaaaaggctagcaggtcctctttaaattctgtgaacttcccacatgggaatcagatgcattggtcgtgtgtttgcatctgtggaggaagactgcaacttgccacattgcacagtctgaggtaacctcaggttaaaatttaactggagaattttatagcatacttaaattttcctttaataaaggaaagtggatgagtttcattgttttaactggacagagacatttttgggggggagaaaacatgcatattttagagcttccagcatttttgccacaccagtagacgctaactcagaaaattaaacaaaccccatttacaccttttctctcaaagtacagttcacaactagtaataagaacagtaaaaatgaagcactatattaggttttgttattttggttagattttttttaaaaagttatttgtaacccgcatgactaataggaccagtttgaaaaagatgacagtagttttagattgttgatggctgtgaaagaaattttggctatttaattactgaacctctcatgaaacagaaatgatatcatgatttttaatgttacgtttatacagtgttga

SEQ ID NO: 4409 - DNA, 1457 bp, Cricetulus griseus
gcaaagatggcggcggtctgcggggagaagcgctcggctggcggcttggggcggaaggctgcggcgcgggctcgcggccggccgacgagccgtaccgagtcccggccctgtggcagccgttgtggccggcgtggcgctggcaggggcaggagcggcgtggcagcacggccgcgtgaaagcagctgcgcgcgagggcagccttaaggtgttggcgcagaaaaatgacttgggaccagtggaaaaactttctctgcgtaaacagcggttcatgcagttttcatccctggagcatgagggagaatattacatgacaccccgggacttcctcttttcagtaatgtttgagcaagtggagcgtaaaacactagtcaagaagctggcgagaaaggatatcgaggatgtactgtcaggaatccaaaaagcacactgtggatcaactttttttagagacctgggtgataaaggggtaatttcatatacagagtatcttttcttacttacaatcctcacaaaacctcacactgggttccatgttgcttttaaaatgctggatgcagatggcaatgagatgattgaaagaaaggagttcgtcaagctgcagaagatcctaagtaagcaagaggacttcaagacagtgaagattagtgacaccgaatcccaggaaccagcagtgaaagagcctggaattaacacgacccttcaagtgcgtttctttgggaaaagaggagaaaagaaacttcattataaagaatttcgaagatttatggaaaatttacaaacagaagttcaagaaatggaattccttcaattttctaagggtctgaatttcatgagaaaggaagactttgcagagtggctccttttctttactaacaccgagaataaagacatctactggaaaaacgtgagagaaaagttgtcagttggagagagcattagtttggatgagttcaagtcattttgccattttacaacacatttggaagactttgctatcgccatgcaaatgtttagcttagctcatcgtcccgtgagactggcggagtttaagagagctgtgaaagtagcaactggacaggagctctcaaacaatattctggacactgtcttcaagatctttgacttggatggcgacgaatgcctcagccacgaggagtttctcggagtattgaaaaacaggatgcatcgaggtttatgggtgccgcagcagcagagtgtgcaagaatactggaaatgcgtaaagaaggaaagcattaagggagtcaaggaggcctggaaacaagctgcaaagggccctttttaagggggaagtcagaggccagcctggggagccagttctctcctcctaccgtgggagtcccagagactgaacttgggtcatgagctttggtgtcaagtgccttttcttgacaagccatctcaccagctctgactcagtaatttcttggtaaattttc

SEQ ID NO: 4410 - DNA, 1457 bp, Cricetulus griseus
  modified_base (1223)..(1223): a, c, t, g, unknown or other
ctctggatgtcttccactgccgggagtcacaatggtctgtctctgacactgcgcacagagcagaacgacttcatccccctgctgtccacagtgacaggggccagggtgatggtgcatgggcaggatgagcctgccttcatggatgacggtggcttcaacttgcggcctggtgtggagacctccatcagcatgaggaaggaagccctggacagccttggaggcaattatggtgactgtactgagaatggcagtgatgtccctgtcaagaacctttacccttccaagtacacgcagcaggtgtgcattcactcctgcttccaggagaacatgatcaagaagtgtggctgtgcctatatcttctaccctaagcccaagggtgtagagttctgtgactaccgaaagttctccttggacagcctgggctgtttctccaagtgtcggaagccgtgcagtgtgaccaactacaagctctctgctggctactcaagatggccctctgtgaagtcccaggattggatcttcgagatgttgtccttgcagaataattacacaatcaacaacaaaagaaatggagtcgcaaaactcaacatcttcttcaaggagctgaactataaaactaattcggagtctccctccgtcacgatggtcaccctcctgtctaacctgggcagccagtggagcctgtggttcggctcgtctgtgctgtctgtggtggaaatggccgagctcatctttgacctcctggtcatcacagtcctcatgctgttgcacaggttcagaagccggtactggtctccaggacgaggggccaggggtgcgagggaagtggcctccactccggcttcctccttcccctcccgattctgtccccaccctacatccccactgccttctttgccccagcagggcacagccccttccctggccctgacggcccctccgcctgcctatgcaaccctaggcccctgtgcccatccactggattctgcagtgcctggcccttctgcctgtgccctgggggagccatgagagaggagagttgtcctctcacccaggccagtgctcctgcttcaacagctgcccagctgcctttggtgtgcctgagggagtaggctaaataaggggccaggaagtttatccagagaacagcagctaatgagctgttctgagctgcccggctcatgcttctgaacactgctttccgcacaagctcaaacaagtcncttttcccttggatcagccaagccagacttggaactttgacaaggaactttcctgggaaacgaccaacgaacaaatataaacaaggctcggaaaaagtggccacaggtttcctaccccatgaccagagattggcctcgccgcgccaccttcagagacacagatgtctgcccctttcttgaacttgggtggggaaaccccacccaaaagcccctttattagttctttggcaattc

SEQ ID NO: 4411 - DNA, 1457 bp, Cricetulus griseus
cagcagcagcgccgccgcctccacgcagccaagccgcctgtgctaaaatgagggcttcctgggtggcccagatcgcaggctcagagtggatttgccaaagcagaggagacccgctatccccagcagtaccagccctcacctctccctgtgcactatgagctgctcgctgatggatatacccggcatcgaaacctggatgctgaccttagagtgcgggataggacccctccacaccttctgtattcggaccgagaccggacctttttggaaggggactggaccagcctcagtaaaagttcggaccgcagaaacagcctggagggctatagccgctcagtgcgcagccggagtggtgagcgctggggaggagatggggaccggagtatagccaagccctgggaagagaggcgcaagcggaggagcctttccagtgaccgtggaaggacagctcacagcgaggctcggaccgcacccctgatcgtagccgaaaggagaaccactccagtgaagggaccaaggagtcaggcagcaactccttagcaacagccggcatggtgtggaggagaggagccaccatcaccaccaccacgaggctccagactcttcccatgggaaaaagactagagagagtgaacgcaatcatcggaccattgaggcagagcccaagactcttgaagagccaaaacacgagaccaaaaagctaaagactctttcagagtatgctcagacattgcagctgggttggaatgggcttctagttttgaaaaacagctgctttccaacatctatgcacatcctagaaggagaccagggagttatcagcggtctcctcaaagaccacacttccggcagcaagctgacccagctaaagattgcccagcgccttcgactggaccagcccaagctggatgaggtcacccgtcgcatcaagcaggggagcccagtgggcctggcactgaggggatgcccacggtggagccaggcctacagaggcggcttcgaacctggtctcctacttgaaacagaagcaggctgcaggggtgatcagcctgccagtgggtggatctaagggcagagacagcacgggcatgctttatgccttcccaccctgcgacttttcccagcagtacctccagtcggcactgaggacattgggcaagctcgaggaggagcacatggtgatagtcatagtaagagacactgcctagcccacacctgtgcttcccagctgcctttgggtcgcagaagcagttcttttaaacatctgctcccttctctacctaccttactcccttggtttgaattctctgctggttattctggttcatttggtggcatcctgtccactgctaaaactgagttcttagatctggggctttttgttctttaacaagaagaaactcctgttatgtttcccgtgtatgagatattgtctgctgtattctgttattttttta

SEQ ID NO: 4412 - DNA, 1456 bp, Cricetulus griseus
cgggcccggcgggaccatgttcaccagcaccggctccagcgggctctacaaggcccctctgtcgaagagtctcttgctggtccccagtgccctgtcccttctgctggctctcttgctgccccactgccagaagttcttcgcatatgacctccatgccgtcaagaacgacttccagatttggaggctggtatgcggaagaataatttgccttgacttgaaagatactttttgcagtagtcttcttatttataacttcagaatatttgaaagaagatacgggagcaggaagtttgcatccttcttgctgggctcctgggtcttgtcagccttgtttgacctcatccttgtggaagctgtgcagtattcgtttggcatcactgtggccagtaatttgccttctggattcttggcgccagtgtttgctctctttgtaccattttactgctccattccaagagtccaagtggcacaaattctgggcccgttgtccatcacaaacaagacgttgatttatatattgggacttcagcttttcacctctggttcctacatctggattgtagccataagtggacttatctccggcgtgtgctatgaccgcaaagtgttccaggttcaccaggtgcttcgcgtccctggcctggtggcccagttcttctcctgggcccttgagcctatattctcatcttcagaacctgccagcgaggtcagggttgggatgggagccacagtggacatccagaggcagcagaggatggaacagctggaccggcagctgatgctctctcaatttgcccaagtgaggcggcagaggcagcagcagggaggaatgatcaattggaatcggcttttccccccttagtcagcgacgaaatatcaactatcaagatggtcctcggtctgaagagcgagtgtcccctccctgcaagtttctgaggagcaggttgcccggctcatggagatgggattttccagaggggatgccttggaggccctgagggcctcaaacaatgacctcaatgtggccaccaacttcctgctgcagcactgacattcagcacagctgttgaatgacagtggtgtgtccccgccaccacagcagcctgaggaccacgcagactccagtccaggtggtctcaagaagaaaggtggtccccaccctacactgtccttaactccaagatggttaccattgtagtatcagataagtttgccattaaattagcatgtattttctatctttattttttactgggcctttctcagtttggagaagcgtcgttcctaacatgttcacatgcatgacagttgcgagtttctgtggcagttttatagcacgcagaaggggacaactgtcatgatgcttgtgtggagcaggctgcttgtcctcttctcagtagagggggacaggtcatgtgacctcagacaggacgtgtttcactattctgtgtggact

SEQ ID NO: 4413 - DNA, 1456 bp, Cricetulus griseus
gtcagccatcgctcccagccccaaccagccttcccagccccagcggaccctgctccaacatgtggctcagtcacagactgcgacacagacttcagtggtggtaaagtccatcccagcgtcttcccctggaacaatcacccacattatgcaacaggcattaagcagtcatactgcttttaccaaacacagtgaggaacttggaactgaggagggtgaggttgaagagatggacacattggatcctcagacaggtctgttttaccgatctgccctgactcagtcacagtcaactaagcagcagaaacttagccagccccagctggaacagactcagctgcaagtgaaaactctgcagtgtttccagaaactccagcacaaactacacgcagatgccccagctctccatcaggcatcagaaactgactcctctccagcaggaacaagcacagcccaagccagatgcacagcacacacagcatcccgtggtagccaaagacaggcagcttcctaccttaatggcacagcccccgcaaactgtagtacaggtacttgctgtgaaaaccacacagcagcttcctaaactgcagcaagctccaaatcaaccaaaaatctacgtgcaaccccaaactccccagagccaaatggcgctccccacttcatcagagaaacagccggcaagccaggtggagcagccaattataacccaaggatcctctgttacaaagataacatttgaggggcgccagcctcccacagttacaaagataactggtggcagttctgttcctaagctgacgtcaccagttacaagcatatctcccattcaggcctctgagaagacagcagtgtcagacatattgcagatgtctttgatggaagctcagattgacacaaatgtagagcatatggtagtggatcccccaaagaaggctctggccactggtgtgctcactggtgaggcaggagctttaccctctacccacgtggtggtggcagggatggcgaaatgtagagagtcctgttcaagtccatctgctgttggccctcccctaacgaccagaaagatggaagcagcaggagtgcctgcgacaggccagttcatgcgtattcagaatgtaggccaaaagaaagctgaagagagtccaacagagattatcatccaggccattccccagtacgctattccttgtcactccagctccaatgtggtagtagagcccagtgggcttcttgaactgaacaacttcaccagtcagcagctggatgatgatgatacagcaatggagcaggatgtagacagcagcacggaggatggaactgagcccagcccctctcagagctctgctgaacggtcctagtgttcagacaccggagtgcactttaaagcctgcttggttaccaagtgtccagggaaacttataacttgttatactaaaaaagaaaaaaaaaaaaaaaa

SEQ ID NO: 4414 - DNA, 1456 bp, Cricetulus griseus
catgagattgtggctctgaagcgtgtgaggctggatgatgacgatgagggcgtgccaagttcagccctccgggagatatgtctactcaaggaactgaagcacaaaaacattggcttcatgatgccctgcatagtgacaagaagctgacgttggtttttgagttctgtgatcaggacctgaagaaatattttgacagctgcaatggtgacctggaccctgaaattgtgaagtcattcctcttccagctgctgaaaggcctgggattctgtcacagccgcaacgtgctgcatagggacctgaagccccagaacctgctcataaacaggaatggggagctgaaattggctgattttggcctggcccgagcctttggtatcccgtgcgctgttactctgctgaggtggtcacgctgtggtaccgcccaccggatgtcctctttggggccaagctgtactccacgtccatcgacatgtggtcagccggctgcatctttgcagagctggctaatgcggggcggcctctcttccccgggaatgatgtggatgaccagctgaagaggatttttcgactgctagggaccccgactgaggaacagtggcccgccatgaccaagctgcccgactataagccctacccaatgtacccagctacgacatccctggtgaacgtcgtacccaagctcaatgccacagggagagacctgttgcagaacctactgaggtgtaaccccgtgcagcgcatctcagcagaggaggccttgcagcacccctacttctctgacttctgccccccataggctctctgacccctggtggccgggctggggcctggcctatttaagcctccctcacagaagggtggaaaagtggggtgtgggatgctgagcaccagctgtgctgggcccagccagggtagagttactctggcccgcgtttttcactccctccatggactttatttaatttcataaattggctcctttcccacagtctgctgatatggtggtggggtggctctgaagggtggctggggacccctgcggttggggtacagtaaaagaaggaaactggggctgaggcacaggtccaggggtaccctcttggcaggaagggaaaggtagggctctttccatcccactgtctcaagtaggctgctcctgtggagaggttggaaaggcctctcccatagcatgacttttggaggcaggacaacaacttgtgttcttgcacgtggactagaccctctagtgtaacctgccacttccaccttatgctgagctggttagaaccttgtcctggctatccactgttggtacagtgaatacctactgaccatgcccacggtgggctataacatctgagttctgggcatggagagactaccttcttatatgttgataggaggtaggtctggtggtacaggcctgtattccaagctaccaacaagcctgaggcag

SEQ ID NO: 4415 - DNA, 1456 bp, Cricetulus griseus
attttgaccttcaatctggacattgtgattattggcattaaccctggattaatggcagctgacaaaggacatgcactaccctggacctggaaatcatttctggaagtgtctgttcatgtcaggactgagtgaggttcagttgaatcacatggatgaccacaccttacccggaaagtatggtattggcttcaccaacatggtggaacggacgacgccaggcagcaaggatttgtccagtaaagaattccgggaaggtggaaggatcctagtgcagaaactgcagaaataccagccacgaatagcggtgtttaatggaaaatgcatttatgaaattttcagtaaagaagtttttggagtaaaggttaagaacttggaatttgggcttcagccccacaagatcccagacacagaaactctctgctacgtcatgccatcttccagtgccagatgtgctcagtttccaagagcccaggacaaggttcattactacattaagctgaaggacctaagagaccaactgaaaggcattgagcggaacacagacgtgcaggaggtgcaatacacatttgacctacagctcgcacaagaggatgcaaagaagatggctgtcaaggaagaaaagtatgatcccggttacgaagccgcgtatggcagtgcttacagtgaaaacccatgtcagagtgaatcttgcagctttgcttcaaacgggctaacagctgacagtgcagagctgagaggagaagcagctcctggtggcgttccaaatgggcagtggatgacacagtcatttacagaccagatcccgtcctttaataactgtgggacacaggagcaggaagaaggaagccaggcttgatgatggtctcctgagctctgcctcagcactgcagttttaatgcagttacactagtggtgtaactatacatggagcagttgtgtggtagagtcaactgcatgaacctgtgtagttgaaaggaaaagtaggtgttttctacctgagttttgtatttgaattactcatcattccagctttttatatactagatttcatttacgaagaaaacttgctttctttggggagttcactttgatgtaattttaagactcaacagtttgaatattgctggttttgctgtatgaaatgtccgtgaggtttttatattccacagaggttatgtagcctattcttctgtgaataataagagaagcagtttcttgtgaatcttaacatgccttttagctgtgacagtgggtcttatttttccttgagtctaggtcaagcttgtgtgagtcatgttgctttaagatgtactgcactgctgtttacatggacattttttgcgggtgctctgaagtgccttgcatcagggattaggatcaactgaatttttttttcatgggaccgtgtaaagcatgtaactaggtattgctttggtatatgactattgtagctttt

SEQ ID NO: 4416 - DNA, 1456 bp, Cricetulus griseus
tcttcctttcagaagatggcggcgggaagtaagagcggcggcgagaagcgcggcgcgaaaagccccgcggactctggcttcttggggctgcgggccagctcggtggaccccgctctgaggcggcggcggcggggcccccggaacaagaagcgcggctggaggcggctggcggaggagccgctgggcatagaggtcgaccagttcctggaagacgtgcggctgcaggagcgcgccaccggtggcttgttggccgaggcccccaatgaaaagctcttcttcgtggacactggatccaagaaaaaagaaccaaacaagaggacctgggtccagaagaagtctcagcgtctccagaaaccccttcgggttgaccttgcccttgagaatccttctaaggtccctgctcccaaagacatcctcgcacaccaggtccccaatgccaagaagctcaggcgaaaggagcagctatgggagaaactggcgaagcagggtgagctgcccagggaggtgcgcaaggcacaggcccggctcctcagccctcctgcaccaaaggccaaacgcgggctacaggacatcattgagcggcccttctatgacctctggaacccaaacaaccctctggacaagccgttggccggtcaggatgcattttttctggagcagaccaagaagaaaggagtgaggcggccaccacgcctccatgtcaagccctcccaggtgcctgcagtagaggtgacccctgcgggagcctcctacaacccaacctttgaagatcaccaggccctgcttctaaaggcccacgaggtggaggtgcagcgtgagaaagactcagaaaagctggagcgacagctggccctgcccaccgtagagcaagctgccacccaggagtccatgtttcgggagatgtgtgagggcctgctggaggagtctgacggtgaggaccagccagactgtgtggagccgccggcggctgacgatggggccgatgagacctcacccactggccctgctggtgtggagaagaggacggagaagaagacagagcagcagcggcggcgggagaaggctgctcgcaagctgcgggtgcagcaggctgcactgagggcagctcggcttcagcatcaggagctcttcaggctgcgtgggatcaaggcccaggtggcccggaggctcatggagctggcacggcggaaggagcagcggcgcctgcggcgactggcagaggctaacaagccccgcaggctggggcggctcaagtaccaggaccctgacattgatgtgcagctcagctccgagttgtctgactcactcaggaccctgaagccagaaggtaacatactccgagacaggttcaagagcttccagaagaggaatatgatcgagccccgggaacgagccaagttcaagcgcaagtacaaagtgaagatggtggagaagcgctccttccgggagatgcagt

SEQ ID NO: 4417 - DNA, 1456 bp, Cricetulus griseus
aggaaatgcagcttttaattggacagaggtttgccgccaacacagacttaaaggttcttctttgtggtccaattggtccaaagctgcatgaacttcttgatgacaatgtgcctggtggtcctctctggattgcacatgatggagggacaaagcaaggagctccagaggaagagactcttggaggttgtgacctccatatctgacatccccactggtattccaattcacctagagctggccagcatgactaacagggagctcatgagcagcattgtgcatcaggtctttcccgcagtgacttctctggggctgaatgaacaggagttgctgtttctcagccagtcagcatctggaccccatgcttctctctcctcctgggatggtattcctgatgtgggcatggtcagtgacattctcttctggatcttgaaagaacatgggaggagtaaaagcagatcctcagatctcaccagaatccatttccacacactggtctaccacatcctggcaaccgtggatggacactgggccaaccagcttgcagctgtagctgcaggagctcgtgtggctgggacacaagcctgcgccactgaaaccatagatgccagccgagtatctctaagggcacctcaagagttcatgacatcccattcggagtccggctccaaaattgtactaaacccaaataagccagtggtggaatggcacagggagggaataaccttctacttcacacccgtgttggtgtgtaaagaccctattcgaactgtgggccttggtgatgccatttcagctgaaggcctcttctataagcacaccctgattaggaaggctgtaagcagttcctatgaggaatgaaaatcacccatcttaagaattccaggaagaacatagcttggaaaataggctgttggtgtcagaacagttcctagatataattggaagacagccaaagaaatcacagcagattaaactgtacagatacattccagcctgttggcaattacataaaaatacttcaggtttaattgaaatttatttatgtactaatgagactggatttttttttttacgtgttacaaaggataaaacctccattcctgggtccccagttgatgtaccacccccccccaagcctggactctacatcaaatttgatgtgcataccttctcagcctcctgctctcagacataaagatcagagctacactcagcctcattgctcagccctggaagaactctctgcagaaccctggtacttgttcctcctgagccttgaagagaatctgctttacaactggaatgtgcttctgtgtagaacacatgtgttttgtgtttgcctttgacacaaccattaaagagtttgacctcataagagccccaagatcatgaataaatgtgtcatgttgtatatattttttaataaatcaagatttctgtgtgaaacttttaaaaa

SEQ ID NO: 4418 - DNA, 1456 bp, Cricetulus griseus
  modified_base (1023)..(1023): a, c, t, g, unknown or other
atcatcgacctccccagctggactcagttccgccaggatactggcaccatgaggtctgtgcgcaggcacctgttctcacagaattctgccccaggccagggcatcgtctgggagtggctaggtgatgatggatcctggataccctatgaagctagcgtctgtgactatctggaacagcaagtagcccggggcatccaggtcgtggacttggccccactgggctacaactacactgtcaactatgccaccttaacacaaaccaacaagacttccagcttctgccggaatgtgcgacgccaagtggggcccgtttacccagtgacttcagtcatcgctcccccaggccacatgggactcgtctgttcttgccaacagtgcctccacggtagcggaactggccctgtgtcaggtcgctatcgtcactccatcgaccaacctgcctgcatatcctgccccccaagcacccaccggaccgctactgtctttggggcccaccaggcttttgccccatacaataagccttcactgtctggggccaggtctgcaacccaggctgaacaccaccaacccctggggcacaacacctcccgttccaggcagccagtccttgttccactccagcctctcgcacctggggccacagctcctgccctcaggaccgtccacctccagtggagccagtgcctccttccccagcgggccttcctccagcagcccagggggccgccgaagcccgagccggagcatgtgatcagaaagtacacggaggagctgagagtggcccccgatgaggactgcatcatctgtatggagaaactgtctgtggcctctgggtacaccgatgtgactgacggcagcacccttgggcccatggctgtgggacgcctcaccaagtgcagccatactttccacctgctgtgcctgctggccatgtactgcaatgggaacaaggatgggagtctgcagtgtccgtcttgcaaaaccatctatggggagaagacaggaacacagccatggggaaanatggaggtgctcagggtccacgtgtctctcccaggccacgaagactgcgggactatactcattgtttacaacatccctcacggcatccagggaccggagcaccccagccctgggaaaccgttcacagcccggggttttccccggcagtgctacctgccagataaccctcaaggccgaaaggttctggagctcctgaaggtggcctggaagagacgactcatctttacagtgggaacatccaacaccacgggtgagacagacacggtcgtgtggaatgagatccaccacaagaccgagatggaccggaacctgacgggccatggctacccagaccccaatacctggcagaacgtgttagcagagctggctgcccagggagtcactgaggactgcctggagccgcagtgacccttcaggcctgtctctgtcgacc

SEQ ID NO: 4419 - DNA, 1456 bp, Cricetulus griseus
  modified_base (625)..(625): a, c, t, g, unknown or other
ctctcaagcccagagacccggcacaagcggctctcaaaatggtgatgaaaccggcacctggcccaacaaccagtttgatacagagatgctgcaagccatgatcttggcctctgccagtgaagctgctgatgggagctccactctgggagggggcgctggcaccatgggtttgagcgctcgatatggaccccagttcaccctacagcacgtgcctgactaccgccagaatgtgtacatccccggcagcaatgccacactgaccaatgcagctggcaaacgagatggcaaggctccagcaggcggtaacggcaacaagaagaagtcgggaaagaaagagaagaagtaatatggaggccaggccttgagccacagggcagcctccctccccagccagtccagcttgtccttacttgtacccaggcctcagaattttagggctcaccccaggatactggtaggagccaaggccatgctccccgttgggaaacagaaataagtgcccaagtcaacactccctctctgtgccctagggggttgaatatgcaaagagagttctgctgggaacccctatccaatcactgatcatacccccaagggtagtagggttcctctccatcagttcagntttcccccaaagcatggtttggttaccagtcttctcatttccttctagagcctgagaccaatgcttaatttgggggacacagtcaccatccccctggtactgatgcttgctggattttcgggaaggcatttttgctacccagtctcttttcactgcctggggatcagtcttttgtttttcattgtttgatgttcccatgttcccactgcatgctatgacttccctactcctcaaagaagagactcctttgcatgtctggagacagtagggggtggtaagctaaagggaagtggacaaaacagctcattaacggggtcttgcaaggggctctgtatgtacccagggtactggcccaaccccccaattctagccatagacaaaactccaggccagacccctccaccctggttcagcctgggcagcttgggctgagccaccaggaccaatagatttaagctggcatttcagtccaagaaggcttctaagtggatttaggacctgagaggaagaggggcctctgtgggtgctgggtactccagaggtgcccctggtggaagggtgggtcagtggtcctagcaggaagggagacccagcaaggccattcttgctgggttgagtcaaggagctagaacaagggaccaagtggctgtaaagtctcaagccaatgatggggcttctccactgggctcctgtagtcctcaagtccctggcctccaccttaccaggtgccacttctcagaaggccactgcccaggcccccaggccgccccttcgtggccagagactggttaaagcccccccagtgcctccttgtgcatagaacttcctctg

SEQ ID NO: 4420 - DNA, 1456 bp, Cricetulus griseus
tcccggagaggaagtggagatacctccatctccatggacaccgaggcatccatcagggaaattaaggactcgctggccgaagttgaggagaagtacaagaaggccatgggtctccaaatgcccagctagacaacgagaagaccaacttcatgtaccaggtagacacactgaaggacatgctgctggagctggaagagcagctggccgagtcccagagacagtatgaggagaagaacaaggagttcgagagggagaagcatgcccacagcatcctgcagttccagtttgccgaagtaaaagaagccctgaggcaaagggaagagatgcttgagaaacatggaataatcctaaattcagaaatagccaccaacggagaaacttcagacacactgaatggagttggatatcaaggccctacaaagatgacaaaagaagagctgaatgccctcaagtcagcaggggaggggacactaggaaaagccaaagaagtggagttgaaaaaggaaattgtgcagagtatggggaaaggaggaggaaccttacagaatactgagcaacaacagcccagacccaacccaataaaggattgtgtggaccaaggggtgtcacatcccggtgagaatgcccaggaccagaaacccactgaagacagtgctctgtccccaggaccactagcaggggccaaatgtgagcaacaggttcggagccaagctcaagagaacacttctttcctcaaaagacccagagcagattgagtcacgggaggtcacagaccagccagatggtaggaccagaaactcgttggaacagtccaactgccctgggaggtctaggacagtgaagagtcaggacccgctgtagacaacagtgacctgtcaggggagctggggggctgcaattcagaaaagtggagtgcaggccagaggggaggttgagaatagcaagagtaaggaggattgcaccatgtcaatgaggaggcagaggcagaatgttccagtttctgtgaacgtaccacgtgtcaatcaagtatcaacgactttaagttatagactgttacttgtagatttgtattcaaccattggtcatgtagacaccattgttttcagtttcagttctagctgagagcattccattagcatcaggtgacaccaaacacagggagactacgtgcctttctttacctcgcctaagtgctgaattttgcaccaatgctcttggatcttattgccaatggtacccaaattaattttatccaagatctttatttcacttcacatgggtaatatgataaattcattttatacaaatattttattttatccttttctgttaatgtcatgtgaattcatactactgctacaaggtagagtggaacgcaaaagaccaaaccctcagtaaaatttgaggcaaactgaaatgtcatataattgaaataaaacattttataattttacaa

SEQ ID NO: 4421 - DNA, 1455 bp, Cricetulus griseus
gaagcacgtctgctgtgactgcaaaaaggacttttgctccttttgctcagtttcacaagaaaacctccgcagatgttctacttgtcacctactccaagagacagccttccagcgccctcagttgatgcgactgaaagtaaaggacctacggcagtatctcctcctcagaaacataccaactgacacttgtcgggagaaggaagacttggtagatctagtactgtgccatcgtggactaggttcaggggatgacctggactcaagcagcctcaattcctcacgctcccagacttctagtttttttacacaatcccttttttcaaattatacagccccctctgctactgtttcctccttccagggagagctcatggacagagatgggaccttcagatcagaagttctggcacaggttcaaagtgaaatagcttcagcaaacacagatgatgatgatgatgatgatgatgatgatggtgatgatgatgatgagcaaagaagaacaagacttggaggagcagaacccagggctctccaagaagaaagtgagagcctcgctgtctgacctgtcaagccttgaagaggtagaagggatgagtgtgcgccagctgaaggaaatcctggctcggaattttgtcaactattctggttgttgtgaaaaatgggagctggtagagaaagttaaccggttgtacaaagagaatgaagaaaaccaaaagtcatatggtgagcggatgcagcttcaggatgaggaagacgacagcctgtgccgaatctgcatggatgcagtcattgactgtgtcctgctggagtgtgggcacatggtcacctgcaccaaatgtggcaagcgcatgagtgagtgccccatctgtcggcagtatgtggtgcgagctgtgcatgttttcaagtcatgaaaattgaggccccctgagtgggacactcccgtgactatcccaaacctacctgagtgcataaaagggactgaaaacttactgttccgaggcagaagctattttaaaaattattttcattactgactgggacagaaagttcatcctaaattgaagaaacctgggctgtgccataggcctgtctgtctgtgaacacatggctttcccagcttgtgctgggtttttctttgatgtgaactcacgattcactagtgggctagtgtggactatactgagcagtggctactctgaatgttcactttattagtcatattattttaaatgctaatatttaatgaatgtaagtttccacattgttgctatctctgcatttaagcataattgggagacaactgacattcaactgccagagcctcagataaatatgtccatttttgttcaggtacagcttttagtagcaagggctgcatctagctttatcttagaagtgtgtgtgtgtgctaaattccttactaacatgtaatcaatttacacttttgtatagtga

SEQ ID NO: 4422 - DNA, 1455 bp, Cricetulus griseus
agcaagtcgggggaccggccgtgtggaggaagccccgtgcaaggccttcagcggcttctggaacaggcacggagccccggggagctgctgcgatggctgagtcagaaccccaccaaggtgcgagcgcatcattaccccgtggcacttcgtcgtctgggacagctcttggtgtctcaacctaggccttctcctgtggagcagtccacactgcaggacttgagccagctcatcatccgaaactgcccctctttgatgttcacaccatccatgtgtgtctacaccttgcagtcttacttggctttccctcagatggaccactcctgtgtgccctggagcgggagcgaaggtcccgcctccctccaaaaaccaccctccccaccatcagcctgccacccatggtgggcaaaggttggaaatggccctgagctgtccccatttcctgcggtaccctcgtcagcatctgatcagaagcctggcagaggcaaggccagaagaactgactccccatgtaatggtgcttctggctcagcacctggcccggcaccggttgcgggaaccccagcttctagaagccattgctcacttcctggtggttgaggaagcccagctcaacagtaaggtggtacagaagttggtcctgccctttgggaggttgaactacctgcccctggagcagcagtttataccctgtcttgagaggatcctggctcgggaagcagggatggcacccttggccacagtcaacattttgatgtcactgtgccagctgcagtgcttgcccttcagagccttggagtttgtcttctcccccagtttcatcaaccacatcagtggcacccctccttctctgattgtgcgacgctacctctctctgctcgacacggctgtggagcttgaactcccagagtaccaaggcccccgacttccccaaagacagcgagtgcccatcttcccgcagcccctcatcactgaccgtgcccgctgcaaatacagtcacaaggacatagtagctgaggggctgcgccagctgctaggggaagaaaaatactgcagggacctgactgtacctccaggctactgcacagacttcctgctctgtgttggtagttctggtgctgtgctacctgtgaggacacaagaccctttcctgccctacccgccacggtcctgccgacaggaccaggccgactctaaccccacaacccaagattctacccaaagggtggtgttgatgctacgagaacgatggcatttctgccgtgatggcagggtgctgctgggctctcgggccctgagggagcggcacctgggcttgatgggctaccagctcctaccgctgccatttgaagaactggagtctcagagaggcctgccccagctcaagagctacctgaggcagaaacttcaggccttaggcccccgctggggacctggagggagggtgagggagtacac

SEQ ID NO: 4423 - DNA, 1455 bp, Cricetulus griseus
agacagccacgcggagtaacagacctttaccatggcgctgctacgaggtgtgtttatcgtggctgctaagcgaacaccctttggagcttacggaggtcttctcaaggacttctctgctactgacttgactgaatttgctgccagggctgccctggctgctggcaaagtcccaccagaaaccattgacagtgtcatcgtgggcaatgtcatgcagagttcttcagatgcagcatacctagcaaggcatgtgggtttgcgagtgggagtcccaaaagagatcggagccctcaccctcaataggctctgtggctctggtttccagtccatcgtgagtggatgtcaggaaatctgtgtcaaagatgcagaagtcgtcttgtgtggaggaacagagagcatgagccaagccccctactgtgtgagaaatgtgcgctttgggaccaaatttggattagatctcaagctggaagatactttgtgggcaggattaacagatcagcatgttaagctccccatgggaatgactgcagagaaccttgctgcaaaatacaacataagcagagaagactgtgacagatacgcactgcagtcccagcagaggtggaaagccgctaacgatgctggctactttaatgaggaaatggtacccattgaggtgaagacaaagaaaggaaaacagatgatgcaagtggatgagcatgctcggccccaaacaaccctggaacaattgcaaaagctccctccagtgttcaagaaagaagggactgtcactgcggggaacgcctcgggggtctctgatggtgctggagctgtcatcatagctagtgaagatgctgtcaaaaaacataacttcacaccactggccagagttgtgagctactttgtatctggatgtgatcccagtatcatgggtattggcccagttcctgcaatcaatggcgcattgaagaaagctggactgagtcttaaggacatggatttggttgatgtgaatgaagctttcgctccccagtacttggctgttcagaaaggcttggatcttgaccccagtaaaagcaatgtgaatggaggcgccattgccctgggtcacccactgggaggctctggatcgagaatcactgcacacttggttcacgaattaaggcgccgaggtggaaaatatgcagtggggtcagcttgcatcggaggtggtcaaggcattgccctgatcattcagaacacagcctgaagagatcacagcacggtgaccacctttacttggccaggccacagaacaggtagccaggtgaccttcagggtagcactactgcaacagtgattgcaattgaccaagccttgatgaggcgaaatatattaggttctgtccacttcatacctgcctaacatactgtgttagaataaaacccaccatcgaaggccttaaaagaatggtgtctttgtcaatagccaccactatat

SEQ ID NO: 4424 - DNA, 1455 bp, Cricetulus griseus
  modified_base (1450)..(1450): a, c, t, g, unknown or other
  modified_base (1452)..(1452): a, c, t, g, unknown or other
ccgcggccctgcgaagatggcggcgacaccggccctgctttcctgaggcggctgcgatggaacctcctccagctccggggccggagcggctctttgactcgcaccggctcccgagcgacggcttcctgctgctcgcgctgctgctctacgctccggtcggcctgtgtctcctggttctgcgcctcttcctagggctccacgtcttcctggtcagctgtgctctgcccgacagcgtcctccgcaggttcgtggtgcggaccatgtgtgcagtgctggggctcgtggcccggcaggaggactccggactccgggatcaccgcgtcagggtccttatttccaaccatgtcacaccttttgaccacaacatagtcaacctgctcaccacctgtagcacccctctactcaatagcccccccagctttgtgtgctggtctcggggcttcatggagatggataggcgggtggagttggtggagtcactcaagaaattctgtgcttccacaaggcttccgcccacacctttgctgctcttccctgaggaagaggctaccaatggcagagaggggctgctgcgtttcagttcgtggccattttctatccaggacgtagtacaacctcttacgctgcaagttcaaagaccgctggtctctgtgacggtgtcagatgcttcctgggtctcagaactgctgtggtcacttttcgtccctttcacggtgtatcaagtaaggtggcttcatccagttcatcggcagcttggggaggagaatgaggagtttgcactccgtgtacaacagctggtggccaaagaattgggtcagatagggacacgactcactccgtcagacaaagcagaacacatgaagcgacagagacaccccagattacgcccccagccagcacagtcttccttcccttcttctcctagcccttcctctgatgtacagctgacaactctggctcaaagagtcaaggaagttttgccccatgtgccattgaatgtcatccagagagacctggccaggactgggtgtgtagacttgaccatcacgaatctgcttgagggggctgtggctttcatgcctgaagatgtttctgaaggatctcagtccctgccctcagcctctgccccaaagttccccagctctggcccggtgacccctcagcccacagccctaacatttgccaagtcttcctgggcccgtcaggagagcctgcaggagcgcaagcaggcactgtatgaatatgcaagaaggagattcagagagagacaggcccaggaggctgactgagcccaaaggaacaggatggtacccagagccgcaggacggagactgggggcagccctcacccagctcacaacaggccgaatgagtgggtggtaaaaagggaggggtggagctcccccaatgtcacattaaattcagggttttcactaaaaaaaaaaaaaaananaaa

SEQ ID NO: 4425 - DNA, 1455 bp, Cricetulus griseus
tgcaaagggacccaaactctcctctttactcagtgaagtcttttgaagagcttcgcctgaaaccccagcttctccaaggagtctatgccatgggcttcaatcgaccatccaagatccaggagaatgcgttgcccatgatgcttgctgaacccccacagaacctgattgcccagtcacagtctggtactgggaaaacagccgcctttgttttagctatgctcagcagagtggaaccagcagacagataccctcagtgtttgtgcctgtccccaacatatgaactggcacttcaaacaggaaaggtgattgagcagatgggcaaattccatccagacctgaagctcgcttatgctgttcgaggcaataaattggacagaggtcagaaggtcagtgagcagattgtcattggcacccccgggaccgtcctggactggtgctccaagctgaagttcattgaccccaagaagatcaaggtgtttgttctggacgaggctgacgtgatgatagcaactcagggccaccaagaccagagcatccgcatccagaggatgctgcccagaaactgccagatgctgctcttctctgccacctttgaagactcagtgtggaagtttgcccagaaggtggtcccagaccccaacatcatcaaacttaagcgtgaagaggagactttggacaccatcaaacagtattatgtcctttgcaataacagagaggagaagttccaggccctgtgcaacctgtatggggccatcaccatcgcccaagccatgatcttctgccatacccgcaaaacagctagctggctggcagcagagctctccaaagagggccaccaggtggctctgctgagtggagaaatgatggtggaacagagggcagctgttattgagcgcttccgggaaggcaaaagagaaggtcctggtgaccaccaacgtgtgtgcccgtggtattgatgttgaacaaagtgtactgtcgtcatcaattttgaccttcctgtggacagacctacctgcatcgcatcgggcgcactggccgctttggcaagaggggtctggcagtaaacatggttgacagcaagcacagcatgaatatcctcaacagaatccaggagcattttaataagaagatagaaagattggacacagatgatttggatgagatcgagaaaatagccaactgagaagcttcaccagcgactggcgccaccctcagcactgtccctgcctgggagcctagtgctttcatggcaaaggccttgacaggcacctcaaagaccaaggcctgagtagagactacctacctcattcagaatcatgtttggacttgacaaatttgtgcaaagagtaaggggaaatccaaggaacagttttgcattttagaaaaagtcctagcctggtgtggtggtgcacacctttaatcccagcacctgagaggcagaggcaggaggatctc

SEQ ID NO: 4426 - DNA, 1454 bp, Cricetulus griseus
gagcgagagaggagctgagaatggaggagagaggcatgcaactgggtgcttctcctggattggggaactccatctaaagccaaggtggtccatagttatggacgatattttgggggaggaagcatctaatggagtgcaattggaaaaatctcatcttttggaaaaatcttctgaattcacccatttatttgaagtcttcagtattggccctcaccttactcagccagtaggaagacccacaagcaagaggccctgtcaccgccacagctgtggagttgctttcaagaacaggactcacctgactcagcacctgagcatgtatgatgggagaaaaatgcatgaatgtcaccagtgccagaaagccttcactaccagtgcttctctcacaaggcatagtaggattcacactggggagaagccttacgagtgcagcaactgtggcaaagccttcaacgacccctcagctctaaggagccatgctagaactcacctgaaagagaaaccctttgactgcagtcagtgtggtaacgccttccggaccctctctgctctgaagatccacatgcgagttcacactggggaaagaccctacaaatgtgatgagtgtggcaaagcctatggcaggagctgccacctcatagcccataaacggacacacactggagagaggccctatgagtgccaggactgtaggaaaggccttaccaaaacccctctccaccttaaggagcacatccggaaccatactggggaaaagccttacgagtgtacacagtgtggcaaagctttccggtggaagtccaacttcaatttgcataagaagaaccacatggtggagaaaacctatgagtgcaaagaatgtggcaagtccttcagtgacctcctgtcaaggaggaaacacatgaggatgcacactgtgaagaaaccggttgagtgctgccagtgtgggaaaaccttccgaaacgagtctatcctgaagacacacatgaactctcacactggggagaaaccttatggctgcgatctctgtgggaaagccttcagtgcaagttccaacctcactgcaacttcctgtgggaaggtttcttcggcgattacctgtcacgaaggaggcacatgagcgtccatcttgtcaagaagtgtgtggaatgtcggcagtgcggaaaagccttcaggaaccaatccagcctgaagacacacatgagaagccacacaggagagaagccagtatgagtgtgaccattgtggaaaagccttcagcataggttccaaccttaatgtacaccggaggatccacactggggaaaagccctatgaatgtcttgtgtgtggaaaagccttcagtgaccattcgtcccttaggagtcacgtgaaaacccaccggggagagaaacgttgggcccatccatgtggaaaaggcttcagtgagtactcagatgcaaaggaacctggca

SEQ ID NO: 4427 - DNA, 1454 bp, Cricetulus griseus
cccacccgggcccggaggatgatgaagctcaagtcgaaccagacccgcacctacgacggcgacggcttcaagaagcgggccgcgtgcctgtgcttccgcagcgagagcgaggaggaggtgctgctcgtgagcagcagccgccatcccgaccgatggattgtccctggtggcggcatggagcctgaggaggagccaagtgtggcagcggtccgggaagtctgtgaggaggctggagtaaaagggacactgggaaggttggttggaatttttgagaaccaggagaggaagcacaggacatacgtgtacgtgcttattgtcacagaagtgctggaagactgggaagactccgtgaacattggaaggaagagagagtggtttaaaatagaagatgccataaaagtgctgcagtgtcacaagcccgtgcaggcgtcctactttgagacgttgaggcaaggctactctgccaacaatggcacccctgtcgtggccgcctcgtaccccagctctgtgtcaggcatcagatgactgcagactcctgtgagagccggagtggaaaccagactgaagcgtggctctcctcacggctccctcaccctccttgcagcctcctctttcacccaggcatggtgggcatcagaaggggacactgaggggctgctgggtgtggggtgatgtgcgtggggtgtggggtgatgggaactctttctctgtgtcctgagggtgggcctgggatgtaactcttcctgcatgctccgctcctccctccctcccctgccctctgagagagggaaccccttccccctccctcttgggttctgaagcgttcccatttcgcctcatccagcctggccaggtattttctcttaatttttttttttttttccattaaaagacgcccatgtgagatgaaactttgtaggaatctgtcctgtgatgtgctgttgagccccatggggtggccttgttcccttcacgatgcatttgtctacacatggtacatgacatgatatgtaaatgagtgatttagaaagagcatcttgactgtttagtttttcagagttttgctatttgtttttattttattttttattccaggtatttctagtttaaggcccctcatactttacatgtttgttccaatgctagtgtctgtcctgctggctgggaattttttccataacgctattctttgctgacatggcctctcttacccttgtatgccttacaccacgctgacctgggttttgtgctgcactcatctgccagttgtggtgtttagttgggaagtaaaggtcttggatgggaccttgagcaaggagggcgggagggagctgatgcctggttcagtgtggggctcggggctctgtggcattgcctgtgttgaaatgtagccaagatgtgaaattaaaatagtacttctctttatttaaaaactaataaatactcaaactttg

SEQ ID NO: 4428 - DNA, 1454 bp, Cricetulus griseus
catcacctcttaatcctcagaacattccagggagttttacagaatcccatctcctgagccatgagtgaactgaaggactgcccattgcaattccatgatttcaagtctgtggaccacctgaaggtctgtccccggtacacggcagtactggcccgctccgaggacgatggcattggtattgaggagctggacactctgcagctggagcttgagaccttgctgtcctctgcaagcaggcggctgcgtgtactggaagctgaaacccagatccttactgactggcaggataagaaaggtgaccgacgattcctgaagctgggtcgagaccatgaacttggtgctccccccaaacatgggaagcccaagaagcagaaactggaagggaaggcagggcatggaccaggccctggcccaggacgacccaaatccaaaaacgttcagccaaagatccaggaatatgaattcactgatgacccaattgacgtgcctcggatccccaagaatgacgctcccaacaggttctgggcctctgtggagccctactgtgcggatatcaccagtgaggaggtacgaacactagaggagctcctgaaacctcctgaagatgaagccgaacattataagattcccccactgggaaaacactactcccagcgctgggcccaggaggatctgctagaggagcagaaggatggggctcgggcagcagctgtggctgacaagaagaaaggcctcatgggaccgctgactgaactggacacaaaagatgtggacgccctgctgaagaagtctgaggcccagcacgagcagccagaagatggctgtccctttggtgccctgacacagcgcttgctgcaggccctggtggaggaaaatattatttcccctatggaggactctcctattcctgacatgtctgggaaagaatcaggggctgatggcgcaagcacctctccccgaaatcagaacaaacccttcagtgtgccccacaccaagtccttggagagccgcatcaaggaggagctgattgcacagggcctcctggagtccgaggaccggcctgctgaggactcagaggatgaggtcctcgctgagctgcgcaaacggcaggctgagctgaaggcactcagtgcacacaaccgcaccaagaagcatgacctgctgaggttggcaaaggaggaggtgagccggcaggagctgagacagcgggtccgcatggcagacaatgaggtcatggatgcctttcgcaagatcatggctgcccggcagaagaagcgcacccctacaaagaaggaaaaggaccaggcctggaaaaccctgaaagaacgagagagcatcctgaagctcctggacgggtagcatcacctgctgctggcctcctccctggcctgtcagaagcccacttcctttgaaaccttggctggggctgcccatcaaatgacaacagtctcagg

SEQ ID NO: 4429 - DNA, 1454 bp, Cricetulus griseus
ggggcaatcatggcggctcggtgcgtgaggctggcgcggcgcagtctcccggcgttggcgctgtcgttcaggccttctcctcgcttgttgtgcacagctacgaaacagaagaatggccagaacctggaagaggacttgggtcattgtgagccaaagacagagccaccctctgcagacaagaccctcctggaagaaaaggtgaagctggaagagcagctgagggagaccatggaaaaatacaaacgagctttggcagatactgagaatctacggcagagaagccagaagctggtggaggaggccaagttgtatggcatccagggtttctgcaaggacttgctggaggttgcagacatcctggagaaggcaacccagagtgttccaaaggaggagatcagcaacaacaaccctcacttgaagagcctatatgaagggcttgtgatgactgaagtccagattcagaaggtgttcacaaaacatggcttgctcaggctcgaccccattggggccaagtttgacccttacgaacatgaggccttgttccacacccctgtggaagggaaagagccgggcactgtggcactagttagcaaagtgggctacaagctacatgggcgcaccctcaggccagctttggtgggggtagtgaaggaagcttagctgcctcccttggggctctggactttgtaggtcacttgttagaactcgaaaggcaggcttgtaatttctcatctgtgaacacatctgatctttgcccagccttgttggaaatcttaagtaagctaagcagaatgtgaagctgcttgcatactgtgtcagggactctgggagcctggtcactgagtttagcgccacctacttcaaaagagggccagcagggcctcaggagtagtgtgactaacaaggatcagacttactgaatgtgtaactgtatggcccagggggactttctgttttgttgacagcagctttccaccttgggcttcttaagctggcttgacagcaaagtgtctgctgtgaagctggaggatcaagaagcaaacagaaacgactttgttctcaacaatttaatgtaaaagaataataaaaatggtagggttttgattcttaatacattcttggaatgttggcctcctagacagcattatttcaaacagttgaagaattatctaacttttctgactcaaagacagtttgtttaattttgaaaagacttggttccatagggttgtggtagttaatttatcatgagaattaaatacaaacatgtcaaggtctgaactaactaagagtaatgtgacagaaacagctggggcagataggagagcaaacaatcctaatattatttttcccttgtaacaatattaatacttgaacataaattaattatacattcattatggtgttttaaaacagtcacgcccaaataaattcataacatcgaaagatgtaca

SEQ ID NO: 4430 - DNA, 1454 bp, Cricetulus griseus
tcggttcaataaatctcagcagggacactttccttcctcacgtggaatgtgggacgatcacactgattggtgcaaccacggagaacccttccttccaggtcaatgctgctcttctaagccgatgtcgggtgattgttcttgagaagcttccagtagaggcaatggtgactattttaatgagagctatcaactcactgggaatccatgtcctagactctagccgtcctactgaccctctgagccacagcagcaactgcagctctgagccctctgtcttcatagaagataaagcagtggacactctggcttaccttagtgatggtgatgcacggactggcttgaatggactgcagctggcagtgctggccaggttgagctctaggaagatgttctgtaagaagagtagtcaaacctattctcctagccgagtcctgatcaccgagaatgatgtgaaagaaggcctacaacggtcccacattttatatgaccgagcaggagaagaacactacaactgcatctctgccctacacaaggctatgcgtggctctgaccagaatgcctccctctactggctggcacggatgcttgagggaggggaggacccactctatgtagccaggaggcttgtgaggtttgccagtgaggacattggtctggcagatccgtcagcattagcacaagcagttgctgcctaccaaggttgtcactttataggcatgcctgaatgtgaggtgcttctggcccagtgtgtggtctattttgccagagcccccaaatccattgaggtgtacagtgcctacaacaatgtgaaagcctgtcttcggaatcatcaggggcccctgcctcccgtacccctgcacctgaggaatgcacccaccagactaatgaaggatttgggctatggtaaaggctacaaatacaaccccatgtacagtgagcctgtggaccaggactacctgcctgaggaactgagaggggttgacttctttaagcagaggcggtgttgacttttaggccatgactaggatgcctgtaccttgaggaaggccagaagtcactggatcttggagatgttgcctgggaaaagttaaaacagaccaacattttgtgccagattttaagagttccatagatggaggtggttacttcaactaaatgtgtaccattgaaattgtgttcatttgcactctgtgcaatgattatgcttatgaaaatacctggcagctttgtgcaattaattaatgttataaggaattatctattttgtcatagtatttaagtcataatgtcatttcaaaattctgttcagtaggcttttttttcttttaaaaaatgtatattctgggtagttctgattggtaaaagaaaacgtaattgtgatttaatactgcatagtgatttgggtatttttttatatgcaaaggtcttatgagccaataaactatttcaaagta

SEQ ID NO: 4431 - DNA, 1454 bp, Cricetulus griseus
caagtcggcaaaagcgaggtgcagctggagcacgatccaaggggagacagtcctgaaccatgacgcagcagccacttcggggtgtgaccagcctacattttaaccaagaccaaagctgcttttgctgtgccatggagacaggtgtccgaatctataatgtggagccactgatggagaaggggcatctggaccacgagcaagtaggcagcgtgggcctggtagagatgctgcaccgatccaacctgctggccctggtgggcggtggtagcagccccaagttctcagagatctcagtgctgatctgggacgatgcccgagaaggcaaggactccaaggacaaactggtgctggagttcacctttaccaagccagtgctggctgtgcgcatgcgccatgacaagattgtgattgtgctgaggaaccgcatctatgtatactccttccctgacaatcctcgaaagctgtttgagtttgacactcgggacaaccccaaggggctgtgtgacctctgcccaagcctggagaagcaactgcttgtgtttcctggccacaagtgtggaagcctgcaactagtggatctggcaagtacaaagcctggcacttcatcagctccattcactatcaatgcacatcagagtgatgtggcctgtgtgtccctgaaccagccaggcaccgtggtagcctcagcctcccaaaagggtacccttattcgtctttttgacacccagtccaaggaaaaactggtggagcttcgaagaggcactgaccctgccaccctatactgcattaacttcagccatgactcctccttcctctgtgcttccagtgacaagggcactgtccatatctttgctcttaaagacacccgcctcaaccgccgctctgcgctggctcgtgtgggcaaggtcgggcctatgattgggcagtacgtggactctcagtggagcctggccagctttactgtgcctgctgagtcagcatgcatctgcgcctttggtcgaaatacttccaagaatgtcaattctgtaattgccatctgcgtagatgggaccttccacaaatatgtcttcactcctgatggaaactgcaacagagaggcctttgacgtgtaccttgacatctgtgacgacgatgacttttaagagccctggcagctgtactaggaacctgcagtagcagatggccaaactgagtcttgagggtgttgaaccagccagcaagcattaaggaggcctctcactctccattcaagcacagctgtgtctaaataaacagctcacttccccagagcactttttggtgactggtgcggaaggccatggacagtttccctgggccacctagtctgggaaacactcatagggacccaaaggggttgtcgtaatccaacctggggaatttaaaaaaggttaccaggagatagcgtctgtgatgtatacgaataaagggccttt

SEQ ID NO: 4432 - DNA, 1453 bp, Cricetulus griseus
cggcacttccggtgagggtcgtctcatctattcccgggagtccacggctggaggcctgcgcggcaccgaggttttggaggctggagtgagaggcggacaggagggacccggaggagagacggagtgttgaataagtatatatcaatataaaaaacatggatgaagaacctgaaagaactaagcggtgggaaggaggctacgagagaacatgggaaattcttaaagaagatgaaactggatcacttaaggctacgatagaggatattctttttaaggcaaagagaaaaagagtgtttgagcaccatggacaagtccgacttggaatgatgcgccacctttatgtggtagtagatggttccagaacaatggaggatcaagacttaaagcccaataggctgacttgtactttaaagttgttggaatactttgtagaagaatattttgatcaaaatcctatcagtcagattggaataattgtgactaagagtaaaagagctgaaaaactgactgaactttcaggaaacccaaggaaacacataacatctttgaagaaagctgtagatatgacctgcaacggagaaccatctctctataattccttaagcatggcaatgcaaaccctaaaacacatgcctggacatacaagtagagaagtactaatcatctttagtagcctgacaacctgtgatccatctaatatttatgatctcatcaagaccctgaaggcagctaaaatcagagtgtctgttattggattgtctgcagaggttcgagtttgcactgtacttgctcgtgaaactggtggcacataccatgttattttagatgaaacccattacaaagagttgttaacgcatcatgttagccctcctcctgccagctcaagctccgaatgctcactcattcgtatgggattccctcagcacaccattgcttctttgtctgatcaggatgcaaaaccatccttcagcatggcgcatttggataatagcactgagccaggacttacactgggaggatatttctgcccacagtgtcgagcaaagtacagtgagcttcctgttgaatgtaaaatatgtggtcttactttggtgtctgcacctcacttggcacgatcttaccatcatttatttcctttggatgcttttcaagaaatttctctagaagaatataaaggagaaagattttgttatggatgtcagggggaattgaaagaccagcatgtctatgtttgcacagtgtgccaaaatgttttctgtgtggactgtgatgtttttattcatgactgtctccattgttgtcctggctgtattcataagatcccaactcctgcaggtatttgattccaacatgtaggacacacactgaatgggttaagaaacatttaattaacttttttttctttttttttgctcatttgttgtgcaagtatacacacacacacacacacaca

SEQ ID NO: 4433 - DNA, 1453 bp, Cricetulus griseus
ggttgttgaccttctctactggagagatattaagaagactggagtggtgtttggtgccagcttattcctgctgctgtctctgacggtgttcagcattgtgagtgtaacggcctacattgccttggccctgctctctgtgactatcagctttaggatatataagggtgtgatccaagctatccagaaatcagatgaaggccacccattcagggcatatttggaatctgaagttactgtatcagaggaattggttcagaaatacagtaattctgctcttggccatgtgaacagcacaataaaagaactcagacgcctcttcttagttgatgatttagttgattccctgaagtttgcagtattgatgtgggtgtttacttatgttggtgccttgttcaatggtctgacactgctgattttagctctgatttcactcttcagtattcctgttatttatgaacgacaccaggtgcagatagatcattatctaggacttgcaaataagagtgttaaagaggccatggctaaaatccaagcaaaaatccctggattgaagcgcaaagcagaatgaaaaagccccaaacagtaggagttcatctttaaaggggacactcatttgataacgggggtgggagggtcaggggtgagcccttggcggcggtgcagcttcagctcttcatttttagcagtgcactatttgaggaaaaattacctgtcttgacttcctgtgtttatcatcttaagtattgtaagctgctgtgtatggatttaaattgtaatcatacttgttttttctgtatgaggcactggtgaattaagtgagccgagaaagcagtatatttaattgcaggtagttttgctgtatttgggaaattgcaaaaaggtgataacaaaaaaaaaaaaaaaaccttttcacagtgtactgtgtttggttggtgtaaattgatgcagacttttctgaatgaaatgtttagacgagatcatactactaaagcaggaatgaaaacgctgtctttatggtatgttctaggtgtattgtgaacttactgttatattgccaatataagtaaatatagacataatctatatatagtgtttcacaaagcttagatctttaccttccagcttccccacagtacttgacctctgagtcattgattatacagtatagtctctcaagcacataagctaggaagagaatatatttctaggagcactaccatctgtctttaaggaaacaacacagaactccagcataaacatcattgcaaagacttactgtattgattctatggactgaatttaatacttccatatgtttgcagttatcaaacatagttatgcaagaaatcataaaatgaagacttatgccattgtggtttaagctgtaatgaattatctgtggaatgcattgtgaactgtaaaagcaaaagtttcaataaagcttatagactta

SEQ ID NO: 4434 - DNA, 1453 bp, Cricetulus griseus
gcagtgcaggcaagctcctctcgggatctggccgacgtggagagggaagacccagatccacactgctctcggtcactgtgcacagccgtcccttctcgccatgtcccacagcaggcatcgcgccgaggccccgccgctggagcgcgaggacagcgggaccttcagtttgggcaagatgataacagccaagcctgggaaaacaccgattcaggtattgcacgaatacggcatgaagaccaagaacattccagtttatgaatgtgaaagatccgatgtgcaaattcacgtgcccactttcaccttcagagtaaccgttggtgacataacttgcacaggtgaaggtaccagtaagaagctggcgaagcatagagctgcagaggctgccataaacattttgaaagccaatgcaagtatttgctttgcagttcctgacccctcaatgcctgatccatccaaacagccaaagaaccaactgaatccaattggctcattacaggaattggctattcaccatggctggcgacttcctgaatataccctttcccaggaaggaggacctgctcataagagggagtataccacaatttgcagactagaatcattcatggaaactggaaaaggtgcatccaaaaaacaagccaagagaaacgctgctgagaaatttctcgccaagtttagtaacatttctccagagaaccacatttctctaacaaatgtggttggacattccctaggatgtacttggcattcgttgaggaattcccctggtgaaaagatcaacttactgaaaagaagcctcctcagtctcccgaacacagactatatccaactgcttagtgagattgccaaggagcaaggttttagcataacctatttggatatagaggagctgagtgccaatggacaataccagtgtctcgcagaactgtccaccagtcctatcaccgtgtgtcatggctcgggcatctcctgtggcaatgcacagagtgacgctgctcacaatgctctgcagtatttaaagataatagcagaaagaaagtaggctccaggcagcttaggagatcttttggcagtgcataagtttccctcgcacctcttccctagtaaaacatttactgtaatgtacgtatgtgcgtcctttccaaatctcttcaggttccgtcatcgactttccagatttaattgtctcctggtagttgttactaagctctttttaatggcttcaactttgtattggtatattgtatttataaactttgtaccacaaggctgagtgtagcatccattttacagggtcaggcacatgggaatggaagctgcatgttcgcctgtgacaatgaagagattagactagagtgttggggattgtgttgaatgtcattgctaaattttcagggaacatggttggtctgctatgtatttgaaacaatggaataaagagctgttcttataa

SEQ ID NO: 4435 - DNA, 1453 bp, Cricetulus griseus
aggatccaaggttatttttggctggtggcactaaacttcccttctcccacaaacctttgctgttatataatggagaactgacctgtcagacacagagtgggaaaatcaactccatctacccacccacagcttccttgacaacacaaaagatgtggaccctgcagacctgagacagatgctgatgcagaccctgatgctcaagcggttttctgatgcttgggaaatatgcaagatgctaaatgatatgggtctgccatccaatttctggtcctgtccaaaatgtaacaatgaagccttcaccctggctcagcagcacaacaaaatggaaatctacgcagacatcattggttctgaagacacaactaatgaagactatcagagcatcgccttatacttcgaaggggaaaagagacactttcaggctggaaaattcttcttgctgtgtggccagtattcacgggcactaaagcacttcctgaagtgcccaagctcagaagacaatgtggcaatagaaatggcaattgaaactgtgggccaggctaaagacgaactgctgaccaatcagctgatagaccacctgatgggggagagcgatggcatgccaaaggatgccaagtacctgttccgcttgtacatggcgctgaaacagtaccgtgaggccgcccggacgccatcatcattgcccgagaagagcagtctgcaggaaactacaggaatgcacatgacgttctcttcagtatgtatgcagaactgaaatcacagaagatcaaaatcccctctgagatggctaccaacctcatgatcttacacagttacatactcgtgaaggttcatgttaagagtggagaccatatgaagggggcccgcatgctcattcgggtggccaacaacatcagcaagttcccgtcccacatcgtgcctatccttacatctactgtgatcgagtgtcacagggcaggcctcaagaactctgctttcagctttgcagctatgctgatgaggcccgaataccgcaacaaaattgatgccaagtacaaaaagaaaatcgaggcaatggtcaggaggccagacacatccgagacagaagaggtcaccaccccatgtccattctgccagtttcttctcccagaatgtgagctcctttgtcccggctgtaaaaacaacattccctattgcattgcaacaggccgacacatgttgaaagatgattggacaatgtgcccgcactgtggcttccctgcactgtactcagaattcaagatcttactaaacagtgaaagcacctgtcccatgtgttcagaaagattaaactctagtcaactgaaaaaaatttcagactgcacccagtacctccggacagaaacggaacagtgagcagcaggcccagtgctcctgagtagatggcatctccccccaggaggctgtgtccagccctggcagacttgaagaatga

SEQ ID NO: 4436 - DNA, 1453 bp, Cricetulus griseus
ggctgaggccaggggaagtgaatggttttacccagagggccgtgcgccgcctttctccgctggccccggcgtgcccgccagctcctccccggccatggcgttcactttcgcggccttctgctatatgctggcgctgctgctcaccgccgcgctcatcttcttcgccatctggcacatcatagcgtttgatgagctgaagactgattacaagaaccctatagaccagtgtaatactctgaaccctcttgtacttccagagtacctcatccatgctttcttctgtgtcatgtttctttgtgcagcagagtggcttacactgggtctcaatatgccccttttggcatatcatatttggaggtatatgagtagaccggtgatgagcggccctggactctatgacccgacgaccatcatgaatgcagacattctagcctactgtcagaaggaaggatggtgcaaactagctttttaccttctagcctttttttactacctatacggcatgatctatgttttggtgagctcatagaacaacacagaagaatcggtccagttaagtgcatgcaaatcgccactaatgaagggattctatccagcaaggtcctgtttccaagagtagcctatggaatctgatcagttactttaaaaaaaaaatgactccttattttttaaatgtttccacattttttgcttgtggaaagactgttttcatatgttatacttggataaagactctaaatggaattacgtataaattaatataaaatgattacctctggtgttgacaggttgaacttgcactcttaaggaacagccataaccctccaagtgattgcattaattactgactgccctgagtccattgggagctttgtttagaggttagctgtagatcgaggtgcttctggtgagctgaaaatgtgtgtctgacttgtgtgggatacagcgtaggtttccccacttatcactgtagctgattgtatatggacaccataataagaagagtgggatttctttccctgttgacttgaacattatccctatgtattgcatgagagggaattccctcctttccatcagagtaatcaatatacttgctttaattcttaagcataagtgatataagcatatgctgaattacctgtaaagaatgcatttaaagctattttaaatgtgtttttatttgtaagacattatttactaagaaattggttatattatgcttactgtcctaattcagtggtcaaggtgttcttaagaatttgcaagtactttagattttcaaaaatgaatgagagaactgtgtaaccaccctgctgttccttcagtgcaacacaataaaactctgaaatgaagatcctttccagtgcgttgtttaaagatcacaaacagctatttctcatacttaacccattataataaaagacataatgttgtcattttacaagttaaa

SEQ ID NO: 4437 - DNA, 1452 bp, Cricetulus griseus
  modified_base (370)..(370): a, c, t, g, unknown or other
atccaggaggcggaggacgtagaggatctggaggaggatggaccgaagggaccctagcgcaggcagctggggacccagcccggtacctcagtccaggctggggcagcgccagcgaggaggagccgagccgcgggcacagtgccacgacaagtggaggtgagaatgagcgtgaggaactggagccggagtggaagcccccggatgaggagctcatcaggaagctggtggatcagattgagttctacttttcggatgagaacctggagaaggatgccttcctactcaagcacgtgcggaggaacaagctgggctacgtgagcgtcaagctgctcacctccttcaaaaagggtgccacctgttccccaactgngaactccccagcaagatgctgttggtgtatgatctccacctgtcccctaagctctgggccccggccacgccccagaagaacggaagggtgcaggagaaggtgatggagcatctgctcaagctctttgggacttttggaatcatctcatcggtgcggattctcaaacctgggagagagctgccccccgacatccggaggatcagcagccgctacagccaggtggggacccaggagtgtgccattgtggagtttgaggaggtagatgcggccattaaagcccatgaattcatggtcactgaatctcagggcagggacaacatgaaagccgtcttgattgggatgaaaccacccaaaaagaaacccctcaaagatagaaaccatgatgatgagcccgcagcaagtacccacctaagcaggtccctgaacaagagagtggaggagcttcagtacatgggggatgagtcttccgccaacagttcctctgaccccgagagcaatcccacctctcctatggctggccggcggcacatggccaccaacaagctcagcccttctggccaccagaatatctttttgagcccaaatgcctcgccatgttcaagtccttggagcagccccttggcgcagcgcaagggcgtctccagaaaatcgccactggctgaagaaggtagactgaacttcagcaccagccccgagatcttccggaagtgcatggattattcttcagacagcagcgtcactccctcgggcagcccctgggttcgcagacgacgccaagctgagatggggacacaggagaaaagtccaggggcaagtcccctgctgtctcggaagatgcagaccgcagatgggttacctgtaggggtgctgaggctgcccagaggccctgacaacaccaggggcttccatggtggacatgagagaagccgagcctgtacataatagcttctatttttaatactgcctcctttgaaaacaaactttgttttcgaggtcctcacaaatagctagcatgacagagaatggaattcagtccccttagaaagcttttgtacccatgtagacctcgagattttatatat

SEQ ID NO: 4438 - DNA, 1452 bp, Cricetulus griseus
gggaccatggaggagacagtgagctggaggtctcagctgcactgttcctatacagtcccacagccctcttctccactgtcccaccagaggagccagaggttattcctcaagtcagccttgtgcccacactggcactgttgctaggcctgcccatcccatttgggaacattggggaagtgatggctgagctgttctcaggtggcagtgactcccatcctcaggcctctgctctagcccaagtctcagctctccatatcaatgcccagcaggtgtcccgatttcttatctcaagagtcctgagccccctgtgctctttgtgcgctgggggttgcctctcatggtgttaggcacggctgcctactgggcattggcatcaggagcagatgaagcaccaccacgtctccgggccctggtcgctggggcctcagttgtgctgcctcgggctgtggtggggctggctgccttggggctcatgctgctgctatggaggcctgtggcagtgctggtgaaggctggggctggtgcttcaaggaccaggactatcctcactcccttctcaggtccccctacttgtcaggctgacctagattatgtggtcccacaaatctaccgccacatgcaggaagagttcccagggccggctagagaggaccaaatctcagggtcctgtaactgtggctgcatatcagttgggaagtgtctactctgctgctatggtcctgtcttctcagccatccattggcatgcagccttcgtgggatttccagaaggtcatggctcttctacttggttgcctgcttactagtgggagctaactctttgcagtaggttgtccactgctcctgctctggcccttcctgtgtgagagtcaagggccaaggaagaggcagcagctcccagggagtgaggctgaggccagagccagtcctgaggaggaacaagaggagccactgatggagatgcgcctccgggatgctccacatcatttcaacgcagccctgttacagctgggcctcaagtacctctttgtccttggagttcagattctagcctgtgccttggcagcttccatcctccgaaggcatctcatggtctggaaggtgtttgccccaagttcatctttgaagccattggtttcattgtgagcagtgtgggacttctcctgggcatagctttggtgatgcgagtagatggcgctgtgagttcctggttcagaagactagttctggcccagcagaggtagcccaggctgagcatgtcagcacctggccatggagagagctggagaatcctctggcctgacctgtactggtgctggatattctgcaagagagactcagacacaccccttaccactgtgtaaccagagactgcttaccctggacttcaccatttataattcagaatctctgtggagccacaatgtaaatttaaaaaaaaaaaaaaaaaaaa

SEQ ID NO: 4439 - DNA, 1452 bp, Cricetulus griseus
gctggcagtcaccggtgctcccggttccagctgctgcgcttgaccttcgcctcggccgctgctctcactcgtcatgttctccgtccgcgtcccgctcgccaccatcaccgaccagcagcagctgcaggtgtcgccgctgaagcgactcagcctggctgacaaggagaacacgcccccgagcctcagcgggacccgcgtcctggccagcaaggtggcgaggagaatcctccaagacgtcgccgaaccggagagtaaagtatctactaaccccagcgttgaggatgagccgttattgagagaaaatccccgccgcttcgttgtctttcccatcgaataccatgacatctggaagatgtacaaaaaagctgaggcctccttctggaccgctgaggaggtggacctttccaaagatattcagcactgggaagctctgaaacctgatgagagacattttatatctcatgttctggctttctttgcggccagtgacggcatagtcaatgaaaacttggtggagcgatttagccaagaagttcaagttacagaggcccgctgtttctatggcttccaaattgccatggaaaacatacattctgagatgtacagtctccttattgacacttatattaaagattccaaagagagggaatatctcttcaatgctattgaaacaatgccttgtgtgaaaaagaaggctgactgggccttgcgttggattggggacaaagaggctacatatggagagcgcgttgtggcctttgctgccgtggaggggatcttcttctctggttcttttgcatcaatattctggctcaagaagcggggactgatgcccggcctcaccttttccaatgagctcattagcagagacgagggtttacactgtgactttgcctgcctgatgttcaagcacctggtacacaagccatcggagcagagagtacaagaaataataaccaacgcagtgaggatagagcaggagttcctcacggaggccttgcctgtgaagctcatcgggatgaactgcactctgatgaagcagtatatcgaattcgtggcagacaggcttatgctagagctggggttcaacaagattttcaaagtagaaaatccatttgacttcatggaaaacatttcactagaaggaaagacaaacttctttgagaagcgagtgggggaatatcagaggatgggggtgatgtcgaattcaacagagaattcttttaccttggatgcggacttctaagtaagcggactgctctttgctgattgtttttctccccttgtcaaaacagcaaaaaacaaatcaactggctacaccatgaattgtcattaaatttgttaaccaggaaactaaaaattttaattgttcagtattatcttgaagtttgcaaatgttaaaatagtactgtaaattctgatatttgcctaaattttctatttttttttttt

SEQ ID NO: 4440 - DNA, 1452 bp, Cricetulus griseus
tgctggacactgccatgaaggactatctgtatgggagactcatcaacttcgaaaagagaaggaaggagtttgaagtgattgcccagatcaagctgttacagtctgcctgcaacaattatagcattggcccctacctcggcagcggggacatcactgacgccctcagcgtgcactcagctggttcttccagctctgacgtggaggaaatcaacatgagctttgtcccggagtctcctgatggccaggaaaagaagttctgggagtcagcctcccagtcatcaccagagacctctggcatcagctcagcctctagcagcacctcctcttcatcagcctccaccacacccgtgtctaccacacgtacccacaagcgctccgtctcaggggtctgcagctacagctcctcactgccactctataaccagcaggtgggcgactgctgcatcatccgggtcagcctggatgtggacaacggcaacatgtacaagagcatcctggtgaccagccaggataaggccccgactgtcatccgaaaagccatggacaaacacaatctggacgaagatgagccagaggactatgagctggtgcagatcatctcagaagatcataagctgaagattccagaaaatgccaacgtgttctatgccatgaactctaccgcaaactatgactttattctaaagaagcggacctttaccaagggggctaaggtcaagcatggcgccagctccaccctccctcgcatgaagcagaaaggactcaagattgccaaaggcatcttctaaggacgtctcccagggtctggctggctgggactaagcacttagactagagtggcccaggccacgcaggtacctctgcccacccgccagcccaggctacccccagactccagtttcaccctaaacctctcctgctgccgggagtgacacctgccactgacaggctgacctggcctccggggaccacttgccgccttaggtgccttctgctctctggaaccagaggactagctgacttttgccaaggagtgctgccaactgggcatggtaccttgcctgccctggacactaccctccacactttcctgacacctccccaggtgcagatcactgccacccatgcccccggatgctccaggacacccacacacccagcagggctgaccactgcattctctccttgtgcccacaggcacaggcctgggatcttcatggaagtcccggcctttcctcccccactctagcctttctcaggctgcaccaaagattccaccttcagggcctacagagtgagggagtctcacccaccacgagccccagccctcccttggatcagagagagaagccctctcgtggaccacccggttggtatcgaatcccacaccactgaaagtgccattcaacaccactacatcctgggttgtacaagactacgtgaaatgggagg

SEQ ID NO: 4441 - DNA, 1452 bp, Cricetulus griseus
ccgggatacgagcctaattccccaatgtggctctggtttgagtaccacagtaaccagggcagaagccaggaacagacaacgcaagctcggggacaaaaactgcagtgactggtaggtgtggctgggtcaagcctccgaatctggcctgcaccatgccttgcaggatagacaggatgatggacggaggagtgaagcagagacctctacagacccaagtcaccaagtggagccttttttttcttattttaattttaatggacatggtggaccaaagggcttagtcaggccctcagcgaggaccctaggagggcctgctctctgtgggtcatatggccagagaccctcgggctctgctgctgccagctcctgactgggtggaaagtgctcttggcatgagccctggggtgggtagagcacaagggctcggtcctctggtcttgagaccaggaactccaggtggtggagtgcacactatttattttttgggattgtggagttcaggctgaagaggctgctctgcagtggctgccctgtgtacaaagggatccaggtcagctcccaggccctgtgccctgagccacaggtgggacagcctgccttctgttggacctgagtggggcctagggcctcatgagtgaggcatcccctgctctccctgccactattgcaattccagaaccttgtcagtgtttccttgtctgggagcagggcccagagtgagcaccgtctgtcagctgctgtcattgtgctcttccctataccaacccaacatcacaagggctttctctggtcctctatccccaagacagtcatcccttcctgacaaaagagcctgcacagatgggtgggcacacccaagcgtttacagctccttttgtctggccatccagtagcagtctgtcttcatcccacttgaacaaaatagaggaaccaggagctagaattctggcagtgtggcagtgctgacccctccccatcagctgccttgtgtgttccggatttgttcctgtcctccctggcctgccctggaggctggaaacctgtgtgcattgaccctggaggctgcctgggtgtgggctctgatccccacctgcccagctgcaaggagtccctcttcgggcctctttgtgagttgtcctgacacagctgtggagatgcttccagaactgaagctgccagccctggggactgtttgaagcctcccccttctctctgtggaggttcctaacctgctgctgaagcacaagtccttggtgctttcctttggtgtttgttaaaggctgtgtccaaacaagacatgccagggcccagggctggtttctagggaggtaggtcagtcatgtcccctccctccccctaggactgtttaggttttactttttgccttgagacaagccaagtgtgaagtggtttaagaaaataatgaaattgtttactattgtttaaaataaa

SEQ ID NO: 4442 - DNA, 1452 bp, Cricetulus griseus
cttctatcactgggatttgatgtcacctccaaggaagcaattgaaaaaaaaagaaacagcgagccaagcgcttccactttcgagcagaaagatgttaaaggcctctactctgatactcgggagaggaaatcaggtggtttatggactcgcttaggatctacacccaagaccaaagaaaagaacacgaagaaagtggatcacaggccatctggtgctgaggaagatgactcggagcttcagagggcatggggtgctttgattaaggagaaagaacagtctcgccagaaaaagagtcggctagatagcttgccatcgctccagattgaagtcagccgggaaagtagctctggttcagaggcagaatcctgactgtcctggccttggcagctgccctcaaatctgacattcttatgtagggtggggcacacagtaggaacctcccttgcaggagtttggcgccttccctcatgcctacactctgaactcttgctgtcccagtgggacagctgtagagtgtgatgagtgttgaagggcatctctgtcttgtgctgcagagctactattctgggccctcaagtcttatttttaacattgtgtcttttaaaagaaatgttttacacagttcatccaaagagcagagaactgaacttctcactgttgccttggccctgacagctcttgccagcacccatttcccaagaaaagtcagttcccaggtgcttattggacagtctttgaggaggaagatgagggaagctgccagcccagccttccaggacctcagtgtgggggctgaatctcacagacctcacctgagctgtggctgccctcccaggtagatagagatgtagcagcagtggcttctattcctccctggggagtttctgttagggcctttattggctgttagcctgatgtgaagatcaaggtcagtgctgtgggacttctagggacaaacaactgtgacttctgaatttggagttgatttatgtgcttagggatggggtcttgggttaatgttgaacaatttttaagtctgtattatgtttaaaaactattaatgacttaaaagttaaattttaattttatatgtggatattcctcctgttggctccgggggaagctcaagtggtgtctcttgtgttgttaaatatacattatatactttggaagaattttttttttttgtttgtttttgctttttgagacagggtttctctgtgtagctttggtgcctgtcctggaactcgctctgtaaaccaagctggcctcgaactcacagagatctgcctgcttctgcctcctgagtgctgggatgaaaggcgtgcatcaccacagagatcgcctgcctctgcctcctgagtgctgggattaaaggcatgcaccaccaacgcccagcaaccacatggtggctcacaaccatcccattatgagatctggtgcccttttctg

SEQ ID NO: 4443 - DNA, 1451 bp, Cricetulus griseus
atgtcgcgaaggcagccagtgcctgttctcacatgacctggcaaacagcaagccatccaccatctgcaaatactaccagaaggggtactgtgcctacggtgcgcgctgcagatatgatcatataaagcccccagctgcagcaggtggagcggtaggccctgcaccccactctttgccatcctcaggcttgcccagccctcaaccttctcctgacattgccacatctgttgtgaagacacatttgcatgaaccggggaagcgagagaagaagatgctggtgctaagagaccgaaatctcactggcctggctgaagacaagagtgtcccaagcacagtgaataacccgggtagctgcagtgatgctcagaccagtccggagatgaagccccattcctacctagatgccatcaggactggcctggacgacttggaggccagcagctcctatagcagcaacgagcagcaattatgcccctacgctgctgctggggagttttgccttccaagcaagccaggacaaagtgtgcagcatctgtatggaggtgatcttggagaaggcatctgcatctgagaggaggtttggcattctctccagctgtagccacacctactgcctgtcctgcatccgccaatggagatgcgccaagcagtttgaaaacccgatcataaagtcttgtccagagtgtcgtgtgatatcagagtttgtaattccaagtgtgtactgggtagaagatcagaataaaaagaatgaattgattgaagctttcaaacaggggatggggaaaaaggcatgtaaatactttgagcaaggcaaggggacctgtccctttggaagcaagtgcctttaccgccatgcttacccggatggacggctggcagagccagagaaacctaggaagcagctgagttctgaaggcactgtgaggttctttaattcagtgcggctttgggattttatcgagaaccgagaaacccagcaggtcaccaacacggatgatgttgatgtgacagagcttggagacctcttcatgcacctttctggagtagaatcatcagaaccctagagtcagtgctgacaccttcatttagggctctacagtcacaacctcccaaggcagggtgccgaggcctctgtcactgacccaaggtggcatggtagataaccaagtccatggaatcactacatttagagttgaactcttaggtgcacctccagccccgttactgggaaccagctatgtagtccagctgttttaattgattgcttttaaatgaaacccaactgccatctttcttttgtgacttttcttccttaagcaacagtaaacttggagctgcttacaaagcagcagatctgttttcttatccagggcgtcgccagccccgtagagggctcctctgcagtgaccgtctctagtgtgttgtgagccttggacttctgcagctctgta

SEQ ID NO: 4444 - DNA, 1451 bp, Cricetulus griseus
tcccagtgcataaagtctctgtcgctcccggaacttgttggcaatgcctattcttcagctttcccccgcgttctctaaactaactatttaaaggtctgcggtcgcaaatggtttgactaaacgtaggatgggacttaagttgaacggcagatatatttcactgatcctcgcggtgcaaatagcttacctggtgcaggccgtgagagcagcaggcaagtgcgatgcagtctttaagggcttttcagactgtttgctcaagctgggagacagcatggccaactacccgcagggcctggacgacaagacgaacatcaagaccgtgtgcacatactgggaggatttccacagctgcacggtcacagctcttacggattgccaggaaggggcgaaagatatgtgggataaactgagaaaagaatcgaaaaacctcaacatccaaggcagcttattcgaactctgcggcagcggcaatggggcggcggggtccctgctcccggcgctttccgtgctcctggtgtctctctcggcagctttagcgacctggctttccttctgagctcgggaccaggtcccccccacccccacccgctcacccacccacactcacttcatgctcccggaaatcgagaggaagagccattcgttctctgaggacgttgtgattctctgtgatgttgaaaacactcatgggattgtgggaaatcctgtttctctttttttattctttagtccgtcttcacacacacaaaagaaaacggcaaactcacccccatttttatttttattttattttatatttttttggcaaaagaatctcaggaatggccctgggccacctactatattaatcatgttgataacatgaaaaatgacgggctcctcctaataggaaagcgaggagaggagaaggccaggggaatgaattcaggagtggtgtccacgtgggaagcatccggtgaatactcacactcacgtctttcttccacagtaccttgttttgatcatttccactgcacatttctcctccaggaaagcgaaaacacacagtgtgggctttgcattttaagggtaagagacagacagataaaaacaggttgtgtgtggcgggaaaggtggtcagaggaaatgctttggtcactgaggggctggcttcacctgctattgttgaggcatcgttcaggtccgctgcctttgttttccctcctctctcttgttttagctgttacacacacagtaatacccgaatatccaacggtatagatcacaagggggtaatcaatgttaaatctaaaatatagttaaaaagattttgacataaaagagccttgattttaaaaaagagagagatgtaatttaaaaagtttattataaattaaattcagcaaaaatttgctacaaactatagagaagtataaaataaaagttattgtttgaaaaaaaaaaaaaaaaaa

SEQ ID NO: 4445 - DNA, 1450 bp, Cricetulus griseus
cgactgtatgctgtgggcggctatgatggaacctcagacctggcgacggtggagtcctatgaccctgtgacaaatacatggcagcccgaggtgtccatgggcacaaggcgaagctgcctgggtgtagctgccttgcatgggcttctgtatgcagctggcggctatgatggggcttcctgcctcaacagtgctgaacgatatgacccactgacaggaacatggacatccattgctgctatgagcaccccggagacgatatgtgcgtgtggccacacttgatgggaacctgtacgccgtgggtggttatgacagctcatcacacctggccactgtggagaagtacgagccccaggtgaattcatggacgcctgtggcctccatgctgagccggcgcagctcagcaggagtagcagtgctggagggtgccctctatgtggcagggggcaacgatggcacaagctgcctcaactcagtggagagatatagcaccaaggctggtgcctgggagactgtggcacccatgaatatccgcaggagcacacatgatttggtggccatggacggctggctctacgctgtggggggcaatgatggcagctccagcctcaactccatagagaagtacaacccaaggaccaacaagtgggtggcagcatcctgcatgttcacaagacgcagcagtgtgggtgtggcagtgctggagctactcaacttcccaccaccttcctcacccacgctgtctgtgtcctctaccagcctctgacacaagtcagactgcacagaggccctgcagcctcccacatgccttaaaccctgtggggtggcccttccacctctgtctcctccaccaaatgttagggcagatcacataccccaccagggatttcctgtttctttggtcttgatcgctgtattcattcgtccttgttcatttatttatgtactgtttgtttactcacttatttatcaactacctatttattgatggatgagaagtgctacagctaccacttcacacatttgctgtcaagtgtcagctctcctgcatgtaggggaccaagagcccttctgagtgtcctcttgcctggctcccttgatggagcagccgggaatcctgggggtggatactcactgaaggaggatgaacaacacagctgggctttgtaaatagtagagggcagagcaactctcacaagaggagaagaggcaaaggctttcaaagaagatgcagcccctagccagcgctttgcacatagcacttatctgtctctaccaggcactgtccctgaagaagcagacttcattcctatgtcttgtgtatacagtgtaatgtcttttctggatcttctgtggagctgggcacacaacatgcacttagatcctacacagcaatatgagccatcttgaacaataaacgtgtttcttgggctccatgggcctgaagctagaa

SEQ ID NO: 4446 - DNA, 1450 bp, Cricetulus griseus
cacatcatcctcatccctagaagaagaggtgtaccacgtggatggaaacatggaggaatattttgcttttgacagaaaacaggatggagatgagcatctggaacagaacccaacactccgaggcagaaagtggcatcgacatgggcttcctcccatttcccctcatgactgtatcagagtgtggcagcagaagtgttcgatcatgtttggaccaatgtggtagaaatactggaagatctcactagaaggacctgggaatctgcaactcacagatgaaaaagcacataaagaaaaattgaaagtaactgaacatagacctccgcacgtgctcgtgtctcgtgtcagcactgatgttcccagtgtccccccatctcgaagctctgagacactccatacatccttggcttcccactttaaccctccccagttttctcagctccatcgattttccagcaacttctacagtgacttgagtggtgtaatgacgattcaagccaaaccccttcagcagagacccacctactttgcagaataaaatacagaatgagaaaagggtccctgacgccgatggagtttgttgctcacacttggacaggtcaaagtattttgacaggttcacagtatctacctaaatcttatcagagggcaactttgactgcaagaaagaggttccaagtggcattgtgatatcactgcttcataattatgggtttgctggaacatgggaagccttggccacaccatttgtcacttgaaaagtgtaggaacaaatattacctgatatataaactcacctctctcactgacagccaggagatggcaggatacccaagagaaacacaagtgaataagtaacttaagttttgaacacttggctttgtaaagagaataaaaactaacctcactgacccctgtggaagcatgcctaaagctcctggggctctagtgctttattttatttataggtggaataagattagtaagttaacaaatgatgcttgtgtgaggatgatgctgttcagactgtaaagggaaaatcaggggaatgcttctacaatatttgactttcataagtgagccttaacttaggctttctctggtaaaaattgaaaactggaaatcacttcagagaaaaactttcaaatgcaggttagtgatatgaattaacatatcttaatgtatcccaaaccaaagaaagagtgaaagaatttttaaaaataattcaagaaaatatgacatttggtggcaaacagctagatttctaaagaatataatctttatgcttgtgttactctgactagaatggagtttctttactaattgagaggttcactttgaacgccataaatcatttcagtatatttttattatcattgttttcttataatgatggatgattgttcagtaattgtaatcatttaatttttaataaaatataaaatgttaaaaa

SEQ ID NO: 4447 - DNA, 1449 bp, Cricetulus griseus
ttctgctacggaattagatttctctggttgacaccttggttctgggacactcgacagtgctggcagaactatccatatcagccactctcgagagagctttattactactacatcatggagctggctttctactggtctctcatgttctctcagttcacagatgttaaaagaaaggacttcctgatcatgttcgtgcatcacttggccaccattgggcttatcaccttctcttacatcaacaacatggttcgagtgggaaccctggttatgtgtctccatgattcctcggacttcttgctggaagctgccaagctggccaattatgccaaatatcagcggctctgtgacaccctctttgtgatctttagtgcagtttttatggttactcgtctaggaatctatccattgtggattctgaacacaaccctctttgagagttgggaaatgattgggccttactcttcctggtggctcttcaatggccttctcctgatcctacaggttctgcatgtcatctggtcttacctgattgcacgaattgcttttaaagctttgatccggggaaaggtgtctaaggatgatcgtagtgacgtagagagcagctcagaggaggaagatgagaccacccacacaaacaacctctctggccgcagctccagcaatggtgccaactgcgtgaatggccacatggcaggcagccactgggctgaagagcacgggacttgtaaagctgttggcaacccactctttggggcctccccacattaacagtcctgtgactagagggactgcaaggcactgaggaggatcaaggaaccaaacagtttcatgttgtcaagaaactgctgttttgtatttaatgcccccggtcctttcagtaatgttattagctctgtgtttgtctgtttttgtttgttgtgcattgtgcatatggtattgagtttcattgactgggttggggcacagttcaggaccactaggtattgcctagttacttctcaacgcacctccagcccagcattggctgcatcttgaattatgctgtctccagaccatctacgttcttgtctcccggctcttgaggctctaagttcctggtccatctaacatggtgccgccagattcagctccaggttttgggaacagttcttctggagcaggaagcaatgttaaacctgataaggactttggctagatacccaggatcactgtggcctctagctacatccccttcctaccacctgatagtgacagggacaactactgatgccctgctctttgctcaatggtacgcagggagggggggtgggagaggatgagctgagatacggaaggcagcagccactgggtgtgctgttaactagttttatactattgtttactcttctgtaattaaagtgtttcaaccctcctaaacaaaaaaaaaaaaaaataaaaaaaaaaaaaaaa

SEQ ID NO: 4448 - DNA, 1449 bp, Cricetulus griseus
ccgggatggctgccgccctcacaagactgggtctaattctcggcttccggtcgtagccggccggcgctcatttctcttctggaagcttagtggagccggggaaaggtgcggggtaaacggggagagggaactgcgagcatccgcgccggctcctaacggagaagatggctgagggcgagcggcagccgccgccagattcttcagaggagacccctccagctactcagaactttatcattccaaaaaaggagatccatacagttccagatatgggcaaatggaagcgctctcaggcatatgctgactacatcggctttatccttaccctcaatgaaggtgtgaaagggaagaagctgaccttcgactacaaagtctctgaggccattgagaagctggtggctcttcttaatacgctggataggtggattgatgaaaccccgccggtagaccagccttcccggtttgggaacaaggcctataggacctggtatgccaaacttgatcaggaagcagagaatttggtggccacagtggtccccacccacctggcggctgctgtacctgaagtggcggtttacttgaaggaggctgttgggaactccacacgcattgactatggcacagggcatgaggctgcctttgctgctttcctctgttgtctctgcaagatcggggtgctccgggtagatgaccaggtggcgattgtcttcaaggtgtttgataggtaccttgaggtcatgcggaagttgcagaagacgtacagaatggaacctgcgggcagccagggcgtgtggggtctggatgacttccagttcctgcccttcatctggggcagcttacagctcatagaccacccccacctggagcccagacactttgtggatgagaaggcagtgagtgagaaccacaaggactacatgttccttcagtgcatcctgttcatcactgagatgaagaccggcccctttgcagagcactccaaccagctgtggaacatcagtgctgtcccctcttggtctaaagtgaaccagggcctcatccgcatgtataaggctgagtgcctggagaagttccccgtgatccagcacttcaagttcgggagcctgctgcccatccatccagtcacatcaggctaagagaggctgagccaccagagccaccctggccaggttcctgtgccctctgacccggcacccctcccaccctccttctgttctttctgtttgatgagaggctgtttactgagatgggtgctgagcagggcctgagttgagtattgaccaaagtgtggccagtttttgactgtccgtctggtgggcagacaagaagagggggtgggacctggtcccagggcccctgcccacctctgtcctccctgcttcctctctctcctgcctaggcctgtgtggagacaagggcatcctgctcttcccattgctttccctttcc

SEQ ID NO: 4449 - DNA, 1449 bp, Cricetulus griseus
gcctgtcccggctcctgctctgggccagcctggggctgctgctcgtcttacctgggcatcctctgggtgaagatgggcaagccctcggcgccgcaggaggcggaggacaacatgaaattgttgccggtggactgtgagagaaaaacagatgagttctgccaggccaagcagaaggcagccttgctggagctgttgcatgagctgtacaacttcctggccatccaagcaggtaattttgagtgtggcaatccagagaagctaaaaagcaaatgcattcctgtcctggaggctcaggagtacatcgctaacgtgaccagcagcccctcggcaaggtttgaggccgcgctcacctggatactgagcagcaataaggatgtgggcatctggttgaaaggggaagacccatctgagctggtgacaacagtggaccaagtggtctgcctggagtctgcccggccccgaatgggcgtaggctgccgcctgagccgggccctgctcaccgctgtcacccacgtgctcatcttcttctggtgcctggctttcctgtggggcctcctgatcctcctgaagtacagatggcgaaagctagaagaagaagagcaggccatgtacgagatggtgaagaagattatagacgtggtccaggaccactatgtggactgggagcaggacatggagcgctacccatatgtgggcatccttcacgtgcgagacaccctcatccccccacagagccgacggcgtatgaagcgagtgtgggaccgtgctgtagaattcctggcttccagtgaatcccggatccagactgaatcccaccgtgtggcgggggaggacatgctggtgtggagatggacaaagccttcttccttctctgactcagagcgataggacagggcctgttccagccggcctggcctggccacgcagctggggcaagggcacagacctttggtgctcattcacgcctgccttgattgccctcctggtctcagttctgggacgtgtgggcttcttagggtcgcagggagagcgggtgaggccctcctctatgccagtcttactgacagaaaggaagaagggcttgctcttcctagagagaaaaacaggggcagtggttggaaccctggaggccctgcacacagttagatagcaaccagtgatctgaagcccctggcttgggtggtgggtcgggaggtggggtccagccacagctgcctgtgcctcagtgcttctcacagatgggaagtgcagccctgagccagggtggagcctcagcttcctcacaggtggggtacggcattgtggctgcacactgccccctgcaggctacatggagcagtgtgggccgttggcctgctgtgcagtggagggcctgctccaaaacacccagtggggggcctcattagctgagagggaggctctccagcaagtcatctagcgggcctcacc

SEQ ID NO: 4450 - DNA, 1448 bp, Cricetulus griseus
ctctctcaggaaagcagcgaccaggatgtggaatagcgggttcgagagcttcggcggcggctccagctatggcggagcgggcggctacacgcagtccgccggcggcttcggctcgcccacactgtctcaggcagagaagaaatcgagagtccgatcccagcacattgtgccctgtaccatatctcagttgctttctgctactctgactgatgaagtgttcaaaattgggaatgttgagatttcacaggtcactatcgtgggaataatcagacatgcagagaaggctccgaccaatattgtttacaaaatagatgatatgactgctgcacccatggatgttcgccagtgggttgacacagatgatgccagtggtgaaaacactgtggttcctccagaaacatatgtgaaagtggctggccacctcaggtcttttcagaacaaaaagagcctggtagcctttaagatcattcccctggaagatatgaatgagttcactgcacatattctggaagtggtcaattcacacatgatgctcagcaaatccaacaaccagctctcaacagggaggccatctatcagcaactcaggaatgggtgagccaggaaacttcagtgggaataacctcatgccagcaaatggcctcactgtggtccaaaaccaggtactgaatttgatcaaggcttgcccaagaccagaaggattgaactttcaggatctcaggaaccagctccagcacatgcctgtggcctcaatcaagcaagcagtggattttctgtgcaatgagggacacatttattctactgtggatgatgatcactttaaatctacagatgcagagtaactagagctcattgggaatctgaaatatttccagctggacctgtttttccatctgttgtctccagctctgtaggttttggccagtggcttctagaacaagtttcatagataaggtctcagcttatgtcctcttgaaacatgctgctgttctgttttgttgtttgttgtttagacgttcaaaaggagctagacagttgagaaagaagtaaaccagggtgggatttcttaacagaaattccagataagctagtcaggactccaggctggatggacgggattgaaagaggaacacaagagcagggcagaactgtcatgcttgggagcttctgttcttgaaaggcttcctgttgaggtgataagtaatactaaggccaagggccacaaaaagaacccactaccttctgcctaatttcgtttcccactctgggtctgtggtgttactttcaaaattgcactttcctttcccttgtcttgcccacaactgaaagtaggtttaagtgagcatgaggttctggtatggtggcctcacagggcagagaggaagaaatgttactccattctttgtaatataaatgtccatatgtttaataaaagtttgattgtaatag

SEQ ID NO: 4451 - DNA, 1448 bp, Cricetulus griseus
cggcagtggcagaggcggcggcggcgggacgcggaggctcccccgggactcggcctcagcagcgaggcggcggcggctgcggaggcgcaggcagcagctgaggcagcggcaggctcaggtgcagccgctgcagtacttagcactttatttgcagctccttcagcagactgcctcctctgggaacctcaacaccctgagcagcctccacccaatgggagggttaaatgcaatgcagctacaaaatttggctgcactagctgctgcagctagtgcagctcagaacacaccaagtggtaccaatgccctcactacatccagcagtcccctcagcgtactcaccagttcagcagaatcttcaccgagctccagcagcagtaactctgtcaaccccatagcctcacttggagccctgcaaacattagctggagcaacagctggcctcaacgttggctctttggcaggaatggctgcattgaatggcggtctgggcagcagtggcctttccaatggcactgggagcaccatggaggccctcacccaggcatattctggtatccagcaatatgctgctgcagcactccccactctgtacaaccagaatttattgacacagcagagtatcggtgctgctggaagccagaaggaaggtccagagggagccaacctgttcatctaccacctgccccaggagtttggagaccaggacctgctgcagatgtttatgccctttgggaatgtcgtgtctgccaaggttttcatagacaagcagacaaacctgagcaagtgttttggttttgtaagttatgacaatcctgtctcagctcaagctgccatccagtccatgaacggctttcagattggaatgaagaggcttaaagtgcagctcaaacgttcgaagaatgatagcaagccctactgagagtgctcccctctgagactggagtgagaagatcttctgattcctgccgtttgttcatcgttgtgcctaaagcatgtcgatgtggcgtcaagtacatcgtccaaatccctgtctcttcagcttctctgatgcttgaactctcacctttgaccttgtgttgacctttgatgctgatgtgtattttattatgtttgtttctttctttgttttttcttttttcttcttttttttttttcccttttgtgctgccaaaaattggttttgctagaacgactgctgaagggaaaatatttaaacttgcatttgaatataaaaaaaatctattttctagaacttcataagataaccacttgattttgtgattccaattctttgtaactgtctcagagcagccctactagcacatgccgtgtggtgtttgtatccctgtgaacacacagccagtccgcttccaggctttgttcctctgtgtgcttagttttaaagacaactttgaaataaacaatgaaataaacgatgtcactaaaaa

SEQ ID NO: 4452 - DNA, 1448 bp, Cricetulus griseus
attgaacgagctaaggccaatgcctctctttgggaggccagattggaagtcacagaactctctaggattgaatatcgtgatacttcccgaagactggcaaaaaataatgaagacttaaaagaaacagcagtataaattggaaaaagatactatgtctgtattaagctatttgaagaagcaggatcaggagaaagataaatatgatagaaaaactgaaacagcaactggtgaaaacaaaaggaaaaagccaaaagaagaagaaggaaaaattggaacataagtatactatgcagataaatgaattggagggacagtttcaatcaaaaaagccaagctggccgagagagcccaccatgaagctatgatgcagttgagcactgctggaagaaatgtttttaaagagaacgtgtatcttcacaaggctcttacatatcatttgaaggaagctgaaacacgacagaaaacctccgagaagttgcaagaaagtcattcctgccttatgcatcaaaaggaaaccaatgagctgttgattaaggaaaagattatgcaacttacccagcagaaatcacaaattcaaactcttcagaagaaggtgtacatgaccacagagtttgaggctgaagttttcaaactgcagcaaaaggcaattatagagaaccaagcaggcaaggtagaaattgacaagctgcagtatcttcttgagatgaaggacaaggaaatgaatcgagtgaagaagctggctaagaacatcctggaccagaggacagaagtggagcaattctttctagatgctctgaaccaagtgaaacagcagattctgatcaacaggaagcattacaagcagatagcacaagctgctttcaatttaaaaatgagcgcagcatgtgcgggaagaacagaataccccagaatcaggacctttgatggcaaagaacacagtaccaacagtgtgaatcatgatctcatggaggctgagaaatggccaagcactcaaaaaaatgtggatattagagatttgacctgggagcaaaaggagaaagtcttgagattgctttttgcaaaaatgaatggtcttgctgctaggaaatacaggtcgagttctaagcctcctgttccagactatatttctgacagtggagaaatgaaagaaactgggggtagaaattaaccttccagatcaaaccttcatcacccagcaagctccagtatcagactccaataaaatgatgtcaccgagtattatttctaacggattacaggactctgacataatgcctgagaaatagagcagaaaagcagatgtatgtaatcttgctctgaatatgttcaagaaatttctcaaaggaaaagagaattccaactcaaaagttacctgtttgccatagaaattggtgtctcccctgaaggaagatcgagagccggtgaaggagaacatggaaacggaactg

SEQ ID NO: 4453 - DNA, 1448 bp, Cricetulus griseus
gtgtgggtgtttggggccgccttggcctgcgccgtcatctcgacgtctgcaggctgctgtgtccccgttttcagagccgcggccctcagagcgaggaagacgggaacaggcctaagtcctcctcgaaggcacgtcggctccgccctggccactccacgatcctcagccagagaggctcacttaaaatacacgaccttcaaggaagggcctattgtggagctggaacagtggattgacaagtactccagccagctgcccccactcacggctttcattctaccttctgggggcaagagcagctcagcgctgcacttctgccgggccgtgtgccgccgagccgaacgacgtgtggtgcctcttgtccaaatgggagaaacggatgcaaatgtggccaagtttttaaacagactcagcgattacctcttcaccatagccagatatgcagccatgaaggagggcagccaagaaaaaatataacaagaagagtgatgaatgagaacatgaactgccaactctggctgttcaaggatttggaatgtaccagcgacccttggaaatgtaatagtgatttacctgtgccaatggggctttaaatgtcacatttataaaggggaaggcaggcaggcttgaggagtttagtcacctctgagctgcccatcactgccacagtgtaggggaaagacagctgcaggtccacaggggtgcaacttggagaatcctctccatcagggcaggaggtgggcggccctccccaccacagcagccgtagaagtgaggttttcaggctgtcactgagccctccgatgtcacacttggctggtttatgcttctgtggtccacacgacggctgtgttttattccacttgtcactgctgctgcttctcactatgaaatgacatcgccagtggcagctgtgtccttgggaagagggatatttatgaaaggctggaggcagccccgagaacctctacagaagggaaactgaggctcagaactggcctaggctgtggtctcatgacccccactcccaagcccagcagcacttgacagtcattttaatcacaaccccgggctgtcggccagtgtcaggcactaataggtctgccgtcacattctcagctgactttcccttaactgatacttcacggctgttgttaatgtgcattttccactgagtaatttccagagcctgaacttgtagcacatcccagtgataaatgtcccccagttccaagtcccctgtcagctgcaatgtcacccatacctcctccccagcacctcccgacagcccatcccagttttatgatccctctgtcccagtgatcacgactgaacctttaagaatccagacgtatttcaagtttaattgaaattaaaattctttgtctaataaattccgcacgaatgactagaaaaaacaaaaaaaaaaaaaaaaaaaaaaaaaaaaa

SEQ ID NO: 4454 - DNA, 1447 bp, Cricetulus griseus
tgtggggaggcagccagctccgtcggtcgccgactacggacctctccgggtctcagccgccagggaccctgtccggaaacactagccgggcatcatgagtggctgtcgagtgttcatcgggagactaaatccagcagcgagagagaaagatgtggaaagattcttcaagggttacggacggatcagagatattgatctgaagagaggttttgggtttgtggaatttgaggacccaagggatgcagatgatgctgtttatgaacttgatggaaaagaactttgcagtgaaagggttactattgaacatgctcgggctcggtctcgaggtgggcgaggaagaggacgatactctgaccgatttagtagtcgaagaccgagaaatgatagacgaaatgctccacctgtaagaacagaaaatcgacttatagttgagaatttgtcatcaagagtcagctggcaggatctcaaagatttcatgagacaagctggggaagtaacctttgcggatgcacaccgacctaaactaaatgaaggggtagttgagtttgcctcttatggtgacttaaagaatgctatggaaaaactttctggaaaagaaattaacgggagaaaaatcaaattaattgaaggcagcaaaaggcacaggtcaagaagcaggtcacgatctcggaccaggagttcctctaggtcccgtagccgatctcgttcccgtaggagcaagtcttacagccgctcaaggagcaggagccggagccggagcaagtcccgttctggtagtaggtctcctgtgcctgagaagagccagaaacgtggttcttcaagtagatctaagtctccagcatctgtggatcgccagaggtcccgatctcggtccaggtccagatcagttgacagtggcaattaaactgtaaataacttgccctggggacctttttttaaaaaacacacaaattcccaaaaaccatacttgctaaaaattctggtaagtatgtgcttttctgtggggtggggtttgtttggagggaggtcgggctggatttctttgtagatgtggaccaccaaggggttgttgaaaactaattgtattaaatgtcttttgataagccttctgctcacacttttgtgactgtctgaagtatatagtttgtgtatattgacagagctcttttataactaaagcatttaattttttgtactagaaaaacttttgaacattttagttcattgttcagatatgttaagattagtttaattactccaattaaactaatagctttggacactttaaaagagctctaaatttgcttgtatataaaggcttaatatgagttttccttgttagggtcaagggtgccttctcacccattaacagctgtaggacagattaaagcagctgtttgttgttgataataaaatatatcaagtattataaaaaaaaaaaaaaaaa

SEQ ID NO: 4455 - DNA, 1447 bp, Cricetulus griseus
gcagagatggcttccaagcgcatcacgcaggagactttgatgctgcagtaaaggagaatattgaggagtttgagatgggtgctgaggaggctgttcaagaggctgtggagcagtttgaatcacaaggggttgatctgagtaacatcgtgaagacagcacccaaagtgtcattggacagcctccaggagcccacacatgatgtcctgcaggctcttaatgatctgcaggagtccctgactgggtctcggccccaggaggtgtcggcccaccttgcccgattctgtgaccagtgcaggcagcagaaggccagccggtacctggcagctcagaagggggcctacccaatcctcctggctgcctggcaactggctgccacaagcgaccagggccttttgctccaggctctcaatgccttggctatgctgactgatggccagcctgacctcctggatgcccagggccagcagctgctcgtggccacgctggcacagaatgccgccaacactgacctcacctgctgtgggatccgctgtgtgcgccatgcctgcctgaaacatgaacagaatcggcagggcctggtgaaagccggagtgttgcccctgctaaccgctgctattacacagcatagccagcacgccgatgtggtcagggaggcctgctgggccttgcgtgtcatgacctttgatgatgacatccgagtgccctttggccacgcccatgagcatgccaagatgattgttcaggagaacagaggtctgaaggtgctcattgaggctgccagagcgtttcctgacaacccgggagtcctgagtgaactctgcagcaccttgtcccgcctggctgtgcggaatgaattctgccaggaggtcatcgacctcggaggccttggcatccttgtgaccctgctggctgactgcagtgaccaccaggaccttgtgaaacaagtgctcagcgccctgagagccattgcaggcaacgacgatgtgaaggacgccatcgtccaggcaggcggtacagagtccattgtggctgccatgacccgacacttagccagcccccaggtttgtgagcaaagctgtgcggcactctgtgtccttgccttacggaagcccgagaatagccgggtcattgtggagggtggtggagcactggccgcactacaggccatgaaagcacacccacaggaggccggtgtccagaaacaggcttgcatgctgatccgaaacttggtgtcccgtagccaggccttctccaagcccatcctcgacctgggggcagaggagctcatctcacaagcccgagcttcccacccagactgtgaggatgtggccaaggccgcattacgagacctgggctgccgcgtggagcttcgagaactgtggacaggaaagaggggtgacctggcaccgtgaccttggctcagcgaactctgactccagaacatggg

SEQ ID NO: 4456 - DNA, 1447 bp, Cricetulus griseus
aggtataaggcagtatggctcatcttcttcatgctgggcctggggacattgctcccctggaatttttcatgacagcaactcagtatttcacaaaccgcctggacctgtaccagaatgtgtcctcagccactgacaaaccaagcaaggacaccgaggccttgcctgcccccacagtgaccttgccagagcgaagtcctctcagtgccatcttcagcaatgtcatgactttgtgtgccatgttgcccctgctgctcttcacctgcctcaactcttttctgcatcagaggatctctcagtctgttcggatcctgggcagcctggtggccatcctgctggtgttcctcatcactgccatcttggtgaaagtggaggtggatgccctgactttcttcatcatcaccatgatcaagatcgtgctcattaactcatttggtgccgttttgcaagccagcctctttggtctggctggcgtcctgcctgccaactacacagcccccatcatgagtggccagggcctggctggcttcttcacctctgtggccatgatctgtgccattgccagtggctccaagctgtcagaaagtgcctttggctattttatcacagcctgtgtatttgtcatcttggccatagtgtgttacctggctctgcctcggctggaattctatcggtattacctacagctgaaccttgaggggccctctgaccaggagaccaagttggatcttatcagtaaaggagaggaaccaagaggaggaagagaggaatccggggtaccagctcgcagctctccacccagcagcaaaaaccactctatcaaggctatacttaagaatatctcagtcctggctttgtccgtctgcttcattttcactgtcaccattgggttgttccctgctgtgactactgaggttgaatccagcattgccggcaccagtgcctggaagagctactacttcattcctgtggcttgtttcttaaatttcaatgtctttgactggctaggccggagtctcacagctatttgcatgtggcctggtaaggatagcctctggttgccagttttggtggtctccaggatcgtgtttattcccctgcttttgctatgcaaagtgaatctttacccacgacgcctggttcatcatcttcatggctgcctttgccttctccaacggctaccttgccagcctctgcatgtgcttcgggcccaagaaagtcaagccagctgaggcggagacagcgggaaacatcatgtctttctttctttgtctgggcctggctctgggagctgtattgtccttcctgttacgggcacttgggtgaccatgtagggacagacagactgcactgcctgcccgcttcctgctcgttttcatccctgcctgggatgagtggggtccagaggtttgctcttctggctgaccttggctttcttctggcctgtgct

SEQ ID NO: 4457 - DNA, 1447 bp, Cricetulus griseus
cagacaccattcccaaaagtaaatttcttgtccctgggatcgaaatttcgatacagtggccggactcaagcacagaccaggcaagccagtgctctgattgacagacctgctccgcactttgagcggacagcaagcaaacgggcatccaggagccttgatggagcagctgccgagtccacagaccgaagtcctcggcccacctctgcaccagccattgctcagagtcaggtcacagaagcgccaggggcacccgtcaaaaaaacacagaaggaagcttcgaaggttgaagtgaaaggggaagaggagccacctgagccagctgagccagagcccacagaaagcaatggaaggatttagacaagagtcaaagaagaaaatcaaaaaagacaatcaatgccagcatcagtgaactagaaaaaaaaacttatagaatttttccttttttaaatttgtttttaccccccaaacagggcctctgtaatctccagcttactgcctacaaacagatttgcctggaagcttcttagattcctaattctagactaggaatgaacttcatgagggttgacaggatttctggcagccgcggctgagggctgaagggcagtgagcaagcatacggaaggaagccacagcagtctctggcctcctggctgagcgctctttacacaaactcagcgactttgaactggttttgagtgtgctatttttcttttagcactgggcttggcactatccccgtcaggacttcagacctgggtacctgacctctgcttctctcttgctgcctttgtctggaaattggaccagacttctgatgtccctccaggcctcctccccctctttgctggctctggcaacagatcttgggatatagtaattgtttggtcttttttttttttcccatctccagggtcagggacttggtaggaattttcccaaagtgactcaggcacaccacagtaacaaacccaactgcagttttattttacttcagaagtagatttccttcaaaccacccaaggaggctaactccggggaccctcccccaggccagcagtgtattctgggggacgctgagcagctggggttggggggcgtggcccaccttaagaaatggagctggagttccggcctagccagcatccccaatgctcatgggaaatagaagccctggggcttgttgtttttacaaatctctcagatctattattttgatgacaaaaatgaaggagctttgtaaattttttaaaaattatgaatcatatcaagtagttgtttacatttgacaaataggaactatggcagcagagtccaactgaaaatgcttaggtaagataggcagtaatcaggctgctgtctgcgcctttcatagtgacagatgtggctgtagtgttttaggtaagtgtttggtcttgcttcttgtatggctatttttcaaataaac

SEQ ID NO: 4458 - DNA, 1447 bp, Cricetulus griseus
gcaccatcttcgcgctcagctccggccagggccgctgcgccgtcgcggtgatccgcaccagcggcccggccagcgcgctcgcgctccgcagcctcacggcgtcccgggcgccgcccccggcccgcagcgcctccctgcgccttctccgccacccgtgctccggggagccgctggaccgcgcgctcgtcctctggttcccagggccccggagcttcacgggtgaggattgcctggagttgcacgtgcacggaggtccggcggtggtcaccggcgtcctgcaggcgttgggtagtgtgccaggactgttcggccagctgaggccggggagttcaccaggagggcattcgcccatggaaagctgagcctcactgaggtggaaggactggcagatctgatccacgcggaaactgaggcccagcgtcgtcaggcgctgagacagctggacggggagctgggccaactgtgccgaggctgggcggagaccctcaccaaggctctggctcatgtagaggcctatattgacttcggagaggatgacaatttggaagagggtgtgctggaacaggtggacagagacattcgagccctggaggctgcgctggattcccacttgcgagatgccaggcgtggtcagaggctccgctcaggggtacatgttgtggtgactggaccctccaacgcgggcaagagtactctggtcaatctgctcagccagaagcctgtatccatcgtgtccccagagccagggaccacccgtgacgtgctggagacccccgtagacctggctgggttccctgtgttgctgagtgacaccgctgggctgagggaaggcgtgggcgcggttgagcaagaaggtgtgcgccgggctcgccaaaggctggaacaggctgacatcatcctgggggtactggacgcctccgacctggcctccccctccagccgcagcttcctggacactgtggtggccccactggtagcacaaagccccgacagtgtcgtacagcgcctcctgctgcttctcaacaagtcagacctgcttcccgctagtgccctggctggcgacaccaccctattagagacaccccacctgctgctgtcctgccacaccggagctgggctggagggcctcctgcaggccctgagaacccaactggctgctgtgtgtggggacccgtccacaggcccaccgctcctgacccgagctaggcaccagcatcacctccagagctgcctagatgccctgagccactaccagccagccacagacctggccctggcagccgaagccctgcgcctggctcgcagacacctgagccacctcacaggtggaggaggcactgcagaggtcctggacctcatcttccaggacttctgtgtgggcaagtgagggccagagcctgccactcaggatctcaaaattcccactagatcttgatctaagatggca

SEQ ID NO: 4459 - DNA, 1447 bp, Cricetulus griseus
caggtgccaagaaaaatccatactgctcctgtccgatccttgttcctgctgcgccctgtgcccatcctgttggcaacaggtggtgggtatgcagggtaccggcagtatgagaagtacagggatcagaagcttgagaagctgggattggagattccgcccaaacttgccagtcactgggaggtggccctgtacaagtcggtgccaacgcgtttgctgtcacgtgcctggggtcgcctgaaccaggtggaacttccttactggctgcggaggccagtctacagcctgtatatctggacctttggggtaaacatgacagaggctgctgtggaggatctgcaccactaccgaaacctcagcgagttcttccgacgcaagctgaagcctcaggcacggcctgtctgtggcttgcacagtgtgatcagcccatcagatggcaagatcctcacctttgggcaggtgaagaattgtgaggtggagcaagtaaaaggcgtaacctactccctggagtcattcctgggtcctcgaacctatacagaggatctgtccttccctccagcctcctcccgtgactccttcaggaaccagctggtcactcgggaagggaatgagctctaccactgtgtcatctacctggcccccggagactatcactgcttccactcccctactgactggactgtctcacatcggcgccacttcccaggttccttgatgtcagtgaaccctggcatggcccgatggatcaaagagctcttctgtcacaatgagcgtgtggtgctgagtggggactggaaacacgggttcttctcattgacggcagtgggcgccactaacgtgggctccatccgcatctactttgatcaagacctgcacacaaacagtcccagatacagcaagggttcctacaatgacttgagctttgtaacacatgccaacaaggagggcattcccatgcgcaagggcgagcacctgggtgaattcaacttgggctctactattgtgctcatctttgaggcccctaaggacttcaacttcaggctgaaggcagggcaaaagatccgctttggggaagcgctgggctctctctagtcgtcttggttgtggctgccaagggatctttccacgcagaagcatgagagtcttcaggtggaggcccagccctgcaggaagtgtaggagacatgctgctattggtctaggggctgtgttggaggcagagggtgtggtggtcagtacttagaaaacggtattcaggccattaggatcccagtaatagggacaaggccagatttcatgttgatcttggggatgccatggatttctcctgcaggagaaattattgaactttgatttcaactgtatcagtagtacagtattttgtatgaaaagtaggagtcttctgaacagtaattcatttcattgcaagacattttgaaataaaaaagaac

SEQ ID NO: 4460 - DNA, 1447 bp, Cricetulus griseus
acctacctgtcatgggagtcgtcattcaggtgcacatcccgtccagggtggacaagctggaatcccaatcctccaaagcagtgtgaccaagagaacctgctgccagccccagtcgtcctcactagtgtccatgaactggatctgtttaggtgcttccggccagtgctaacccatgtgcagaccctgtgggagctcatgctccttggggagcccctagtggtcctggcaccctcacctgatgtgtcttcagagctggtgctagccctgaccagttgcctgcagcccctgaagttctgctgtgacttccgcccctacttcaccattcatgacagcgagttcaaggagctcacaacacgaacacaggctccaccaaacgtggtcctgggagtcacaaaccctttctttatcaaaacactccagcactggcctcatgtccttcgaattggggagcccaagatgtcaggggaccttcctaagcaggtcaagcttaaaaaaccctcacggctgaagactcttgacaccaagccaggcctctacacctcatatactgcccacctccaccgggacaaagcactgcttaaacgactgctcaagggcgtacagaagaaaaggccatgggatgcacaaagtgccctgctgaggcggcacctcctagagctcacacagagtttcatcattcctctggagcactacatggccagccttatgccgctgcagaagagcatcacaccctggaagagccccccccagatctgccccttccgccaggatgatttcctgcgtagcctggaacattcgggaccccagctcacctgcattctcaagggtgactggctgggcctctacaggcgttttttcaagtccccccatttcgatggttggtatcggcaacgacataaagagatggcccagaagctggaagctctgcacctggaagctatttgtgaggcgaacatcgaggcctggatgaaggacaagtcggaggtggaagtggtagacctagccctgaaacttcgggaaaagctggtgcgggcacagagccaccaggtccccgtgaaggaggtgacactgcagcgtgctcagctgtacatcgacacagttattggctccctgcccaaggacctacaagcagtcctgtgccctccctaggacaagagccaacttgtgtggtcctggaggcctagagcctaagtctgccaagttccctctacggtgaaaggcaggcatccaccaagctgggactcccagccttggcctcctacctcggcttcagcctctctcccggaaccacctctgtcccatccagtaaaatgacatttggaatgacatttttcttatacaaaaaaaaaaaaaaaaaaaaaaaaaaaaaaaaaaaaaaaaaaaaaaaaaaaaaaaaaaaaaaaaaaaaaaaaaaaaaaaaaaaaaaaaaaaaaaaaaaaaaaaaaaa

SEQ ID NO: 4461 - DNA, 1446 bp, Cricetulus griseus
  modified_base (1431)..(1431): a, c, t, g, unknown or other
tgcggcccgagaagagggccttgaccgctgcgcgagcctggagagctcggactgtgagtccttggacagcagcaacagtggcttcggaccggaggaagactcctcatacctggatggggtgtccctgcccgactttgagctgctcagtgacccggaggatgagcatctgtgtgccaacctgatgcagctgctgcaggagagcctgtcccaggcgcgattgggctcgcggcgccccgcgcgcctgctaatgccaagccagctggtgagccaggtgggcaaggaactcctgcgcctggcttacagcgagccgtgcggcctgcggggggcactgctggacgtctgtgtggagcaaggcaagagctgccatagcgtggctcagctggccctcgaccccagcctggtgcccacctttcagctgaccctggtgctgcgcctggactctcgcctctggcccaaaatccaggggctgttgagttccgctaactcttccttggtccctggctacagccagtccctgacgctgagcaccggcttcagagtcatcaagaagaaactctacagctccgaacagctgctcattgaagagtgttgaacttcgtcctgggggggggcggagggggcgtcgcattgcccccaaaagtgcagacaggaaagtttagtggtggagacgagcaggcaaggactgaaggactgatgcctgcgttagaaagctgacaatagccaccggaggggcgcagggcccgttggagaaggaagtgtcaaggaaggtcgctaggttgtgtgcaggtggctcccctgtttgggggcacatgctcttagtactgtagcatgaaacaaaggcttaggggccacacaggcttctggctggatgtgtatgtagcatgtaccttttatattattattattattactgacagttacaacaacagtagtgtgacagagccaaaagggcagctggtctgcgctggcgtctgccaggggtgggggctggagggcaggaagggaggaagggggtaggtctgggagatagttcgtgtatctcatggtctgaaaggaccaagtgtgtttgtcgtttgttttgtatcttttgtgttttgtggggatgggagcttcactactgacctgttcgaggcagctatcttacagccgcatgaatgtaagagtaggacggggtgggtgttgggatcatttgggatctttgacacttgaaaaaagtaacacctgggagctttgtccagcccattccctgccatggactggaggattgaactgtgaggggatgggtctggaaggggggggtgggggctggaacccctcccccagaggagtggccacctgggtcttccatctagaactgttacatgaagatactcacggttcatgaatacacttgatgttcaagtattaagacctatgcaatattttactttntaataaacatagttt

SEQ ID NO: 4462 - DNA, 1445 bp, Cricetulus griseus
atttccaaaaactgggtcggtgttcagtcacgggttttcttgtaaacacagccaatatgacccttggccatcaggtcatggaagtggctgtcttttcgaagacacggccgggcatacattcccattgctcaggtgaaagacatctatgtgacaacagatcagattcctatatttgtgaccatgtcccagaagaatgaccggaactcatctgatgaaaccttccttagagacctccccattgtgttcgatgtcctcattcatgatcccagccacttcctcaatgactctgccatttcctacaagtggaactttggggacaacactggcctgtttgtctccaacaatcacactttgaaccatacgtatgtgctcaatggaaccttcaatcttaacctcaccgtgcaagctgcagtgtctgggtcatgcccttcaccttccaacaccaagcccttctttaatgtctatggtttataactccatggagctgagggacttttccagcgaaaactgccagataaacagatacggttatttcagagccaccatcacaattgtagaggggatcctagaagtcaacgttatccagatagcagacgtcccagtgcccatgccccagcctgagaactccctgatggacttcactgtgacctgcaaaggggccacccccacagaagtttgcaccatcatctctgaccctacctgccagatggcccagaacagggtctgcagcccagtgtctgtggaccagctgtgtctgctatctgtgagaagagccttcaatgggtctggcatgtactgtgtgaacttcactctgggtgatgatgcaagcttagccctcaccagcaccctgatctctgtccctggcaaagaccgagcctcccctctgagaatggcaaacggtgccttgatctccatcggctgcctgggcctgtttgtcaccatggttaccggtatcttgctgtacaaaaaacaccaggcatacaagcctataggaagccgccccaggaagatggtcaaaggcaaaagcctgagtgttttcctcagccatgcaaaggccccgttcttccggagaaaccgggagaaggatccggctgctgcacagcaagccggggatgccctaagtcttcagccttctttctgaccaggagcccactccagtgtgtttatgtgagccgtgcagaagcacgggactagaaacgctcttttccaaaggatcattgtaaaatatctatgatggtttaggaggctagttatatggcgctttagagaaggcatgaaatgacttagtatttcctcctgtttgtgtcctggtttttactgttgtaagtaggacgcacacactgtgtctgaagagtgacgggaaagtcaattgctcctgaaggtcctaggttaactaggagaggattgattgattgattgattgattgattgattgattgattgat

SEQ ID NO: 4463 - DNA, 1444 bp, Cricetulus griseus
aagaagacaggagaactgcctcctcggctgaggcagaaagtggccgctgggctgggtctttcccctgctgacttacccaatggtaaggaggaggtcccctatctgccgtgacttcctcaaaggtgactgtcagagaggtaccaagtgcaaattccgtcatctgcaaagggattttgaaatttgatgcccgaggtggaggaggtactggaggtggaggctccacaggctctgttccccaagggacgacgccatgatctctacgatatctacgaccttcctgaaaggggctttgaggaccatgagccaggccctaagcgccggagaggtggatgcctgccctcctgatggccccattttgaatcctatgagtataatctggccccgccccgtggagtggagtgcagactgctagaagaggagaatgccatgctcaggaaacgagtggaagagctaaagaaacaagtcagcaacctgctggccaccaatgaggtacttctggaacagaatgcccagttccgaaatcaggccaaggtcatgaccctgagctccactgcaccagcgactgagcaaaccctggcccccactgtgggcactgtggccacttttaaccatggcattgcccagactcacactactctgagcagccaggctctacagcctcgccctgtatcccagcaagaactagtggcccctgctggagccccagctgctcccccaaccaatgctgcacctcctgctgctccaccacccccacctccacacttgaacccagagatcacgcctctgtcagccgctctggctcaaaccatcgcccagggtatggcacccccacctgtctccatggcccctgtagctgtgtctgtggctcctgtggctcctgtggctgtgtccatggcccagcccttggcaggaatcacaatgagccatactactactcctatggtgacttaccccattgcttcccagagcatgcgtatcacagccatgccacactgacaggactaatggacactctactccctgtcacagcgtccgagggctgggggaagggaccactcaaaaactaggacaagagtactgtcaaggaaagaaaggactaagggaccgtgttcgctcataggaagttggagatgtccctggtcttgtcctcgcttgtgaacagcacaagtccagcactggtatgggaagagagaaattccccacccagagggacagccaggaaagatggggaaagtgggcggtcaggagagaaggcctcacacgagccttcagatggtttggggcccagaactactcctgggcccctgggaaggctgggaccataatactccaacccaaagactaggggaacattcacttaccaagcttggcctggaaatctgtagggcagtgcccactactttccataaaaaaaggttgttttcttaacaaaaaaaaaaaaaaa

SEQ ID NO: 4464 - DNA, 1444 bp, Cricetulus griseus
ggctcggcggtctgcgcctgcgcaggccggtggggcaagatggctgcggagcaaggcgtgcggagttccgggaccccacccggacacttgctgggacgagggatgcgggccctcctgctgctgttgtggtttgcagcccgcggagacgcgctgtatttccacattggggagacagagaagaagtgctttattgaggaaattccggacgagaccatggtcatcggaaactatcggacgcagctgtatgacaaacagcgcgaggagtaccagccagccacccctgggcttggcatgttcgtggaggtgaaagaccccgaggacaaggtcatcctggcccggcagtatggctctgagggcaggttcacattcacctcccatacccctggtgaacaccagatctgccttcactccaattccaccaagttctccctctttgctggaggcatgctgagagttcaccttgacatccaagtaggagagcatgcgaacgactacgcagaaatcgctgccaaagacaagctgagtgagctgcagctaagagtgcgacagctagtggagcaagtggagcagatccagaaagagcagaactaccagcggtggcgggaggagcgcttccggcaaaccagtgagagcaccaaccagcgagtgttgtggtggtccatcctgcaaacactcatcctcgtggccattggtgtctggcagatgaggcacctcaagagtttctttgaagccaagaagttggtgtagccgtgccaagcctcacaggcaatctttcttccaggctgtgggaagggagaaggattggttttcagccatagatgttctggagggagagggactgcaagcatgcccccgttcctcaggctcaaccttcgaacaacaacttggctggctaatgctgagcgggtggtgggacaggccctccccacccccacctctggaccttttgcagtaatcactctgggacctggtgacacccttggtgtcttggattctcagtgttactgatcagggatgtggggctgctgtctgggtaggttttgggagggaagtgggtgggccagcaagctgattttccttctgtcttcctttgttaacatgggattttgagcaggtcagggtatatcagtgactccttgctattccaagaaccttgcttttcttgcctttggcttagaaccagcctgctgatctgaggtgtatgtgtgtcgacttaagggtgggtggaggggttgccgtgcaagaaaggatcccagaggttggtttttgttctttctgggacttgagcagctggtaacaggccaagcagagacttcggtgctggttggagacaaagccagcagtctttagttactgagtttattttcagtgagtttgggtttgttacattggtttcccaaattaaaaaataaaaaagaaagaaactgaacaaaaaaaaaaaaaa

SEQ ID NO: 4465 - DNA, 1444 bp, Cricetulus griseus
ggtgactcctagaaaaccacacaacccacttgcatctgatgacatcaggcagccagccaaccagccatgtcttacactccagggattggtggggaccctgctcagctggcacagcgcatctcttctaacatccaaaagatcacacaatgctctgtggaaatccaaaggactctgaatcaacttggaacacctcaggattcaccagaactgaggcaacagctgcagcagaagcagcaatatactaaccaacttgcgaaagaaacagataagtacattaaagagtttggatcactgcccaccacccccagtgaacagcgtcaaagaaagatacagaaggaccgattagtggcagaatttacaacatcactgacaaactttcagaagacccagaggcaagctgctgagagagagaaagagtttgttgctcgagtgagagccagctccagggtatcgggtggttttcctgaagacagcttgaaagaaaagaatcttgtgtcctgggaaagccaaacacagcctcaagtgcaggtccaagatgaagaaattacagaagatgacctacgccttattcatgagagagagtcttcaatcaggcagctggaagctgatattttggacattaatgaaatctttaaagacttgggaatgatgattcatgagcaaggagatgtgattgacagcatagaagccaatgtagaaagtgcagaggtacacgttcaacaggcgaaccagcagctgtcaagagcagcagattatcagcgcaaatccagaaaaaccctctgcatcatcgttcttgtcctcgtcgttggacttgtgattatctgtctcatcgtatggggactgaaaggctgagtggtgagagtggaccgctgcacgacgtcgtctgggttctgtaggcagattctcgaggtcactttctattgttattttaaaggcagtggtgtaaaggatggtcccatactttgtcatttttattgggggaaggaggttcttttgaattcgatctgatattttctaatactgaaggtttttctaaataccattgctggtataatgtccatgctgtttagttcaatgactgttgggttttgctcacattgtatatgactttcatttataatttatttattattgtttgtactgagttttggggaatttatttgatgccattttttttatcatacttcattagattaagaatcagatgtctgccaatgaactcacttgcctttttaaatcaatgttttaatgcactaatctgaatgctgtaaaaggagttgtcttagtttaacatttgtgttttatgatggtcttatatagcagtttgctagtgaagtcattgtttaatgtggcaggctctgaagcctttaaatgggaacaagtgaaatagtaactaaataattgtatccttgcaagcagaataaagatgatttcagagatgtct

SEQ ID NO: 4466 - DNA, 1444 bp, Cricetulus griseus
tttcctgcagattcctgcagaggagatccccgcttacatgtctgtgcaccgactcctgaggaagctgctgagccgctatcggctcccagtggcaacccgagagaaccctgtcatcaatgactgttgtcggggtgccatgctttccctggccacaggtctggcccactctggaagtgacctctcactactagtcccagaaatcgaagacatgcacagcagcctctatctgcgcccttcagagtccccaatcaccgtggatgtcaactgcaccaaccgaggcactcggtactgctggatgagcaccgctctctatatacctggacggcaaatcatagaagtctccttgcccgaagatgctgcctctgcggacctgaagatacaaattggctgccatactgatgacctgaccagggccagtaagctgttccgaggccccctggtgattaatcggtgttgcttggacaagcccgtgaaatccatcacctgcctctggggaggtctcctttatatcatcgtgcctcagaatagcaaattggggtctgtgcccatcaccgtgaagggggctgtccgtgctccatactacaagctaggggagacatcccaggaagaatggaagaggcgtctccaggaacatcctggtccgtggggagagctggccactgacaacctcatcctgactgtgccaactgcaaatctccgagctctggagaatccggagccactcctccgcctctgggacgacgtgatgcaggctgtggcaaggctgggcggagagcccttccctttgcgtctgccgcagaggatagtggccgatgtgcagatctcagttggctggatgcatgccgggtaccccatcatgtgtcatctggagtcagtgcaggagctcatcaatgagaagctcatcaggaccaaggggctgtggggccctgtccatgagctgggccgcaaccagcagaggcaggagtgggagttcccaccacacaccactgaagccacctgcaacctgtggtgtgtttatgttcatgaaaccgtcctgggcatacctcgaagccgagccaatattgccctgtggccccctgttcgggaaaagagagtccgaatctacctgagcaaagggcccaatatcaagaactggaatgcctggacagcgctggaaacatacttacagctccaggaggcctttggctgggaaccatttattcgtctcttcactgagtacagaaaccagaccaacgcccacagacactgctgacaaaatgaatctgtgggcgaagatgttctcacagcaagtgcagaagaatctggctccgttctttgaggcctgggcctggcccatccagaaggaactggctaccagcctagcctatctgcctgaatggaaggaaaatataatgaaattgtacctcctcacacagatgtaaggagtgcccatcgaggtgtcagg

SEQ ID NO: 4467 - DNA, 1444 bp, Cricetulus griseus
gagtgcctagccgagagccaccagcacctctccaaggagtcgctggcagggaacaagccagccaacgccgtcctgcacaaggttctgaaccagctggaggagttgctgagcgacatgaaggcggatgtgacccgcctgccagccacgctgtcccgaataccccccatcgcagcccgccttcagatgtcagagcgcagcatcgggatacggggcagccttcagcgccgcacccgtaggggccctggccgccgcaggcgccaattacagtcagatgcctgcagggtccttcatcacagccaccaccaacggccctccagtgctggtgaagaaagagaaggaaatgatgggggcgttggtgtcagacgggctggatcggaaggaaccccgagcaggggaggtgatttgatagacgactgactggatctcaggcctgcccttcacctaggccccgaccccggagccgacccacatctcaggccttggggcctgctgccaaccctccaccttccccaccccttgggccaccactgggctaggagcccttttgcccctctataacttctccctcaagaaggacccctatctctctccgcctccacacacctttcccaccaaaccttgaagactgtgctggtgtgaagaggtctgggtgggagatggttagcagggtcttccaagtacccttattcctcaccaccaaatacacggcttcccactaaatgattgtcaggacggaagaggtggagccctcagtccttccctgcagtatcacctccgcctcctgcaaaagtgggggttacccttgcctggcctttaggaacttttgtgaggggagaggaggggtggcggcttgtcaccttccccgcctcttccggatggagggtgcagcagctacaagagagggagttgattgctgttgcgcctcacctcctgtgtaccagcatcttgtattaggaacatttctcctccctggggaccaaggaccacccctacaaagagttaacggttgggtgatactccctcaagccaaagaggagctccccgacctgttctaggaaacctagaaagggtgggagagaatacagagggccagacttgggggcagatctccactctggggctcaggtttctgggggacttaaatcctccctcctcaaggcctggatacagactaaatttgagtaagtcatgccaggggcctagtcaggagactaccttgcctgtgggaccagagcaacatagtggataacaggctagggagatatgggcacattccccctccacggaggggctggggaggggcagtttgcatgggaacccccacttcctccttgctgcccctttcccaggcttggctcccactcctggtctgtcccaatcccctcttctgtatcaggttatcggttgtacatataaattatactttcctttacaaaaaaaaaaa

SEQ ID NO: 4468 - DNA, 1444 bp, Cricetulus griseus
cggttctccattgcctgtctctttggactcatcgccgccactgtgccgcgcctagggctcggatcctgccgggaagatgtcagatgaattttcgttggcagatgcactgcctgaaccgtcctctgccaaaccgtctgctgtgagcaatgcaaaagctggccaaactactcaaggctggcccggctccaacccttggagtaacccaagtgctccacctgctatgccatctggactcccaccaagtggtgcagcacctatcactgtgcctttcggaccagcaccaacaggaatgtatccctctatgcctccaactggaccaccaccaggacccccagcaccctttcctccttctggaccatcatgtcccccacctagtggtccttatccagcccctactgtgccagttcctggccccacagggccatatgctacgccaaatatgccccttccagagctacctaggccgtatggtgcacccacagatccagctggtactttaggtccatggggatccatgtcttctggaccttgggcaccaggaattggggggcagcatcctaatatgccatatcgatctccagggccatatcccactgctcctcctccagtgtcaggagcaccgcctgttccatggggcactgtgccaccaggaccctggggaccaccagcaccatatcctggccctgcaggatcatatcccacgccaggaccccatcctactccgaataatccttaccaagtgccttcaggaccttctggtgctccaccaatgcctggtggcccccattaccattaagttgacagtggatgaagagatggcgcaatttctttttgaagtacatgtacatgcacatgaaggcatatataatacaaatggctattggtaaagggcgttcctgaaagaacaactttcgtacctcagagagctcctggcctgcttcatgtgtttggatatgtagagcatcatgtgggtacaatcagattatttttatcattttaagtctgtgtgtgtgtgtgtgtgtgtgtgtgtgtgtgtgtgtgtgtgtgtgtgtgtgtgtgtgtgtgtgtacgcacgcgctaagttaattcaaccattatacccattctttaaacccttgtgttttgtacttcccaactgataattgtgagttattgcatttattatttaatgtaagagtggaaatcaaagggatagcagaattttctgtgttattttttttttctcagaacatttctcctgttaccctcaaggtagagtgtttctgggttcaacctaaaatcaagaaaagcaaaaataaaataaaagatagcctaatgaggaaaagaatccagagttttctatttttgttttaacccaagaaaagaataatactgttttcagaacaagccttgctgggccaggactggtctactaaaaagacagcttgtcaataagtgtttagtc

SEQ ID NO: 4469 - DNA, 1444 bp, Cricetulus griseus
cgggcgcgcccccgctctgcgctgtctccgatggcgtccgcctccggggccatggcgaagcacgagcagatcctgatcctcgagccgccctccgacctcaaattcaaaggccccttcacagatgtagtcactacaaatcttaaattgcgaaatccatcggatagaaaagtgtgttttaaggtgaagaccacagcacctcgccggtactgtgtgaggcccaacagtggaattattgacccagggtcaactgtgactgtttcagtaatgctacagccatttgattatgatccaaatgaaaagagtaaacataagttcatggtacagacaatttttgctccaccaaatatttcagatatggaagctgtgtggaaagaagcaaaacctgatgaattaatggattctaaattgagatgtgtatttgaaatgccgaatgaaaatgataaaatgaatgatatggaacctagcaaagctgttccactgaatgcatccaaacaagacggacccctgccaaaaccgcatagtgtttctctcaatgatacggaaacaaggaagctgatggaagagtgtaagagacttcagggagaaatgatgaagctgtcagaagaaaaccgacacctgagagatgaaggcttaagacttagaaaggtagcgcattcggacaaaccgggatccacctcagctgcacccttcagggagagtgtcaccagtcctcttccttctcttctggttgtaatcgcagccattttcattggattctttctagggaaattcatcttgtagagtgaagcatgcagagtgctagttcttttttttttttctctcgaccagaaaaagatttgtttacctaccatttcattggtagtatggcccgcggtgaccatggcccgcggtgaccattttttgtgtgtacagcgtcatataggctttgcctttaatgatctcttacggttagaaaacacaatgaaacacactgttgggcccctggacaaattgtacattaccagatcatcactagcaggtgtcagttgcacattctgtcctttatgagattcataaataaagaattgttctttctttgtggttttaataagagttcaagaattgttcagtcttgtaaatgttattttaataatccctttaaattttatctgttgctgttacctcttgaaatatgatttatttagattgctaatctcactcattcaggaaatgccaagaggttttctgtggggaactggtgcctcttactgtgtaaattttctctttccctttgctaatatcatggcagaatttttcttatcccttgtgaggaggcagtttgttgactgagtttttcatccttacgatcctgtcccatggtatttaacataaaaaataaaactgttaacagattcttgctcggaaaaaaaaaaaaaaaaaaaaaaaaaaaaaaaaaaaaaaaaaa

SEQ ID NO: 4470 - DNA, 1444 bp, Cricetulus griseus
cacagggtatgggaccctggtacaagaaggaaggaatcaacccataaaatacaacaaagatggaagtgttgccattgccagcaagccacgagaggtgagggagtttaacggtcagcactttattttggaggaagcaatcacaggagattttgctttggtgaaagcttggaaagcagaccgggcaggaaacgtgattttcaggaaaagtgcaagaaacttcaatttgccaatgtgcaaagctgctggaaccacagtggtggaggttgaagaaattgtagacattggatcatttgccccagaagatatccacattccaaagatttatgtacatcgccttataaagggagaaaaatatgagaaaagaattgagcgtttatcactccgaaaggaaggagatggaaaagccaaatctggtaagcctggagaagatgtcagggagcggatcatcaagagggcggctctggagtttgaggatggcatgtatgctaatttgggtatagggatacctcttttggccagcaacttcatcagtccaaatatgactgttcatcttcaaagtgaaaatggagtcttgggtttgggtccataccctctaaaacacgaagctgatgctgacctcatcaatgcaggaaaggaaacagttactgttcttccaggagcctctttcttctccagcgatgaatcattcgcaatgattagagggggacatgtcaatctaacaatgttaggagcaatgcaagtttctaaatatggtgacctggccaactggatgatacctgggaaaatggtgaaaggaatgggaggagctatggatttagtatccagttccaaaaccaaagtggtggtcaccatggagcattctgccaagggaaatgcacacaaaatcatggagaaatgtacattaccactgacgggaaagcagtgtgtcaatcgcattattacagaaaagggtgtgtttgacgtggacaagaaaaatgggctgacactgattgagctctgggaaggcctgactgttgatgacataaagaagagcaccggctgtgactttgcagtttcaccaaaacttatgccaatgcagcagatttcaacttgaagtatggagtagacctttgtctcaggatgctaagattgcattttgaacacataggatttaattgaaagggtgtcagtaatcaaaactatgtatttaacaagaagtttcgactagttctcttctagtatttctggatttgtgtagccatagactgttctcttttcatatgaatttgtgattaggcagaatacttttttgatggctatatatcttttactttcctcttttttgagagatcctccttccctccacacttcttataggccaaataggataccccaaagaaggcaaacaggaatgtctctgcaccctaaagccaggctggacagcttggttgtctgcacagtaaaa

SEQ ID NO: 4471 - DNA, 1443 bp, Cricetulus griseus
ctggaaacaatgagcaacaagaaactaagacgagtaggtttatcacaagagctgtgtgaccgtttgagcagacatcagattgttaattgtcaggactttttaggtctttccccactggaacttatgaaagtgactggcctgagttatggaggtgtccaggagcttctgtatatggtcagcagggcctgtgccccacagatgcaaacagcctatgatataaagatgcggaggtctgctgaactctccccagcgttcctgtctactaccctttctgctttggacaaagccctgcatggtggtgtggcttgtggatcgctcacagagattacaggtccgccaggttgtgggaaaactcagttttgtataatgatgagtgttttagctacattgcccaccaacatgggaggattagaagggactgtcgtgtatattgacaccgagtctgcgtttactgctgaaagactggtcgagattgcagaatcccgttttccactctattttaacacagaagaaaaactgcttttgatgagcagtaaagttcatcttcaccgggaactcagctgtgaggcagttctgcaaaggcttgaatctttggaggaagagattatttccaaaggagttaagcttgtgattgttgactctattgcttctgtggtcagaaaggagttcgatcctcagcttcagggcaacatcaaagaaaggaacaagttcttggccaaacaagcatccttgctgaagtacctggctgaggaattttcactcccagttatcttgacgaatcaaattacgacccatctgagtggagccctcccttctcaagcagacctggtgtctccggctgatgatttgtccctgtctgaaggcacttctggatccagctgtgtggtagccgcactgggaaactcatggagtcactgtgtgaacacccggctgattctccagtaccttgactcagagagaaggcagattctcattgccaagtcacctctggctgccttcacctccttcatctataccatcaagggggaaggcctagttcttcaaggccaagaaaggccatagggatcctgtgacctttgtctagagctgatgggggtgtgatttgtgaaatgaaacaagaccaagccgggtgctgctgggaaaaggaccggaagccaatataatgaggattaattggttgattgctgttgagatggtaactgtgatttcagaccccagaagggaaggtgaagaagcctttgtccactctctagatgtggaggggtagggactttaccaccatgggatgtcaacagccataataataatttgcacttacatagcacctttcaaccaccccctggggagaggaggaggaggactaacaagatttgtaattacagaagggaacatttccgaataaagtattgtccagcaaataaaaagaataaggtgtgaaagaac

SEQ ID NO: 4472 - DNA, 1443 bp, Cricetulus griseus
  modified_base (466)..(466): a, c, t, g, unknown or other
  modified_base (493)..(493): a, c, t, g, unknown or other
ggaaccctcctccgaggtgccagagcagccacctgcccaggcgctccccgggagtacccccaagagagcttactacatctattctgggggcgagaagattccgctggtactgagccgacctctctcctccagcgtggccacctccagcacctctgcaggaagaccgtcaacggccacctggactcctatgagaaagtgacccagctgcctggacccattcgggagttcctggaccagtatgatgctcccctttaaagagcaaaggggtcagggggggcctgggtcggtcgcctctcctccgtcggcacatagcacaagcacaaaaatccagccccaatggtcggtagctcccagtgagccagggggcaggtaggcttcttcctcgggcccctcggcttggcgaagtgagtcaggtgggacctggaatgtgtctgagggggaggggagttggccacctgctttcccngccccagctccagcttctctctcaagnggagccagctggcctggtgggacaatagcattgacaagtggactctcctctcttcttcccttcctccacacccctctgcttcccgcccagcctaggtgaggagtggtggctcctggctctagggagagagaggcaaggggtgacccgaagagagccattctggtgccaggctcctcccttgggagggagacggatagggctggtcagttggccacctttcccaacaccggagggagacaggtgaacagatgagccatcttggagcccaggtttccttagagaagatgggggactcttttgtttctcctatgtcaggctaggagacttgccttaaatgccctctgtcccatggatagggattggcacatgaggagccaaacacagccaagaggcagaagagccgggggattcacccagtggctgaagggcaggggaagtgggtgcagggaggagaccctgacatgcaggagactcctgagtgatcactgggaagaaattggccagtcttaggcacttcttggtcaggggcgaggcaggaggtgatggagaaacattcatctatctgccattccacagtggccactcacaggaatgcagcagccatggaattacctggaactggtcttgttttggggaaaacaacaaaagttttgagtcagggatggggctggatggggcagctgtgtgttggggtggcttttttctctctgttttgaataatgtttacaatttgcctcaatcacttttataaagatcacctccagccctcccctttccccattcaggcctttgaggctgtttgaagatgcttgaaaaaaactcaaaaccaaatcccagttcaactcagactttgcacatatatttatatttatactcagaaaagaaacatttcggtaatttataataaagagcactattttttaatgaaaaaaaaaaaaaaaaaaaaaaaa

SEQ ID NO: 4473 - DNA, 1443 bp, Cricetulus griseus
gcttgttgaaggacctcagtgacaatgaaagtgagaatagtaatcttaaaaggaaggtacttgaaaaagaagcctatattggagaactttcatgtctgtttcaaaatgaaaaggaaagcgctttgaaagcaaaccggttttctcagtcagtcaaagtagtgcatgaccgtctgcacctccagattcagaaaagggaagcagagaatgataagttaaaagagcacatgaagggcttggaaacccaaatagccaagtggaacttgcaggtgaaaatgaataagcaggtggctgtagccatcaaagaagcaagcaggcagaaaactacagccctgaagaaagcatccaaagtttacagacaaaggctgaaacacttcacaggggacattgaacacctcactgcccagatccgagatcaggaaaccaagttgtctgaaactgtttcagcttccaatgcctggaaaagtcattatgagaaaatggtaatagagaaaagtgaactggaagttcagatcgaaacaatgcaaaagcaaattgttaatcttttggaagatttgaaaaaaatggaaactcatggaaaaaattcatgtgatgagatccttagaaaacttcactcacttgaagacgaaaacaaactgctaaacattgagaatgtgaaactaaagggtatgcttgacactttgaaggatgaagttgcttctgttgaaaatgagctcgtagaattacaagaagtagaaaaacgacagaaaactctcatcgacgtatataaaactcaggtacaaaaattgcaagaagcagctgaagtggtaaaaagcagatgtaaaaatttgctacatgaaaataacctaataataaaaaataaaaacaaaaagttagagaaggttgatggaaaccacagccttctaaccaagccttgtcttgaggaggagaatcatctcattcagttgaagtgtgaaaaccttaaagaaaagctagagcagatggatgctgagaataaagagctggagaagaagctggctgaccaagagaagtatctgaagcacagcgacctggagctgaaaaagaaggctgcagagtacacagtgctgtccaggcagctggaagccgcttttggaagaagggaggcaaaaggtttctgaagaagtagagaaaatgtcatctagagagagggctttgcaaattaaaatattagatctggaaactgagcttagaaagaaaaatgaagaacaaaaccaacttgttggcaaaatgaacagtaaagcccagcaccaggatattttgctgaaagaaatacagcacagtcttgagaagtcagagaaccaaaatgagagcattaagaactacttgcagtttcttcagatttcctatgtaacaatgtttagataaattgttgaatttattgaccactgattgttataccttatgatttatagcttagcagtgtta

SEQ ID NO: 4474 - DNA, 1443 bp, Cricetulus griseus
tttttttaatactaaattgaaagcccgattcaatattaatccacgggtcttgaactggacatcctaatgatgcaaatatgtaaccattaagctgatccgaggctggcaggctgccgctgatatggagaagcaccactcgtctacattgccatcccttactctgcaaggtcagctgttgagaagaggcaggttttcttcattggcctagattttgcggcagattagatcttttgagggttctcttcaccattttcccgcatcttctgtttgtcctgtctttttctctgtactcatggagagtgagttgatgttagtttctttctttgtgctttcgtagaaatcttggggataattagaattaagcctgttttacaacaggaaaaaccctgtcttaggaaacaatatctcatggaaagaaaactgtacaaattgaatgcttggccttcttagagatcatgccacctcttagagaccatgtcacctcatatctgtcacccttcctcttcctatcatagcgacagctttttactagctggcttctttctgtatttgctgacttatgtcatatttcttttcaaatgtgtttacaggtccgtgtaagcagtgttaggtccacaggcctttaaggcctttacaaatccaatcttctgtgtaaaaagcagggcctcagaaaacagtgatacttttagtgtccacacattttgcctttagggttaatggttggggttttggtttgttgttaatttttgttattttaaaaggtaaattgcacttttaaaaaattggttgatttaatatatttgtttttttttcccttacctgtacttagagaggaaatttgaacaagttggaaaacacattttgtttgtttgtttgtttggattctgagaaacacttgcagctcttcagtattcactcgtcttcctgctgtttcttgtacggggctgtggcccttttgcttgttttataggtcttttttttaaaaacaacacaacacaaaccgaacagtttcaaacctgaagattcccgcagtccgtgtaagcatgtttacctgtcggctcgctcgctttctgtgtctgttaaatgaatgtcatgtaaatgctaaaataagtcaacagtgtctcagaactgaataactgcagtgacttgatgctctaaatcaatgtaggatttactgctagatggtttttaacccttgaaattgtgattgtgacccatgagggggggacctttcagtgctaaagctgatcatgtgtgtagccagaaaggtacttttgtttttttattttttgttttattttttgtaaccactgtcttaacggcaaaataattatggtaaaatacaagtctcgtgtttattattccttaagaagaagtctgtgttatattaccactgaacacccaataaagcagaatgtggttgtttcaaaaaaaaaaaaaaaa

SEQ ID NO: 4475 - DNA, 1442 bp, Cricetulus griseus
  modified_base (316)..(316): a, c, t, g, unknown or other
ccctgtcaaagcaagagattggtctggactggccatcgaggagttcaagagaacactccttccgccaaagagtgacgatgactttgctgacttccactccagaaattttcatccacaagctccgacaaatccctgggagagaaagtggtggctttcagacacgccaaggaagactctgcctccgtgaagtctttagatctcccctcccatcggtggcagcagcgttggcaaggaggactctgaagatgcgctttctgttcagtttgacatgaaactggcggatgtgggaggcgatcttaagcatgtcatgtctganagctctttggatttaccaacagttagtggccagcatcctcctgccgcagcagcaggaagtgggtacttctccaccacctcagatcttctaaagagagagacttcatttggcagctctgagaacatcaccatgtcatctctctccaaaggaacggccttggcaagcgaggacactctccaggggactcccttcccagctttcgccagctttaaagacatgatgccccagaccactgagcagaaagagtacgaaagtggggactaccaggacttctcaaggaaggacctgcccacagtagaacgaagccaagagaccacatgtccaagcccagctttcagtgtcacttctcatgaaacccccaaagagtgtgcagacgactttggagaatttcggggataaagaaataagtcgatcctctccttctccagccctggagcagcctttcagagaccgttccaacactctgagtgagaagacagcgctgcccgtcatccgagacaagtacaaagacctgaccggtgaggtggaggaaaatgagagatacgcgtatgagtggcagagatgcctggggagcgccctggatgtcattaaaaaggcaaatgacaccttaaatggcattagcagcagtgctgtttgcacggaagttatccagtcagcccaaggcatggaatatcttctaggcgtcgtggaagtgtatcgagtaaccaggcgtgtggagctggggattaaagccactgctgtttgcagtgagaaactccaacagttgctgaaggacattgataaagtgtggaacaacctgattggcttcatgtcacttgccacactcacgccagacgaaaattcactggatttttcctcctgtatgttacggcctgggattaagaacgctcaggagctggcttgtggggtgtgtctcttaaatgtggactctaggagccggaaagaagagaagcctgcagcagaacagcctaaaaacgcattcaactcggaaacagacagcttcaagctggcctacggaggccaccagtaccacgccagctgtgccaacttctggatcaactgtgttgaacccaagcctcccggcctcctcctgccagatctgctctgaaagctgctcaatgaagct

SEQ ID NO: 4476 - DNA, 1442 bp, Cricetulus griseus
gctgccccagtgccgagcgggctatgggcgagccggaccccctgggctcggggcagctcgcgggcggccggagctggtgcttgcggcggctggggatggaccgggagtggttgcagctggaggctgcgagtgaggtgactataggacgaggatttggtgtcacctaccaactgatgtcaaaggtatgccctctgatgatttcccggaaccactgtgttttgaagcagaaccctgagggacagtggacaatcatggacaacaagagtctgaatggtgtttggctgaacagagagcgtctggcaccattacaggtttattgcatccaaaagggagaccatattcagcttggagtgccactggaaaataaggagaatgcggagtatgaatatgaagttatttgagccagtgaagttacttgggaaaggtgaagcagcaagtcagcccttgggatgtttgtgtcctaagttgacttgtcttgaggcaagtgacgaggccactgggactcatgcttgccctactcttccaaaggtcatcgaacgctaccctaagaagcagaaggcctcccacccctcagcgtctcagagcagccttgagctgtttaaggtgaacatgtccaggattctgaagctgaaaacccagatgcacgagaagcagatggctgtcctgagcgtgaggaggcagacccgaaaggggagctcgaagaagatcgtgaggatggagaaggagctgcaggatttacagtctcagctttattcggagcaggctcagcagcaagcccgagtggagcagctggagaagaccttccaggaagaggagcatcacctccagggtttggagaaagagcaaggagaagaggacctgaagcagcagctggtccaggctctgcaggagcatcgggctctaatggaagagctaaatcgcagcaagaaggactttgagaaaatcattcaagccaagaacaaagaattggagcagaccaaggaagaaaaggagaaggtgcaagctcagaaggaggaggttctcagccatgtgaacgacgtgctggagaatgagctgcagtgtatcatatgctccgagtacttcattgaggctgtcaccctgaactgcgcccacagtttctgctccttctgtatcagtgaatggatgaaacggaaactagagtgtcccatttgtcgaaaggatattgagtccaaaacccactccctggttctagacaattgcattaataagatggtggataatctgagctcagaagtgaaagaacaccggagtgtccttctcagggaacggaaagcaaagagactgtcatgaaggtcatgctccaaggacatgggagagactctagggggatggcaccttggagtggtctagaggattccctggattccctcaggccgctccggacatcatctgggaagccgtgtgctgccgcagagactgag

SEQ ID NO: 4477 - DNA, 1442 bp, Cricetulus griseus
gcggcggcggcagctggtttctctcccgtcggctccgtctccctggagctccgcactgcgcgtgcgccgacgccggcgctctggctctagaagcccctggtggctgccagagaggagtagctaggcagtccccggatatgaactctgttctgtcacacggactggcgcggtagttcccctgccgccgagagggcgtctcagaaacaatgctataataaacattcttctacctggaccttaatgcaaagcttttggcgttttcaagacaccaagatacaagatacatgctttggagtcgtaggaggaaaagccagtgtctctgtgttagccaagctttgtgaacttggagcagctctgctttttcatttttgtccaattctttgtgataactgaaaaggaaagaaacttgaacttcatgatttgactacattatcaggctatggaacactttaatcaataggagaattaacaaagtgaaaaacatgcatctcctggaggcacttttgacattcagttgtgacatttagccatgagtttggctttttttataggaacaaatattaaagtaacttgtagccagttgtggtggctttatacttgtaatttctgaattcaggaagctgaggtggagattgccataagttcaaggtctgcctaggctatgtaatgagttctaggtcagcttgagcttcagagtgaggtcctgctcaaaccaaagcaggggagtgggtgaaagtgcttgctctaatacctgggaagaggtgtattgtacaaaagtttgtaacatacagaaccactgtgtgattgaagtcttactaaaccaaaaagggaacatactgatatctcagaatcttacacctcgtattccctcatctttactgatcatcaatgataaatgcaaaatcaatttgagaaagtattcaatcaagtacagtcaatcagtgttttaaatgtcacagtaatacttctgtattcagaggtcatgtaaagcaacaatttgatgttttttaaacaacacatagtaactgtcacgaaagagatggtgcaagcccaggaacagacaacaatttgagcagctctccaaggaatgagaagggaaaacttaggttaacagcttactagagtaggggttcagcacctcccatcctcagtattctagaggacagcagactgctcccgagccccatggctgtgcagatgcctacctaacacagtccatgcagaagaccaggggtttcttcacaaattttgtgtatttggagagtttgttcagcatttattctttggaaataaaaatagtttatctaaaaaaaaaaaaaaaaaaaaaaaaaaaaaaaaaaaaaaaaaaaaaaaaaaaaaaaaaaaaaaaaaaaaaaaaaaaaaaaaaaaaaaaaaaaaaaaaaaaaaaaaaaaaaaaaaaaaaaaaaaaaaaaaaaaaaaaa

SEQ ID NO: 4478 - DNA, 1441 bp, Cricetulus griseus
acgggatccgggacacagcggagcccgcgggccccgcgttcatgcaccgcctgctggcctgggacgcagcatgcctcccgccgccgcccgccgcctttagacccatggaagtggccaacttctactacgagcccgactgcctggcctacggggccaaggcggcccgcgccgcgccgcgcgcccccgccgccgagccggccatcggcgagcacgagcgcgccatcggacttcagcccctacctggagccgctcgcgcccgccgcggacttcgccgcgcccgcgcccgcgcaccacgacttccttccgacctcttcgccgacgactacggcgccaagccggccaagaagccggccgactacagttacgtgagcctcgggcgcgcgggcgccaaggccgcgccgcccgcctgcttcccgccgccgctgcccgccgcgctcaaggcggagccgggcttcgaacccgcggactgcaagcgcgcggacgacgcgcccgccatggcggccggcttcccgttcgccctgcgcgcctacctgggctaccaggcgacgccgagcggcagcagcggcagcctgtccacgtcgtcgtcgtccagcccgcccggcacgccgagccccgccgacgccaaggccgcgcccgctgcctgcttcgcggggccgccggccgcgcccgccaaggccaaggccaagaaggcggtggacaagctgagcgacgagtacaagatgcggcgcgagcgcaacaacatcgcggtgcgcaagagccgcgacaaggccaagatgcgcaacttggagacgcagcacaaggtgctggagctgacggccgagaacgagcggctgcagaagaaggtggagcagctgtcgcgagagctcagcaccctgcggaacttgttcaagcagctgcccgagccgctgctggcctcggcgggtcactgctagcgcgccgggggtgccgtgggggcgccgcggccaccgcggccaccgtgggcaccgtgcgtcctgccccgcgcgcgcgcgcgcgcgcaccgagcgtgccccgcgcgcacctgcacctgcacctgcacctgcaccgaggggacaccgtgggggcaccgcgcgcacgcacctgcaccgcgcgcccgggttcaggacttgatgcaatccggatcaaacgtggctgagcgcgtgtggacacgggactgacgcaacacacgtgtaactgtctgtcagccgggccctgagtaatcacttaaagatgttcctgcggggttgttgctgttgatgtttttgtttttgttttttgttttgttttgtttttttttttggtcttattatttttttgtattatataaaaaagttctatttctatgagaaaagaggcgtatgtatattttgagaaccttttccgtttcgagcattaaagtgaagacattttaataaacttttttggagaatgtttaaaagccaaa

SEQ ID NO: 4479 - DNA, 1441 bp, Cricetulus griseus
aaaattcctgaagaatcacgtgattgaagacatcaaaggaaaatggggtcaggaggattttgaagacaaccggcacctctacagatttcctccttcctcaacccctgaagccatatccaaagaagcccctgtatcaaagagatgttattaaatttccagagtggaatgatcccccaccaggcacttcacaagagaatattccagtgaggccaattgtgatgaattctgagatgtggttcaagcgccatagcattgcaattggagaggtgcccgcttgccgtctcgtctaccgaagacagctgaccgaggccaatgtggaagagatctggaagtctacaacattatcacatttacagaaaatccttggcctggattccttagaagaagttttaaacgtcaaacttgtcaactccaagttcatcatccataatgtgtatagtgtcagcaagcagggagtcgtcgatcttggacgacaagtggtttgctacagaaagtagtaaaatggcaattgaagcattttcagatttgttgtctccttctgcctcctgaaaacaggagaaagttacagttgttgatgaggatgatggcaaggatctgcttaaacaaagagatgccaccgctgtgtgatggctttggcacccgcactctgatggttcagacgttttcccggtgcatcttgtgttcgaaggatgaagtagacttagatgagttgctagctgctcggttggtgacatttctgatggacaattaccaggagattctgaaagttcctctggccctgcagacctccatagaagagcgtgtggctcatctgcgaagagtccagataaaatatccaggagctgatatggatgtcacgttgtctgcgccttccttttgccgtcaaattagtcctgaggaatttgaataccaaagggcgtatggctctcaggagcccttggcagccttgctggaagaagtcatagcagatgccaaactctccaacaaggagaagaagaagaagctgaagcagtttcagaaatcttaccctgaagtctaccaggaacgatttcctaccccagaaagtgaagcacttctctttcctgaaaaacccaagcccaaaccgcagctgttcatgtgggcgctgaggaagcctttccaaccatttcagagaacaagaagtttccggatgtgatacagtgaccgagttttagagacctcagtggtagagacagttttgagtcagtcaaggttgaagaatgccaagtcataaactactgaaataatggagtttcagagaatcagtcaggtgatctgactcttaaaatgttgagccgttgtcagtatttttataaatctcaatgctgtttttagagatgtaagatgaaattacttcctttctgaatatattttctcagcttcttcatccttttgaaagtaaatggaatgtaaataaatactg

SEQ ID NO: 4480 - DNA, 1441 bp, Cricetulus griseus
ggtatttgaatcggcgacccggccgtggagtggggaagcagcgagatcctgagtctcccaacggcgccacggactcaggtggcagcgctgagtccgtacgtcccagcgcggccctcatggcgctgctccgacgcccgacggtgtccagtgatttgaagactattgacacaggagttaatcctaaagctaagagccatgtgactatccggcgggcagttttagaagaaattggaaataaagttagaaccagagcagctccagtggctaagaaacctcagaacaccaaaataccagttcagcccaccaaagtgacaaatgtcaacaaacagccaaaacctacagcctctgtgaaacctgtacaaatggagacactggctccaaaggatccttctcctgcccctgaggatgtctccatgaaggaagagaacctctgccaagctttctctgatgctttgctctgcaagattgaggatatagataacgaagactgggaaaaccctcagctctgcagtgactacgtgaaggacatctaccagtatctcaggcagcttgaggttttgcagtctatcaacccacacttcttagatggaagagatataaatggacgtatgcgtgccatcctggtggactggctggtccaagtccattccaagtttaggcttctgcaagaaactctgtacatgtgcattgccatcatggaccggttcctacaggctcagccggtctgccggaagaagttgcagctggttgggatcacggctctgctcttggcttccaaatacgaggagatgttttctccaaatatcgaagactttgtttatatcacagacaatgcttacaccagttcccaaatccgagaaatggagactctgattttgaaagagctgaaattcgagttgggccggcctttgccactccacttcttaaggcgagcctcaaaagctggggaggtggacgtggaacaacacactttagccaagtatctgatggagctgacactcatcgactatgacatggtgcattatcacccttctcaggttgcagctgccgcttcctgcctttctcagaaggtgctgggccagggcaaatggaatttaaagcagcagtattacaccggatacatggagagtgaagtactggaagtcatgcagcacatggccaagaacgtagtgaaagtcaatgaaaacctcactaagttcatcgctgtcaagaacaagtatgccagcagcagactcctcaagatcagcacgatccctcagctgaactccaaaaccatcaaagacctcgcctcccctctaatggacaggctctaggcagctgggctcccgtcgtgcacatctgattctgattttgtacatactctagtttacttcacaaaacctcttctcagaataattttataattgtttattgaggaaaaataaagctacagattttctta

SEQ ID NO: 4481 - DNA, 1441 bp, Cricetulus griseus
gcaaagtttgtggcgaagccgacgtcgggcagagcgcaccccaggggagatccaggatctcccgatgtcgggctgcgagagccgttgacccggggacgccgcggttccgggcagcagcgtggagcagccggccggcccgccgtctccggtgcgatggggaccggctgagaagccagcatgggcaactgcgtggggagacagcgccgggagaggccggctgctccgggacacccccgcaagcgagcaggacgaaatgagcccttgaagaaggagcggctcaagtggaaaagtgactaccccatgactgacgggcagttgcggagcaagcgagatgagttctgggacacagcgcctgcctttgagggccgcaaggagatctgggatgccctcaaggctgctgcctatgcggctgaagctaacgaccatgagctggctcaggccatcctggatggagccagcatcaccttgcctcatggaaccctctgtgaatgctatgatgagctgggcaatcgctaccaactgcccatctattgcctgtcaccacctgtgaacctgctgctggagcacacagaggaggagagcctggagccccctgagcccacccctagtgtgcgccgagaattcccactgaaagtgcgcctctccacaggcaaggacgtgaggctcagtgccagcctgcccgacacagtggggcagctcaagaggcagctgcacagccaggagggcatcgagccatcctggcagagatggttcttctctgggaagctgcttacagaccgcacacggctccaggaaaccaagattcaaaaagactttgtcatccaggtcatcatcaaccagcccccaccaccccaggactgacgccttccagtgctgttgtattcttcaggggtgcgtcctgccaccctgctgtatggctctcagtgaactatgaagggacttgccttccagggcactggatccaccagtgcctggcacccagggggcagtgctgcttgccagtcacacacgggccttgccagccttgttggagaaaaggcacctagcactctccaccacaggttggagccacgggggcaggcctgctgtgctcactccagttttctgctcagggttggaagcaattgctgtccccccccaccaccatccctcaccatgactctgccctgggcaaagtgccagtcccctggaggggagggaatcaccagtgagccccagggcttggagagcttgaggtgagcctccctgcctctccctgcacccagcacaatcagcagagatgaggcagggggccagatagccaggctttatggcaggggtctgcacagggccatccccaactgtaacccaggcagggtgggttctgtagcctggtcatggccccagtagggccctgtgtacagacacatctgtattttatcaataaagccttttgctcctc

SEQ ID NO: 4482 - DNA, 1441 bp, Cricetulus griseus
gtgtgtgttgcggggccgagcgtgtagcgtcaggacgacaccgggcgcaagccccgcccagctatcatagagtgcaaggataaagtcaaagttgctcaacccggaggccagtggactcagtccctggcaccagcaccatgcccatgacactgggttactgggacatccgtgggctggctcatgccattcgcttgctcctggaatacacagactcaagctatgaggagaagagatacaccatgggcgacgctcctgactatgacagaagccagtggctgagtgagaaattcaacctgggtctggattttcccaatctgccctacttactagatggatcaaacaagatcacccagagcaatgccatcctgcgctacattgcccgcaagcacaacctgtgtggagagacagaggaggaaaagattcgtgtggacattttggagaaccaggctatggatgtctccaatcagctggctagagtctgttacagcccagactttgagaaactgaaggcagagtacttggagcagctccctggaatgatgaagctcttctcacagttcctggggaagcagacatggtttgttggtgaaaagattacttttgtggatttccttgcttatgatatcctggacctgcaccttatattcgaacccaagtgtctggacacattcccaaacctgaaggattttgtggcccgctttgagggactgaagaagatctctgcctacatgaagagtagccgcttcctccgcacacctctgtatacaagggtggccacatggggcaataagtagggccttggcagggcaggaggtgagaatgaggaacctggggctctgggactgttgaacttcctgtagccctggcacttccttccatccccttcctgaccccagaatgtcatgggtcctcttttctttcacccagtccctaccctttcaagccctttaaagcctaggctcctagttttccttcagcaaagtgcctatctagcatgactgtcctgcagccacttgacagtcttgcctgtcaattgctgtgatatcaagaagagttgggactctcgttggataagcaggggtttgggacttcctgaccccatctgatagcctcacagcaggcagctgctgaaggctcaaagggagccctttgggacttgggatctcctgtattctagcattactgaggcttatcatacaggtctcgggtgaggacccaggctggtgggagtccccaggagtaagccagaatcctctatgcctccagttagtatggctgcattatatctgtgtgtctccaggatcctgtcctccatctctgatgcctttggagtatcctgtcctggtcaccagagatggggaccaccttggttaatcccttctctctgtgaggccctgtgaaataaatttcttcatgctttcaataaaaaaaaaaaaaaaaa

SEQ ID NO: 4483 - DNA, 1441 bp, Cricetulus griseus
cccgcggcgagtggggcggagcgagcgtgaggggcaagcgcgcggaagctccgcgactgagccctcgcctcctccggcgccggtccgcgtccgcggggccgctgctgagcgccgggagtcctggagccctgctgtactggatgctatgagttgctaaaagtgagcctggctttttagctaccttggggtgctgagagggagtcccagaaccatgccggatctcctactactgggcctgattgggggcctgactctgctgttgctgctgacgctgctggcctttgctgggtattcaggactgctgactggggtaacagtgagtgctggatcacccccaatccgtaacatcactgtggcctacaagttccatgtggggtcctatggtgacactggacagcttttcacggagagctgcagcatctctcccaagcttcgttccatcgctgtctactatgacaacccccatacggtgcctcctgagaagtgccggtgtgcagtaggcagcatcctgagtgagggagaggagtcaccctcacctgagctcattcacctctatcagaaattcggcttcaaggtcttctcctttccagcacccagccatgtggtgacagccaccttcccctacaccacccccatatccatctggctggctgcccgccgagtccaccctgctttggatacctatatcaaggagcggaagctgtgtgctcaccctcggctggagatctacctgcaagaccagatccatttcatgtgcccactggcacgacaaggagatttctacgtgccagaggtgaaggagacagagcggaaatcccgggggcttgcagaggccagtgatgcccagatggatggcacaggagctgacacaagtgacgccagttctgtaagcctggaggtgcgccctggcagccgggagacttcagccaccacactttctcctggggcaagcaaccgtggctgggatgatggtgataaccgcagcgagcacagctacagtgaatcgggtgccagtggctcatcttttgaggagctggacctggagggtgaggggcccttgggggaacctcaactgagccctgaagccaagcttctgggggctacccgggagctcagcacccctgagaggggtgaggagtaaccacaagccctcggccctcttgtggtgcgtttgctaagggactgagcaaactctctatccccctttttccttgacctgcccagcttggaccttggaccaggagtaacaggagcctgagttctcctaccccaagcctaaacatcctcactgcccttttggctcttagggccaaaggagccagagactgttatctgcaccaacctcttgggttgccaactttttgcagactcattggagcttccagaacccagaataaagcgaattacttttgtttcacctaggaaaaaaaaaaaaaaaaaa

SEQ ID NO: 4484 - DNA, 1440 bp, Cricetulus griseus
caggtgtcctctttgttcatgttttggagagagagtatttcaagggtgaatttccaccttacccaaagcctggtgaggttagtaatgatcccataacatttaacacaaatttaatgggttacccagacagacctggatggcttcgatacattcaaaggacaccatacagtgatggggttctgtatgggtctccgacagctgaaaatgtggggaaaccaaccatcatcgagataactgcttacaatagacgtacctttgagactgcaaggcataatttgataattaatataatgtcagcagaagaattcccgttgccatatcaagcagaattcttcatcaaaaatatgaatgtggaagagatattggccagtgaggttcttggagactttcttggggctgtaaaaaatgtgtggcaaccggagcgcctcaacgctataaacatcacgtcggccctagacaggggtggcagggtgccgcttcctattaatgacatgaaggagggcgtttatgtcatggttggtgccgatgttgcattttcttcttgtttacgagaagttgaaaatccacagaatcagttgagatgcagtcaagaaatggagcctgtgattacatgtgataaaaagtttcgaactcagttttacattgactggtgcaaaatttccctggttgataaaaccaagcaagtttccacctatcaggaagtggttcgtggtgaggggatcttgcccgatggtggggagtacaagcccccttctgagtctttgaaaagcagggactattacacggatttcctcgttaccctggctgtgccctcggcagtggcactggtgcttttcctaatcctggcttacatcatgtgttgccgacgggaaggagtggaaaagagaaacatgcaaaccccagatatccaacttgtccatcacagttctattcagaaatctaccaaggagcttcgagacatgtccaaaaacagagagattgcatggcccctgtctacactccccgtgtttcaccctgtgactggggaaatcatacctcccctgcacacagacaactatgacagcaccaacatgccgttgatgcagacacagcagaacttgccacaccagactcagattcctcaacagcagactacaggtaaatggtatccctgaagaaagaaagctgactgaagccatgagtttataatcatcaacacagcatttatgtctcatttcctctctcctccaataatgcatgagcttttctgacatcagttatgcatgttgactgtattaaatatataccaaatactacaacttatctttcatttactaatgtattttttttgtacttaaagcatttttgaaaatttataagacatcaatgactttatatttgttacaataaaaagtaaactttaaaataaatattaatgaagcctaaaaaaaaaaaaaaaaa

SEQ ID NO: 4485 - DNA, 1440 bp, Cricetulus griseus
tcggatgacagacttgacttccagcattcccaagcctctgcttccagttggaaacaaacctttaatttggtacccgctgaacctgcttgagcgtgttggatttgaagaagtcattgtgattacaaccaaagatgttcaaaaggcactttgcacagaattcaagatgaaaatgaaaccagatatcgtatgcattcctgaggaggctgacatgggaactgcagattctctacgccacatatatccaaaacttaagacagatgtgctggtcctgagctgcgatctgataacagatgttgctttacatgaggttgtggacctgttcagagcttatgatgcatcacttgccatgttaatgagaaaaggacaagatagtatagaaccagttccaggtcagaaggggaaaaaaaaaacagtggagcagcgtgacttcattggagtggacagcacaggaaaaaggctgctctttatggctaatgaagcagacttggatgaagagctggtcattaagggatccatcctgcagaagcaccctaggatacacttccatacaggcctcgttgatgcccatctctactgcttgaagaaatatgttgtggatttcttaatggaaaataggtcaataacttctatccgaagtgaactgattccatacctagtaagaaaacagttttcttccgcttcctcacagcagaggcaggaagacaaagaagaggatctaaagaaaaaggagctgaagtctttagatatttacagctttataaaaaatgacaacactctgaccttggctccttatgatgcctgctggaatgcctttcaaggagacaagtgggaagatttttctagatcacaggtgcgctgctatgtccacatcatgaaagagggactctgctctcgagtgagcacattgggactctacatggaagccaacaggcaggtacccaagttgctgtctgagctttgtccagaggagtcaataatccacccatcagcccagattgccaacagacacctggtcgaagttgacagccccattgggccagatacacaagttggagagaagtcgtctattaagggctcagtcattggctcatcctgtgtcatacaagatagagtgtctgttaccaattgccttctcatgaactctgtcatcgtggaagaaggaagcaaaatccagggcagcgtcatctgcaacaacgtggtgattgagaagggagcggacatcaaggactgtctaattggaagtggtcagaggattgaagccaaagctaagcgaatgaacgaggtaattgtgggaagtgaccaactcatggagatctgagtcctgaacaagcctgacccctcccttcctttgggcccaaaactgcagatgttggctggcccacctgtttgactctgtatttattttcaaattaaagaagaatttccaggctgtaaaaaaaa

SEQ ID NO: 4486 - DNA, 1440 bp, Cricetulus griseus
tcatcaacgtgcgcgaccggctcttccacgcgctcttcttcaagatggcggtcacctactcgcgcctgttcccgcctgccttccgccgcctctttgagttcttcgttctactcaaggccctgtttgtactcttcgtgctggcgtacatccacattgtcttctctcggtcgcccatcaactgcttggagcatgttagagaccgatggccacgggagggcgttctgcgggtggaggtgcgccacaactcgagccgggcgccagtggtcctgcagttctgtgatggtggccttagtggcctggagctggagccagggggcctggagctggaggaggaagagctgaccatggacatgttcaacaacagctccatcaagtttgagttggacattgaacccaaggtgttcaagccaccaggtggcacagatgccctgaacgacagccaggacttcccattccctgagacgccaacaaaagtatggccgcaggatgagtatatcgtggaatactcactggaatatggctttctgcggctgtcacaggccacgcgccagcgcctgagcatcccagtcatggtggtcaccctagatcccacacgggaccagtgcttcggggaccgctttagccgcctgttgctggacgagtttctgggctatgatgacatcctcatgtccagtgtgaagggcctggcagagaatgaggagaacaagggctttctgaggaatgtggtgtctggggagcactaccgctttgtcagcatgtggatggcacgcacatcttatctagccgcctttgtcatcatggtcatctttaccctcagtgtgtccatgctgctgcgctactcgcaccaccagatcttcgtcttcatcgtggacctgctacagatgctggagatgaacatggccatcgccttccccgcagcacccttgctgaccgtcatcttggccctcgtcggaatggaagccatcatgtctgagtttttcaatgacaccaccacggccttctacatcatcctcatcgtgtggctggctgaccagtatgatgccatctgctgccacaccaacaccagcaagcggcactggctgaggttcttctacttgtaccacttcgccttctacgcctaccactaccgcttcaacgggcagtacagcagcctggccctggtcacctcctggctcttcatccagcattccatgatctacttcttccaccactatgagttgccggccatcctgcagcagatccgcatccaggagatgctattgcagacacctcagctgggccccggaacccccacggcactgcctgacgacctcaacaacaactctggctcccctgccgcccccgatcctggccctccgctagccctgggccccagctccagcctcctcacccgcaggcggggcatctgggcctggctcgctgggtgctgccgcctcagta

SEQ ID NO: 4487 - DNA, 1439 bp, Cricetulus griseus
cggaagcgaggaaggtgctgtgtaatcagtgagaccgtgaggcgcttgcggccctcacaatgcccgactacttaggtgcggaccagcggaaaaccaaggaggacgagaaggacgacaagcccatccgagctctggatgagggggacatcgccttattgaaaacttatggtcagagtacttactctagacagatcaagcaggttgaggatgacattcaacaacttctcaaaaaaatcaatgagctcactggtattaaagagtctgacactggcctggccccaccagccctctgggacctggctgcagataaacagacacttcagagtgaacagccgctacaggttgcaaggtgtacgaagataatcaatgctgattcagaggaccccaaatacattatcaatgtgaagcagtttgccaagtttgtggtggatctcagcgatcaggtggcacctactgacattgaagaagggatgagagttggtgtggaccgaaataaataccaaattcacattccactacctccaaagattgacccaacagttaccatgatgcaggtggaagaaaaacctgatgtcacatacagtgatgttggtggctgtaaggagcagattgagaaattgagagaagtagttgaaacccctctactccatccagagagatttgttaaccttgggattgagcctccgaagggtgttctgctgtttggtccccctggcacaggcaagacactctgtgctagggcagttgctaacaggactgacgcttgcttcatccgagttattgggtctgagctcgtacagaaatacgtcggtgagggggctcgaatggttcgtgagctttttgaaatggccagaacaaaaaaagcctgccttattttctttgatgaaattgatgccattggaggggctcggtttgatgatggtgctgggggtgacaatgaggtgcagagaaccatgttggaactgatcaatcagctggatggttttgatcctcgaggcaacatcaaagttctgatggcgactaaccgacctgacactttggatccagcactgatgaggccagggagattggacagaaagattgagtttagcttacccgatttagagggtcggactcacatctttaagattcatgcgcgctcaatgagtgttgaaagagacattaggtttgaactgctggcccgactgtgtccaaacagtactggggcggaaattagaagtgtctgtacagaagctggtatgtttgccatccgagcacggcgaaaaattgctacagagaaggacttcttggaagctgtaaataaggtcatcaagtcctacgccaaattcagtgctactccccgctacatgacgtacaattgagccccagaggctttgagtgagaacttcctgctcttgggtaacttgttcccccaccttacaaaaataaaggtttaaaaa

SEQ ID NO: 4488 - DNA, 1439 bp, Cricetulus griseus
  modified_base (435)..(435): a, c, t, g, unknown or other
ggaacataccgtttttgctgctgtagtacagatttatgtaatgtcaactttactgagaattttccacctcctgatacaacaccactcagtccacctcattcatttaatcgagatgagacaataatcattgctttggcatcagtctctgtattagctgttttgatagtcgccttatgttttggatacagaatgttgacaggagaaccgaaaacaaggccttcacagtatgaacatgatggaagcagcggcgtcagagccttctctggacttggataatctgaagctgctggagctgattggacggggtcgatatggagcagtatataaaggttccttggatgagcgtccagttgctgtaaaagtattttcttttgcaaaccgtcagaattttataaatgaaaaaacatttatagagtgcctttgatggaacatganaacattgctcgatttatagttgagatgagagactcacagcagatggtcgcatggagtatttgcttgtcatggagtattatcccaatggatcttgaagactccatacatcacactgacagcattgtgaagaatatatcctctgagcactcaatgtccagcacacctttgactataggagaaaagaaccggaattcaattaattatgaacgacagcaagcacaagctcgaatctccagccctgaaacaagtgtcaccagcctgtccacaaacacaaccaccacaaacaccactggcctcactccaagtaccggcatgaccactatatctgaggtgccgtacccagatgagacaaatttgcatgccacaaatgttgcacagtcaatggggccaacccctgtctgcttacagctgacagaagaagacttggagactaataagctagacccaaaagaagttgataagaacctcaaggagagctctgacgagaacctcatggaacactctcttaagcagttcagtgggccagacccattgagcagtaccagttctagcttgctttatcagtgccatctggtcaggcagctaacctagtgtcacatagggctcaagacatgctgcaaaaccaatttattggtgaggatacccgactgaatatcaattccagtcctgatgagcatgaacctttactgagacgagagcaacaagctggccatgatgaaggggttctggatcgtttggtagacaggagggaacggcctctagaaggtggtcgaactaattccaataacaataacagcaatccatgttcagaacaagatgtacttacacagggtgttacaagcacagttgcagatcctgggccaacaaagcccagaagagcacagaggcccaattctctggatctttcagccacaaatatcctggatggcagcagtatacagataggtgaatcaacacaagatggcaaatccggatcaggtgaaaagatcaagagacgtgtgaaa

SEQ ID NO: 4489 - DNA, 1439 bp, Cricetulus griseus
caatgaagatgtggcatgccgagctctatgtgaagggccacagagatttgaggaatatgagtacttagggtataaaggcggtctttatgaggcaatcgcagatcactacatgcaggtgctggtctgtcagcatgagtgtgtgagggaacttgccacccgcccaggccgcctctcaccaattgagaactttcttcccttgcattacgactacctacagtttgcatactacagagttggtgaatatgtgaaagccttggagtgtgccaaagcctacctgatgttccatccagatgatgaggatgtcctggacaatgtagactactatgaaagcctgctagacgacagcattgacccagaatccattgaagcccgagaggatttaacagcatttgtcaaacgtcataaccttgaatctgaactgataaagtcagctgcagagggtctgggatttttatattcagaaccgaattactggatcagttacggagaacggcaggatgagaaccgggtccctttaggagtgaacacggagggagcagaagttcatggactgtcaatggggaaaaagtccctgcccaagataggtcgagacctaagagaaggtggccctctactctatgagaacatcaccttcgtctacaactcagaacaactgaacgggactcagcgggttctcctagacaacgtcctatcggaagagcagtgccgggagctacacagtgtggccagtggaatcatgctggttggtgatggataccgagggaaaacatcgccccatacacccaatgaaaagtttgaaggagcaactgtcttgaaagcactaaaatttggctatgaaggccgagtgccactaaagagtgcacgcttgttctatgacatcagcgagaaagctcggaagattgtggaatcctatttcatgctgaactcaaccctgtatttttcctatacacacatggtctgcagaacagccctgtctgggcagcaggatagaagaaacgacctcagtcatcccattcatgcagacaactgcctgttggatcccgaagctaatgaatgctggaaggagcctcctgcttacactttccgggactatagtgcactcctgtatatgaatgacgactttgaaggaggagagttcatcttcactgaaatagacgctaaaactgtgaccgcctccattaaaccaaagtgtgggcggatgatcagcttctcatctggtggcgagaaccctcatggggtgaaggcggtcaccagaggccagcgctgtgctgtggcactgtggttcaccctagatcctctttacagagaagtggagcggatacaggctgatgaagtgattgccatcttggatcaagagcagcatgggaagcatggactgaatattaaccccagagatgagctataggaaagagagtgatctatggagtatttatttaaat

SEQ ID NO: 4490 - DNA, 1439 bp, Cricetulus griseus
ttcattaagaaagactaaggaacaagaagcagagcctgaggaacaggaggaagattcatccagtgaccccgacttcggcgtttacagaatcgcattagtgaagatgtggaagagagattggctcgacaccgaaaaatagtagaacctgaagtggtaggagaaagtgattcagaagtagaaggagatgcctggcgcatggaacgagaagatagcagcgaagaagaagaggaagaaattgatgatgaggaaatagagcggcgccgtggcatgatgcgtcagcgagcacaggagaggaaaaatgaagagatggaagtcatggaattagaagatgaagggcgctctggggaggagtcggagtcagagtctgaatatgaggagtacacagacagtgaagatgaaatggagcctcgacttaagcctgtcttcattagaaagaaggaccgagtgacagttcaagaacgagaagctgaagcattgaaacaaaaggaactggagcaggaagcaaaacgtatggctgaggagcggcgcaagtacacactaaagattgtagaagaagagaccaagaaagagctggaggagaacaagcggtctcttgctgcactggatgcgctcaatacagatgatgaaaatgatgaggaggaatacgaggcctggaaagtcagagagctcaaaagaatcaagagggacagagaagaccgagaagcgcttgaaaaggagaaagcagagattgaacgcatgcgaaacctgactgaggaggaaaggcgagctgaacttcgggcgaatggcaaagtcattaccaacaaagccgttaaggggaaatacaagtttttacaaaagtattatcaccggggtgccttcttcatggatgaggatgaagaggtctacaagagagattttagtgcacctactcttgaggaccatttcaacaaaaccattcttccaaaagtcatgcaggtcaagaattttggacggtctggtcgtaccaagtacacccaccttgtagatcaagatacaacttcctttgactctgcatggggccaagagagtgcccagaacacaaagttctttaaacaaaaggcagctggggtacgtgatgtatttgagcgaccatctgccaagaagaggaaaaccacctaggtttcaactacttattccaactctgggacacaaggacatctggtcctcagttttctttacccattatttacatagttcttgtatagagccttctggacttcctgccataatgtgtgtttgaaggtgctttgtgagaagtttggaatcatcctgagaaacccacagaaaagcactagccaggtagggttagaggcttccactttaaaacagtttctgagaaatcttaggtttctctaccatggcttcccatattgacttgggactattctgagttttggttttgttttgtttttgagacaggg

SEQ ID NO: 4491 - DNA, 1439 bp, Cricetulus griseus
cggcggggacccggcaccgggcgcggccggcggcagcgaccatgatcgctttgtttaacaagctgctggactggttcaaggccctgttctggaaggaggaaatggagctcacgctggtggggctgcagtactcgggcaagaccaccttcgtcaacgtgatcgcgtcaggacagttcaatgaggacatgatccccactgtgggtttcaacatgcgcaaaatcaccaaagggaatgtgaccatcaagctctgggacattgggggacagccccgtttccgcagcatgtgggagcgctactgcagaggagtgagcgccatcgtgtatatggtggatgctgcggaccaggagaagattgaggcctccaagaatgagctccacaacctactagacaagccccagctgcaaggcatcccggtcttagtcctcggtaacaagcgagacctcgcaggagcgctagatgagaaggagctgattgaaaaaatgaatctgtctgctatccaggaccgagagatctgctgctactccatttcctgcaaggagaaggacaacatagacatcaccctacagtggcttattcaacactcaaagtctcggagaagctgagattgtggctcttctccttcggaccagggaccacagtcacccaacctgaagccgagctccccgcccactctgttgtcccccctaaacccacttctcctcacccagtgtggggagggccctctggggctcctagagtcccgttctgctgaggtttgaactcctgtttttattgtaaaataaacttccccccatcaggtcccctaacctctctctcttcctttctctctttgttccttcacttagcccccgctgccctcccctcttgacagccctggccccgcaacccctgtcctcactttctgtcccttccctctgccccccttttcaacaccctgttattgtcctgtgtgtacagtatatatatgtatatatattttaatttttaatttaagcaaagacttaagatcaaccatttgatgctgcaggggccaatcaggacctgggaggggcaaactggaaaggatgggaagagatacagggaccaggcctaagtgggaggaagccagtggtgtctatgccaccccagcgaccccatcctcactattcctggccccagctcctgcctctacccagggcccccacctccatggcccatttcattttctgttctcatttcacagagttgtacaaggagagaactcagcatggggggttggttctttggattttgtttgtttgtttatttgtttaatttaatgatttgtaaagtgatgttcctcttcctttttacacttttcagctcatatttaacctctgtttggaaaatgattcttgtaactgtacatttttttttttgcctcctaataatgacaacaataaattaccaattttgtgttg

SEQ ID NO: 4492 - DNA, 1438 bp, Cricetulus griseus
ggcgctggcggttggggttgctcgcaggaggcaggtaactatgaagggcttgtattttcaacagagctctacaaatgaagaaataacattcctatttcaagaaagggagagtctccctgttacagaggataacttcgtgaaacttcaagttaaagcttgtgctctgagccagataaacacaaagcttctggcagaaatgaagatggaaaaagatttcttccctgttggaagagaagttgctggaattgtgttagatgttggcagtaaggtatcattctttcaaccagatgatgaagtagtgggaattttgcctttggattcagaagaccctgggctctgtgaagttattcaagtacatgagcattacctggttcataaaccagaaaaggtttcgtggacggcagctgctggagccattcgggatggtgtgcgagcctgcacagctctgtattatctttctcacctctctcccggaaagtctgtgctgatcatggatggagcaagtgcatttggcacaatagccattcagttagcacaccatagaggagccaaggtgatttcaacagcatgcagcctggaagacaagcaacatcttgaaaggattaggccttctatagcccgcgtgattgacatctctagtgggaaagtccatgttgctgaaagctgtttggaggaaacaggtggcctgggagtagatattgtcatagacgcaggagtgagattatatagtaaagatgacgagccggctgtaaaatcacagctaccacataagcatgacatcatcacacttcttggtgttggaggccattgggtaacaacagaagaaaaccttcagttggaccctccagatagccactgccttttcctcaagggggcaacggtggctttccttaatgatgaagtttggaatttgtcaaatgcacaacagggaaaatacctttgcatcttaagagacgtgatggagaagttatcggctggtattttcagaccgctacttgatgagcccattccactgtatgaagcaaaagcttccatggaagttgttcagaaaaatcaagaaagaaaaaagcaagttgttcaattttaattttctttcccagacctcagttggacgcactcatgccagtatatgaagccagttttctttggaaactgttaagaaaaatcaaggaagatgaaacaagttttttctatttttaagcctgttttcctgccataataagacatttggttatttgacatatttgagaaattcttgcaaaattaatgtgcaaacaatccagattattttttaacatcttgaaggggatattccaaaaacctctttttgttattgtatctatacatttgcctctgctatattctttccataaagaaaactgctttcagcaaaagccatgctgtcatatgacagcatccgtcacaagcttttgctata

SEQ ID NO: 4493 - DNA, 1438 bp, Cricetulus griseus
gaacgaaagagtccttatgttgccgtgtgctgtatagtgatggccttcagcatcctcttcatacagtagctttggaaactactagctgttattgccatcagactctgtaaacaaggacatgtctccaaaaaataatgggaagaatggttaacccttttatctctgaacatggaatgagataaatttcaagatgctattctctattttttatgctattggaccaatgagctgtacaaataattacgatgtaacagtttaatacacaggaatgtgaatgtaacagtcgacctcagttctgtcactccagtattatactatacaaatgtcattctgttgtgtcgggactgcttttcctaaggttcctgagggcatgaaatagaacacacggtaggcgaattccacaggctcctttcactagagtttgaaaacattgtcttcacaggatgagacattctagtgactggcctatttttgagaaaaattgttctatatttgttgttgttactgttcttatgaattgcattcatatttaaaccattttgattgctaaccagagtacgaaattaccttaaatgtttccattcaagatgtttcctgcgcgggttagtaagaatgtgtaatttataataaagtcctttaccttcataataaaattagtctcatattataggatgactacatattttcatgaattaacttttccatgtttacaaaatctaacaaatctttgcctccatttgtgatcaatatttaatacttataaataatataaaattcaggaaacatttacacatttgaaaatggtgtgtgaccattgaaataaaaaatatttagtactttctctttattcataatgtatatgaaagataagattaatgtatatggagtagaatgtgcacttgttattgagataatcccaagattctagaagaaaatgaagagtgatgattcattgagggtagaacttatagaagagcatgcaataagctgaacttggcagtgttttataaaggtagacagatgttacatcctggagagtcatgtattttacctacctcgaaactgaagttgagtgtttcccctcctgcctcacaaatcctgtaggaggataataaagtttcccttggtttatgaaaaaaaaggttgacaatggaatgcaatagtggattctccttagatttctctaaacattgtaatggcaactagccagtcaagacagtgtttccagaaacttgtaaaatcccatattccatctgctaaaagcagtccctgctgttgaggcaaacacatactagaagtgcactgtttacatttcctggatgcacagaaaatatttgcaagttatcaaagaacttaaagggtcaacaaaagtcctttgggacgctatttcatccttacaatctagaaaaaaaaagaaaaaaaaactcagaggctttga

SEQ ID NO: 4494 - DNA, 1437 bp, Cricetulus griseus
ttccacaagatggcagcgtctgatgacgggttgctgctgccgcggctgccggagctcttcgaaaccagcaagaaacttctggaggaagtggaagaaacgactgaacccaccggctccgggacagtccaggataaggtgtccaaaggactggatctccttgagaaggctgctggaatgttatcggaacttgatttgttcagccgaaatgaagatttagaagagattgcttccaccgacctgaagtacttgatggtgccagcgttgcaaggagctctcaccatgaaacaagtcaaccccagcaagcgtctagatcatttgcagcaggctcgagaacacttcataaatttcttaactcagtgtcattgctatcatgtggctgagtttcagctaccccaaagcaagaataactcagctgaaaataacactgctagctcttccatggcctatccaaatctcgttgctatggcatcgcaaagacaggctaaaatagagaggtacaagcagaagaaggagttggagcataggttgtctgcactgaaatctgctgtggaaagtggtcaagcagatgatgaacgtgttcgtgaatattacctccttcaacttcggaggtggattggtatctgcttagaagagattgagagcattgaccaggaaatacagatcctgaaagaaaaagactctccaagagaggaatcaacttctcgctcatctcttccagagaagcctccaatgaaacccttcatactcactcggaacaaggcccaagccaacgtatttggagctggttatccaagcctggcaactatgacagtgagtgactggtatgaacagcatcagaaatatggagcattaccagatcgtggaatagccaagccgccatcagctgatttcaaaagagcatcacagcagcaggaagatgaagaacaaaacgatgacgagggtgaagagaaaactctgcacagactgcgagagtgggatgactggaaggacacccatcccaggggctatggcaaccgacagaacatgggctaatcttcctgaagggcgaaagaataacgtgatgcacaccaaggacaacctcagcagggtgcagtgaaggcagcagacagagtcttgctttgcattcaatagtgtcaaataattgctgtaccctaggtaatgaccagaggttttgtttgacttcattaattctcttcatcatgtattctgatttcttaggtagaaaagagctctcagaaatggctctatataacctatgacagtatgaattcattctcttaaaaagtaataaaaccccctctattatgtgtgcctgtgcacaaatgtgggtatcagctggttttgttgtttgtgggggagcagtagggtttggttgtgggtctttgaatgtctggaaatccttgtcatatgccttcatggtgagcaacaattgcccag

SEQ ID NO: 4495 - DNA, 1437 bp, Cricetulus griseus
  modified_base (1429)..(1429): a, c, t, g, unknown or other
ggttgtcacccgtggctaggcagtggattgccatgaagcgggcagcgatgcggctttgtaccttgaacaggggcttttattcatggcagaggactgactcaaggataccagtacacccaaacaaggacccttacacatgcgtgaagttcgggataagttacgggagatagtaggagtatccacaaactggagagaccatgtaaaagcaatggaggaaaggaagttacttcataactttttggctaaatcacagaaagccctaccacccaggaaaatgaaggacagttacattgaagttctcctacctttgggtagtgatcctggactacgagataaatatttgactgttcaaaacacagtaagattcggcaggattctggaggaccttgacagcttaggagttcttgtttgctacatgcacaacagaaatcattctgttacgatgtctcctttatcaatagtgacagccctagtggacaagattgatatgtgtaaacagagcttaagccctgagcaggacattaagttcactggccatgttagctgggttggaaagacatccatggaagtgaagatgaaaatgttccagctgcacaaggatgatgcattttggcctgtattggatgcaacctttgtaatggtggctcgggattctgaaaacaaagggccggcatttgtaaatccactcatccctgaaaatgcagaagaagaagagctctttaaacaaggagaactgaacaagggacgaagaattgcctttagctccacttcattactgaaaatggctcccagtcctgaggagaggaataccatccatgagatgtttcttagcacactggatccaaagactataagttttcacagtcgaattttgcctcctaactcagtgtggatggaagatacaaaactcaagagcttggatatttgtcatcctcaggagcggaacattttcaatcgaatatttggtggttttcttatgagaaaagcatatgaacttgcatgggctactgcttgtagctttggtggttcccggccatttgtggtaacagtagatgatataatgtttcagaaacccgttgaagttggctcattgctctttctttcttcacaggtttgctttactcagaacaattacattcaagtcagagtacatagtgaagtggcctctcttgggagtaatgagcatatgaccaccaacgtctttcatttcacattcatgtcagaaagagaagtacccttggttttccccaaaacatacggagagtccatgttgtatttagatggcaagcggcatttcaagtccatgagtgccccagtgaccttgaaaaggactactccgtggagccctaggaaatctcacttgttgcaagctagtactcctgcatagaggcatagtgcctagtaaagaattttaagtaaataaaaaaanaaaaaaaa

SEQ ID NO: 4496 - DNA, 1437 bp, Cricetulus griseus
atcgagaagcagctgcagaaggacaagcaggtctaccgggccacgcaccgcctgctgctgctgggtgctggagagtctggcaaaagcaccattgtgaagcagatgaggattctgcatgtaaatggttttaacggagacgagaaggccaccaaggtgcaggacatcaaaaacaacctgaaggaggccattgaaaccatcgtggccgccatgagcaacctggtgccccctgtggagctggccaaccctgagaatcagttccgcgtggactacattctgagcgtgatgaacgtgcccaactttgacttcccacctgaattctatgagcatgccaaggctctgtgggaggacgagggagtgcgtgcctgctatgagcgctccaatgagtaccagctgattgactgtgcccagtacttcctggacaagattgacgtgatcaagcaggccgactacgtgccaagcgaccaggacctgcttcgctgccgcgtcctgacctctggaatctttgagaccaagttccaggtggacaaagtcaacttccacatgttcgatgtgggcggccagcgcgatgagcgccgcaagtggattcaatgcttcaatgatgtgactgccatcatcttcgtggtggccagcagcagctacaacatggtcattcgggaggacaaccagaccaaccgcctgcaggaggccctgaacctcttcaagagcatctggaacaacagatggctgcgcaccatctctgtgatcctgttcctcaacaagcaggacctgcttgctgagaaagtcctcgctgggaaatcgaagattgaggactactttccagagttcgctcgctacaccactcctgaggatgcgactcccgagcccggagaggacccacgcgtgacccgggccaagtacttcattcgagatgagtttctgagaatcagcactgccagcggagacgggcgccactactgctaccctcactttacctgtgccgtggacactgagaacatccgccgcgtcttcaacgactgccgtgacatcatccagcgcatgcacctccgccaatacgagctgctctaagaagggaacacccaaatttaattcagccttaagcacaattaattaagagtgaaacgcaattgaaaagcagttgatcacccaccatagggcatgattaacaacgcaaccttcccttttttccccagtgattctgaaaaacccctcttcccttcagcttgctttgatgttccaaatttagtaagcttaaggcggcctacagaagaaaaagaaaaaaataggccacaaaagttccctctcactttcagtaagtaaaataaaagcagcaacaaacagaaataaataaaacaaataaaattcaaaatgaatattgtgttgtgcagcattaaaaaatcaaaataaaaattaaatgtgagcaaaaaaaaaaaaaaaaaa

SEQ ID NO: 4497 - DNA, 1437 bp, Cricetulus griseus
catgccgctggaactggagctgtgtcccgggcgctgggtgggagggcagcatccgtgcttcatcatcgcggagatcggccagaaccaccagggcgacctggacatagccaagcgcatgatccgcactgccaaggagtgtggggctgactgtgctaagtttcagaagagtgagttggagttcaagtttaaccggaaggccctggagagaccatatacttcgaagcattcatgggggacgacatacggcgagcataagcggcatctagaattcagccacgcccagtacaaggagctgcagcgctatgcgcaggagattggcatcttcttcactgcctctggcatggatgagatggcagttgagtttctgcatgaactgaatgtcccgtttttcaaagttggatctggtgacactaacaattttccttatctggagaagacagccaagaaaggtcggcctatggtgatctccagtgggatgcagtcgatggacaccatgaagcaagtataccagatcgtgaagcccctcaaccccaacttctgcttcctccagtgcaccagtgcctacccactgcagccggaggatgccaacctgcgcgtcatctcggaataccagaaactctttcccgacattcccatagggtattctgggcatgagacaggcattgccatatctgtggctgcagtggctctgggggccaaggtgttggaacgtcacataactttggacaaaacctggaaggggagtgaccactcagcctcgctggagcctggagaactggcagagctggtgcggtctgtgcgcctggtagagcgggcattgggatctccaacaaagcagctgctgccctgtgagatggcctgcaacgagaagctgggcaagtctgtggtggccaaagtgagaatccccgaaggcaccgtcctgaccctggacatgctcactgtgaaggtgggggagcctaaaggctatcctcctgaagacatcttcaacttagtgggcaagaagatgctagtcactgttgaagaagatgacacaatcctggaagactctgtggaaaatcacagcaagaaaatcaaatcttaaaataaagtgccactccctggcttctcagccaccctgctactactgtccagtgtattgggtgcacaccctgtcacagtggccacctgtgtccagcccattggaaaggaagagccaatgaagccattctactttgaggtgtccagccagagaaggtggcccagagcaaatgtagctccttcagggtttctgtgtagctctgttgtcaccttaatccttcatgttcctacctacagagcaactccaggttgttcgacttctttaagctgtgtcgaactttttatagaggttcattgtccacatttcacttttgttctttggaatcaatgctgagattaatcattttgttcttttcaagt

SEQ ID NO: 4498 - DNA, 1437 bp, Cricetulus griseus
caagcatgcaggtgacctgccccagcatctccaagtgatgatcaaccttctacgctgtgaagacagaatcaagctggctgtacgactagagagcgtctggaccgaccgtgtccgctatatggtcgtggtgtacaccagcgggcgccaggacaccgaggagaacattttgttaggagttgacttttccagtaaggagagcaaaagctgcaccatcgggatggttcttcgtctgtggagtgacacgaagatccaccttgacggggatggtggcttcagtgtgagcacagcaggcaggatgcacatcttcaagcccgtgtctgtccaggccatgtggtctgccctgcaagtgcttcacaaggcctgtgaagtggcacggaggcacaactacttccctgggggagtggcgctcatctgggccacctactatgagagctggtccagccaacaaccccgcatccctactgccagcaggctcaaggaagccagacgtcggtggctctggagctggggctcacccagaaccgccagcaagccttctagagccttccagagaaacctccaaagtccctccaaagtcactcctgttgaagaattctcactgtgataagaacgccaccagtatggaagtggtgaaggaagaattgtcagctaagagagatccgaagccagctaaggacctgaggcttctgttcagtaatgaggccgagaagccgaccaccaacagctacctgatgcaacatcaggagtccatcattcagctacagaaggcaggcctggtccggaagcacaccaaagagctggagaggttgaagagcctgccttcagacccaccgtctacctgcagggacagtgccaccagcaggctggaggctagcatccctgaggagggccaggagcctgaacactcagccctgagcaaccaagcagggattgaagagaaacctccagaaggagctttggtgaagagccctactcctaccctcctccgcctggatcacaccagtagcttctcgaaagacttcctgaagacggtgtgcctacacccccacctcctcctccatgagttccaacctgacccggagctccagcagtgacagcatccacagtgtccgagggaagccagggctggtgaagcagcgggcgcaggagatcgagacgagactccggctggcgggcctcactgtgtcctccccactgaagcgttcccactccctcgccaaactgggaagtctcaacttatccaccgaggacctgtccagtgaggctgacacgtccaccattgctgactcacaggacgccaagtgtggtcactcttccttgttgcacgaaccccaggccaccccgagggaccccgttacagcctgtaaaccctcagggaaatcggtcccagaaaacttgaaaagcctgtcagggttaagtaaaagctgaccagcgttc

SEQ ID NO: 4499 - DNA, 1436 bp, Cricetulus griseus
ggaaacggacagagacagtgaactacagaaaatagcaaatagtgccatggataaagcacagagagacccatattcaggaaatgccttcctgcctggtgagagctccagtgatgatgaaactcccttagcagaactgtccaaggaggaactttgtaccaaaatcaaaaacctgaaagagaaactaaccaacatccgaaaggagaacagccggcttcgacagtctttggtcatgctacaagtgttaccacaggcagtcacccagtttgaagaactggttggaatggcagagaccctgcttaagggtggaggagccgtgtccacacctgcgtctactctctggagagcaacgaacaactcctccccagactcctttgcctctctgtgcagtaattccaactctagctccagctccccaagttccctgaaggctgaggaagagcagcctcctggtgagaagcagttcaagattgaaaaatggcagattgcccgttgtaataagagcaagcctcagaaatttattaatgatttaatgcaagtgctttacacaaatgaatacatggccacacacagtctgactggggcaaaatcctctacttcaagagacaaagttgtaaaaccagctatgaatcagaatgaagttcaagaaatcataggaataaccaaacaagtatttcccagctcggatgatatttcaatcagaaggatgataggacaaaaactgaataactgcaccaagaagccaaatgtgagcaaaactcttcactctcaggatcagagaatgtctgtcaaacaagcatgcaacatgatttctttggaaatatgcatttctcacagccccaaatacttccctgtacaaccaacttaagataatataagcccttatcatagcaacaaaaacatctaccctccaaatcacctaaagtgcacgtaggacatattacatcgtgtttgatcagctgtgatgctaaactgcttaattttaacatgtttatttccactgtaacagaaggaaaataaattttaaaaatgctgtttaataatggcacagaaaaaagtcattttgtaaatcaacaaaagataaaatattcttcaaagacttttcacttgatggcagatcacctgattactttgcaatgtgaagctgagatctgcctgcctctgccttccaaatgctgggattgaaggtgtgtgccaccatgtctggcaaaactctgcttcttgaatgtgtaaagtgatgttgaagcctggaaaggggaattcctaaggtgcagtgcagtggacccagagaatactctctctaaacattgcttggtaacagtgcggttgtacaaaacagatattctcaatgaaataaattatgcaacatttgctacttttaattaaataaaattaaactccattaaaaactaaaaaaaaaaaaaagaaaaaaaaaaaaa

SEQ ID NO: 4500 - DNA, 1435 bp, Cricetulus griseus
ccagaaaccactaacgtcatcaaatccagtgctggaacttgaactagcagaggaaaaactacccatgactctttctaggcaagaggtcatcagaagactgcgagaaagaggagaaccaattagactatttggagaaacggattatgatgctttccaacgtttaagaaaaatagagattcttacaccagaagttaacaagggcttaaggaatgatctgaaagcagctttggacaagattgaccagcagtacttgaatgaaattgtgggtggtcaggaacctggagaggaggacacacagaatgacttgaaagttcacgaagaaaacaccaccattgaagaattagaggcactgggagagtccttagggaaaggtgacgatcataaggacatggacatcatcacgaagttcctgaagtttcttcttggcgtttgggctaaagaattgaatgccagggaggattatgtgaaacgcagcgtgcagggcaaactgaacagtgctacccagaagcagaccgagtcctacctcagaccgcttttcagaaagactaccggaaaaggaatacttcctgctgatattaaagagtcgataacagatattattaagttcatgttacagagagagtatgtgaaggcaaatgatgcataccttcagatggccattggaaacgctccctggcctattggtgtcactatggttggaatccatgcgagaactggcagggaaaagatttttccaagcatgttgcacatgttttaaatgatgaaacccagcggaaatacattcagggactgaagaggttaatgacaatttgccaaaagcactttcctacggatccatcaaaatgtgtggagtataatgcgctatgagatctgcagcattcggatttctggccttaccacacaacaaaggaagagttctacaatagagttccattggatgcaattcttgttggtcttaagaactgtgttgactttcatatggtattggattgcaaacaaatttttgtgtgttgctttcattttaatcaattgaaaaattaaattctaaagctattgtccatagtgtaaatgtgtagacaacaaggagaagggaatttgaactgacctttctccccaggacccaaaagtgtgtcattagataattagaaacatttgagagtgggtttaagctttctgtaaattatcatgatttgcacatttctctcatgtggtatttatagaaaatactttttgtatttcaacaaaagtgttggaccattgaatgttcctttacagttcttaaaatgttttctggacttctgccatcatgcaatagaatgtgtttactgttaagtgtttattttttctttgtgattcagacttgcttttgcacagactgctcttcctgaggtcctgagttaaagttacttttaaacaaaaaaaaaaaaaaaaaaaa

SEQ ID NO: 4501 - DNA, 1435 bp, Cricetulus griseus
gaagcatggtatcggtactgatgcaactcatgcagaacacattgaaaccatcaaagcccggatgtatgtgggacttacctcagacaagcggttcctccctgggcacctgggcatgggacttgtggaaggttatgattccatgggctatgagatgtccaagccggacctccgtgccgagctggaagctgatctcaagctcatctgtgagggcaagaaggataagtttcaagttctaaggcaacaagtgcagaaatacaagcaggttttcattgaagcagtggccaaggacaaagaaattggatgaggccttatctcagtacttaggagaagggacagaggtggtccagcaagaagagatctacccagccatgccagagcctgttcgaaagtgcccacagtgcaacaaggatatggtcctcaagaccaagaagagtggtgggttctaccttagctgcacagggttcccagaatgtcgggcagctgtgtggtttcctgattcggtgctggaggccagcagggacagcactgtgtgttccatttgtcagccaccccctgtgtacaggttgaagttgaagtttaagcgtgggagccttcccccaaccatgcccctggagtttgttggctgcataggtggatgtgatgaaactttaaaggaaatcttgggcctgcgattttcacaaggtcccccaagagctacccagccctctggctacctgcaggccagccaggccctcaacaggatggacagcagtcagcatagcctctctcaacctctggtcaacagacatactggatcttcaaaggcaatggctgaaaccttcccaccacccactcctgctggtgaaagtaactctgtgatctgcaattgtggccaggaggctgtgctgcttactgtccgcaagcagggccccaaccagggccggcacttctataagtgcaatggtggtggttgcaacttctttctgtgggctgacagcagccatcccacaggaggaggagggccccccacctctgcatcaagacccccaggcagctccatggggtacacgtcagctttaggcagcaacgtggatgggtttggcagccttggtggtgatggtgatggaagtacatcctgcctgtgtgggcagcctgctgtcacacggactgtgcagaaagatgggcccaacaaaggacgccagttccacatctgtgccaagccacgagagcaacagtgtggcttctttcagtgggtagatgagaacatggctccagggagtcttgcagctccaccgtggcctggaggcagaggaaaagcccagagaccagaggctacaagcaaaagactaagagctggttcctcagatgcaggatctacagacaaaaaaaccccgaaaatgtagcctttgccaccagcctggacacactcgccccttttgtccctcagaaccgatga

SEQ ID NO: 4502 - DNA, 1435 bp, Cricetulus griseus
gggaaacgactgagttcactggatgacaagattccccataagtctccgcgtccaagacgtactatctggctgtctcgaagccagtcagacattttccctttcagtgcacgccaggacctcaagggtggcaagatcaaattctttgacctgcccagcaaatctgtcatttcccttgtatttgacctggacgcaccagaacctggaactacacctctggctgattgtcaggagcctttggccatgtcttccagaaggtggcggtctttgcctggttcacctgagttcttgcgtcaggcctgtccttttgtgggcggtgaagaatcactgtctgatgggcctccaccacgactcagtagtcgtctcaagtatggagtaagagagatcccaccattccgggcatctgccctaccagctgcttcagtccatgaggccatggattgctccaacccccaagaagaaaatggttttggacccaggcccaaggggaccagtccatgtgttgaaactgcctctgaggagatggaggtggaagaaagaccacaaatgactcctgtccatttctctgtctcgggaataagtttgcaaacccagggagagcaggatgggtgaggtggtggggaggactagtccctgcctcaccatagaggtgtttcaatagttagggccaacctaattctaagcctctgaaatccagcaaggagctctggctcccactgactgcagtgcacgtcctagacaggaccaaaggactcttagttccaggctgagctggcagtcagctatgcagctaatatcagttcctttcctaccctaggtctcttgtgtccattctggggcacataagttacaggatggaaactggagctacctgggaggctgtaaagggcatagctatttctcagactgaagactgggatgcttcttgccagtatgtctaagacacttgaataattgctgtttgcactcactgtatggtcagaccacatcactacatctctatgcaagggggagacaaggaatgtggtggtggtcaaagatcttttagctaacctattcaaagacctttccagttgattaatctattttcatatttataaagaagtcttaatgttttgcctcaagactttcaaccttggtgttgggagtggggctggttttgtaggccccagggcctgcactgtgtatgtgtcaacaggtgatacaaaccagtagttaatgtattatacttggactgatttttctccctgctatagctggagctttgggaacagtctgtccttacagagccgcaataagaaataaccaaaaagaatgaagttggtcaaattattttttcattaatttgttgtattttttttttgttaaaacttttcccaagacactttcagattaaaaaataaagttgatgctgcagtgctagttagccttatttgta

SEQ ID NO: 4503 - DNA, 1435 bp, Cricetulus griseus
atgagggctttgccatgccacactccatcatacgggtagacattgcgggccgtgacgtctctcgatatttgaggctgctgttgcgcaaggaaggggctgacttctacacctcggctgagtttgaggttgtccggaccatcaaagagcgagcctgctacctgtccatcaacccacaaaaggaggaggctttagagaccaagaaggtgcagtacacccttccagacggcagcacaattgatgtggggcctgcatgcttccgggcccctgagctgctgttccaaccagacctgttgggggatgagagtgaggggctccatgaagtactggccttcgccatccacaagtctgacatggaccttcgacggacactcttctccaatattatgctctcagggggttcaacactctttaaaggctttggagacaggttactaagtgaggtaaagaagctcgctccaaaggacgttaaaatcaagatctcagctcctcaggaacggctatactccacatggattggcggctccatccttgcctccctggacaccttcaagaagatgtgggtatccaaaaaggagtatgaagacgatggctcccgtgcgattcatcgcaaaaccttctaatgcccaagaagggtggacatattgggagagaagaaggagaggggagccagagccctcgaccccttttggtctgggttcatgttctaggcctggggtcccctgcatgccctgaccctggagcaggtggtgcggtcatgctcgcctgtagcgcccctcccctccccctgtgctcaacatacacacacagacacagagagtaaggtttagctgcatggatggcagtcccaagctggagcataggaattcaacccgacattgagttggtgtgggcgaccctctcagcaaggccactttggcctgtggttccttgctccgatcttgaagctccaagaccagacactcacatgccccatttgttctgacagctcccactggggctagaatccctgaaccactggagtgggcgacagccaggagctcccctgggcagatgtcctagataggactgactagggaacagttctccattcccaatgagggagtgtggccaagggtcagagcatcagagccatgggcagccacggctcgtggtgtgcccactctttcaaggcactacagtgaagtttgctcccccccatcaccccccttccctccctgccctggccaggaagggattatggtccttatttgctgagagaaagccatttaatcgggagtcagacccaaagggcaggcatgtcctcacctccctctagaaaggtcttcaccatggccagggccccacctccctctccagagctgaacaataatttaacacagttgcctgaaaaataattcttttttcataaatcattatagtaataattatggaacaa

SEQ ID NO: 4504 - DNA, 1435 bp, Cricetulus griseus
  modified_base (1319)..(1319): a, c, t, g, unknown or other
aggtttctcccctcccgccgaccgagcgagcgacagggctgtggcccccctgacccctggcatcatgcatcggaccacacggattaaaatcacggagctgaaccctcacctcatgtgtgccctctgtgggggttatttcattgatgccaccaccattgtggagtgcttgcattccttctgcaaaacctgcatcgtgcgctacttggagaccaacaaatactgccccatgtgtgacgtccaggtccataaaacccgaccactactgagcatcaggtcagacaaaacccttcaggacattgtctacaagttggtgcctgggctttttaaagatgagatgaaacggcggcgggacttctatgcagcataccccctgacggaggttcccaacggctccaacgaggaccgaggcgaggtcctagagcaagagaagggagccctgggcgatgatgagattgtcagtctttccattgagttctacgaaggagtcagggaccgagaggagaagaagagcctcatggagaatggggatggggacaaggagaagacaggggtgcgcttcctgcgatgcccagcagccatgactgtcatgcacctcgcaaagttcctccgcaacaaaatggatgtacccagcaagtacaaggtggagatcctctatgaagatgagcccctgaaggaatattacaccctcatggacattgcctacatctacccctggcggcggaatgggcctctccccctcaagtaccgtgtccagccagcctgcaagcggctcaccctgcccacagtgcccactccctcagagggcaccaacaccagcggggcatcagagtgtgagtcagtcagcgacaaggctcccagtcctgccaccctgccagccacatcctcctccttgcccagccccgcgaccccctcccatggctctcccatctcccacggccccccagccatccaccccacctccccaactccaccttcgactgccagtggggccaactccgctaccaacgggggcacttcgaactgcctgcaaacgccatcctccaccagcagggggcgcaagatgactgttaacggagctccttgccccccttaactggaggaaagggaccctctccctcagcagccacctctccccgcccttctactttttctgggcccctttttccacctttgactctccctggttcctcccatcttcacagtgggaggtgggttttataaataaaatatatatatatatatatatatatatgtacatagaaaaaccaaatatacatacttattttctatggaccaaccagattaatttaaatgccacnggaaaaactgtatgtgtgtgtatgtgtttgtatggagtctgaggtcctgtgactgtaccctcctgtcctgggtcatttgtatctcttggttttgtaataaatgctgcatactctct

SEQ ID NO: 4505 - DNA, 1435 bp, Cricetulus griseus
atcctgggcatctttggcaccgtgcaatatcggtcccgttatctcatcctgtacgccgcctggctggtgctctgggttggctggaatgcctttatcatctgcttctacctggaggttggacagctatcccaggaccgggacttcatcatgaccttcaacacatccctgcatcgctcgtggtggatggagaatgggccaggctgcctggtgactcctgttctgaactccgcctggccctggaggaccaccatgtcatctccgtcactggctgcctgcttgattacccctacatcgaagccctcagcagtgccctgcagatcttcctagctctgttcggcttcgtgtttgcctgttatgtgagcaaagtgttcctggaagaggaggacagctttgacttcatcggtggctttgactcctatgggtaccaggcgccgcagaagacatcgcatttacagctgcagcctctgtacacgtcagggtagcctctgccccgcagcaacccgcgtacctgggcaactggagtgagaagcagcactgtaaaggagctcggatcacgatgggcaggcgcgccctctggcggcccactggctgactgcaacttgcggagcccctcctggatatgtgggcccctggagcaaatgcggactcagactcggacttggacttgaccctggctctagccggactttagggttggggcaggacgggacgggggtgggagggggaatcgctgggtttgtattttttttaatctcagccttggtacgtgcctgggccttcctctttcttcagcttcactccttacctagtattttgccctcagtccaaacatcaagacagatggactcaccccatctcatccctcattcacctgcactggggaagatattgtgaactaggagtagagtgttgggctccagctgcagcagcatcactgacatcctgtgtgacatctagcgcagcctttgctctctctgggcctcagtttccccacctcagataattaagataatcccttagcagaggacacttctagcactgtcatttggctgtcagttcgctgggctacagtgcagatatggaaactaaggcccagagatgtgaggtgacttgctggagcctcacagtaaggctttagtgaaggcaggctttgactcccctgggtggtgagcctaatcagatggggacaaatttcctttagaccaggctgcctcttgtcactgggccacctcccccccgcgaagcacttgctcctctcatcccttccccccagacctcttccactcaaaggtttagccactggtgctttggaccttttggtttataagccgggttttgcagggggactgggtttgcttctcaatgagaacctgtggactgggacctccctggtatccatgcaggtggggtgaattaaaaaaaggtgttttcttca

SEQ ID NO: 4506 - DNA, 1435 bp, Cricetulus griseus
cccagtatgcagatgcactgcaccctgagatcttcaatgctgcccgggacatcctgatagagcactacaagtaccctgagggaattcggaagtatgactatgaccccagttttgccatccgtggtctccactatgacattcagaagagccttctgatgaaaattgatgcttttcattatgtacaactgggaacagcctacaggggactccagcctgtgccagatgatgaagtgattgacctatacggtggcacccagcacatcccactataccagatgagcggcttctatggcaagggcccttccatcaagcagtttatggatatcttctcactaccagagatggcactgctgtcttgtgtggtggactactttctggtccatggcctggagtttgaccaagtacacctctacaaggatgtgacggatgccatccgggacgttcatgtgaagggcctcatgtaccagtggattgaacaagacatggagaagtacatcctcagaggggatgaaacatttgcagtcctgagccgcctggtggcccatggaaaacagctgttccttatcaccaacagtccttttagctttgtggacaaaggcatgcggcacatggtaggtcctgattggcgccagctcttcgatgtagtcatcgtccaggcagacaagcccaactttttcaccgaccggcgcaagccttttcgaaagcttgatgagaagggctccctccactgggaccgtatcactcgcctggaaaagggcaagatctaccggcagggaaacctgtttgactttcttcgtctgacagaatggcgtgggccacgtgtgctctacttcggtgaccacctctacagtgacctggcggatctcatgctgcgacatggctggcgcacaggcgccatcatccctgagctggagcgtgagatccgcatcatcaacacagaacaatacatgcactcgttgacctggcagcaggcgctcaccgggctgctcgaacgcatgcagacttatcaggatgcagagtcacgacaggtgctggctacctggatgaaggagcggcaagaactgagatgcatcaccaaagccctgttcaatgctcagtttgggagcatcttccgcaccttccacaaccctacctacttctccaggcgccttgtgcgcttctccgacctctacatggcctccctcagctgtttgctcaactaccgtgtggacttcactttttacccgcgccgaacacccctgcagcatgaggcgcctctctggatggaccagctctgcactggctgtatgaagacaccctttcttggtgacatggcccacatccgctgagggcacttttattgtcctggacataccctctgtcttttcagccccagtcaccctgacaagcaataaaagtggtctctgtcttacaaaaaaaaaaaaaaaaaaaaaaa

SEQ ID NO: 4507 - DNA, 1435 bp, Cricetulus griseus
aacacccctggaaaccccttttgatgacctccagagcctcccaaatgatgtgatctcctccctgaagaacaggctgaagaaggtctccacaaccacaggtgacggggtggccagagcctttctcaaggcccaggctgctttctttggcagctaccggaatgcactgaaaattgagcccgaagaacccatcaccttcagtgaggaagccttcgtgtcccactaccgctctggagccatgaggcagttcctacagaatgccacacagctgcagctcttcaaacagtttattgatggccgactagaccttctcaattccggcgaaggtttcaatgatgtctttgaagaggagatcaacatgggcgagtatgctggtagcgataagctgtaccaccagtggctgtccacagtccccctgagctgggaattgtgcctccaccacccactgcccgcctgaccaagctccaggctgctggtggcccatttggtgacttctcttcagagcagctacagctggaccggcaaagacaagctgccctgagctcagccctactaccagggctgctcaccaatgctgccccccaaggccccacagaacttctgcagccactcagcccagccccaggagctgcaggcacaggcagtgattccctgcttgccctcctggacccacttaacacagcctggtcaggacagccgccactcaatccatttgtcccttctgtgccagtagcaccacccactatgtccctgggctctacaccagccaggccttttgggacccctccagcatccctggggccagcatatgcaccgagcatcctattgtccggttctggcttctatacccctcacaggtctcagcccaacctgtctgccctctccatgcccaacctctttggccagacccccatgggtgcccacagtagtcccttgcagccacttggtcccccagctgttgccccctccaggatccgaacattgcctctggcccgttcaagtgccagggctgggccaagcaagggttagccctgaggcctggtgaacccccactgctgcctcccagaccccccagggtctagaaccagccctgcagccctctgttcccgctcaggccagagacccctttgacaaacccagctccaaccagcccttccagggcttgggaacaccagcaactctggtttataggagaaacccagaaatctgagtggtaggaactaccttcggctctctgccaccctcatacctctgggcttatgtcaatcaaagcttaggctcagcctcctgccacttggagctttatgggaagagcttggcaacaatgacccagattccaactcaaaggacaatttctttgatctcgcttttccttcttaccttactgatttgatgaatcttgaaaattgattcctttcaataaaccaaggtgaaacac

SEQ ID NO: 4508 - DNA, 1435 bp, Cricetulus griseus
actgcatctcctgagtctcggaagccatccccatcagagtctcctgagccaaggaagccattccctgccatcacttcagagccacggagaccagccccagcagtatcaccaggttcctggaagccaggaccacctggttctcctcggccttggaaatccagtccttcagcgacatcgggaccttggaaatcatctaaacctgctccatctatttctcctggacctagtcctccttcattacagagtctcagaagcctagtgtcttccccgaggcacggaaacatgcttctcctggctcatctgagcccccaaaggtgacctcagacatatggaagcctgtcctctctattgatgctgagcctaggaagtccacactgtttcctgagccccccaaaacagtccttcccgcttctcctgagccacggaaacgtgcacttttcccagagtcccggaagcatgtacttttccctgagctccccaaatctgctgtgttctctgatgctcagaaggccactgagcttagtgaggagctacagctggaagctgtagatgatgcaaatgtgatagtgtggtccaggaagggcttctggctacacccaagaaactgttagaagatggctttatttccttcttccaagaagctcaagaaagacagccaagagaactcggatgctgagctcagtagcagtgagtacatcagaacagatttagacaccatagatatcaagggccaggagtcaagcagcgaccaagaacaggttggatgtagaatctattgtattttggcaaagaaaacaaaatggagatgagtagtcctgagcagtccaaaaatgtgcttcagttcactgaagagaaggaggcattcatttctgaggaagagattgcaaaatatatgaagcgtggaaaagggaagtattattgcaaaatttgttgctgtcgtgccatgaaaaaaggtgctgttttgcatcacttagttaataagcacaatgttcatagcccatacaaatgcacaatttgtgggaaagcatttcttttggagtctcttcttaaaaatcacgtagcagcccatgggcaaagtttacttaaatgcccacgctgtaattttgaatcaaaatttcccaagaggctttaagaaacatttaactcattgtcaaagccggcataatgaagaggcaaataagaagctgatggaagctcttgaatcaccattggaggagccacagatgtgactttcaaacagtacctgctctgcaattgttttttgccaaactcaagcttgttgaatagcctagaaaaaaaaaaaaaagaatggtttgagaattgagcatgaaaagtaaatttgagaaaaattttgttaaccttataagtacttttgaatcatgtttcatatcctctttcttcatgtaaaatcagtataagaatctttaatactttc

SEQ ID NO: 4509 - DNA, 1434 bp, Cricetulus griseus
ggccagaatgggagacaccagagacatctgccctcacctggactccataggagaggtgaccaaagaggacttgctgcttaagtctaagggaacctgccagtcatgtggtgttgctggacctaacctatgggcctgcctccaggttacctgcccctatgttggctgtggagagtccttcgctgaccatagcaccattcacgcacaggtgaagaagcacaacctgactgtgaacctgactacgttccgggtgtggtgctatgcctgtgagcgcgaagtcttcctggaacagcgcctggcagtccacctgcccagctcctcagccaagctctcagagcaggactccccaccaccctcccaccccagaatgtggaagcctacgtgctcttctacaggaagagcagtgaggaggccatggacctggtggtcatcctgccgcagagcgtctgggagcacctgtatggcagatttgggggcggccctgctgtgaaccatctgtatgtgtgtgctccatctgccaggtggagattgaggcgctggccaagcgcaggagggtggagattgacactttcatcaagctgaacaaggcgttccaagctgaggagtcccccggagtcatctactgcatcagcatgcactggttccgagagtgggaggctttcgtcaaggggaaggacagcgagcctcctgggcccattgacaacagcaggatcgctcaggtcaaaggcagtggccagatccagctaaagcagggggctgactatgggcagatttctgaagagacctggacctatctgaacagcctatatgggggtggccctgagattgccatccggcagagtgtggcccaggccccagacccagagagcttgcatggagagcaaaagattgaggctgagacccgggctgtgtgatttgggccagtggctgtggctggccctactccctctccagacaaccctgcatccctctgaaggctgtgtcctgctgagtgcccactgtccctgaaggctggtaatttgccatcccccagagggtgtgtctgtgccctgcagctgagctgctttgtgcctggtgcagagactaagtgcggctggtccgtcggccatgagagatgctgtgctgggaaatatattctctcctgtcatcaccgtgtccccaaacttgccctcttgctagctcgggtgcagcttttctccaggagccccatgctgctcctcagccaatgctggtccctgggatggggggctaggagtggctgccaccttttgagtattttctgttgtgtacttgacccaacaccttagggactcacaaaggtagatttccatgccctgggtcacaatggatgtgaggggctctgcatgctggccagcggcccaaataaaaaattagctcttaaaaataaaaaaaaaaaaaaaaaaaaaaaaaaaaaaa

SEQ ID NO: 4510 - DNA, 1434 bp, Cricetulus griseus
ccagcaggtggtgggcagtggtggtgttcgccgcgctcccgtcttcgggagcaggtggagagtcccccgaagcccctccgcagtcctggacacagctgtggttcttccgctttttcttgaatgttgctggctatgccagttttatggtacctggctacctcctggtgcaatacttaagacggaagaactacctggagacaggcaggggtctctgctttcccctggtgaaggcctgtgtgtttggcaatgagcccaaggcctctgatgaggttccactggctccccggacagagacagcagacagtagtccctcttggcaggtcctgaagctgatcttctgtgcctcggggctccaggtgtcctatctgacttggggtgtactgcaggaaagagtgatgaccggcagctatggggccaccgccacatcaccaggcgagcacttcatggactcacagttcctggtgctaatgaaccgtgtgctggcactgatcgtggcaggtctctactgtgtcctacgcaaacaaccccgtcatggggcacccatgtaccggtactcttttgccagtctgtctaacgtgcttagcagctggtgccaatacgaagcgcttaaatttgtcagcttccctacccaagtgctggccaaggcctccaaggtgattcctgtcatgatgatgggaaagctggtgtctagacgaagctatgaacactgggaatacctgactgccggcctcatctccattggagttagcatgtttctgctgtctagtggaccagagccccgaagctctccagccaccacactctcaggcttgattctactggcaggctacattgcttttgacagcttcacctcaaactggcaggatgccctgtttgcctataagatgtcatcagtgcagatgatgtttggggtcaatttattctcctgtcttttcacagtaggctcactactggagcagggggccctcctggagggagcccgctttatgggacggcacagtgagtttgcacttcatgccctcctcctctccatctgctctgcctttggccagctcttcatcttctataccattggacaatttggagctgctgtcttcaccatcatcatgactctccgccaggctattgccatccttctctcctgcctcctctatggccacactgtcactgtggtggggggactgggagtggctgtggtcttcactgccctcctactcagagtctatgcccggggccgtaagcagcggggaaagaaggttgtaccaactgagcccccagtgcagaaggtatgagtacagcagaggattggagccctggaggcagcctcttttgccttaagcccagcccctttcggggcctttgtgttccttgctcaagttttgctacttgggaatgtcaccttttgctcttatttgattaaaactgcagcagtga

SEQ ID NO: 4511 - DNA, 1434 bp, Cricetulus griseus
cagtatccagattcagcaatgtcaagtccctccagcatctttgcagattccggatccggcaacttgtccgaatagatcatatcccggatctcccactgcctaaacctctgatctcttacatccgaaagttctactactatgatcctcaggaagaggtgtatctatccctaaaggaagcccagctcatttccaaacagaagcaagaggtggagccctccacgtagcagcctccacaaaagctgttcaacacaaaggcgttttgattgccaagctccggtttgaagaaccaaatgaagctaccacaaagaagaacttgggacagaaagagaatagagaggggtgtgattccggcacagactttggctcccctgcagctcctggggcttgggaagaagcacacaactatcctccaagtggagctccccattctacccaaccccctcatttgtagaagtcttgtctgcagtcggagtgttgagagcatctccactagcagggactaggatttgttttccactttaagagaatggcatgccccctgtgtggaggggaagagctctgagttagacattttccctatgggaatcctcttggtttggtttgtgggaagaggggagtggataaatggttttatttctagtcatcaacacagctgtccttacactaaatttgtgctattgcatacatgtagccatctttcttttcactgcagcagtgtttatcagtagttcaaaatgatttatttgctcctggggagtaaaaccttttttattaaaaaagaaaaaaaaaaaaaaaaaagctgaggggtgtcattctggactcagtggttagggggttcttcactagaggggagcccatactcctgcaaccactctgtctggcttagccacccctgccctccgagccaaagcgtggcctggtttttgtcttcccatttagttttcctcctttattctcccttttttgtgcttaatttattaaaatagttgctgtataatttattttcataaagtataaaaataactaaaatggttaaaatagacttgcaggccaatcttaaatgggtgggggggtctggggtgggatggggaaagggaaagatgttttgatataaacaaatgcactttgggtgtgttttggtatttttctgggcatagaggggtgggtgttgggatgtccctatagattagttccagaatggggtgtttgtaaatactgtattaataggcatgtttgactcttgtaaaagggacattagtagctgctgcaggtcctgtttggaaaccctgtgtataattcccggtttttgtaagtgtcagtgcgggagacatttgactcttgtgtttgtatctcctttttatgattgctgtaccgacccatgtctttttggggagggatgaaaaaagagatttgaaataaaaatgtttaagaaat

SEQ ID NO: 4512 - DNA, 1433 bp, Cricetulus griseus
cctcggctgctgtccattgcggcgactcgaccgtcggtgcggaatggacagctgctggtgtcaaccgggctcccagccctggaccagctcttaggtggaggtttagctgttggaacagttcttctgattgaagaagataaatacagtatttattcacctttgctcttcaagtatttcctggcagaaggaattgtcaatgggcatactctgttggttgcatctgccaaagaaaagcctgccgacattttacaggaactccctgcaccactacttgatgacaatggtaaaaaagagcttgaagatgttcataattctaaaacaccagaatcagatgttaacatgaaaatagcctggcgataccagttgcaacccaagatgcaggttgggccagtgtcatcttcacgatttggtcactattatgatgtatcaaaaaggattcctcaggagctactaggaagttcaaaatggcatggattcttcctcccagaacacataacttcagatcttaaaggagaaccctgttctttgtcaggagactatatgaaactgcttcagttcatccagaacatcatttatactgaaggatttgatggatctaatccccagaaaaaacagaaaaacattttaagaataggaattcagaactttggttcaccattttggggagatgacatttgctgcacagaaaactctgacaacagtcacaggcttaccaagttcttctatgttctccgtggtcttctaagaacctcgctgtcagcctgtatcatcacgatgccaacacatctgatccagaataaagcaattactgctcgtgtgagaaatttgtcagatacagtagttggtctggaatcttttattggttcagagaaagaaaccaactcattatataaggattatcatggtttgatccatatacggaagattcctcggcttaataacttgacttgtgatgaatcggatgtcaaagacttagcttttaagttaaaacggaagctgttcaccattgagcgactgcatttgcctccagacttgtcagacacagtgagtcgctcaagcaaacaggatctggcagaatccgccaagctgctgggcccaggctgtggcatgatggccggaggcaggaagcacctggacttctagggaatcctccttagtaactgcatgcggaattatctgacaccctaattatgattgcaaatagcttatgtaaatatttttcttaatgatttgaccctccaatctttgaaaaacacaggattacaaaatggagccatcattcttctgtttagtttgtttctatttgtttttttctacctaacttttgtacaaaaataatacagcagaaataccatcatttgacatttagctgctgttgtgtattttaaaatactaattaatttttaaataaacaccaaaacaataccacaaaa

SEQ ID NO: 4513 - DNA, 1433 bp, Cricetulus griseus
cttttattttattttattttattttattttattttagcaggttcccagagtcctcccagggaaggatctgtacctctaggagccagggagggagcaaggcagccatgctggggtagttgcagactgcaggtttcatctgcttttgttgaccccggaggacagacaatcctgaactgacaaactggtagcttagaatagaaggttaggtctgaggccctggtggtcacacaatggtacttgaggggaccagaggctgtcttgggtcccgagagcatggagaagcagaacttgaggtcagggtctcagggatgctagagatcccagagtgctgtgtatgacccagtgctgctgtctatttattactatatcctatttatgttaacttattggtgctttaaatggcaacgttaattccccgaaatagcatgaggccctcacatggagccagggtcaagcctcacctagtgggtctggtctggccctttggtctccaggggggtggagcagtttgtggttgttgttgttttgtgccacagtgctctctggcgccccctggattcctgctatgcggtgcaccattcataaagaaatgaatggctctgggaccttgggcaaagtggattccttgttcttcaaagagcagctgaaaagcactgagacatcctgactcggcatccagcatgcttccactcagcatggaagctcctcgggtggcctaaacactcacagaatgcaggaagttggggcagtgcaggccttgaattgggcctgaacggctgcccagtgctccggagaagggggagagcaaggcctgagatgcctgggacgccaaccaggaagctgtgctccttgcttcatcgctgccttcccactcccgcccatgtctgggctcccaggcagggaatccgatctgatctctcctttgtgctggggccagacaagcagaggaacgccctcgatctgggagcagggtaggggaaggcagccaagccggggcagtggctgactacagtgctagctgcctctcaacctctgagcagggcggtcccttgcagtttagctgcaggattctgcttcatgcatttttgcacctttctttgtcattctctaagcactttacctggatggcaggaggctagcccctgaagctctgggtaggacgggcctgtaaccatgggtgcagcaaggagactctcctgctgctgcagcaggcccagctcaggactggctgcccaattccaagctgagaggcaacttgtctaaaagccaagatgattccacagctggggcctgctgggtcttgccatcacttcacaacctatgggcatggattctctgggctcagcccacctggcagctttgaaggctcagggaccaatggactcttcctctgagtgcacagcctctggctccacaatacaaccaccacctgc

SEQ ID NO: 4514 - DNA, 1433 bp, Cricetulus griseus
ggaggggagggttatagggggcgagttctgggaggcgtgggaacgtacagacggacggtgcagcgtgttgaagatgggcacaggctgtgtggggaccgtggttagctgcttccaagaacgtgcccgaatcgagaaggcctatgcccagcagctggctgactgggcccgcaagtggaggggtgctgtagagaagggcccacagtatggcactttggagaaggcctggcatgccttcttcactgcggctgagaggctgagtgagctgcacttggaggtgagggagaagttgcacggtccagacagcgagcgtgtgcggacttggcagcgaggggctttccaccgtccagtgctgggtggttttcgggaaagtcgggctgcagaggatgctttccgtaaggcccagaagccctggctaaagaggctgaaggaggttgaggcttccaaaaagagctaccacacagcacgcaaggatgagaagacagcccagactcgggagagccacgggaaggcagacagctccatgtcccaggagcagcttcgaaaattgcaggagcgggtgggacgatgcaccaaggaggcagagaagatgaaaacccaatatgagcagagcctggcagagctaaatcgctataccccacgttacatggaggacatggagcaggcctttgagagctgccaggctgctgagcgccagcggcttctcttcttcaaggatatgttgctcaccttgcatcaacaccttgacctctccagcagtgacaagttccatgagctccatcgagacctgcagcagggcattgcagcggctagtgatgaagaagacctgcgctggtggcgtggcacacatgggcccggcatggccatgaactggccacagtttgaggagtggtccctagatacacagagagcaatcagccggaaggagaagggtggccggagccctgatgaggttactctgaccagcattgtacctacaagagatggcactgcacccccaccccagtccccagcatgcccagcatctccaggtgggcaggacgaggactggtcagatgaggagagtccccggaaggctgccattggggtgaaggtgcgggcgctttatgactatgctggccaggaagctgatgagctgagcttccgagcaggggaagagctgctgaagatgagtgaggaggatgaacagggctggtgccagggccagttgcagagtggccgcattggtctctaccctgccaattatgtagaatgtgtgggtgcctgagtgccctgacagccctattgcaccttctctctatcctgggccaaagctcaacccttcctggactgctggacctgagggccctgaaccatgtgctgctgctgctgtccctctgtttccgcaggagggaagatgtcttagggcccatgaagtgaaggggtctgtgtctaga

SEQ ID NO: 4515 - DNA, 1433 bp, Cricetulus griseus
agacttttgtatgttctcttaaagccaactcggaacacacgctgactctgggccctttggtggacccgaactcgatgctatggagagctctgcgggctcgtggaggcgccttgagcatcccacagagagaggaggagaccgacccggagccccaagcccctccgttggatagccagagtgcccaatggaagaacgcgatgggcttctggatcctgggcctttgcaacaacttctcatatgtggtgatgctgagtgctgcccatgacatcctcaagtacaagcaggcatctgggaaccagagccatgtggagccaagcccaacacccatgacccacaacagttcatctcgatttgactgcaactccatctccacagctgcagtgctcctggcagacatccttcccaccctcgtcatcaaactcctggctccttttggccttcatttgctgccctacagtccccgggtccttgtcactggagtttttctgctggaagctttatcctggttgccttttctcactcagtgtggttaagcctgagtggagtggttttggccagcatctcatcaggtctaggagaggtcaccttcctctcactcaccgccttctaccccagtgctatgatctcctggtggtcctcgggtactgggggtgcagggcttcttggatcggtgtcttacttgggactcatccaggctggcctttcccctcagcacaccctgctttctatgttggtggtccctgttctgctgctggccagctatttcttgttgctcacatctcctgaaccccaggaccctggagggaaggatgaagcagagactgctgcccggcagccactcataggcactgagaccccagagtcaaagccagattccagctgggatctcccgttccaggaaaggtggacagtgttcaagggcctgttgcactatatcatccccttggtgctggtctactttgctgagtatttcatcaaccaaggactttttgagctcctctttttccggaacacatccctgagtcattctcagcagtaccgatggtaccaaatgctataccagactggtgtgtttgtctcccgctcttctctctactgttgccgaatccgtttcatctgggtcctagccctgctgcagtgcctcaaccttgctgtcctactggcagacgtatttctgagcttcctgcccagcatctacctcatctttgccatcgtcctgtatgaagggttcctgggtggagctgcctatgtgaatacctaccacaacgttgctcttgagaccagtgacaagcaccgagaatttgccatggaggctgcctgtatctctgacaccttgggaatctccatgtcagggttcctggccttgcctctgcatgacttcctctgccgtttcccttgacacgggctgctcaggacacactgacctgcaggca

SEQ ID NO: 4516 - DNA, 1433 bp, Cricetulus griseus
agaccattcatcaaagagtgtgcatccaagagcagaaagtctgttccccaagatgatgaatgctgacatggatgcagttgatgctgaaaatcaggtggaactggaagaaaagactcgacttattaatcaggtgttggaacttcaacacacacttgaagatctttctgcaagagtagatgcagttaaggaagaaaatctgaagctaaaatcggaaaatcaagttcttggacaatatatagaaaacctcatgtctgcttctagtgtttttcaaacaactgatacaaaaagcaaaaggaagtaaagggttcatctccctttcttctgtggagttgctgctttttttatttatttttcttaaagcttggatatgatccaaaagttacagtatcctttgcttccttgagtatttataaagagaatgtcagatctaggtaatattaactgcttaacaggaaacatccccgagttaatgttatatgtattacattagtttatgaaaatgtgcaaatgtagagactttataattagaatgacagatatttatgaaacttgaagatgaatgttttgccaatttgcttatatatctataggtttagcactgtcttttatcatacgcctaactagtgaactatacaagagaataaccatgttgtgaaaagtgaccaaaaccatgtactgaatgcacagcttctgtaccttgtccaccatcatgtgcctctcctccatctgcctccctgacagtaacttcagtagttgtcacctaccagagtaacctgaactgtaattgttgacacataaccaaaataagatactttcttagccaaggcttgccatttgtaatatttagtaataagataggatcagtggtttctctttaatcaattgaagatagattgaagctataaaaaatgaagggttttctttgaaatgtaaattgtcacattgagaagctaaaaactcccgtttacacaaaatagcccatttggtgttgaaaagagtgctggtcacatgtatgtgagaaattagaaaaaagagggaccagttaatagtttggtctcaagatttgtacccaggagataaacttttgcaaaattaattgagagtatattagtataggaatcatgaatataagagagttttgtatatgtgatacttgttaaccttagtattttatctctgttgtttttcccagaatttctgtaaacacaactactttgtttgcagaattttagccatttcttttaacaattttaaaattgtttggtttgtagcttccatttgataaaagaattgatacccaaaataatattaagatgttacagcatgaaagatccactaatgcagctgatggctcttaggttgggctgtgttgacttgtgggatcatctaatgtattagttctgctttgctgtttaaataaaaagcttgtttca

SEQ ID NO: 4517 - DNA, 1433 bp, Cricetulus griseus
accaccgctgcagcccactaaacccaggaggcgccctggcccgcgctcgccccccagggcctcatgtcggaaccacagcctggcctggagccgccccaacatgggctgtacatgctcttcctgccttgtgctggtcttcttcctcatgggccttgtaggcttcatgatctgccacgtgctcaagaagaaaggttaccgctagccgcacatctaggggctcagagcctgatgactgcccagctccagcccccttgaagacgatgacgtgaatgaggacacggtagagaggattgttcgctgcatcatccaaaatgaagccaatgctgaggccttgaaggagatgctaggggacagtgaaggagaagggacagtgcagctctccagtgtggatgccacctccagcctgcaggacggacgccccttccatcatcacacagtgcatcttggctctgcaagcctaggacagggacagctgccattgagaggctcgctccctcgagccaccactcctcccaggctgtagccacccactcagtgcagaatggaggaatcaaggatgatagcctagtccctagtacacttgaggcaactcctggaacctctgcagaactgaccttgggcactagaggaagaggcccaagcccagggctgcctcgtcaagaggcaaatggacagccaaacaaactggacacctcaggtcagcaggtatgaagacatggccagggcttcactgggcagtggtggactcatattactgtccctatgctaggcaacactgataatccacctcctgctcccactgaatacttccccttctctcaggagtctctaccaccagaagcagggggtatgtgaggcaagtctccctgagctcgagaccaggtaatctcatcctcttaccctctacctaaactacccaagcctatcaactccccagagcttgaagaggaagcaacactgttcccccctcctttcttccaagcctcagtcttcactgtgctgatggattaccagcaggcattgccagggtatggacagccatgaaggctctcccctccactggacagcctgctcctcagttgagggaccagctctacttctatctggagtgacatggtcccaggctgagggacctcaggaggagcgcctcccaactcccaaaccctcattcttttccttccctacctgccaacaggttgcctggcctgccttcccaaacctcgctccacatgcaggagtgtggcagctgggaccaggccctgcccgtggtgggaccctaaagcaatagcaccttaggctccctgccctcttgatgcaagaggcccaggccctaataaatagtctcagaccaaaaaaaaaaaaaaaaaaaaaaaaaaaaaaaaaaaaaaaaaaaaaaaaaaaaaaaaaaaaaaaaaaaaaaaaaaaaaaaaaaa

SEQ ID NO: 4518 - DNA, 1433 bp, Cricetulus griseus
  modified_base (1384)..(1384): a, c, t, g, unknown or other
  modified_base (1386)..(1386): a, c, t, g, unknown or other
  modified_base (1390)..(1390): a, c, t, g, unknown or other
tagcggactcagcggcgggcctgaggcggcccaagcgccggtcgcgcgccatggcccccatgggcatccgcctgtccccgctcggggtggccgtgttcttcctgctggggctcggggtgctctaccacctctactccggcttcttggccggccgcttcagcctcttcggcctgggtggcgagccggcgggccgggcggcccagtcggaaggcgacgggggcgcggtggacttgcgggagatgctcgccgtggcggtgctggcggccgagcgcggcggcgaggaggtgaggcgggtccgcgagagcaatgtcctccacgagaagtccaaggggaagacgcgcgagggtgccgacgacaagatgaccagcggcgacgtgctgtccaaccgcaagatgttttacctgctcaagaccaccttccccaccgtgcagataaatactgaggagcatgtggatgcatctgacaaggaggtcattgtatggaatcgtaagatccctgaggacatcctgaaggaaatagctgctcctaaggaggtacctgcagaaagtgtcactgtctggattgacccacttgatgctacccaggaatatacggaggatcttcgaaagtatgtcactaccatggtgtgtgtagctgtgaatggcaaacctgtgctaggagttattcataagccattctctgaatatacagcttgggcaatggtagatggtggttcaaatgtgaaagctcgttcttcctacaatgagaagaccccaaagatcattgtgtcccgctctcatgcagggatggtcaaacagattgctcttatgacatttggaaaccagacatcaatcatcccagctggcggtgctggttataaagttttagcactcttggatgtgcctgatacaagtcaagaaaaagcagatctatatattcacgtgacgtacatcaaaaagtgggatatatgtgctggcaatgccatcttaaaggcccttggggggcatatgaccactctgagtgggaaagagatcagttacactggttctgatggcattgaagggggactccttgctagcatcaaaatgaatcaccaagctctggtcagaaaactcccggatttagaaaagtcaggacatccataagcattcctgaccacagggtgcaactctgccagaggtgaattgtttggctgaactgttggaagtttcaaaggactggtggagactatgcatggttaaggccattctgaccttaggaaatatttatgaagcatcgagacttacttttccctgtactaggatgcaaaatcagggaaattaggttgcttcatttctcaagtattgtctttattttgagactattttcatacggttgtcatacacaagggcacatagtatatatntntatntatatatatctaggaattgtttcttaactattaaaagaattaa

SEQ ID NO: 4519 - DNA, 1432 bp, Cricetulus griseus
agccctgttccagccccctcgagagaaactccacctgtgtgaagagagagcaaaatcctactcgagcagctgtgagtacaaacaggccatccaggagcttgtgcgctgtgtggcattgacaagaatttgctatggcgactcacattggaaactagcagaggcatatgttaatctggctcaaggctacctccagctgaaagggctgtcactacaagcaaagcaacatgcagaaaaagccaaaagaaatcctggccaactccattgagaacccctatcatgacaatacagatatcttcaagtgttccatagatctcttctgtaccctggggaaagccctgctgtcccttcaaaaatttaaagaagcctcagagaacttggtgaaagcggaaagactttccaaggagatgctgcaatgtgggaacattataaaggaggaatgggtaagaaatccaagctcggatcaagctgttctttgcacaactgtatcaaggtcagaaaagatcaaaagaagctttgccctactatcaaaaggctttggaatatactgagctcaccaaagatgaaaggagtcttgagtgtgtaccagtactaagggagctggcaggagtggagcaagccctgggattccacgatgctgctgtcagtcatttctcacgggggcacatctcatcgtcctgagtaaaaatccctccccagaggaggctgcagattccgcacactttattgcccgggctgctgttgcttctgggaagcaagaccaccgtgatatggccgagcagtattttcaggaaagcatgactcatgtgaaggattctgaaggagcaggaagagtcaagttcctttccattcaagatgaattttgcaattttctgcagatcactggacaaaaagaaagagcaatcatgatcctgagagagtctctggaagccaaagtaggagcattcggtgacttcagccctgaggtggcagagacataccggatcctgggcagggcagacctggcacagggaaaccacatcggagcacatgccaaactaaagaagtgtgttcagattgagacgttcttgaatggatcgcaggacaagaggaccctggccacccagcagaccatagacacactgtccaaaaactccgaggctgccacgaagccaaggcaatctctgaaagccaagatggcattgtgcaccacataccagggaaggccaagcacaatgtggctgactgatcccccccatgtgccccaaagaaagctctgagaaagacttggcattgcttttaggatgctgaacaaacctctctccaaccaggaggtggcatttagcagtcactgcagatttttaaggctgtttgctccagcatacagcagcatcaccatgaatcttccgcatctcaactgtggacgcccttcgggtgatctggtgcttttggttat

SEQ ID NO: 4520 - DNA, 1432 bp, Cricetulus griseus
accctgcagctgcggtgatctctgctcgtgcccacccgggactcctagagcctgcgtgcctgcagcagcgtcccgggagccccctccctccgtggtggtacatcccggcgctacggcgtccgagcaaggccgaaagggccgctccgccggcggttcgcgtttctcgtgtctgcttgactgacagctgctccgcggagcggcggcgcgcgcagagctgaagcgctgcagcatggcgcgcggctgcctccagggtgtcaagtaccttatgttcgccttcaacctgctcttctggctgggtggctgtggtgtcctgggtgttggcatctggttggctgccacacagggaaactttgccaccctgtcatcctcatttccatctttgtcggctgccaatctactcatcgtcactggcaccttcgttatggccatcggcttcgtgggctgcattggggccctcaaggagaacaagtgcctactgctcaccttctttgtgctgctgctgctggtattcctgctggaagccaccattgctgtgctcttctttgcctacagtgacaagattgacagttatgcccagcaagacctgaagaagggcctgcatctgtatggcacacagggcaatgtgggcctcaccaacgcctggagcatcatccagactgatttccgttgctgtggagtctccaattatactgattggtttgaggtatacaacgccactcgtgtgcctgactcctgctgcctggagttcagtgacagctgtgggttacacgcacctggtacctggtggaaatcgccctgttatgagacagtgaaggcctggctccaggagaacctgctagctgtgggcatctttggactgtgcacggcgctggtgcagattctgggcctcaccttcgccatgaccatgtactgccaggtggtaaaggcggacacttactgcgcataggtctctcagcttctgcttctctgccaaaggacccgcccatggggagacatccacacccacttcccatgcaggacttggtgctctgctgaatgcaggggaagagcttgaggccagagcacccaggatccacccctgtacctaaggcctctgcttgggtggctgcagtcaccagattatagggttggtgccaaccaagcatggcacccagggctaaaggcccagggaactttgacagtttttatatccatatatcttccagtattcacacaggatagggtccccaaccctgcatggatgccaggttggaggcaggcccagtctgctcaaggcccacgatggtcctggtgctccaggccagaccaggtcccatgattcacattccatgatggtgtcgtggtcccgggtgcatcttaataaagcgtgtgagcagcccctgtgactagctggacacacaaaagttatacaacaaaaaaaaaaaaaaaaaaa

SEQ ID NO: 4521 - DNA, 1432 bp, Cricetulus griseus
acgtgcctgactaccgccagaatgtgtaccatccccggcagcaatgccacactgaccaatgcagctggcaaacgagatggcaaggctccagcaggcggtaacggcaacaagaagaagtcgggaaagaaagagaagaagtaatatggaggccaggccttgagccacagggcagcctccctccccagccagtccagcttgtccttacttgtacccaggcctcagaattttagggctcacccccaggatactggtaggagccaaggccatgctccccgttgggaaacagaaataagtgcccaagtcaacactccctctctgtgccctagggggttgaaatatgcaaagagagtttctgctgggaaacccctatccaatcactgatcatacccccaagggtagtagggttacacacaaaaaaaccataccacggtcccttagttacagctgaactcctccaccttccaactcagtcaggctcatccatctcctgcttccctctcctcacccaacccacccccttcagtccctctcttgagcaaggtggttgggctgttgtggggacaggtgacccaagcaggctcctagttctggagagttgggcgagtgttataaccttttggcctctccatcagttcagctttcccccaaagcatggtttggtaccagtcttctcatttccttctagagcctgagaccaatgcttaagtttgggggacacagtcaccatccccctggtactgatgcttgctggattttcgggaaggcattttgctacccagtctcttttcactgcctggggatcagtcttagtctttcattgtttcattgttcccatgttcccatgttcccactgcatgctatgacttccctactcctcaaagaagagactcctttgcatgtctggagacagtagggggtggtaagctaaagggaagcaaactccaggccagacccctccaccctggttcagcctgggcagcttgggctgagccaccaggaccaatagatttaagctggcatttcagtccaagaaggcttctaagtggatttaggacctgagaggaagaggggcctctgtgggtgctgggtactccagaggtgcccctggtggaagggtgggtcagtggtcctagcaggaagggagacccagcaaggccattcttgctgggttgagtcaaggagctagaacaagggaccaagtggcggtgtaaaaggtctcaagccaatgatggggcttctccactgggctcctgtagtcctcaagtccctggcctccaccttaccaggtgccacttctcagaaggccactgcccaggcccccaggccgccccttcgtggccagagactggttaaagccccccagtgcctccttgtgcatagaacttcctctgaaagcttctcttcgcatagtcacgtagctcctgcctatccc

SEQ ID NO: 4522 - DNA, 1432 bp, Cricetulus griseus
ctgcgagttacagaatgtctgaaggggacagtgttggagactctgtccatgggaagccctcagtggtgtacagatttttcacacggcttggacagatttatcagtcctggctggacaagtctaccccatacacagctgtccggtgggtcgtgacactgggcctgagttttgtctacatgattagagtttacctattacagggttggtacattgtgacctatgccttgggaatttaccacctaaaccttttcatagcgttcctttctcccaaagtggacccttccttgatggaagactcagatgatggcccttcattaccaaccaaacagaatgaggagtttcggcccttcattcgaaggcttccagaattcaaattttggcatgcagctacgaaaggcattcttgtggctatgatctgtaccttcttcgaggcttttaacgtcccagtgttctggccgatcctggtgatgtacttcatcatgcttttctgtatcacaatgaagaggcaaataaagcacatgattaaataccggtacataccattcacacacggaaagaggagatacaaagggaaggaggacgtgggcaagacatttgctagttagaagctggactgaatctgtcacacgtattcaagaacggttttgagccattgtaacaatgcctttttcttcacataaagtagttgattatgaggaagttgaattttctttttaagaggagcctcaatgatttgtatctgaaatatcaggttcttgaagaaactggcatttaaatcaaattgcattgatttctttttcagtgatgttgatgtgtttgaagtggacagaattacagtgaaccataggcttgggggccaggcgggtggcagcccgagagagcgggagggagggtgggagtgcagccctgccttcccgaccacgctgaggccactcctgtgtgccagagggacatgccagcctgcttcctatgtgtgaaaaagaatgtaacactttgagggtgactgtcacatagctctgtggggttctcatgccagtttctgaatctcatctcactagaagatgtttttcaagttggcctctatcataatgactcaaaactttgttcttaactaccatgattgcttttgagggcctggaattataaatatatattatattttaattgtttgagattattttgacactttcctttgatacgtaacatttttcttttgattaatttaaacttgttctcatgcaacaacttctaaggaaccagaactagccagagcacaccaggtttggggtttgtcacatggccttttactttctatggggaaaaagaacctctccgcatgtcaaactttttgatgtgataaaaataatactctttaaacattttactaagtgacttttaaatccaactttattaaacaaagtgtcccttgctt

SEQ ID NO: 4523 - DNA, 1431 bp, Cricetulus griseus
cccccgcgccacctcgcaacctccaaactgaggccaggggtgcattcgaacccggagagcgagcatgtttttggtccagaggagactctacacccttggcagcagagcgaagcttccaaaagacaatttattctttgaacacccttggattctccacttctgccaaaaatggctttgaaattcaaaaatgccaaacgaattgaaggcctggacagcaatgtgtgggttgaatttactaagttggctgcagacccttctgttgtgaatcttggacaaggccttccagatatatcgcctccaacctatgtgaaggaagaattatcaaaggctgcattgactgataacctgaatcagtacaccaggggctttggtcatccatcacttgtgaaagctctgtcctgtttatatgaaaaaatttatcaaaatcaaatcgatccaaatgaagaaattattgtgacagtgggcggatatggagctctcttcaacaccattcaaggactggttgacccgggagatgaagtcatcataatggtgcctttttacgactgttacgagcccatggtgagaatggccggagcaacgcctgtgtttattcccctgagatctaaacccactgatgggatgaagtggtctagttctgactggacattcaaccctcaagaactggaaagtaaatttagttccaaaactaaagccattatattaaatactccacataaccccataggcaaggtgtataccagagaggagctgaaagtcattgctgacctttgcatcaagtatgacaccgtgtgcatcagtgatgaggtttacgaatggcttgtctacactggacacaagcatataaaaatagccacttttcctggtatgtgggagagaacaataacaataggaagcgctggcaagactttcagtgtgaccggctggaagcttggctggagcattggtcctaaacacctgataaaacatttacagaccgttcaacagaacacattttacacttgtgcaactcctttacaggcagccttggcccaggctctttggattgatatcaagcgcatggatagcccagaatgttattttaattctctggcgaaggaattagaagtaaaaagagacaggatggtccgtttgcttaacagcgttggcctgaaacccatcattcctgatgggggttacttcatcatcgctgacgtgtcttcattagatgctgacctctccgacatgaagagcgatgagccttatgactataaatttgtgaagtggatgacgaaaaataagaaactgtcagccatccctgtttcagcattctgtgactcagagtctaaatcacagtttgagaagttggtgcggttctgcttcattaaaaaagacagcacactggatgctgctgaagaaatcatcaaggcatggagcagcccgaagtcttga

SEQ ID NO: 4524 - DNA, 1431 bp, Cricetulus griseus
ctaaacctgaagacttggaggccgaggggcttcgacccagctgaggagcgaagagctgctggcagcgccgatctccccagcgcgcaggtttttagaactttagctctcaaaatgggcagaatcttccttgaccatatcggtggtacccgtctgttttcttgtgcaaactgtgacacgatcctgaccaaccgctcagaactcatctccactcggttcacaggcgccactggtagagcatttctttttaacaaggtagttaacttgcaatacagtgaagttcaggatcgggtcatgctcactggccgccacatggttcgagatgtgagctgcaaaaactgcaatagcaaactgggatggatctatgagtttgctactgaagacagccagcgttataaggaaggccgtgtgattctggaacgagcactagttcgagagagtgaaggctttgaggagcatgtaccatctgataactcttgaagaaaaaagataaatccatcttttcccaggtctccttcactgaaaacaaaatctacttacatacactgtcaccttagcatcagagtcggattcatgaactgcggaacaagaggttgtgagaatctaagatggaacctttctttctttctttttttttttttaattttgtatttcccatccaacagcagtttgtagagagaatattatgcagatgccgttaattttttccctatgtttacatcttgaggcagaagagtctgcagctacattgtaggctatgtgaggggagaaaattggggcccctagagtgaaaagaagtgtttgtgtacattttgagtggagaatatgtctagagcatggtttttaaacttatttgggcttcattttaaactttcttttaaacccagttatttcacttaatttgctagcttcaagaagagatccgaatctgtgcccagcgctggaggctcagtgttagcgtggcttgtgctggccagtgtgccatattcttgttggagaggaactgtagcaccagaacccattcttccttgtcagtcttgacccacagatgtcaccatccctagttacttgtcaccatgtacttggtgttgattggaaactttctgaaatggggcagaactgcttggctgtctttcccatgtaacttaagcatagtaatataaataaagtgatagttggatgttttggtcctgtgttacttctaaaaatgtcttttaaaagagcagaggtttgataagtgattttcttagtagttaaagtgtttcttctcaatcttaagctacatcgactatgtataaggtatttgtgtaaatggaagcctactgtttatacccacagcattgcatttagaaagcagatgagcagaatgtcagtatgtatccttgcataaactattaatctgcatctgttctgtgtgccttggctaacctggaa

SEQ ID NO: 4525 - DNA, 1431 bp, Cricetulus griseus
ctgaacgggacgtaccatcaccatcatcaccatcatccgacttactcgccctacatgggggctccgctgacgcctgcctggccagccggacccttcgaaacgccggtgctgcacagcttacagagccgcgcgggagcccccgctccccggtgccacgaggccccagcgcagacctgctggaggatctgtccgagagccgcgagtgcgtgaactgcggctccatccagacgccgctgtggcgacgagatggcacaggccactacctgtgcaacgcgtgcggtctctacagcaagatgaacggcctcagtcggcccctcatcaagccacagaagcgcgtgccttcatcacggcggcttggattgtcctgtgctaactgtcacactacaaccaccaccttatggcgtagaaatgccgagggtgaacctgtgtgcaatgcttgcggactctatatgaaactccatggggtgcctcgaccacttgctatgaaaaagaagggattcaaaccaggaaacgaaacctaaaacataaataaggcaaaggcttgctctggtaatagcagtaactctgttcctatgactccaacctcctcctcttctaattcagatgactgcaccaaaaacacatctccttcaacgcaaccgacagcctccggggctggtgcctcagtgatgtctgcagtgggagagggcaccaactctgagaacagtgacctcaagtattcaggtcaagatggcctctacataggtgtcagtctgtcttctcctgccgaagtcacatcctctgtacggcaggattcttggtgtgctctggccctggcctgagctggtgctgtcaagatgacaagaggccaggagggctctgagggtctcatgccacctgtctgaatttgtccatcaatccagatggcagcagaaatgcagacataacattccttcaatgcatgatttctgtgccttttgttttgcaagagatgtatttcccaagaagcttgctgaagcgaaaagagacagtccctgcaggaagggccaacacagcaggcacatggcctgctcccgccagcctgggcgtgcttcttgtgatcaaccttggttatcccagaatttcttcatacctgattgatgtgcacatttcacaagcattggtggagaggagcattaaaaccatttggtacatcccggaggctgagtgcagtcctgggatctcgacaagaatattagtttgcaagacggaattataatggacagatgctgactgactttactcagcgttcattatagtggctgatctgaggtcacttggaatttgtaaacagggtagcaaacaagatattttcttccatgtacacaataattttttaagtgcaatttgcgttgcagcaatcagtgttaaatcatttgcataagatttaacagcatttttataacgaatgta

SEQ ID NO: 4526 - DNA, 1431 bp, Cricetulus griseus
gtgactgctgtcccggggctccttcgagcgcgtggtgcttgcgccggggactcgctgaaagctctgcagcggcgcgcggcaggtgtcgcgagccgagccgtggccggccactccatgccgggttggaggctgctggcacgggctggcgcccaggtgctgggctgtggcgccacaggcctaggtgctgccccgggcttagggagtagaacaaacatctggttctttgttagaaatcaacacagcaagagtagtacttggtgggatgagcatctttctgaagaaaatgtctcctttgttaagcaactggtccaggacgaaaataaagcccaattatcaagcaaactgaatcccctgaaagatgaaccgtggcctttacatccttgggaaccaggttcttccagagtcggccttatcgcccttaagctgggcatgatgcctttatggaccaaggatggtcaaaagcatgtagccacattacttcaggtacaagactgccatgtgttaaaatatactcccaaggaagactataatggaaaaacatcagccctcactgtgggtgggaaaaccgtgtcacgcttctataaacctgattctatattggaattttaccgagaacttggattgccaccaaaacagacaattaaaatctttcatgtgacagataatgctgtaattaagccagggacccctctttatgctgctcactttcgccctggacagtacgtggatgtcacagccaaaactattggtaaaggttttcagggtgtcatgaaaagatggggatttaaaggccaacctgctactcacggtcaaacgaagacccacaggagacctggagctatttctactggagatgttgccagagtctggcctggaactaaaatgcctgggcggatgggaaatcagagcaggactgtgtacggactgaaagtgtggagagtgaacaccaagcacaacattatctacgtaaatggctctgtacctggacataaaaattgcttagtaaaggtaaaagactctatactgcctgcatataaggatcattgtaaaagcctgccattccctacttattttcctgatggagatgaagaagaacttgcagaagacttgtatgatgaggacgtgttgcaacccagtgcaccttctgttacgtttgtctgatgtcactggcacggcataacttcctgtgccctgtgcactggatgaaccagaacagtggtagaaccaggaatggtaaccctctgcttagttgtgatgctgccgccttgtctgtatcaaaggacataaatgcatcacttcccttacttaaatctgattagcaaacttactacattaaataaaccagtcacgtggattggatttgttaagattgacagtttgcaaagaacaaaatgttgccatttggaggcatcattctttagacacgtttcc

SEQ ID NO: 4527 - DNA, 1431 bp, Cricetulus griseus
gcgcgatccgctgcgaccaagagacacgcctgcggtgggaagaggaaggtttccgacagattgctctgaacaaagtggctgtcctgctgctggccggtgggcagggcactcgcctgggcgtcacctaccccaagggcatgtatcaagtagggctgcccagccaaaagaccctgtaccaactgcaggcagagcggatccggcgtgttcaacagttggctggccagcgactggggacccattgcaccgtgccctggtacatcatgaccagtgagtttacactgggaccgaccatcaagttcttcaaggagcatgacttcttccacctagaccctgctaacgtggtcctgttcgagcagcgcatgctacctgctgtgacttttgagggcaaggccatactggaacggaaagacaaagttgccatggccccagatggcaacgggggcttatactgtgccctggctgaccaccagatcctggaggacatgaaacgtcggggtgtggagtttgtgcatgtgtactgtgtggacaacatcctggtgcggctggctgacccagtcttcataggcttctgtgtgcttcggggtgcagactgcggtgccaaggtggtggagaaagcataccctgaggagccagttggtgtggtgtgccaggtggatggtgtcccccaggtggtggaatacagcgagattagccctgagaccgctgggctccgagggcctgatgggggcttgctctacaacacgggcaatatctgcaaccatttcttcacccgagacttcctggataaggtcaccagggagtttgagcccttgctgaagctgcatgtggccgtgaagaaggtcccatatgtggacgaggagggaaatctggtaaagccgctaaaaccgaatgggataaagatggagaagtttgtgtttgatgtgttccagtttgctaagaacttcgttgcctttgaagtatctcgggaggaggaattctccccattgaagaatgctgacacagccagcagggacaacccttccacctccaggagagccttgttggctcagcactaccgctgggctctgcaggccggagcccacttcctggatgtacatggggtccagcttcctcagcagtctggcttgctcccaaatggagaccctccagccatctgtgagatatcgcccttggtgtcttactctggagaggggttggagatgtacctacaaggccgaaaactccagtctccattcattctggatgaggaccaagccaggctgctgcagccacaggagtgctaacccgctggctcccagcctctccagccctggggctctatcgggtgctgatatagctctggcccaggctctgggtggaaatgctggcctgcaggacacagaagggagtgtgctagttactttacaaggttgggacctctttgggtccccc

SEQ ID NO: 4528 - DNA, 1430 bp, Cricetulus griseus
caaacacctcaacacagaacatgctttggatgaccggagcacggcccaatgccgagtacagatgcaggtggtccaacagctggagatccagctccgccaaggagagtgagcggttacaggccatgatggcacattcagagcttgcccagaatcatgagttctactaagaattgctgatgtcaggcccccccttcacctatgcctcccttatccgccaggccattctggaaactccagataggcagctgactctgaatgagatctataactggttcaccaggatgttcgcttacttccgaagaaacactgccacctggaagaatgctgtgcgccacaacctcagcctgcataagtgcttcgtccgagtggagaatgtcaagggggcgtgtgtggaccgtggacgagcgggaatatcagaaacggagaccaccaaagatgacagggagtcccaccctggtgaagaacatgatctcgggcctcagttatggtgcccttaatgccagctatcaggctgccctggcagagagcagctttcccctcctcagcagtcctggcatgctgaaccctggctcagccagcagtcttctgcccctcagccaggatgacatgggtgcccctggggagccactgcccagcaacgggagcagcagcccccctcgcctctcccctcctcagtacagccaccaggtgcaagtgaaagaggagcctgctgaggcagaggaagacaggcggccggggcctcccctgggtgcccccaaccccagcactgtgggacctccggaagacagggacctggaggaggacctgccaggagaagacatgtcctaagggctgggtgggcaggcggggcaggccacgaccctactgcccagtccagaccgcagcccacccaccccactctacagcccctccaacctcaaggcacttcggggacgtcaaaatggggggaggacctgggccagcagctccccaagccacctgacagacagacgcctggggacaggaatatccctgccccctgagaggacacagaacccttggcccggacccatagaggacatggagggccctcttcagacccctgcataggaccaagtccccatcatgctgggagtatggattctagcagaagagctggaaagttaagactctgtggaacccctatgggggacccacaacccaaggccacagactgggtgtcagggatgccctggagcaccctgccatggccccttccctgagaaagactccttggacatttcccaggagaaccccatgttcaccaccaacccttatcccaccctacacaagccaccctcttgagaggcaaggggccccgccttccccatgtatcccccacctgtgttccgtttgaccagcacagaatattaaagtcctctaatttaaaccggaaaaaaaaaaaaaataaa

SEQ ID NO: 4529 - DNA, 1430 bp, Cricetulus griseus
ggatccgggggcagtgcccaaaaggaaatgccactaaaagagttcatcgagagcctccagctgaagcctgggcaggtggtgtacaagtgccccaagtgctgcagcatcaagcccgaccgagcccaccactgcagtgtttgtaaacggtgcattcgcaagatggaccaccactgtccctgggtcaacaactgtgtgggcgagaacaaccagaagtacttcgtcctgtttacaatgtacatagctctcatttccttgccacgccctcatcatggtgggattccacttcctgcattgctttgaagaagactggacaaagtgcagctctttctcgcctcccaccacagtcatcctgctcatcctgctgtgctttgaggcactgctcttcctcattttcacatccgtgatgtttgggacccaagtgcactccatctgcacagatgagacgggaatagaacaattgaaaaaggagagagaagatgggctaaaaaaacaaagtggatgaacatgaaagctgtttttggccaccctttctctctagggtgggccagcccctttgccacaccagaccaagggaaggcagacccgtaccagtatgtggtctgaaggacccctgaccagcattgacacacagaccacatcatggcaccgtcccatcagctctcgtgaatgtttaggccaaagcattgcagagaaaaaaaaagttcccaacctctattttatttttaaaaaaaaaatcatctttccaatttttttgatgagtgaagctgctctttttccttttaaaatcacttctctggcctctgtttcctctctgctgtctgtcagcatgactaacgtggagggtgctgcccaggccctgccccttctactaattgaatacccccctgatgctgttcgtggatgaactggcccggtagggaagccacgagggccctgacctcctcctgcccacaaggcagcactggcagccacaggactcagaaccctcattgaagattgtgcacagacctatatcttatgttagcctgggaggtggttgtagatgttactcagcccgccacacagactagctctcccatcaggaggcactgtctgtgcagagtcacaggaaagggctggtcctgagctagggaaggaccagggctgtaggaggtgctgagagaagaccattcttgaacactcctcccatttagaccctgcgcaccgtgaagtcctccacaccagtgggttttaaagcagtcgccacaaaactccctttttagcttttgccttggggtgggggtagggatagggtttttcactctagtcctgggtgggaagaaagttaatgtagccctgtgatttttcagaagtcagtgggacatgctgcctcttcccaactctgtcagtgcttccacacggaaacaatgcaataaaccttttccaaacct

SEQ ID NO: 4530 - DNA, 1430 bp, Cricetulus griseus
gctgcttccctctggtggtgactgctggccctgcagctcaggccacgtgatttctaggaaacgcacctcccaggaggagaactgaaacttagggtggggactgtagaaaggggaggagagagcagaaacctagcctagaacaagctgagcctgtgatatcctcggtcgctcaggatggcctcaggcaaagcacgctgtacccggaagctccgaagttggataatacagcaattggaaagtgggcacttcccaggggtgtgctgggatgacacagccaagactatgttccggattccctggaagcatgcaggcaagcaagacttccgaaaggaccaggatgctgccatattcaaggcttgggcactgtttaaaaaaaagcataaggatgaggacataggaccccctgctgtctggaagactcgcctgcgctgtgccctcaacaagagtcctgaatttgaagaggttcctgagagaggccgtatggatgttgctgaaccctacaaagtctatcggatactgccaccaggaaccctccctgcccaaccaagaagccagaaatcgccatccaagcgacccaatagtgctgtgtcaccagagagggaagagaataaggagaagggaaggtccagtgggcttgtaaacccctcagactgtggcagcagtggcggtggcggcagcggcggcagcagcagcgggtacagcagcagcagcagccctgagccggaggaaggtgctagcccaagcgaagtctccactccagaggacccagtgtttatagagcatccactgcctctgaactcggactactcgctgctgctcaccttcatctacagtgggcgtgtggtgggcgagatcacggtggagagcctagactgtcgccttgtggctgacccctcagtctcggagagcaacatgccacaagtggtgtttcccacacctgatccactggagcctatccagcacctactgagtcagcttgagagaggcatcctggtggccagcaattccagaggcctttttgttcagcgcctttgtcccatccccgtctcctggaatgcacctgaggccccacctgggcctggtccgcatctgctgcccagcaataagtgtgtggagctcttcagtaccacctgcttctctagagacttggcccagtactgccagggccagggccccccacccaagttccaggcaaccctgcatttctgggaggagaggcctggctccagccacacccaggagaatcttatcacagtgcagatggagcaggcctttgcccggcatttactggagaaaattccagaggagcagaaagccgctttgtttctgttacagaacccagaacatccatctgctgctttatcactctgatcctcaggtctctgttgaaatagtcttgttctccacaccattggtctacctgctttgtg

SEQ ID NO: 4531 - DNA, 1430 bp, Cricetulus griseus
gggttcgcgcgccgcggggtcgtaacagccgagcgcttggagagcccgaggtctgtgagcagccgccatgtcgatcttcacgcccaccaaccagatcagattgaccaatgtagccgtggtgcggatgaagcgggcagggaagcgcttcgaaatcgcctgctataaaaacaaggtcgtcggctggcggagtggcgtggaaaaagaccttgatgaagttctgcagacccactcagtgtttgtaaatgtttccaaaggtcaggttgccaagaaggaagacctcatcagtgcatttggaacagatgaccagactgaaatctgtaagcagattctgactaaaggagaagttcaagtgtcagataaagaacgacacacacagctagagcagatgtttagggatattgcaaccattgtggcagacaagtgtgtgaacccagaaacaaaaagaccttacacagttatcctcattgagagagccatgaaggacatccactactcggtcaagcccaacaagagcacaaagcagcaggctttggaagtgataaagcagttaaaagagaagataaagatagagcgtgctcacatgagattgcgcttcatcctgccaataaatgaaggcaagaagctcaaagaaaagctgaagccgcttatgaaggtcgtggagagtgaggactacagccagcagctggagatagtatgtctcgtcgatcctggctgcttcagagaaattgatgagctaataaaaaaggaaaccaagggcaagggttctctggaagtactcagtttgaaagacgtggaggaaggagatgagaaattcgaatgacactctccagctcctcagctggagcaccacagaggacgttggttcccagcagcagcattttgtttttgtgacctgccaaaagccctgctcaagcaacgggccactttcccatcttgtgttaaacatttacctaggtactgggtgtttttgttgtaaattggggtttccagcaaaaatgacaaacccaaaatacagtgtccagaacagctcttcactgctgtctatgcctttatagttccacagaaaagatcaaagacatggataagaaggtagatttagtatgtgataagtcattggagaggggtctgtataacaaagtggagtgtttactagaatgaagatgtggtgcttttgcagaatgaagtccaggtctggggtgtgagcttggagagaagacttcctggttcctacatatagacgtataatgactagggaaaatatgaatttttaaattttcaacaaacatggccctacaacttagattattcttggtaaaatatatataaagccatttaatagtaattcttaaaaagtttataatatatgttagtatagctaaaattatacataatcaataaaacttatttttactaaaaaaaaaaaaaaaaaa

SEQ ID NO: 4532 - DNA, 1430 bp, Cricetulus griseus
atgtggctgagctgaggcgcgcagccgggagactctgcaggatccgcgcccggagcatctgagcggtgaactcttcaagtcttcgaattttaaaaaaaaaaaatggcctccaataaaactacattagcaaaagatgggaaagaaacagaatggaaagagtaaaaaagttgaagaggcagagcccgaagaatttgtggtagagaaagtgctggaccggcgtgtagtgaatgggaaggtggagtatttcctcaagtggaaggggttcacagatgctgataatacttgggaaccagaagaaaatttagattgtccagaattaattgaagcatttcttaattctcaaaaagctggtaaagaaaaagatggtacaaaaaggaaatctttatctgacagtgaatctgatgatagcaaatcgaagaagaagagagatgctgctgacaaaccaaggggttttgccagaggtcttgatcctgaacgaataattggtgccacagacagcagtggagaattaatgtttctcatgaaatggaaggactcagatgaggcagacttggtgctggcaaaggaggcaaatatgaagtgtcctcagattgtcattgccttttatgaggagaggctgacttggcattcttgtccagaagatgaagcccaataattgtttgcattttttatatatatttatatatatataaaatctgaatcttgggttttgaattactagtatagaaaaaatagcgttctaatgaaaatcgagtttgatatgctggttttgaaagtattgatagtagttgggatatttttggtttttgttttgcatcaaaaggcactgactgattcctttgggcaaataaaagctttctgtagttgcttcctttcacaatagaatgtttgataaccatgttgtattttctcggctttgaagaacagcttttcttaaacgctgaggagatcttacagtcattagtcaaccaaaacttatttttgactgagacacagaaaggaccattctgggttttttgtttgttttttttttttttttttttttgtttctctttgtagaaagttgaaatctcctaaaaggttatgattcgtggactatctgtttgctgtggaaatggaatacagttaaagaagatgttggcaatttcaaacccattgacataaatgaacaaaatttggtaatataaattaatgacttgcatgctttttctttaccctgactcattccttactggtaggatccatcttttcagtatttggttctggttcaatgaatgagccagaaaagtaactttgtagtatcagaatgtcatccaactgtatatttactttattgtaaataatggtgaacagtggtcaataaatagttttatattcctttaaaaaaaaaaaaaaaaaaaaaaaaaaaaaaaaaaaaaaaaaaaaaaaaa

SEQ ID NO: 4533 - DNA, 1429 bp, Cricetulus griseus
aagcgcacgtcgagcgggggagcggcgctgcctgtggagatccgcggaggccgacaggattcgttggctgccgtccccgctgccgtgcactgggttaaaaacgacaacgaacaccaaccatgaaagatccaagtcgcagcagtactagcccaagcatcatcaatgaagatgtgattattaacggtcattctcatgaagatgataatccatttgcagagtacatgtggatggaaaatgaagaggaattcaacagacaaatagaagaggagctgtgggaagaagaatttattgaacgctgtttccaagaaatgctggaagaagaagaagaacatgaatggtttattccagctcgagatctcccacagactatggaccaaatccaagaccagtttaatgaccttgttatcagtgatggctcttctctggaagatcttgtggtcaagagcaatctgaatccaaatgcaaaggagtttgttcctggggtgaagtactaacatatttgagtagacggggccctcttttggtggatgtagcacaatttccacactgtgaaggcagtattagaagacttcattgtaaaagctctctcgtcactgtgttacacttatgcattgccaaagtttttgttagtcttgcatgcttaataaaagtgctgagactgttacgaagtaagaagctgtcacacagttactgaaagtagaatggccccatggcttaatgtaaagacagcaatggaagaagcaccagtcaattgtgacaaagaaccaaattaaataaccttcaactctcactgacttgtctgtctttgaggctaaactggtcccttaggattaattgatactttttaatgtctacactttgcaaaaataagtaaattaggttctgattgttaagcagatttctcaattgcatttctcaattgcatttgtccattgaaaatacccttttctgaagaaagtctgttaactggaagtgtcattacacagaatgtctgacagaggttactttggtgatcagtctggctttcgcctggtgcattatcatgttagggatactgagttctccctgcggtgaacttgaggaaatacaatttgaggcttgtgtcttctaaggattcattgcatcatagccatacatgtgtgaagtctaacacaggaccaacacagcccataatctaattgaagtactaaaaagatggtagcatggttttgagtggtgctcttccttgctttgttaaccatcatgactatagtctgcagcacaatttttcttttaacaaagctagaacagttttggcttcttaaacttcatatttgggtaggttaagctgccatacgtgttcagtgtgaatagtgtttaagttgaaaatattagtaaaaaaattatattttttcaaaaatatttaaaaaaaaataaataatagtagaac

SEQ ID NO: 4534 - DNA, 1429 bp, Cricetulus griseus
ccgccgccgccgccgcctcctcattcatcctcgtgcaccataggcggcacaggcaccaagatgtccaaccgagtggtctgccgggaagccagccacgccgggagctggtacaccgcctcaggacctcagctgaatgcccagctagaaggttggctttcacaagttcagtctacgaaaagacctgctagagccattattgccccccatgcaggatacacatactgtggctcttgtgctgcccatgcttataaacaagtggatccagctattacccggagaattttcatccttgggccttcccatcatgtgcccctgtctcgatgtgcgctctccagtgtggatatatataggactcctctgtatgaccttcgtattgaccaaaagatttacggagagctatggaagacaggaatgtttgaacgaatgtctctgcagacagatgaagatgaacacagtattgaaatgcatttgccttatacagctaaagccatggaaagccataaagatgagtttaccattattcctgtactggttggagctctgagtgagtcaaaagaacaggaattcggaaaactcttcagtaaatatctagcggatcctagtaatctctttgtggtctcttctgatttctgccactggggtcaaaggttccgttacagttactatgatgaatcccagggggagatttatagatccattgaacatctagataaaatgggtatgagtattatagaacaattagatcctgtatcttttagcaattatttgaagaaatatcataatactatatgtggaagacatcccatcggggtattattaaatgctatcacagagctccagaagaacggaatgaatatgagcttttccttcttgaattatgcccagtcgagccagtgtagaagctggcaagacagttcagtgagttatgcagctggagcactcacggtccactgaagctccgaccctcagggacgccacctgcacagactcacactctgtccggggtccagcctagcctttaccaagatgttggttctggtgtggggggatcctgaaacctcagactaatagaactctcttatcttcttttctagtaggtgtagtcctccttaatttcaactcatttaaaaatgctttatagtttggggcagtggaaggaaggctggaatcagaatatttgtgacttgtaaagcatttagcatatctgaaatttgcactctttgcagactcatgcacatatattccgctttcagaatagttttgcagattgtacacagacaaaaaagggtggaagctttttaataaaagaaattgcatttataaatgatctgtattagaatataagaaatctccagttatagacaattactacccatgttgtacaacagataccttctattttagttgctaataaagggctacacaactc

SEQ ID NO: 4535 - DNA, 1429 bp, Cricetulus griseus
atgcgctcagctggcgcggcccgagcctgccgcggcgcccgccggtgctggctctccgggtgcgcgggctccacagaggggccgcagcagcggacgggccccgagcgtgccgacgaccgggaggcgctggtagacctctgccgcagaaggcacttcctcagcgggacgccgcagcagctcagcccggctgcgctcctgagcggctgccacccgggctttgggacccttttggggtgtggagttgcgaaagaacctggcctcgcagtggtggtcctccatggtggtggccaggggagcaggtcttcgcggtggacgccctccaccagcagccaggcccttcgcagcccggggacagcgcctgcaggttagtgtctccagagtgtgtacgcgaaatcttgcaagaccaagaaacgagtaaggaacagctaatggcgtttcttgagaacttattaaaaacttctgggaagctacgggcgactcttcttcacggtgccttggagcactatgttaatggcctggatctggtaaatagaaggctaccttatggtcttgctcagattggagtgtgtttccatcctgttttggacactaagcagatacctagcagtgtcaaaagaattggtagaaaagactgaagcttcattgggtgtggtttaactcctgcaaggaattcaagccagtggtttgacttctggctgcggcataggcttctatggtggagaaagtttgctaagagtccatctaacttcagcagcactgactgtcaggatgaagcagggcgaaagggaagcaaaactttactacagctttccctggggaaaggagccaatcgagactctgtggaacctaggagatcaagaactcttacacatgtatcacgggagtagtgcgtctacattacagggtcgagatgggcggaaaaacgtcattccttgtgttctgtccataaatggggacctagacctaggcacgctggcttacatctgcgattccttccagctcacagagaactcctttgcaaggaagaagagccttcagcgaaaggtgcttaaacttcacccttgtttagcccctattaaggttgctttggatgtggggaaaggcccgacagcagaactgagacaggtttgtcaagggctacttaatgaatttctagagaatgggatttctgtgtggcctggttatttggagactgtgcagtcttcattagagcaactctattcaaagtatgatgaaatgagcattctcttcaccgttctcatcactgagactactttggaaaatggattgatccagctgagaagcagagacaccacgatgaaggaaatgatgcacatatccaaactgaaagactttctagtcaagtatctagcatctgacaaaaaaagtataggtcttcatagtcctgtaataaatattctgtattgag

SEQ ID NO: 4536 - DNA, 1428 bp, Cricetulus griseus
cctgcgacagctcccaagcccatgccaccacgccccctctgccaaatcagcagtttggggtctcattgcagcacctccaggagaaaaatccagaccaagtgcccattcctatcgtgctcagggagacagttgcctacctgcaggctcatgctctcaccaccgagggcatcttccggagatcagccaacacccaggttgtacgggaagtgcagcagaaatacaacatggggctgccggtggactttgaccagtacaatgagctgcacctgccagcagtcaatcctcaagaccctttcttcgggaacttcctgagcccttgctaacctttgacctctacccccacgtggtgggcttcctcaacattgatgaaagccagagagtggaggtaacacagcaggcgctccaaactctgccagaggagaactaccaggtgcttcgtttcctgactgctttcctggtgcaggtatctgcccattgtgaccagaacaagatgaccaacactaacctggctgtagtctttggccctaacctgctgtgggccaaggatgctgccatcactctcaaggccattaatcccatcaacaccttcactaagttcctcctggatcatcaaggggagttgtttcccagcacagatgcccagggcgtctgagctcagcccccccaccccttctctggcagccccagttggacttgtcctcctggtattaaccttattggagtccagggttcctgcctaggaaggggccctgaagccccaggagatggaatttggagctcaccaactggacagcccctcctctccctctttccagcccctaaccagccctggaggcctgttattgtaagacattttctttgccttatacctctcactgcctctttggttgctgggcttttgatagctttcattccactcctaatgaaaacttgtgaccctcttccagaagtctgttccctagtgatagggaagtacctgcagtgtccctgccccacaggtatggccaggcatgacagctctagagatggtactgcacactgtgggatctgcactgaccaccttttagacgaggcaggcctgacctcattggcttttcctgcacccgtgtgtcaggtctctctggcgccacaagtgcttctgtcagtccaggcctcatgcctggcccagcctgggccattctgcttttgcctacctttttgtatcaagtgttgctacattccatttactgaggagccttttggacctcactagtccttctcctgcccctgccctttcagcctgtagttggagggggcgctcttactgtgaatccagtgttcacatttaccatgatttccttggcaccaatcatgtatttcaccatttgctactttttgtatttcaataaaaataaaaatggaaatagaaaaaaaaaaaaaaaaaaaaaa

SEQ ID NO: 4537 - DNA, 1428 bp, Cricetulus griseus
tctccaaggaggatatgaagcgttttcggcttcctgccccgagctgtgcagcaaacagtccacccccatggggctcagcctccccctgagtactagtgtccctgacagcgcagaatccggatgcagctcctgtagcacccctctctacgatcaggggggcccagtggagatcctgtccttcctgtacctgggcagtgcctatcatgcttcccggaaggacatgcttgacgccttgggcatcactgccttgatcaacgtctcggccaattgtcctaaccactttgagggtcactaccagtacaagagcattcctgtggaggacaaccacaaggctgacatcagctcctggttcaacgaggcaattgacttcatagactccatcaaggatgctggagggagagtatttgtccattgccaggccggcatctcccggtcagccaccatctgccttgcttacctcatgaggactaaccgagtgaaactggacgaggcctttgaatttgtgaagcagaggcggagtatcatctctcctaactttagcttcatgggccagctgctgcaatttgagtcccaggtgctggccccgcactgctctgctgaagctgggagtcctgccatggctgtccttgaccggggcacctccaccaccactgtcttcaacttccccgtctccatccccgtccaccccacgaacagtgccctgaactatcttcagagccccatcacgacctcccccagctgctgaagggccaggggaggtgtggatattctcgtgccaccgggacgccactcctcccatgggaggagcaatgcaataactctgggagagactcatttgagctggtccttatttatttaagccctaccccctcccctcccgagttccactgggttcctaagcagtcataataatgactactgcaagacatttgctgaactcagcattcgggtccaatatgttgtgggtacatcaagtccctctgacaaagcagggcagaagagaaaggactctgagccagtttcttcacttgcccatttttttttttctagaaacttcatgcttgacatacctaccagtattaaccattcccgacgacatacacgtatgagaattttaccttatttatttttgtgtaggtggtctgccttcacaaatgtcagtgtctactcatagaagaaccaaatacctcaatttttgtgtttgcgtactgtactatcttgtaaatagacccagggcaggtttggtttcaacactggtggacaaaaccggtgttggtttgtagttttagttgtcaacagttgtatgtttgctgattatttatgacctgaagtaatatatttcttcttctaagaagacattttgttactaggatgacttttttttatacaacagaataaattatgacgtttctattaaaaagaaaaaaa

SEQ ID NO: 4538 - DNA, 1428 bp, Cricetulus griseus
agcgcggagagcggcggtgccaggaggctcggtgggctccccttcaagtgtacgtctgtgagcggcctatgctgtttggcactcatgggtgtaagcaagttagatattctataccggagacttcttctcacaaaacttttcatcagaggatggggaaggccagaagatctcaagagactctttgaattcagaaagatgattggaaatcgagaaaggtgccagaatctggtttcaagtgactatccagtacacattgataaggttgaagaacagtcagattgtaagatcctagatggacactttgtttctcccatggcccacctatgtgcctggtatcatgccaattgaatctgttattgcaaggttccaatttattgtgcctaaggaatggaacagcagatacagacctgtgtgcattcatctggctggaacaggagaccatcattactggaggcgcagaactctcatggagctgactaacctgaatctggtttccagaaagttaaatttagatatgacagaccaagtagtgcccccaaatgctaagtgccatactcacgtagcgaacttctcagttccagttgacccaagtcttattattgtggtacaagccaaagaggatgcctatattccacgaacaggagttcgaagcctacaagaaatttggcctggttgcgaaatccgatacctagaagggggtcatatcagtgcctatctctttaaacaaggactcttcagacaagccatctatgatgcctttgaacgtttccttcataagtatgctaactaattggattgccatataacatcctgtttcccactaaaagaattctccctatgatgatgtgaaaaacaagcagacagcactacttacctgattgctgccatatagtctatatgccagtgttatgggtcagttgccaactgtagatacatttcagtaatttaaagcagtacttgaatcatatagtcctgaagttattttgttacttctttttagaaaaatctcatatactcaatgtgatatgacatctattgttactatttattaaaagacattttaattttgaataatttattgattcagaatagatagaaatgctattggtttttaatagaattgttgaaactgagattataacatcataagtactatatgctgttatatggcatttttttctattaacttgatttaaaaaaaaacttgttcctcctttttgtctatgtagtgggtttatgatatagttttcaactttagataatttactgccatagaaatacctaagatatgtaaatcagtgttagttttgaattaagaaaatatcctgactgctgaactgtacctacatggcagtacaaatttgtaatcccagcacttgagaagtgaaggcaagagggtcaagagtcccgacattgtcctttacatag

SEQ ID NO: 4539 - DNA, 1428 bp, Cricetulus griseus
  modified_base (74)..(74): a, c, t, g, unknown or other
aggactgtcatccgagaaactgccgatacgacgggcaaattgctgtgtttggaactggttttcagcagaaattnagctacaacattacctcttggtgggtgctggtgccattggctgtgaaatgctcaaaagttttgccctcatgggcctgggagtcagggctaatggaggcgtggctgttgctgacatggaccacatagaacgctccaacctcagcaggcagttcctctttaggccccaggacattgggaagcccaaggcagaggtggctgcaacagcagcccagcgtctaaacccagacctacaagtgaccttctatactaacccactggatcccaccactcagcacatctttggtgacgacttcttctccagggtggatggtgttgttgctgctttggacagctttgaggcccggcactatgttgccgctcgctgcacgcactattgcagatcctgagggtgtgccccaccctctgtgtactctgcggtacttccccagcacagtcgagcacatcctgcagtgggcccgagatgaatttgagggactcttcagccgatctgcagagaccatcaactgttaccaagaggcatgcacttccctgtcgggcatggataggacgcaaacgctaatcttactgcagcaagtgatgggtgtcctaaaaaggcgcccaaagacctggcaagacagcgtggtgtgggctctaggccactggcaactatgcttccatgattggcccggaacagctgaaggaactacaggaacttctgagagactggagcaagggccctcggctgaagcctgtgttgtttgagaagaatgatgacagcaacttccatgtggactttgtggtagcagcgactgatctgagagctcagaactatggaaatcctaccagttaaccatgctcagatcaagcaaattgtgggccggataatcccagccattgccaccagtacagcagttgtggcaggcttattgggcctggagctgtataaggtggtaagtgggccacggccccttagtacctttcgtcgaagctatctgcacctggctgaaaactacttcatacgatcagtgccttctgccccagccctccagttgttccagcacctgaagtggacctgttgggaccacctgaaggtgcctgctgggcagcctgagaggacactggaatcactgctggcccatctccaggaagaacaggcactgaaggtggagatgctgctgtatggcccttacatactctattctgcacaatggccacttgaaaagcaagctcggtgcctgtgcctcagggtgacagaactggttcagcaagtgaccggccgcgagcctgagcctgggctgcgggtactggtgttggagctgagctgtgagggtgagggggatgaaactgcctttccacctctgcattatgagctgtg

SEQ ID NO: 4540 - DNA, 1428 bp, Cricetulus griseus
caggctgtgttgtcctctttaccagcgcggccgagcccgtggtagcatccggcagggaaatggtcgtggtttcggtgcccgccgaagtcacagttatcctgttagatatcgaaggtaccacaaccccgattgctttcgtgaaggacactttattcccttacatcaaagagaatgttaaggagtacctgcagactcactgggatgaggaggaatgtcagcaagatgtcagcctgctgaggaaacaggctgaagaagatgcacacctggatggggccgttccaatccctgtggcgtcaggaagtgacctgcagcagatgatccaggccgtggtggataatgtgtactggcagatgtctcatgatcggaagaccacagcgctcaaacagctgcagggccacatgtggaaggcagctttcacagctggccgcatgaaggcagagttcttcgcggacgtagtcccagctgtcagaaggtggagagaggctggaatgaaggtgtacatctactcttcagggagtgtagaggctcagaaactgctctttgggcattccacagaaggagatattcttgagcttattgatggccactttgacaccaagattggacacaaagtggagagtgagagttaccgcaagattgcagacagcatcgggtgttcaaccagtaacatcttgtttctcacagatgttactttagaggccagtgctgctgaggaagcagatgtgcacgtcgctgtggtggtgagacctggcaatgcgggactgacagacgatgagaagacatactacaacctcatcacatccttcagcgagctatacctgccgtcaacatagagcaggttctgaggaagacgaaactgttcccccctaatgtctagctttattctaattgtaaaagtaacttacttatatgtacacacagacagatgcaagtgtatatacatgtatgtgtgctcagattaatttccacgggcacataggtgagcaaagtttcggttctgtgaaaatcaaattcatgtaaagaggctttatatgaccataactcgtaagtcttactgaggccagagtgtatttgatagaaggaactgcaaatacaaatcaaatgtgggtgtttatcaaattctttactggaatggaaatctagttttgagaaattattatccagagacctgttatttcaaaactggcagtgcttcagaggcatctatagaggaacccacctccactgacccgccagtgttagcactgttttctcattggcttctgtgtcttacgtagcttgagaatatatgttaatgactagtttttaaaaacgttttattgaagccagtgtaataccacaaagagctctaatgtgtaatatttcctctgaagtggctgtgaagatataaattttataacagcattgtttatcccagtgccattctga

SEQ ID NO: 4541 - DNA, 1427 bp, Cricetulus griseus
ggccagtgtgtgtgtgtgtgtgtgtgtgtgtgtgtgtgtgtgtgtgagagagagagagagagagagagagagagagagagagagagatgtacccattaggatttatttaggtgcccattgcatttttttgtactatggagttgtttacactaagcatgactgaagacaactaacttcctccctaccagtccattgtgttcagctccaagaggaaagtcaaggctcctttgactgtcaaatgattaccttaacccatgtggtacccaatgtcagaacacttaagagttctaaataattttgtgctgctattcatcaaaacttctattccagatttgtcatcttaagaagttagagatatgaagaggtattcttgatgtatctaccagtatttagtagtaacatttacctgtccactgtgaatcgaagcctgaggcacgctacttaaccctggacacactatcctgtcctctgtgttgtgttctgaggatttttcctgagtcatgcaggcaatgacagtcgactgtaaataccacatgtgagtttacccggatctgtgcattttgtgccttattcacgagagtggtagaattctgcagtatgttgagtgtttccactatagtgcatcatttcccatgtgccagtcgtaagtgtttttcagccagccactgaagacttcttacaaagtcataaagcaacctggagcaatttgttgttgaatcagaagaagtacccacctttgcctatgttataaacattccacccctgctcttctgataatgtgaagtcagatgaggattcccagggggacgtggcacctgcggaaaccatgtctaaagtcatttctgtgtagcttggcagagcccactaatggctgatgatgtgcagcctactgacgactttggttaacccactgtacatcacccagtcatttacccaacattaccttcaggtttgcaactaaaatattacaatttaatcaattaaaccaaccaacaataagcactacgcagtcagtctgccaccaacaacgtgtttgcatttaccttaccaatattaatcccagcgtggtaactctgtgtgaccccgataacattttgtaacattgtgctgccttagagtgtactgtgagttctatcagtatttatgttgaattttctaacatggattctagtctctattctgttaatttaattttaaatgctttatccatttgtgcaaaggtaaacacagattgtatcttttttaatggtacggcataaaaaataaccctaaagtgaagtggctctatactgttttatagagtactttaacatgtatagatatcttgtaaacttgtattgtggatgtgtaaataatatgtactttgggtttttaacaccgcatgtaaagtcaaaataaaatatccaagtcattaaaaaaaaaaaaaa

SEQ ID NO: 4542 - DNA, 1427 bp, Cricetulus griseus
ccccgcccctcatacagtggcgctctcgccatcttgcgccccctccagcctagcccagtcaccttttccctttctacactctctgaccccgttccccgccccccagcccatcgtgtcccggggccgccgccgccgccgcagacaccgcgccatctctgtccccctcattctcctcgcgggacgcgcagacgtgcctccacgtgtccttaagcagagatgaataatactgcagctagcccgatgtctactgccacttcaagcagcggaagaaatacagggaaggctataagctttgctggagaattgcagagcatgatgttttctttaggtgatgctaggaggcctctccatgaaacagcagttttggtagaagatgtggttcacacacaactaattaacctgttacagcaagctgcagaagtctctcagctgcggggagcaagggtgatctctgctgaagatcttctgttcttgatgagaaaagataagaaaaagcttagaagacttctaaaatacatgtttatccgagactacaagtcaaagatcatcaaaggcattgatgaggatgacctactggaagaaaaactgagtggcagcagcagtacaaacaagagacagaaaatcgctcaggatttgatcaactctatcgaccagacaggagagcttctggcaatgtttgaggacaacgaacttgatgatgttaaacaggaaagaatggagagagcagaaagacagactcgaactatggattcagctcaatatgcagaattctgtgaaagccgacagctaagcttctccaaaaaagcttccaaatttcgagactggctggactgcggcagtatggagataaagcccaatgttatagctatggaaattctggcatatttagcatatgaaacagtggcacagttagtggatctggctcttcttgtaagacaggatatggtatccaaggcaggggaccccttcagccatgccatttctgcaaccttcattcagtatcacaactctgctgagggggcctgtttgaagtcctgcccagactctcctgagaacacaccgcctcctacaccaacagctccctcttctggatcacagcattcctcgagagccacatctgggtccttggggaatgggagtacaggacaagactctactaaaagcaaacagagaaagaggaaaaagagcactgcggcctgtggtgttgaggctcacagcgatgccatccagccctgccacatcagagaagccattcgacgctacggccacaagattggccctctttccccattcacaagtgcctaccgaaggagtgggatggctttcctggcctgctgaggggaccatggctgtgcctgctacaagagagaaaatggtgcaccgaggtcattcttccctgccctggctgaaaataaaatatgagttta

SEQ ID NO: 4543 - DNA, 1427 bp, Cricetulus griseus
gtcatccatggcacagacacgattggccttcgctgcctcggtcctttctttcatgctggaaaacctgcagaagcctgtcatcctcaccggtgcccaggtacctatccatgcactgtggaacgatggccgtgagaacctgctggggccctgctcatggctggccagtacatcattcctgaggtgtgcctattcttccagaatcaactcttccggggcaatcggacaaccaaggtggatgctcggaggttcgcagccttctgctcccccaacttgccccctctggccactgtgggtgccgatgtcacaattaaccgcgaactggttcagaaggccagcgggaaggaccgtctggtggtgcacagcaccatggagcgtgacgtgggcctgctgcgcctctaccctgggattcccgcctccctggttcggaccttcctgcagcccccactgaaaggtgtggtcatggagacctttggctctgggaatgggcccaccaatccagacctgcttcgtgagctgcgggaggcagctgaacaaggcctgatcattgtcaactgtacccactgccttcagggggctgtgacttcggactatgcatctggcatggccatggcaggagctggcattgtctcaggattcgacatgacatcggaggctgccctggcccaaactgtccctatgtgctaggccaaccagggctgaccctggatgacaggaagaagctgctagccaagaatcttcgcggggagatgacgctgccgctgcaagatggcatactgggtcgcagggtagcatggcttctcagtcggaatggcagtcaggaggctgatgccacgcaggatgtcctgatacctagcctggccctggctgcagctcatgctggtgacctagatactctgcaggcttttgtggagctgggcagagacctaaacctgaaggactgtagcggtcaaaccccactgcatgtcgctgcacggaggggccatgctgctgtggtcagcacgctgctacagaagggcgtggacgtgaatgcccgtaacgaagatggccacagcccgctactgctggccgtgaggggcaggcatcagggtgtcattgggctgctgcgggccgctggggcttgcctgtctgcccaggagctggaggacattgggacagaactgtgcaggctggcatccagggcggatagtgaaggcctgagggcgtggtgggaggcaggagctgacctgggacagctggactattatggacactgtgccctgcaagtagccgaagcaactgggaatgctgatgtggtgaccctgctacagagcttgaaggacaggcccaatgcccagccccaggcccactgagtcctgggccgggccagtgtctcccagtgaactcccattggtttgaagctggatcctggcacctagtattccagagcc

SEQ ID NO: 4544 - DNA, 1427 bp, Cricetulus griseus
agtgcttgtggtctccgaagatctgtccccgttcctcgtgcctgggtacccgccaccagcatggaggctcgccgcgcgcggcaaaaggctctcaaagtaaagaacttaaagaatgtcagatatatgaagttgatttccatggaaacatcgtcatcctctgatgacagttgtgacagctttgcttctgataattttgcaaacacaagactgcagttggacagggaaggctgcaggacccgaagtcagtgccgtcactccggaccactcagggtagccatgaagtttccagcacgaaacacccggggcccagccaacaaaaagcagtcccctctaaaccctctgagaactctgcaaatgattcccattctgactctgaagaagaagaagagaagaagaagaagatggcatgaactttatggagaaaaagggctttaaatgtaaagcaaaacaaagcaatgcttgcaaaactcatgtcagaattagaaagcttccctggcttattctctggaagacattccctccccggccacagatccaaagattcaaagccacctagaagacgcacattcccaggtgtcgcttccagaaggaacccggaacgaagagcccgaccgattaccagatcaaggtcccggatcctggggtctttgggtgctctgcccacagaggaggaagaggaagaagaggaagaggataagtacatgctagtgagaaggaggaagtctgtggacggctacatgaatgacgatgacatgcccagaagtcgtcgccctggatccatgacccttccacatataattcgcccagtagaagaagttacagaagaagagatcaagaacatttgcagcaactctcgagagaagatctacaaccgatcactgggttccacttgtcaccagtgtcgccagaaaaccattgataccaaaacaaactgcaggaacccagactgctggggcatccggggccagttctgtggtccctgccttagaaaccgctatggtgaagaggtcaaggatgctctgctggacccgaactggcactgcccaccctgtcgaggaatctgcaactgtagcttctgccgccagcgtgatggacggtgcgccacgggagtcctggtgtatttagccaagtatcatggctttgggaatgtgcatgcttacttgaaaagtctgaagcaggaatttgaaatgcaagcctgaagattctccgcctgcctttcggcttctcaaggcccttttgttcttgataatgttcttgatggggagctgagtaagaatcttggtgagcagtctgtcttagaactcggtcaggttaatcttgttagattcacacttgtttctgatacatcacggaaggcatactattagttacacttgagctacatgtagtttcccaaagcttgccctggccctaccttgtagcctccc

SEQ ID NO: 4545 - DNA, 1426 bp, Cricetulus griseus
ggaacatggcggcgcggtcgctgtgggtcggaggggatggctacaaccattcagcactgccacccaagaactgctggggaagactgcagttctgaggaccctcctgatgtacttggtccctcccttgctgaacgagccttaagactaaaagactgttaaactggaaaaagaagtccaggatttaacactgagataccagagagctgtcgctgattgtgaaaacataaggagacgaacccagagatgtgtggaagatgccaagatatttggaatccagagcttctgtaaggacttggtggaggtggcagacattttggagaagactgctgagtgcttttcagaaggagccaaacccgaggaccacaagcttactctggaaaaagtcttccaaggactgtcccttttagaagcaaagctgaaaagtgtgtttgccaagcatggcctagagaaaatgacacccattggtgacaaatatgaccctcatgagcatgaactcatctgtcacatgccagcaggtgttggagtacagcctggcactgtggcattagtacggcaagatggctacaaacttcatggccgcaccattagacttgcccaagtggaagtggcagtggagtctcagagaaggttatgagcaagccaccaggaactaaaacttccagggtcctggcacctgtgtctcctttatttattaagctggtttgtattatacatgaggtccttcatgtgctctgctttggatttagtcatattggctttatctctacaatatcttattggttttatgtgacctgtttggtctcatcacaagtcctgacattgggcatttgaacaatgtgacaagtgtcctatggcctttaccaaaatgtttacaaaaatcatttaaattggtactctgatgactgaatccaaaatcccttaactgttttttcaactaatttctggaattagtacagcatcttgtgtcttgtattttatgggaaaaggagatggtagggattggtttgatatttaggtacttagatgacaaagctttacccttgtataaatttaaatcatttgggcacccctttctggtcccatttgaaagggctaaagggtcaggccagtcttccgtttttttcttgttggtgaggtgtactcttttattaaactggtctcaagtgtatgaacagacaagctctggctgcctccacaacacaacccactcccagggagaccaaaagcctctatacatcgcaagttggagagtcaggctttgggggccaggcatagtggctggtcattcaaaattcaaaagtattaccttgaatgatttttttcgcagtacataatttatacaaaaataatgctgccatctcccttgcatgcactcagaatgaactgggccatcctaagagaaaaacaaaaaaaaaaaaaaaaaaaa

SEQ ID NO: 4546 - DNA, 1426 bp, Cricetulus griseus
cggggacgggaacaagatggcggtcccggggcaggcagtatgggcttattttgccaaagaaaacacagccgttgcaccgagttttgcaaaaaccatcagtatttgggaatgattctgatgatgatgatgagacctccgtgagtgaaagccttcagagggaagctgctaagaaacaggccatgaaacagaccaaactggagattacagaaagcccttgcagaagattccactgtgtatgagtatgacagcatctatgatagaaatgacagaaaagaaggaagaaagagatggaaaagggagaatttgatgacaaagaggcatttgtaacatctgcttatataaaaaaactagaagaaagagctgaagaggaggaagagaaaagaaggcggctgccctggaagcacgactggatgtgaccaagcagaaagatcttagtggatttttataggcacctgttaaatcaagccgttggtgaagaagcagttcctaagtccagcttccgtgaagccaggactggaataaaagaagagaagcctagggttactctgatgagcaaattcagaggacagacagaaagaaatcgagacagaagggaaagcagcccaagatctagaccaaaggatgagtttcttgaccaggaaagatccaacaaagtaagaaacatggaaaaggacaatggggaccaagagaagccctctcgttctgaaacatcactagcaacaaaacatagactggcagaggaaaggcaggagaagggcaatgagcaatcgaagccccccgaggccttgagcaagtttgcaaagcggagcaatgaggaaactgtgatgtcagcgagagacaggtacctggccaggcagatggcgcggattaatgcaaagacttacattgagaaagaggaggactaatgactgccaggatctcgagttccttggaagcatagaacactgtgaaccctggaacttgctttaagaaagcaactgggtttgtgaacagtgactggagggtgtttcttaaagtgtattttcaaaatttgtgaactcaaaagtcagtgcttaactttttgatccacaccatacttggcttaaataaaaataaagatagtgatgtactcctgcatttaatttaccttttactttattgtaaaagtaatttccaggttagggacaaggctcagtaatagagctcttgtctaacatgcacaaggccctggaattgatgcccaggattgaaaagagtcagtaatttcgttcatgtttaattccttgttgtttagaagatgtcactttattttgtatgtttgtattttgcaagttactaagttggtatataagtaaatctgttggctgaaaatgaaaagatgttttatatactcgaacaaggagactgaaacctgtcaaaaatccatttctctgttcaaataaaacta

SEQ ID NO: 4547 - DNA, 1426 bp, Cricetulus griseus
cggctcccactgcaggacgatccccacctgtggccctgcagaggcctgtgtaccagaacccttcctcaaccacctgcagtaccttgtgcctctcccctaagcccaaaaagtggcaacactgaaaccagagctagccgccaacactgccctccaccatgctgtggccttggtcctgctgagccggctgctgcctggaagtgaataccttgcacaagagctgctgctgagctgtgtgttccggctggagttcctgccggaaaatgcaacagggggtccagaagcagctgacttctctgatggactatcgttaggggaacagtggggaccctcagtgcagacgaggggctctcctaagttcaagcttgccaaggatctccccagcatccgcagctgctacttggctcattgttcaccagcccgagccagcctgctgacttcccaagccttataccgtggggagctactgagagtctcaagcctgctattgcctgtgcctaaggagccactgctgcccactgactggcccttccagccattgatacatctctaccatcgggcttcagatactccctctgggcttcctgctgctgacactgtaggcactgccgtgcgggtcctacagtgggcgctagttctggaaagctggcgccctgaggccctctgtgctgtgcctcctgctgcccgcctggcaaggctcatgtgtgtgttcctggtggacagcgagctattccgagagactcctatacagcatctggtggcagctcttttagcgcggctctgtcggccccaagtcctgccaagcctcaacctggactgcccactccctggcctggcgtcttttcctgacctctatgccagcttcttagagcactttgaggctgtctcttttggggaccacttgtttggggctctggtcctccttcctctgcagcgtcggttcagtgtcaccttgcgccttgccctctttggggagcatgtgggagtcttgcgagccctaggtctgccactgactcagctgcctgtgccgttggagtgctacacagagcctgctgaagacagcctggctctccttcagctctatttccgggccctggttactggtgcactccgtccacattggtgccccgtcctctacacggtagctgtggctcatgtcaatagtttcatcttctcccaagacccaaagagcccagatgaggtgaaggctgcccggaagaatatgttgcagaaaacatggctgctggcagatgagggccttcggcagcacctcctccactacaaactgcccaactccagcctcccagagggctttgagctgtattcccagctgcctcgcctgaggcagcagcacctgcagacattgcccacagaggggctccagaatggaggatccaagacgtagagcccttggcactggctaatgatg

SEQ ID NO: 4548 - DNA, 1426 bp, Cricetulus griseus
tccgacaccatctttcttcgctactgcggcggtgaccgcggcaaagggcacacgctagagccatgaagttcctcagcaaggccgggtccttctcgagattttactccctcaaagttgccccgaaggttaaaactccagttccccctgcaggagtacctctgcagcctgaggatcttgagtttaccaaattaccaaatggtttggtgattgcttctctggaaaactatgctcccttatcaagaattggcttattcgttaaagcaggcagcagatatgaggactccaacaacttaggaacctctcatttactacgtcttgcatctagtttgactaccaaaggagcgtcgtctttcaagataacccgtggaattgaagcaattggtggtaaattaagtgtggcagcaacaagggaaaatatggcctacactatagaaggcatgcgaaatgatattgaaattctgatggagttcctgctcaatgtcaccacagcaccagaatttcgccgttgggaagtagctgcccttcagtctcagctaaagattgacaaagctgttgcctttcagaattcacagactcgtgtgattgagaacttgcatgatgctgcctacaagaataccttggctaatcctttgtattgtcctgactatagggtggggaaagtaacatcagagcaattacattattttattcagaaccacttcacaagtgcaagaatggctttggttggacttggtgtgagtcattctgtcctgaaacaagttgctgaacaatttctcaacatgaggggtggccttggttcagctggtgcaaaagccacataccgtggaggtgaaattcgggagcaaaatggagacaacctggtccatgctgctattgtagcagaaagtgctgccattggagatacaggagcaaatgcatttagtgtacttcagcatcttcttggtgctggaccacatatcaagaggggcaacaataccaccagcctcctgagccagagtgttgccaaaggaagtaatcagccttttgatgtttctgcatttaatgccagctactcagattctgggctcttcggaatttacactatctcccaagctgaagctgctggtgatgttatcaaggctgcctacaaccaagtaaaagcagttgctcaaggaaacctttccagtgcagatgtccaagctgccaagaacaagctgaaagctggatacctcatgtctgtggagacttcagagggtttcctgagtgagattgggtcacaggccctacttgctggctcttacatgtcaccacccactttccttcaacaaattgactccgtggctgatgctgatgtcataaaggctgcaaaaaagtttgtttctggcaagaagtcaatggcagcaagtggaaacttgggacatacaccttttcttgacgagctgtaaca

SEQ ID NO: 4549 - DNA, 1426 bp, Cricetulus griseus
tctctcagctgacagactttaagttccctgcctcagacttgtgtatgctgaggacagcacaactacagaagtagctatgcagatgctcttttaaaatcaggtgacagctgaagagcccgaaaactcttcaagacactgactgcactttctagtctcagacatttgatgttgaacacaaaatgaggccagtgttcctatgataacctgtttggggctcaattttgttcttgcactagccaaacaaagaggtcttgcttcatttttagactaggtatatatagactagcacaggagagaggagtctgtatcaggctcctggacttcccagagtttaatttttctacgaaagtaaacctgcactaaaatccctaaatggatggataagaagatgtagccctcggagctcagctcattttcaaggcagaatctagatcacagttttcaagatgatacatggacaaaatggtatgtggccaattttgatgctctcttttctcccccccacagtctatgtcacaaagctgtctatattagacattttggagggaccagggaacttaaaacatccaatcattcatctcctctgtgtgcttgctgtcactcaatgatatgttctttcttttcatctactaggctgggcaggcaagcagggagaccttgttctgtttcgagagtcgccttctacagggtacagtgttaaggaggagaatggaaattttatcaccagttgcaatgctaaaaccggtctggggttctccagtcaagacgattttcagcactgctttcctcactgtagctctgtcatccggggactctctcagtaatggggggggtgggagaatgaattccttccttcagttttccttttacgaataatcacatagaagcatgagctatgtgttggatatactctgttcttttccacacaattaaagatggtacataatcctacaaacttcagtatacataaaaatgtagtttgatgttctttgctctgctgtttacatttgctatgatttccagaagctatattagaaataaaattacgtaatgtaggatgattttctatttttgaaggctgaacatcaatcattcacgtgaccaaaaaattgtatttttaaaaagaaatccatatctcgtctgtaatttttaaatacttattctcctaagtaaactgttgaataactcaaatcagtaccagtgagcgtttaaagcacatgggctcagaaggattgttttgaaaaaaaaatacactagagatttttttaaagatgcatataaatgacaagctactagatgttttgaaatccattgtttgcgccaaaggtaaatgaactaaaagacttatcagggctcccactcagttttatgtgatcaataaaataccaagttattggaaaataaatcatgtatggaataaaaaaaa

SEQ ID NO: 4550 - DNA, 1426 bp, Cricetulus griseus
gacagctgctctgggagctctgcgcgccctgctgttccgtgcctggcccgtctgtcccctctgattgtgcctagcgatgaccacccagcaaattgtccttcagggcccgggaccctggggtttccgcctcgtaggcggcaaggacttcgagcaacctctcgccatttcccgggtcactcccggaagcaaggctgctatagctaatttatgtattggagatttaatcacagccatcgatggagaagataccagcagtatgacacacttggaagctcagaacaaaatcaagggctgtacagacaacatgacactcaccgtatccaggtctgagcaaaaaatttggtctcctttggtgagtgaggaggggaaacgtcatccatacaagatgaatttagcatcagaaccccaagaggtcctgcacataggaagtgcccacaaccgaagcgcgatgccatttactgcctcacctgcccccagcagtgccccccggatcatcacaaaccagtacaacaaccccactggcctctactctcctgaaaacatctccagcttcaacagtgccgtggagtcgaagacagcaggcagcggggaggaggcgaagagcagacactcggatcagccacatccttcaggcagcctcatcatcgacaaggaatctgaagtttacaagatgcttcaggagaagcaggagttaaacgagccccccaaacagtccacctccttcctgcttctgcaggagatcctggagtcagatgggaaaggggatcccaacaagccctcaggattcagaagtgttaaagctcccgtcaccaaagtggctgcttcagttggaaatgctcagaagctgcccatgtgtgacagatgtggtactggcattgtgggagtgtttgtgaagctgagggaccatcaccgccaccctgaatgctatgtgtgtaccgactgtggcaccaacttgaaacagaagggccatttcttcgtagaggatcagatttactgtgaaaagcatgcccgggagcgggtcacaccacctgagggctatgatgtggtcactgtgttccccaagtgattgaggggaccggccctgcctgcacccaccatccagcctgctgtacctggttctctgaatgttctggcctctcctccctgacagttctgtgcttacctagtgttagtcctgctcggtgaacactgtgtttcgcctgtgctgactcccactagcagtgtgatgcctgcttttacactactggaaatggttttgtcccttgtcccctctcccgcaccaccatacaccttcttcacttgggtcttctctgctgcaaatggacgttggtcacaatggaacgaagccaaatgtagtatctctcacgttgattttgttttacttaataaatttagactctaaagaaaaaaaaaaaaaaaaaaaaaa

SEQ ID NO: 4551 - DNA, 1425 bp, Cricetulus griseus
  modified_base (1413)..(1413): a, c, t, g, unknown or other
ggtttcttacactccaagagtaaagattctgccgaaaagctaaaagcactgcttgatgagtctttggctcggggcattgattcaagttatcgtccagctcaaaaggatgtggaaccacccaaaatttcaagcacaaaatctatttctatcaagcaagagcccaaagcatcatcgagtctcccttccggcagtagtaatggcaaagccctcgcaactgaaaagataaagaaagaagctgaaaagagacctgctgataaaatgaaagatgtcactgaaggagttgatattccaaagaaacctagattggagaaaccagagacacggtcttctcccattactgtccaaaccagcaaggatttagctatggcagacctctccagctttgaagagactagtgctgatgattttgccatggagatgggcttggcctgtgttgtttgtaggcaaatgaccgtggcatctggaaatcaattagtagaatgtcaagagtgccataacctctaccaccaagattgccacaaaccccaggtgacagacaaagaagtgaatgaccctcgcctggtgtggtactgtgcccggtgcactagacaaatgaagagaatggctcagaaaactcagaagcccccacagaaaccagctcccactgttgtttctgtggccccagctgtcaaggatccattagttaagaaaccagaaaccaaacttaaacaggaaacagccttcctagctttcaagagagcagaagtcaagccacccacggttatttcaggaaattcttctggtaacaacgtgtcctcttcagtaactagcggcctaactggatgggcagcttttgcagccaaaacatcttcagctggtccatcaacagcaaaattgaattcaacagcacaaaacaatagtggaaaacctgctgcctcatcagctaaccagaagcctgtgggattgactagtctggcaacatcatccaaaggtggactaggttccaaactaggttctggtaacagctcttccccatctgtaccattaaaaccacttccacctctaaccctaggcaagactggcctgagtcgctcggttagttgtgataatgtcagcaaagcgggtcttcccagtcccagtagtctagttcctgggggcagtgggcaggtgagtgggaatggaagcagtgctgcctcagggcccagtggaagtgccacaagcaaaaccacaccggagcccagcagcggcccctcagcgtcgcttaaagggccaacttcacaggaatcacagctcaacgccatgaagcgattacagatggtcaagaagaaagctgcccaaaagaaactcaagaagtaaggtggccaaataggttttatatcatattgctttaaagattaataaaagaaaaaaaaatttatatagttaaaaaaaaanaaaaaaaaaaaa

SEQ ID NO: 4552 - DNA, 1425 bp, Cricetulus griseus
actccggaaccagctcctcgggccaggagaaggggtgccatgtcagtggattccatcacggatctggatgacaaccagtctcgactcctagaagctttacaactctccttgcctgctgaggctcagaataaaaaagaaaaggccagagataagaagctgagcctgaatcctatttacaggcaggtccccaggctggtggacagctgctgccagcatctggaaaaacatggcctccagacagtggggatatttcgagttggaagctcaaagaagagagtaagacaattgcgtgaggaaattgaccgtgggattgatgtctgtctggaagaggagcacagtgttcatgatgtggcagccttgttgaaggagttcctcagggacatgcctgacccacttctcaccagggagctatacacagcattcatcaacactctcttgtgcctgtctgcaaagccgggcccagtctgtgtaccagagacctcaagggagtggcagagatgacaggcgcccccctcctccttacccggggtcagggaagcctgccatggcctcagcccagcaggccccagagcctcccctgtggaggatccagaggcatgaagaagattcaggaacaactgcagaagaaggtcagcaggcctcaggagagcatccggccaggccaacaaaactgagcagcgcctactccctctcagccagtgagcaggacaggcagaactcgggggaggccagatggctcgactggcagcgagagcggtggcagatctggggagctcctgtcaactgacaaccccgacgcccctcccgggaaaaacccctggtaactgagcccgccgccagcagctggagacaaaacaattaaaatcaactgacacttatattacaccatgagatatatagtaagcaaaaaaaatactatagaatgttctagaatatgcacaagcgggtttctgtgcttttttgccatcactttttcatggggacagccctcccttcaatacctaaggaaaatcctaaccaaacgaaacagaataagagaatccatatttttatacagtattgagaaatgaaagttatagtcactgaatgatttttcatagtgaacaagttttaagtaaatattgaatttgatatgttgtgaaatattttttaggaactgtttagaaagaactcagcaaatcaaatgagagaaatatatacttataatatgtaacctttattaatttttcaaaactacaaactggaatccaactataaaaattttaaattcaaatacacattcaaattatacagcatcatttctccctctgccctgttatcaatattagcccaattataagaaattccttgtaaaataaatcctatctggggggcaaaaaaaacagctacatctttgcgcttacattgtgccaaaggctgaggaaa

SEQ ID NO: 4553 - DNA, 1425 bp, Cricetulus griseus
cggcgacggcggcgcgggcggctccggcgtcggcagcggtggcggcgtcgccccccggcgggagcctgtccctttcccgtcggggagcgcggggccggggcccaggggaccccgggccacggaaagcgggaagaggatggactgccctgccctcccccccggatggaagaaggaggaagtgatccgaaaatcagggctcagtgctggcaagagcgatgtctactacttcagtccaagtggtaagaagttcagaagtaaaccgcagctggcaaggtacctgggaaatgccgttgacctcagcagttttgacttcagaactggcaagatgatgcctagtaaattacagaagaacaagcagagactgcggaatgaccctctcaaccagaacaagggtaaaccagacttgaacacgacattgccaattagacaaactgcatcaattttcaagcaaccagtcaccaaagtcacaaaccaccccaataataaagtaaagtcagacccacaacggatgaacgaacagccacgtcagcttttctgggagaagagactgcaaggacttagtgcatcggatgtaacagaacaaattataaaaaccatggagctacccaaaggccttcaaggagtcggtcctgggagtaatgatgagacccttctatctgctgtggccagtgctctgcacacaagctctgcaccaatcaccggacaagtctctgcggctgtggaaaagaaccctgctgtctggcttaacacatctcaacccctctgcaaagctttcattgtcacagatgaagacattaggaaacaggaagagcgagtccaacaagtacgaaagaaattggaagaagcactgatggcagacatcctgtcccgggctgctgacacagaggaggtagacattgatatggacagtggagatgacgcttaagaatatgatcaggtaactttcaactgaacttccccaagagcaaattgctagaaatggaattaaaacatttccaccgggtttcgcctgtaagaaaaaagtgtacctgagcacatagagctttttaatagcactaaccaatgcctttctagatgtatttttgatgtatatatctattgttccaaatgacatttattttgagtcctaggacttaaaattagtcttttataatatcaagcaggacccttaaaatgaagtggagcttctgatgccaggtgcaatctactggaaatgtagcacttacatgagatatttgtttcccccacagttttaatataacagatcaggagtaccaaataagtttcccaactaaagattattgtgacttctctgtatataaacagatttttatactttattgaaagaagatacctgtacattcttccatcatcactgtaaagacaaataaatgactatattcacaaaaaaaaaaaaaaaaaaaa

SEQ ID NO: 4554 - DNA, 1425 bp, Cricetulus griseus
gacccggagaacctgctgagcccgcggtggcagctaggcccgcggtacgcggccaagcagttcgcgcggcacggcgccgcctctggggtggcccccgcctccctgtggccctcgccagagcagcttcgcgagttggaggcggaggagcgagaatggtacccgagcttagcgaccatgcaagagtcgctgcgcgcgaagcagcaggccgaggaggcgaggcgtcgtgccagggaacagcatatctcagagtgcatggccaagatgccacaaatgattgagaactggcgacagcagaagcgggaacgctgggaaaaagctcaggctgacaaggagcggagggcccggttacaggctgaggctcaggagcgcctgggttaccatgtggacccaaggagtgcccaattccaggagctattacaggacctagacaagcagcaacgcaagcgcctcaaggaggagagacagcgacagaagaaggaagcgcgagacgctgctatggcctctgctaaagcccaggacccagcagtgtctggggaagccagctcctaaagcccctttcccaataaagcctgctgctgacagcccctaatctacatattctccctcaagctgtgacttcctgggtcccttggctcattccccaatacctggggtggaagaatcctctgctgggctttgttcacacctggacactaagccatgccatgactggggcttcagggacagagaaaggggaatggatgggcaaataatgaaggagcagatggcagtggagaaggaggcttctgtttaccaacattaatctccagtaattagccaattaccaggggggaatacagccaaacagactgcatgagagggagcagcagccctttctagggctgagctggggcaggggcccaagtttccagagggaggagaccgctggggccccccatcctgtgaggctcaggcctcttcccacagttctcagcatgcccatgtcacctgtgcccggggtggccttggccttcagagctgatgttacctcttctccaggctggaggccaaggccagactagggagaaagccttgggcttctaatgaactcactcgctccagatggaaagatttgggccactccaacggaggataaaagtttagggcgtccagcttcccctcatcatggaggagggaggtgggttgtccttggggatgcttcaggggatggggaagcaggcaggcgcctctccatctggctgcagggagctgggacagaggccaagaggggcccatctgtcacctcctggtcttgccagcaactttgagcaggctgggctctgttaagaggatggggacagctgtctggcccaggtcttgtcggactgagatgggaataggggccacttcagaaaggtgggaatctggcctaggtgttggtttttt

SEQ ID NO: 4555 - DNA, 1425 bp, Cricetulus griseus
ctgcgcgctggcggcgtccggcctcctgcgaccgacccgaggcgaacctcagccgcggctcttgcgcgacgctccccgggtctcgcagcctaccggggagtcggagccccgcggcctgcgcagcccggctctcagccaacaggaaggaagaagggcacaacctgaaactggcgaaccacactctgctggtgtccacgtggccagtccctcctgcaagggagctggggaaagcagactgatacccagggttctgctgggccactgccggtgggatggacagcctgcaggaggccaagtgggagcacagcgtggccaccgcccacagcatccaatatcagtgagccccaccaatgcctgctgctgctatatgaggatatcggctcctccagggtccggtactgggacctcctgctgctcattcccaatgtgctcttcttcatcttcctgctctggaagcttcccttagctcgggccaagatccgtgtcacctccagccccatttttatcaccttctacatcttggtgtttgtggtagccctggtaggcattgccagggctgtggtttctatgacagtcagcgcctctgatgctgcgaccattgctgacaagatcctgtgggagatcacccgcttcttcctgctagccattgagctgagcgtgatcatcctgggccttgcctttggtcacctagagagcaagtccagcatcaagcgagtgctggctatcaccacagtactgtctctggcctactcagtcacccaggggactctggagatcctgtaccctgactcccatctttcagctgaggatttcaacatctatggccacggtggtcgccagttctggctggtcagctcttgcttcttcttcctggtctactcactggtggtaattctccccaagaccccactgaaggagcgtgtatccctgccctcacggaggagtttctacgtgtatgcaggcatcctggccacactcaacttgctgcagggcttggggagtgctctgctgtgtgccaacatcattgaggggctctgctgtgtggatgccactaccttcctatacttcagcttctttgcaccgctcatctatgtggccttcctccgtggcttctttggctcagagcccaagatccttttctcctacaaatgtcaagtggatgaggctgaagagccagacatgcacctgccacaaccctacgcagtggctcggcgtgagggcatagagtctacagggcctgcgggggtctcagcagccagctactccagcacacagttcgactctgctggaatggcttacttagatgacattgcctccatgccctgccacacgggcagcatcaacagcacagacagtgagcgctggaaagccatcaatgcctgagtgggcacctgggcatcagggaggcctgtgaagacatatggg

SEQ ID NO: 4556 - DNA, 1425 bp, Cricetulus griseus
  modified_base (731)..(731): a, c, t, g, unknown or other
gctgcaaaccctttcccagtgccttctttgccaaatggtacctgtaaaccagggaagccacaagtgaagtctgacagacagcaagctgactttcacatgaaggaggctaaaaagttgaagaacaaagcagaggcaatggtggacaaggctaggaaaggccttcaagtatttggaagccattctgtctttcattgagtgtgggatgggccatggagtctggaaagttcagcaaagtcatagacctcattaagttcacaatgtcactgaaatccttctcggataccacggcgccaatacaagagaagtatatttgctgttttatgcttgcgctgccagtccctgttgaacatggcaatgtttcgctgtaaaagagacatagtgatgaagtattctcgcactcttagtgaccacttcaagagttcttccaaagtggcccaggcaccttctccatgcatggcaagaagcacaggcgtcccgtcccccgctctcccccaatgccttctcctgccagctctgtagggtcccagtcaagtgctggcagtctggggagtagcggggtgactgccactgttagtactccagtcaccatccacaacatgacctcctcctatgtcaccatcacatcccacgtccttaaggcctttgacctttgggaacaagcagaggcccttacaaagaagaataaagaattctttgcccagctcagcacaaagacttaacgaagatggacnctttgcctaggtgttttagtcaatactcagtacaggcagtattaagtttgcctttgttcaggccatgacttgtattgctaatactgcataccctcacgatatcaaacacacactgttcatgtaaggggtgtgggcacatgtcccaattttgttttaatattttctgaatgtgatcgtgttttggatgatacctgagcagggttgcctttttttttttatttattaccattatatattatatattatatattttctttcttatgttagaggaaagtcaaattttggtattaaaattgctttaagaaggaatagattgtccaagtgataatgaaaatcactggtatgtctttaaatgagtttttctttgattaccatggaatgatgtgccagctctcaccagcacagtgctttggtaagcaggctagggaggcactcgtgctcccagtgaagatgtgcaacaaaaagccggggaacaccacgttttcatcagcttcgcagtggcctgcaaacttggcttttgtgaatgagatttagctgccctgtagagtacttgaaagaggcagacatgatctgtgagaggatgtctttttttttaaagaatatctgcaaaagatcgttccaaagataatgtgccacagatcttttaatttctctgtaatgaggattaagtgcttagttttaaaaatgttaattg

SEQ ID NO: 4557 - DNA, 1425 bp, Cricetulus griseus
caagttactgaagacggctcaaatatggttaaaagtgaacttttctccggtcttccccagaagaggattgtggtagaattcagttcacctaatgttgcaaaaaatttcatgttggacatttgcgctccaccatcataggaaattttatagcaaacctaaaagaagctttaggacatcgagtaacaagaataaattacattggagattggggcatgcagtttggtctgctgggaactggtttccagctgtttggctatgaagaaaaactccagtccaaccctttacagcatctctttgaggtttatgtgcaagttaataaagaagctacagatgataaaaatattgcgaaattggcacacgaattcttccatcgcctggaactgggtgacactcaggcactttcactgtggcaaagatttcgggacttgagcattgaagagtacatccagatttacaagcgccttggaatacactttgatgaatattcaggagaatcattttatcgtgaaaaatctcgagatgttgtaaagctgctggacagcaaaggacttctacagaaaacagtaacgggaaatgttgtagtagatctctctgagactggtgacctctcttctatctgcactgtgaagcgaagtgatggaacttctctctatgcaaccagggatcttgcagctgctatcgatcgcatgaacaagtacaattttgatacaatgatttacgtggcagacaaagggcaaaaacgtcattttcagcaagtgttccaaatactgaagatcatgggatatgaatgggcagaaaggtgccagcatgtagcttttgggatagtaaagggaatgaagactcgaagaggggatgtcacttttctggaagatgtcttaaatgaggttcaatcaaggatgctacagaacatggcttccattaagacaacaaaaaaaatggagaacccacaggagactgcagaaagagtggggctcgccgctctcatcatccaggacttcaaaggtttgctcttatctgactatcagttcagttgggatcgtgttctccagaatcgtggggacactggagtcttcctacagtatacccatgcccgcctctatagtttggaagagacttttggatgtggttacctcaatgacgtcaacgttgcttgtttacaagagccacagtctgtttcaattctccagcatcttctcaggttcgacgaggtactctataaatcctctcaggacctgcaacccaagcacatcgtcagctaccttttaactctaagtcaccttgcagctattgctcataaaacactccaagtaaaagacagtcctgctgacgtggctggggccagacttcatcttttcagagctgtccgttctgtcctagccaatggaatgaagcttcttggaattacacctgtatatagaatgtaat

SEQ ID NO: 4558 - DNA, 1425 bp, Cricetulus griseus
gggacccaggattatcagagccttgaattccctggttgatgtcgaggacctgggcaacatcatgagccccatgaagaaggaaaagagagaaaaggctcaacaggaggagaaagctggtgtgaacaggaacccagagaagagtgcggacagtgaaggaagagctatgatcactcctgctctccgagaggccctaactaaacaagggtaccagttgattggaagccactctggtgtgaagctttgcagatggacaaagtcaatgctgcgggggagagggaggttgctacaaacacacattctatggcattgagagccatcgctgcatggaagccacccagcttggcatgtgcgaataaatgcgtcttctgctggcggcaccacaccaatcctgtgggcactgaatggcggtggaaggtggaccagccagaactgatcttgaaggaagccattgaaaaccaccagaacatgattaagcagttcaaaggtgtgccagggctcaaggcagagcggtttgaagaggggatggaggtcaagcactgtgcattgtcacttgttggggagcccataatgtacccagagatcaaccgacttttgaagctgctccaccagcatgggatctccagtttccttgtcaccaatgcacagttccctgaggaaatcaggaacctcagaccagttactcagctgtatgtgagcgtggatgctagcaccaaagacagcctgaagaagattgaccgcccgcctcttcaaagatttctggcagcgcttcctagacagttttgaaagccttaagctgcaaagcaacagcgaacagtctaccgactgacacttgtgaagtgttggaatgtggaagaactccaggcctatgctgagttggtgtccttggggaaccctgacttcatcgaggtcaagggtgtgacctactgtggtgagagtgcagccagcagcctcaccatggccaatgtgccttggcacgaggaagtggtacgctttgtccaggagctggtggatctgcttcccgactatgaaattgcgtgtgaacacgagcactccaactgcctcctgattggacataaaaagtttaaaatcagtggagaatggtggacgtggatcgattacagccgcttccaggagctcgtcctgcagtatgaagagagtggaggctcaaagacgttcagtgcgagcgattacatggccagaaccccacagtgggcactcttcggtgccagggaaagaggctttgatcccaaggacacgagataccagaggaagaacaaagcgaaggatatttctggatgctgagcttatctgagttaaggatctccaaagacaagagccgcctgaccccagaagggtcccagtccccatcacagtcccaagggcaaagcttcacagctgtatttcatagggtgataccaccaggca

SEQ ID NO: 4559 - DNA, 1425 bp, Cricetulus griseus
cgaggccgccgccgccgccgccgccgcgcagtgcccgagcccgagccgcggcggagaggagggaggaggaggaggtggaggaggcgccgggccgcggggttgtcagtatttaaacagagcacatcatgcgtgagtacaagcttgtggtccttggttcaggaggcgtggggaagtctgctctgacagttcagtttgttcagggaatttttgttgaaaaatatgacccaacgatagaagattcctacagaaagcaagtcgaagtagattgccaacagtgtatgctggaaatcctggatactgcaggaacagagcaatttacagcaatgagggatttgtatatgaagaatggccaagggtttgcactagtttattcaattacagctcagtctacgtttaatgacttacaagacttgagagaacagattttacgggttaaagacacagaagatgttccaatgattttggttggcaataaatgtgacctggaagatgagcgggtagttggcaaagaacaaggccagaatttagcaagacagtggtgtaactgtgcctttttagaatcctctgcaaagtcaaagatcaatgttaatgagatattttatgacctggtcagacagataaatagaaaaacaccagtggaaaagaagaagcctaaaaagaaatcatgtctgctgctctagacttgaagtcagcagcagctctgagccagattacagaaatgaagaactgttgcctaattggaaagtgccagcattccagacttcaaaaaactaaatctgaagaggcttctcctgttttatatattatgtgaagaatttagatcttatattggtttgcacaagttccctggagaaaaagttgctctgtgtatatctcctggaaataagacatagtatttctcctttgcaatagcagttataacagatgtgaaataagatacttgactctaatacaattacacagaagagcatggatgcatttcaaatgttagatgttactactataatcaaatgatttcatattgacctttttatcatgactcctccctatcaagcactaaaaaattgaaccatcatactttatatctgtaatgatatagattatgaaatcgcccttcaaactcattgcagcagataacatttttgagtcattgacttcattttatatttaaaattatgaaaatatcatctgtcattatattctaattaaaattgtttgtgcataatgctttgaaaaaatgggtcttttatagggaaaaactgggataactgatttctatggctttcaaagctaaaatatataatatactaaaccaactctaatattgcttcttgtgttttactgtcagattaaattacagcttttatggatgattaaattttagtacattttcaaaaaaaaaaaaaaaaaaaaaaaaaaaaaaaa

SEQ ID NO: 4560 - DNA, 1425 bp, Cricetulus griseus
ctgaccaggcacagacgcggcgggagctcttcaccagcctccttggccctcgcagccagccccgacgcggggcagccgcaggagccctggctgtggctggagggcagtgggccatgccaggggaagtggaaggccccaggtggaagcaggcagaagacattagggatatttatgacttccgagatgttctgggcacgggtgccttctcagaggttatcctggcagaggacaagaggactcagaagctggtggccatcaaatgcattgccaagaaggccctggagggcaaagagggcagcatggagaatgagatcgccgtcttgcacaagattaaacatcccaacattgtagccctggatgacatctatgagagtgggggccacctctacctcatcatgcagctggtttcaggtggggagctatttgaccgcattgtggagaaaggattctacacagaacgggatgccagccgcctcatcttccaggtgctggatgctgtcaagtacttgcacgacctgggtatcgtgcatcgagatctcaagccagagaacctgctgtactacagcctggatgaagactccaaaatcatgatctccgactttggcctctccaagatggaggacccaggcagtgtgctctccacagcctgtgggactccaggatacgtggcacctgaggtcctggcccagaagccctatagcaaggccgtagactgctggtccataggagtcattgcctatatcctgctctgtggctacccacctttctacgatgaaaatgatgccaaactctttgaacagattttgaaggctgagtatgagtttgactctccttactgggacgacatctctgactctgccaaagacttcatacggcacttgatggagaaagacccggagaagaggttcacctgtgagcaagccttgcagcacccatggattgcaggagatacagctctggataagaatatccaccagtcagtgagcgagcagatcaagaagaattttgccaagagcaagtggaagcaagctttcaacgccacagctgtggttcggcacatgaggaagcttcagctgggcaccagccaggaggggcaaggacagccagccagtcatggggagcagctgacaccaacagctggggggccagcagctggctgttgctgccgagactgctgtgtggagccaggctcggaactgccccctgcaccacccccaagctctagggccatggactgaacaccaaggaaatcagggttcctttcatgggaggggttgggggcagcctgcttcctcctcaccccagaactggggagtttcttaccccataccccctcaccccttcctctcactcttcactgcattttccatacaaatgtttctattttattgttccttcttgtaataaagggaagataaaacaaga

SEQ ID NO: 4561 - DNA, 1425 bp, Cricetulus griseus
gagccggcgcgggcgggctgctgaggtggctgtcccctagcgattggaaccaaggctggctacaagctgttttctttgagttctgtggaacaacttgaccaagtccatggaagcaatgaaatccccgacgtgtacattgtggagcgcctcttctccagcagcctggtggtggtcgtcagtcacacaaaacctcggcagatgaacgtgtaccacttcaagaaaggcactgagatctgtaattacagctactccagcaacattttgtccatacggctgaaccggcagaggctgctggtctgcctggaagaatccatctatatccacaacattaaagatatgaagctattgaagaccctcctggacatcccctcaaacccaacaggtctatgtgccctctctatcaatcattccaactcctacctagcctatcctggaagccagactacaggcgagattgttctctatgatggaaactccctgaaaacagtgtgcaccatcgctgcccacgagggaacactggccgccatcaccttcaactcctcgggctccaaactagcaagtgcttctgagaaaggcacggtcatccgcgtgttctctgtacctgacgggcaaaaactctatgagtttcgtcgaggaatgaaaaggtatgtgacaatcagctctctagtgttcagtatggactcgcagttcctgtgtgcctccagcaacacggagaccgtgcacatcttcaagctggaacacccgactgacagccgcccagaagagccttccacctggagtggctacatgggaaagatgttcatggcagctaccaactacctccccgcccaggtgtcgggcatgatgaaccaggacagggctttcgccacaggacgcctgaacttctctgggcagaagaacatctgtacgctgtccacgatccagaaactgccgcggctgctagtggcctcctccgatggacacctttacatctacaatttggaccctcaggatggaggggaatgtgtcttaatcaaaacccacagtttgctcagctcaggaacaacagacgagaacaaagagaatgacctcagaccttcggtacctccatcttacgcagcaactgtagcgaggcccagcacatctgcagcttccactgtgccaggttactctgaggacggtggggcactccgaggagaagttattccagaacacgagtttgcaacgggaccagtgtgtcttgacgatgagaatgagtttccccctataatcttgtgccgcggaagtcagaagggcaaaacgaagcaatcctgacaagaagcgcaccccagaagtcaggacaccccctgtcgggtggttttggagaaaacaaggacagtggaagaaacggagtgcaatcagttgtgtgagcagagagggaagggaggcaggaatcccgggtgcctc

SEQ ID NO: 4562 - DNA, 1424 bp, Cricetulus griseus
gcgcgcgcgtcctgccgtgctcgtgggtccacgctcggactctgcggggacagaagcgggagccatgggcgggaccgccagcacccgccgggtcaccttcgaggccgacgagaacgagaacatcacggtggtgaagggcatccggctttcagaaaatgtgatcgaccggatgaaggagtcttctccatctggctctaagtctcagcagtattccagtatttatggtgcttcagtttctgatgaagaattgaaaagaagagtagctgaggagctggcattggagcaagccaagaaggaatcagaaaaccagagacgccttaagcaagccagggacctagaacgagagagggctgcagccaatgagcagctcaccagagctatccttcgggaaaggatatccagtgaggaggagcgctccaaggcaaagcatctggctcggcagctggaagagaaagaccgagtgatacggaagcaggatgcgttctacaaagagcagctggccagactggaggagaggagctcagagttctacaaagtcaccaccgaggagtatcagaaagctgctgaagaggtggaatccaagttcaagcggtatgaatatcatccagtctgtgcagatctgcagaccaaaatcctccagtgttaccgccagaacacccagcagaccctcagctgctctgctctagccagccagtacatgcaatgtgtcaaccatgccaagcagagcatgctggagaagggaggataaagttccccttgagaacatgcaaaactccttcaacgttaattccagaggtggaacatttttcttttcctagtaagaaaatgacccaattaaagagaagaccactaaagacagacaggctttggaaaatggactctacagaatcataacatgttttgatcaatagtttaaaaagccaaggtctagatcaggtatccgtcatcaaagaacactgttaagtgttaatgaaagccacaaatgaataaaagagaagggcagtccaccgcacctttttgtactctcttcccagcttctgacataaaatattctctccactccaggctccagcacttagtgacctccacttggagaaagctgggagtggggacgataaactgtttcaagtagagagacaggaagaaagcaccgggctgggtcgactgtagagtctcctgggctgtggggcctgggtgtactcttctcttctctcattatataggagctattttgttgtaacttatgatgatcatgaaagacagacagaaaggagagaaaatgtgcctcttttactggaataatgtttatgattgcaagtgaaaaaaggcatttttattaatataaagcgagccttggcttatgcaacctctgtagtgaatactgacaacttcactcactatcaataataaatctattttctgac

SEQ ID NO: 4563 - DNA, 1424 bp, Cricetulus griseus
tcgcggggacaaagatggcggcggccaggtgttggcagctggtcccccgccggggactgtcccttcacgccgctgctgaggcctccgcctcggccagcaaggtgagcgacccggaggtcgtggcgacgcccgtggcgcggtacccgccgatcgtggcttccatgaccgccgacagcaaggcggcgcggctgcggcgggtgcagcgctggcaggcggcggtgcacgcggccccgtccgtggacgagaaggtacgcattctcaccaagatgcagttcaagaagtacatggtgtatccccagaccttcgccctgaacgccgatcgctggtaccagggcttcaccaagaccgtgttcatctcgggcctgccgcccgcgcccgctcagtcccggccctcgctcgacctggcgggcctgcgcgccgctgtgtgcgactgcatcctgcaggagcatgtctacctgcgccgccgcctgcgcccgcatctcttcgatcggcgccaggccctcgtctcacccctcctggaccgactggtggagactctcgtgagcctgctggtcccactcaaccctgccctggccaccgccgccctcgattgtaagcgcccggttgacttttactggcttcgtggtgaagaatgcattcctgctggtcatcgaaaaggtcgtattgatgctttacggtatcagataaatgataaaccacacaaccagatccgaatatctcagcaactccctgagtttgtgccattagattattccattcctgtagaaatccctgttatgaaatgtaaaccagacaagcttccattattcaaacggcaatatgaaaacaccatatttactggctccaaaacagcagatccgtgctgttatggccacacccagtttcatctgttacctgaccgtttaaatagagacaagctgataaaacaaaaccaaactgagcaggtagaagttgtttgtagagctaatgcccttgcaagtctttttgcttggactggagctcaagctatgtaccaaggattctggagcgaggcagatgttactcgaccttttgtctcccagggcgtgatcacagacggaaaatatttttctttttctgctaccagttaaatactttggcactgactgtacaggctgatcaaaataactcccgtaaaaacatatgttgggggacacagagtaagcctctgtacgagactgtggaagataacgacgtgaaaggctttgatgacaatgtcctcctgcagatagttgactttcttctaaataaaccgaaagaagacagaacacagctgttgggaagtcaggagaaagcccttgatctgggaccttgaggatatttaaatttgatcagaggaataataaactcatttaagaattctgtaactgtcagttattaaacacattattgtttttgaaaaacca

SEQ ID NO: 4564 - DNA, 1423 bp, Cricetulus griseus
ggaagagatcggatcacggaacttcttcgagcgggacggacagccttactgtgaaaaggactaccacagcctcttctccccccgctgttactactgtaacgggcccatcctggataaagtagtgacagcacttgaccggacatggcacccggaacacttcttctgtgctcagtgcggagccttcttcggtccagaagggttccatgagaaggacggcaaagcctactgtcggaaggattacttcgacatgtttgcgccccaagtgtggcggctgtgcccgcgcccatcctggagaactacatttcagccctcaacacactctggcacccagaatgctttgtgtgcagggaatgcttcacgcctttcgtcaatggtagcttctttgagcacgatgggcagccatactgtgaggtccactaccacgagcggcgaggctccctgtgctctggttgccagaagcccattactggccgctgcatcaccgccatggccaagaagttccacccggagcactttgtctgtgccttttgcctcaagcagctcaacaagggcaccttcaaggagcagaatgacaagccctactgccagagctgcttcctgaagctcttctgctaggtccctcccatccaccccacccctccccagccagcacctgccccgggttcaccgagagaggcttctccagcaataatgttttatgtagccacatctccatctctggggatggcgtgaggtggggatggccacccgtgcctcaacactgtatcaattttgatagatttctacactgaggttcgacttcgtattgctcaagttgcttttacttctctctacaagatgattttgaagagatttgaagaacgtccccttttgtattcttgactttgttcaccgtcactggtcctgccagtggcctcggctttggtatggactttgctttgtactgagggattgggatgggtaaacaatttgtattttattttgtttcttagcacaagccagttgagaccctgttctgtaacttcacagctccccaggactgttttaaactgctgtatttccaaacttcccttattgcccaggccaacaggctcttcattaagaactggtctgagggtctccagcccttttggacctggaattttgaacctcctgtgtcctgttcccaagggaggcaaaggggaaagtatatatttggggtctgcttcctgcctgagcaagccatcaggagccagtctctgctcctcatgaactttctggcaacaaggagagcccattggacacttacttagccacctcgttgcttctccgtgctccttccgccttctcaggaaagctggggtctgattttgaccaggaagaaccataagggtctctggactcggtcctactgggtgtatcacttcctccctcaaacttcctg

SEQ ID NO: 4565 - DNA, 1423 bp, Cricetulus griseus
accacctcgccgccgagtccagcagacaccccggagcaagaaggcaacatggcagctccagctaaggccgagaacctgtccctggtggtgcacggacctggggacattcgcttggagaactacccaatccctgagccaggcccaaatgatgtgctgctaaagatgcattctgtggggatctgcggatcagatgttcactactggcagcatggccgaattggagattttattgtgaaaaagccaatggtgcttgggcatgaagctgcagggacagtcataaaagtaggagacatggtgaagcatctaaaaccaggcgatcgggttgccatcgagcccggtgttccccgagaaacagatgaattctgcaagattggccgatacaatctaaacccctccatcttcttctgtgccacacccccagatgacgggaacctctgtcgcttctacaagcacaatgctgatttctgctacaagcttcctgacagtgtcacctttgaagaaggggccctgattgagcctctctctgtggggatctatgcctgccgccgaggttcagtttctctggggaagaaggtccttgtgtgtggagctgggccaattgggatagtcactttgcttgtggccaaagcaatgggagcttctcaagtgctggtgatggacctgtcttcctctcggttggccaaagccaaggaagttggagctgatttcaccctccatatctccaaggagccccctctggaagttgccagtaaagtggaaagcatgctggggagaaagccggaagtcactattgaatgcacaggggctgaatcctccatccagaccggcatctatgccactcactctggtgggaccttggtgattgtaggattgggctccgagatggtcaatttacccctagtgcacgcagctgtgagggaggtggatatcaagggcgtgtttagatactgcaacacgtggccaatggcgatttccatgcttgcatcaaaggccttgaatgtaaagcctttagttacccataggttccctctggagaaggctgttgaagcctttgaagcaaccaaaaagggagtggggctgaaagttatgatcaagtgtgaccccagtgaccagaacccctaatgtgcattcctctgtgccctcagcttaccctctcagcatctaagggctacatggctaggaatgggatgcccttgatgcagaactttcttttgaatggtaaaaataattaactcataataagcagagagccttaggggagttggtgtgccttaaagacagaagtggggatgcttcagggaccttgtagccagaatgagatgtttatattgaggaaagtctaggagagagagatgaggtaccctagcttacattcctcaagtgtggaagtaagggcactcacctctgcccaagcaccacctct

SEQ ID NO: 4566 - DNA, 1423 bp, Cricetulus griseus
agctccacaagtgaaggagatagatctgtgtgcagccaaagcagcagcaattcctctcaggtaacaacagctggggctggaaaaagcttctgacccagaagctccagataaacatggctcagcatcgtttgtttcttcgttgttgaaatccagtatgaatagtcatgtgacccaatccactgattccagacagcagagtggatcacctaaaaagagtgctttggaaggttcttcagtctcagcttctcagagcagctcagagattgaggtgcccttgttgggttcttctggaagttcagaagtagagttgccattactgtcttctaagtctagtccagagacagcttcaagtgggttaacatccaaaactagttgaactggcagatctgcctcaaaataagagctctcaagaaagtattgtttgtgaattgaggtgtaagtcagtgtatttgggcaccggctgtggaaaaaagcaaagaaaatgctaaggcagttgcatcaagagaagcaactgaagctatttctcaagaagaaggtggtggtgaagatatgcaaaaggaagtataggggcagtgaggtagaagatctagtgctccttgatgaagagtcgagacctctgaacttacctccagcattgaaacatcctcaagaattactgtaatgtctcccaagttactgctgcatctagtacctggtgtttgaagagaaaaactggcttttatataatataaaacactggctttcacagattttgtattgctttttttccagttttgcagaaaattaaattctagttctcttcactaaagtagaagttgtaaataatttaaatgacagtacatattaaaaggtatacattgacagcataccagtatgctgttttatttgctgaagaaaatactgtcttctatttttaatgacatattaggtacgatgtgtagttctgtagaatcttaaattttttctactactaccaatttggtggaaatgtattaagttgtctaccatgcttttttgtttttattctaacttgattaaatcccatcaaagaaaaggggaccacagtatttgaatgtgtaaaacacaaggttttaagaatgttgcttgtaatgttgaacatctgttaaagaataagagtagttatctcaagctattttcatgataagttgtaaactttttgtttttaagatacaaaacattataaagtacttcctgttattttactctgaagttgtttaaaattcaccatgattttgactgctgctgattgttaagcaggttaatttatgttttgagatgaaatgcaatttacactttcttaaaacataaatgtgggtttctatattaagcatattttgtgactactaatattaacattgatttgtttagatattaaatgctttaagctattttaccttttcaa

SEQ ID NO: 4567 - DNA, 1422 bp, Cricetulus griseus
gtccgcgtgtgagccggagagctcatggctacactggagtcttccgggctggacagccagagtagagacatggagacagaggtgcaacagagtgcaaggtggctgtactgtggggagcctgacgacaggcagaaagctgtgctggtccaattctccaatgggaagctgcagaatccaggcaacatgcgcttcaccttgtacaacagcaacgacttggtaaaccccaggctgaagaatcagcggatcctggcagcagaaacagacaggctgtcctatgttggaaacaattttgggactggcgccctcaaatgcaacactctttgcagacactttgtgggaattctgaataagacctctgggcagatggaagtatatgatgctgagttgttcaacatgcagccactgtttgctgaagacgctattgaacaggagcctcctccagagaaccaggccaagactttcagggaaaagttggattcttgcattgaagcctttggaagcaccaagcagaagcggtccctgaactccaggagaatgaacaaagttggcagcgaatctttgaatctcacagtaactaaagctgcagagaacatcattgatacaaagggtgtgaacgctctggtcagcgatgccatgcaggatgacttgcaagatgactccctctaccttcctccctgccatgctgatgcaaccaagcctgaagacgtgtacagatttgaagacattctgtcccaggctgagtatgatgcccttgagagcccatcagaagctttcagaaaggtcacatcagaagacatactgaagatgattgaagagaacagacactgttccttcgtcatagaaatgctgaagtctttaccatcaaatgaggagagtcgagaccggcaagcccgaagcatctggtttctagatgccctcatcagatttagagctcagaaagtgataaagggaaaaagcgccctaggacccggaatcccccatatcatcaacaccaagctgctgaagaatttcacctgcttgacttacaacaatggcagtctacggaacttaatttcaagttctatgaaggccaagatcactgcgtttgccatcatacttgcgttgcacataaatagcttccagattgacctgacactgttgcagggagacttgaaactcagtgagaaaaggatgattgagatagcaaaagccatgaggctgaagatttccaaaagaaaggtgaccctggcagacggcagggaagaggatcacagactgggcactctgtccgtccccttgcctccgccccagacctcagatcgccagtcaaagcggaagaagatgaactagatgttttccaccagtacctcaggaggcaagaagacaggtgatctttctgagttcaaggccagcctggtctacagatcgagttccaggacagcc

SEQ ID NO: 4568 - DNA, 1422 bp, Cricetulus griseus
cgcggcgcggttgaaggtagagtgagttgctgaggtgacccggtgaatacttgtatctccaccatggcagctctccgctacgccggcctggacgacacggacagtgaggatgagctgcctccgggctgggaggagagaaccaccaaggacggctgggtatactacgccaaccacactgaggaaaagacccagtgggaacatccgaaaaccggcaaaagaagacgagttgcaggagatttgccatatggatgggaacaagagactgacgagaatggacaagtgttttttgttgaccacataaataaaagaactacctacttggacccaagattggcatttactgtggatgataatccaacaaagccaactaccagacagagatacgatggtagcaccaccgccatggagatcctgcagggccgggacttcacagggagagtggtcctggttaccggagcaaattcaggaatagggttcgaaaccgccaaatcctttgcccttccatggtgcacatgtgatcctggcctgtaggaacatgagcagagccagtgaggcagtatcccgcattcctggaagaatggcaacaaagccaaggtagaagcaatgaccctggacctggctgtgctccgtagcgtgcaacattttgctgaagcgttcaaggccaagaatatgtctcttcatgtgcttgtgtgtaatgcggggacttttgctctaccctggaccctcacgaaagatggcctggagaccaccttccaggtgaaccacctgggacacttctaccttgtccaactcctgcaggatgttttgtgtcgctcagcccctgctcgtgtcgtcgtggtctcttctgagtcccacagatttacagatattaacgattcctcagggaaacttgacctcagccgcctgtctccatctcagagtgactactgggccatgctggcttataatagatccaaactttgcaatctcctcttctccaatgagctgcaccgtcgcctctccccacgaggggtcacatcaaatgcagtgcaccctggaaacatgatgtactcatccattcatcggaactcatgggtatacatgttactgttcaccttggccaggccattcaccaagtccatgcaacaaggagctgctacaactgtctactgtgcagtcgcccctgagctggaaggcctcggagggatgtatttcaacaactgctgccgttgcctgccatctgaagaggctcagagcgaagagacagcccgggccctgtggggatctcagcgagaggctcatccaggatcgactggggagtccatccagctaatcagagccctgtagttttgggcaaacccccacccatgctctgaccctcatcactgctagccccatcatccaagggttcccctaaccctccagggcagagccatgagagta

SEQ ID NO: 4569 - DNA, 1422 bp, Cricetulus griseus
gcggcgtgggcaagaccagcctcattggagcgcttcaccgacgacacgttctgcgaggcctgcaagtccaccgtgggtgttgacttttaaaatcaagactgtagagctaagagggaagaaaattagattgcagatctgggacacggcagggcaggagagatttaacagcattacctcagcctattacagaagtgccaaggggatcatattagtctatgacatcactaagaaggagacattcgatgacttgccaaaatggatgaagatgattgataagtatgcttcggaagatgctgagctgctcctggttggaaacaagctggactgcgaagcagacagagaaatctccaagcagcaaggagagaagtttgcacagcagataactgggatgcggttctgtgaagccagtgccaaggacaatttcaatgtggacgagatatttctgaaactcgtcgacgacattctgaaaaagatgcctcttgatattttgagaagcgagttatccaatagcatactctctctacaaccagagcctgagatcccaccagagctgcctcctcctagaccacatgtccgatgctgttgactggctgctttggagacagagtgcatacgagcccccgacggcggggaccattctgtgtgcactgcaatcatgtgacaatttccttctgcactttgtaacccaagtcagctatacactaacttgtaaatatgcaaatatgcaatcctgggtaaggtgggttataaatcacatgcttcccctcggactgtatttcctcgttgttccagtgtgtaatgtgcctacactgggaggcgtggttcttctggtgtgaagaatgggagagaagaagggtgtgctgtctcctgagtactttaaatgtctacactacgaggcagacgctccgatgggaaaagagggcccggtgcttcgagttccgtttcagagaaaaatctacaaaactgaagactttttgaaaaagaagacatgacaacggcttcttctttatttatttttgaaactatataagagattttaaaaccacactgctatcctacacaaatcctgtttgaagggattttaagagttacattttactgtatcaaaaaacacatatgcatttgcctagacatcctgtatctttgtaatgatggacttctcccattgatggtgaagcttattcctatgaagcctagactgtgttcaagttttcttgggttttttttttttttggttctgataaggaatttgtgaactctatctttggtatatcttttattaaactgcactgttttgtttagtcaaggtaaataagtatgtatttgaataacttggtgtgccctgagtattgtggtgtgagaagcatcgtggtctttctacactaatgaagtgcaaataaaattttgtatttatgaatgaca

SEQ ID NO: 4570 - DNA, 1422 bp, Cricetulus griseus
cgcgatctggctcggcattagccgcgggctccactccaacagagcttgttgttgggagttgcagtcatcccccacctcgctctcaacgccggctcaaccctcgcagcttgtcagtggagcgctcactggctccggcagtgtcctcgcggcagccatggccacgaagatcgacaaggaggcgtgtcgcgcggcgtacaacctagtgcgggacgacggctcggcagtcatctgggtgactttcagatacgatggcgccaccattgtccccggcgatcagggagcggattaccagcacttcattcagcagtgcacagatgatgtccggctgtttgcctttgtacgctttaccaccggcgatgccatgagcaaaaggtccaagtttgccctcatcacgtggattggggaggatgtgagtggcctgcagagagccaagacggggaccgacaagacgctggtgaaggaggtggtgcagaattttgcaaaggagtttgtgatcagcgatcggaaggagctggaggaggacttcatcaggagtgagctgaagaaggctggaggagccaattatgatgctcagacagagtaaccccagccccacccccagagccatctgcctgctccacctaggaggagacttgccacctcaagtcaccagcccaccagggaggaggagccatgagaggcaccagcggcgccaccagtgtgtgtaaccccctccctgcctccccaaccccctcacccctcttaagctcaccaagcatcattctttggtacctgccccctttttgttttaaagaaagtcatcttggtgccagggtcatgcacaccatcagatcccaggtgcctatgtcagtggcccttggcctgtcatttcccttgccctcactgtggcctgcctggtctgagccaccctggccctcacttgctagggcctggcctgggtaccatcccagcttgccttggctgtttcctgcttaccctatgccggccgccatgccaggagctgtgtacaccctacagcctccatgagctcacacatgccacatgctcctcagaacccctagacatggctccaggccccaccttcaccctgttcagagtgggagttcagggtcaaactcagggcctcgtagggtgacaacgatggaaaggtcccctgcaaacagggaggtagacacaggcctcacggcacctggaaggcagcagttggaatcttagtctgcaccacaaatttgaaaagatggctttgtttgcttttaaagaaagctgaggcaggcttggctcctcgtgagcatgcgaagatggttcttttcctttctcctcgctcttttcattttggggaagaagactgcactggactgggctgtgaggaccatctctggcattccaacagtttacagaaataaatgtgtttttcaagaaaaa

SEQ ID NO: 4571 - DNA, 1422 bp, Cricetulus griseus
aattcaaggaagaaacaggtgattaaaagtctacagtgaggatgagaccagcagggcgttagaagtacccagtgacatcaccgcccgagatgtttgccagctcttgatcctgaagaaccactatgtggatgacaacagctggactctttttgagtacctgtctcacacaggtgtagaaagaataatagaagaccatgagctggtgattgaagtgctgtctcacgtgggggatggaagaagaaaataaactctatcttaaggaaaaattatgccaaatatgaattctttaagaacccaatgttatttctttccagagaacatggtgttcttttgcagctgagaccaatggtgacagactcccctacacaaatcctgcagatgttttaagctcaagcacctatcctgaaatccatggcttcttacatgcttggaaaaaagtttactgttttctgagaagatctggtttatatttttctactaaaggcacatcgaaaggaaccgacggcatttgcagtttttcagcgaattcagcactagtaatgtttacgtgtcagtggcaggcaaaaaaaaacatggagcaccaactgcctatggattctgctttaagcctaacaaagcaggagggccccgggacctgagaatgctctgtgccgaagaagagcagagcaggatgtgctgggtgaccgccattagattgcttaagcacggcatgcagctgtaccagaattatatgcacccataccaaggtcgaagtggctgcagctcacagagcatatccacccatgagaagcatatcagagaattcgctggtagcaatggacttttcaggccagaagagcagagtcatagacaaccccaccggaagccctttcagtggctgttgaggaaggactcgcttggaggaagaaaggatgtttacgcctggggaatcacggtagccctactgccccctcccagagctctgctgtgaacatggctatccatcgatcccagccatggtttcatcacaaaatttcgagagatgaagctcagcagctgattatccggcaggggcctgtggatggagttttcttggtacgggacagtcagagtaaccccagaacttttgtactgtcaatgagtcatggacaaaagataaaacactttcaaatcataccggtggaagatgatggcgagatgttccacaccctggatgaaggccacacaaaattcacagatcttattcagctggtagagttctaccagctcaacaagggtgtccttccttgcaagttgaaacattactgtactaggatggctctttagccaaactgtatgtgactcaataaaaaagtggaagaagaaggatgcaaagaagaatgtttaaggaaagagataacaaataagcctgaaagtaaatcatggtgaaaaaaatttcaacct

SEQ ID NO: 4572 - DNA, 1421 bp, Cricetulus griseus
  modified_base (1412)..(1412): a, c, t, g, unknown or other
gaaataaatattaaagaatggttttgtaaaaatatcaaagcctccagtattcacaggcaaagacaggacagagcccataacaggtttccaaaaagcaatggtcaagaccatgtctgcagccctgaagattccccactttggctattgtgacgaggtgaaccttactgaactggttaagcttcgggaagaattgaaacctgttgctttggctcgaggaatcaaactctccttcatgcccttcttcttaaaggctgcttctttgggattgctccagtttccaatcctcaatgcctctgtggatgaaaactgccagaacatcacctacaaggcttctcacaacattgggatagcaatggatactgagctggggttaattgtccccaacgtgaagaatgttcaggttcgctctgtgtttgagatcgccatggaactgaaccgcctccagaaactgggttcttctggtcagctcagtaccaccgatcttactggagggacatttactctttccaacattggatcaattggtggaacctatgccaagccagtgatattgccacctgaagtggccatcggggccttgggagcaattaccggcccttccccgatttgaccagaaaggagacgttttaaagcacagataatgaatgtgagctggtcagccgatcacagggtcattgacggagccacaatgtcacgcttctctaacctgtggaaatcctacctggaaaacccagcatttatgctgctcgatctgaaataatagttaaaaaaggcatccttgaaccttttgcgtttccaaagagtgcgtgaggcctggctgtgccagcacgtgttcttgttacacttgcgttagaaatgattgagttcccgcttgaggtctaaagcacagtatttaccactggcatggtaggctcttggctgaaaatgaacgatggtgtgatgattgccctggggtatcacactgtgtaggtcacagggtgacttctcaatatggtgctgagatcgtgttagttgaaacaggcaacaacaacaaaaacaaaataagtgcaattctgcttatctttgtagatgataaggtgtatactcttgccttatgtgttaagtattatctataaatgtattatagctgaaactagcattatttaaaggggaaattataatctggtcttaactatagtttcacaatcagtaaggctgttacaggtaaatgttttaaatggatagacttctagagctgtggttatgctttggcaatttgctgggaaatacttgacttttcaaactcactttgtgacataaaatatcatagatacagcagctgttggcttttttttatgcttagagatctgttgccttttaatttgaaagaaagaaagaaagaaagaaagaagagaagaagagaagaagaaaanaaaaaaaag

SEQ ID NO: 4573 - DNA, 1421 bp, Cricetulus griseus
acaacattctcaccaacaaccagacgctgcggcttctcacagagcggcagctgccagtggtggccccaatgctcgactcccaaacctattattccaacttctggtgcgggatcactccacagggctactatcgccgtacagctgaatacttccctaccaagaaccgccagcgccagggctgcttccgggtccctatggtccactctaccttcctggtgtccttgaagactgaggaaacagcccagcttgccttctacccacctcatcccaactatacttggccctttgatgacatcattgtctttgcctatgcctgccaggctgctggggtctccatgtatgtgtgcaatgaccatcgtttcgggtacatgaatgtggcagtgaagcccgaccaggggctggaggaggaaaagaccaacttcatccacctgattttggaagcactagtggatgggccccccatgatggcctcagatcatgtgtctcggcccctaaagaagcccagcaagatgggatttgatgaagtctttgttatcagcctggcgcgcagaccccagcgccgggctcgaatgctgagctctctttgggagatggagatctctgctcaggtggtagatgctgtggatggcaagggtgaggtgggctgcttcctcagccactactccatctgggaagaggtggttgtcaggggcctggccagggttgtggtgtttgaggatgacgtacgctttaaggacaacttccggaggcggctggaacagatgatggaggatgtggtgacccagaagctctcatgggacctgatctaccttggccggaagcaggtgagccctgaggaggaggtggccgtggagggcctgcctggtctggtggtggctgggtactcccactggacgttggcgtacaccttgagcctggcaggggctcgaaagctgttagccacccagcctctgcaacgaatgctacctgtggacgagttcctgcctgtcatgtttgaccagcacccaaatgaccagtacaaggcacacttctggcctcgggacctccaagccttctcagcccagcctctgcttgcctccccaacccactatgcaggagattctgaatggctcagtgacacagagacatcctccctctgggatgatgatagtggccgcctaattagctggactggctctcaaagacccttcctggccccacctacccctggctagcagcagtggacatagcctccatcctcaccccacggatgagctctagttttttttttttttttttgtagacgagggtttctctgtgtagttttggagtctatcctggaactagctcttgcagaccaggctggtcttgaactcacatagatccactgcctctgcctcccgagtgctgggattaaagatttgcaccaccactgcctggct

SEQ ID NO: 4574 - DNA, 1420 bp, Cricetulus griseus
  modified_base (831)..(831): a, c, t, g, unknown or other
gatctctcaggtgccaacaggatagtgctagaagactctaatatcttgcagcctgtgggtctgactgtgtttgaaaactggctctattggattgataagcagcagcaaatgattgaaaaattgacatgactggtcgagaaggaagaacgaaggtccaggctcgaattgctcagctgagtgacatccatgcagtaaaggagctgaacctgcacgagtatagacagcacccttgtgcccaggataatggtggctgttcacatatttgcctcgtaaaaggagatggtactacaagatgctcttgccccatgcacctagttctgcttcaggatgagctgtcctgtggagaacctccaacatgttctcctcagcagttcacttgtttcaccggggacattgactgtatccctgtggcctggcggtgtgatgggtttactgaatgtgaagaccacagtgatgaactcaactgtcctgtatgcttagagtctcagttccagtgtgccagtgggcagtgtatcgatggtgccctgcgatgcaatggtgatgccaactgccaggataaatcagacgagaacaactgtgaagtgctttgtttaattgatcagttccgctgtgccaatggtcagtgtgttggaaagcacaagaaatgcgaccacaatgtggactgcagtgacaaatctgatgaactggactgttatccaactgaagagccggcaccacaagccaccaacacagttggttcagttattggagtaattgttaccatatttgtgtctggaaccatatacttcatctgccaaaggatgctgtgtcctcgtatgaagggagatgganaggctatgacaaacgactatgtggttcacggcccagcttctgtgcccctgggttacgttcctcacccaagcccacacacaggtcctacagctacaggccttacagctaccggcactttgccccgcccacgacaccctgcagcactgacgtctgtgacagtgactatgctcctagccggagaatgacctcagtggcaacagccaagggctacaccagtgacttgaactatgactcagagcctgtgccccctccacccacaccccgaagccagtacttgtcagcagaggagaactatgaaagctgccccccttctccatacacagagaggagttactcccaccacctctatccaccaccgccctccccctgcacggactcctcctgaggaggggccctcctcctctgactgcctccaccgggaaatgtaaatacacatctggttgagatctggagggggggaggagctgtaaagaagagtgaggcagactgtacagttaacattataaagggggtgggtacgtggagatatttgtacagaagaaaaggatatttatatatttcttaaaagtagacagatttgctgcttgtg

SEQ ID NO: 4575 - DNA, 1420 bp, Cricetulus griseus
agccatcgccaaatatgacttcaaagctactgctgacgatgagctgagcttcaaaaggggggacatccttaaggttttgaatgaagagtgtgatcagaactggtataaggcagagctcaatgggaaggatggcttcattcccaagaactacatagaaatgaaaccacatccgtggtttttggcaaaatccccagagccaaggcagaagaaatgcttagcaaacagaggcatgatggggccttcctaatccgagagagcgagagtgcccctggggacttctccctgtctgtcaagtttggaaatgatgtccagcacttcaaggtgctccgagacggggccgggaagtacttcctgtgggtggtgaaatttaactctttgaatgaactggtggactaccacagatccacgtcagtgtccaggaaccagcagatattcctgcgggacatagagcaggtgccacagcagccaacgtatgtccaggcactgtttgactttgacccccaggaagacggtgagctgggctttcgcagaggagacttcatccatgtcatggataactcagatcccaactggtggaagggggcctgccatgggcagaccggcatgtttccccgcaattacgtcaccccagtgaaccggaacgtctaagaagcagaagagattatttaaagaaagtgaaaagttgagaccattcacaagaattgcacccacatgctgcctgtcacagcttgtgagggagtgcagaacatctggctgggtcctactggtgaccctctcacttaggttgaaactttggggggtgggaaggggtgtttgatttcataatgccaaaacttaacctattgaattgaattacagtttttattacagaatctcactgctgctcctgttcccctcctatctccttttctcatcctttctttcctgtccttcagtgcatgacgtttgaggccacgtatagtcccagctgatgccaatactaaaagaaaccaagtgggctggtactttctctatgcaaaatgtctgtggagatgaatggactaaaagagctatattcttcacacacaaggggcggccagggcacctggggcccgtgaatgggcttctgccagagatgcctgagggcatctgcctccagcccaagcctggagcatcccgtcaaggttggactttgtaggggaaggaggcacgccacccacctctggtccccgagtcactgcagacctgcgcctcctcccactgtctccccgtcaggtgttctcctggttttgcttcctctttccctgctgatgataaaatgaaataatgagttacacctgggccatttgattgttttattttggaattggtgtatatcatgaagccttgctgaactaagttttgtgtgtatatatttaaagatcagtgtttaaataaaaaa

SEQ ID NO: 4576 - DNA, 1420 bp, Cricetulus griseus
  modified_base (433)..(433): a, c, t, g, unknown or other
  modified_base (578)..(578): a, c, t, g, unknown or other
tgacagataatttaaaagaaaaagccctttcatttttgaggcaaggttatcaaagggaacttctctatcagagggaagatggctccttcagtgctttcggggatagtgacccttctgggagtacttggttgtcagcatttgttttacgatgtttcatggaagctgatttctatatagatattgatcagaatgtgttacagaggacatataattggctcaaagaacatcggaaacccaatggtgaattttgggagccaggaagagtcatccacagtgaactccaaggaggcaataaaagccctgtaacactgacagcctatattatgacttctctcctgggctacagaaaataccagcctgttatcgatatacaaccctctatcaagttttgagtctgaattcgacagaggaattacagacaattacactctancacttgtagcctatgccttgttttcagtggggagtcctaaggcggaggatgctttgtacctgctgactcagcaagcagaaagaaaggagacatgcagttctggctgtcatcagcacccacgttttctcagtcctggcagccacgntccctggatattgaggtcgcagcttatgccctgctctcacacctgcagcaccgtgtttctgagggaatcccagtcatgaggtggctcagccgtcaaagaaatagcctaggagggtttgcatccactcaggatactgttgtggccttgaaggccctctctgaattttcagccctaatgcacacggaaaatacaaatatccaagtgactgtcacaggtcccagctcaccgaaacccatacactttcggattgacacacagaatcgctttctccttcacacagcaaagcttgctgtgctaggaagcttttgatttagatgttgatgtgaaagatgaagatgatgccaatcatgtgaatttgaatgtgtgcacaaggtttttaggccaaaacaaagactggcatggcccttatggaggttaaccttctcagtggctttactgtaccttcaggtacaattcctctgagtgagatggtgaagaaagtggaatatgatcatgggaaagtcaacctttatttagattctgtaaatgaaacccagttttgtgttgatgttcctgctgtaagaaacttcagagtttcaaaaactcaagatgcttcagtatctatagtggattactatgaaccaaggagacaggcagtgagaagctacaacaccaaggtgaagctgtcctcatgtgacctctgtggagacaacagctgctatctctgtatgaatggagccatggactcccttcggccttcttcaagcctcttcgcttcttgtttcagccttctgtacttggtgcgacattggctatgattttatttttcaaggacttcatctaaaactagcatttccaagaaa

SEQ ID NO: 4577 - DNA, 1420 bp, Cricetulus griseus
gagaggatgtgggggctcccggcggcccggctgcgggacgtggggacacactgaggggagagtgttgatgagggtgtctagggttcaaaggtcagagatcaggcttgcaaggagttggggagagggcgtcgaaagtcgaaggggtcggcgaccgaccactcagggaagatatttatgggcaagggtcttgaggaaggagaaatgtaaccggcctggcagccttcttagggtacggactgtgaccccaagctcggtaagcagcagcaagaggagcattgatgtagtctctcgagagcggggacactaaagagagaagtgagaaggaattcctagaatatctatccattcctggggttcggccctcactgttggtcacttagctttcctcagtttgtgaccctagatcttggcatcttgagatggcttctccctctagacagcccccacttggggggtcagggctgctgcatgggagccgtgctcgttcttatggaagcctggtacaatcatcgtgctccccatcagttggagcctggagacaccctggctggactagcactcaaatacggggtgacgatggaacagattaagcgtacaaaccgcctttatactaacgactccatcttcctgaagaaaactctctacatccccatcctgacagagcccagagacctatttaatggtttggattctgaggaggaaaatgatggagagggagaggtacgaccaagtaaggatggtgctggttcgcattcatcgaagaggaggagtcaagagtcaggttcaggccaggccgatggcgaagccctcacacctcacccaggggaaacccccacatccaccccatgacctttctgcctctgatttccttaagaaactcgactcacagatcagtctgtccaagaaggctgctgcccagaagctgaggaaaggggaaagtgggttacctgaggagggtgcgggtctccacctcagctcccctaggatgcagcagcgagcagtcctcgggcctgtgccactgacccgcacctctcgaacccagagtttgcgggatcaggaagatgaaatcttcaaactctgatgttcccagaactgataagagaagcagggtgttgaaggaacagctgagagagaggagtctgaggtgtcgctcgagcagagcttccaagcctccctcactcctctctggccatcttgcccagcgttttggtcaagacttcctcagctagggacactttctggcaagagtaggggatgggagcagagctcttcccaatcctgaatctagagttgtcctttagattcaaagcctccttcacacccttgctgtccctttcaccatttcctgggttagagcggacagcagacgacccctttcccccacctctaatgatgttacctaatttatttggtgctatat

SEQ ID NO: 4578 - DNA, 1419 bp, Cricetulus griseus
aatggctgccactgacactctgagcaaaagcactgaggattcacttggagggacagggtgatcctgcagagatggatccaacccctgacctgtactgtacccttgggaacaatctggaccacttcgtggagcacagccttcagccccagagggactggaaagaggaagggcaggacgcctgggagagaattgagaggttccttcgggaccaatgcttccgggatgagctacttctggaccaagaagtcaaggtgcttaaggtggtgaagggaggctcctcgggaaaggggacgacggctgaaccacaggatctgatcaggacatggttctgttcctgagctgcttctccagggaagagtgacggcattattcggatggatgttctgccggcttataatgctttgggatcctctttcccgagacttgaaaccagacccagaaatctacgaagatctaataaggactaatggcaaccccggggagttctcgccaagcttcacagagttgcagagacattttgtgaaaagccgccctgttaaactgaagaacctactccggctagtgaagttctggtaccagcagtacctgagaagtaagcatagaagagcagcattgcctcccaaatattctctggagctactgaccatctacgcctgggaaatgggtacagagagcagcgaaaacttcaatttggatgaagggtttgtagccgtgatgaatctcctcagagactaccaagacatctgcgtatactggactaagtactacgatttccaaaatgaagtcgttggaaactttctcaaacaacagctgaagagacaccggcccatcatcctagacccagctgatcccaccaacaacttaggaagtagaaatggatgggacctggtggccagagaagctttctactgcctgctgcagacctgctgctggactggaatcctcagcggcagctgggatgtactgccagcaagagaaattcaggtgacagtgaaacaaacagaaaaagaaacctggaggctctgggtagacccctatagccccatcaggaagatgaaggcagagatcaaaaggaaaaatggcacctccggggagctacgcatctccttccaggatccacagggggagaggcaacttctcagcagccagaagaccctatcggattatgggatattctctaaggtgaccatccgggtgctggagacctttccccctgagatccaggtctttgtgaaggaatccagtggccagagcaagccttatgccatcgaccctggcgctaccatctatgaactgaaggggaaggttgaagatgctggagggccttgcacagagaatcaggtgctgatgttggggagtaagaagctgaaagatcgttgcagccttgcagagctacagataaaagactgtgacaccatc

SEQ ID NO: 4579 - DNA, 1419 bp, Cricetulus griseus
ggacactgttccaagagaaggggtccagacccagagacattgtggtggaccctgtgcatggcttcatgtactggacagattgggggacacctgccaagatcaagaaaggggcctgaatggtgtagatatctactcgctggtgactgaggacatccagtggccaaatggcatcacactagatattcccagtggccgcctctattgggttgattccaaactccactctatctccagcattgatgtcaatgggggcaatcggaagaccattttggaagatgagaagcagctggcccaccccttctccttggccatctatgaggacaaagtattttggacggatgtcataaatgaagccattttcagtgccaatcgcctcacaggctcagatgttaatttggtggctgaaaacctcttgtccccagaggacattgtcctgttccacaacatcacacagcctagaggggtgaactggtgtgagagaacagccctccccaacggtggctgccaatacctgtgcctgcccgccccacagatcaatcctcactccccaaaattcacctgtgcctgccctgatggcatgctactggccaaggatatgcgaagctgcctcacagaagtggcacctgtactgaccacccagggaacatccaccatcaggcctgagatcactgcaggagccgaagggctgccgaagcacaaggaggatcagtcggcttccagtacttccaggcagcctgcagaaggaacgaggagcggccacagggtgtgggggtcttgtccatcaccctccccatcgcactggtcatcctccttgtctttggggccatcctgttgtggaggaactggcggctgaggaacatcaacagcataaactttgacaacccagtgtaccagaagaccacagaagatgaactccatatttgccgaagccaggacggctactcctacccctcacgacagatggtcagcctggaggatgatgtggcatgaacagctgtgagaaccttctctttccgggatccgtccgccgccactctcaggaaggaaggacactttttctacacctccctgtccaggactggtcctgctgcctctgtgaacactgtgttgctcaaagcaagataagagccaagctgggccggggatcaagctcagtggcctgcctgccccaggctctgttttatatatttattgtccaggggcagaaaaggctgctggctgtgctcaagactgaattctggctgggattctctcttcgcacttttccagttcagagtcgggcacccatgtgctctgcatctgtgctcttagattgcactgttccgtggtgtgttggatgacttggaagaatacttagaattgccacaatttatcacacgggtaactaagatgacagtggcagtctctcttggatacctg

SEQ ID NO: 4580 - DNA, 1419 bp, Cricetulus griseus
aagaggaggcagatgatggctgtaaggtggcatccgatttaatcagtcagcaagatgcctgtgtagattctacttcatccctgagagagaacaaacaaccagaaggtttggaaatcaaaacaaggcaaaggggaagatagtgatgtactcagtataaatgcagatgcttatgacagcgatatagaaggcccatgcaatgaggacgccgctgccgctactgccactgccgctgctgttgctactcctgcttctgctccagaagtcccagaaagaacagtccggagtgaagctggtcagatagatgaccttgagaaagatattgaaaagagtgtgaatgagattttgggactggcggagtctagcccaaaggagcccaaagcggccaccctgactgttcctccaccagaagatgttcagccttctgcacagcaactggaacttctagaacttgagatgagggcaagagcaattaaggctctcatgaaagctggtgatataaaaaagccagtctagttttctgattttgattttgtgtgtgtttgaatgaagccatgtcatataattttgtatctgacatttatttggggtctcatgtgatatttctcatgtaaaacttattaggtaaactcatcttagactgaaattatatatattttttacttttattattatagattgtagatgtgtgtttaaattcatggcaaatatagttggataccctaaatatttcttttagttttgtctgtaaaattgatatttttaaaagtcaacaaggagtcaggatatttttttttctttgtttttaaaatgtttgggcaacaaactcaaaaagctttaagaaaagattgatcaagcatgtttctcttaaggctacctgtatttttcaataagaatcttaaattattgctcctagatttgttaacaatttatgaactttagttttgtgtatatatacttttaagatatgtattgtttgaggatgccttttgtggatgtgagtttcctagctaaaactaatgaactgttttcttgtaaggctcaaagatctgaatttgctttaaaagcttttttaaataaaagaaaaaactcaacttatgacttattttttagcaatgtaaacttaattgttcattgtttaattccagaattaaaaaaaataagtttcatttacattccaagctttcaggaaaagggtattatattatgatacagggtttcatttgatgtcattgtttgaagatctgatgtatagttccataaatcaaaataataaaaggctgttattctggatatgaagacttgatacttttccaaaagcaaaattgactttaagacctttgataagttgatgttgtaattaagctaattttgtatactttttaataaacaaattagcatcttgccacaaaaaaaaaaaaa

SEQ ID NO: 4581 - DNA, 1419 bp, Cricetulus griseus
ccctgtggtcctctcatgagaagatgttggcacagccctcaaggacagtgatgccgaggtttacaacattattaaaaagagaacaatcggcaaaggattggattggagctgattgcctcagagaattttgccagcagagctgtgttggaggccctgggatcttgcttaaataataaatactctgagggatatccaggccaaaggtattatggtgggaccgagttcattgatgagctggagacactgtgtcagaagcgtgcattgcaggcctatcatctggatcctcggtgctggggcgtcaatgtccagccttattcaggctcccctgcaaacttcgctgtatatactgccctggttgagccccatggacgtatcatgggcttagacctgccagatggaggtcatttgactcatggcttcatgacagacaagaagaaaatctctgctacatctatcttctttgaatctatgccttataaggtgtacccagacactggctacattaactatgaccagctggaggagaatgccagcctctttcacccgaagctgatcgtcgcagggaccagctgctactctcggaacctggactacgcacgtctgcgaaagattgctgatgataatggggcatatctcatggcagacatggcacacattagtgggctggtggcagctggtgtgataccctccccttttaaatactgccatgtggtgaccaccacaacccacaaaaccctgagaggctgccgtgctggtatgatattctacagaaagggtgtgcgcagtgtggaccccaagactggcaaagagattcattatgagctggagtcactcatcaactctgctgtgttcccaggcttacagggaggcccccataaccatgccattgctggtgttgctgtggccctgaagcaagccatgactacagaattcaaaatctaccagctccaggtggtggccaactgcaagattctgtctgaggccctcaaagagctaggctacaaaatagtcacaggtggttctgataatcacttgatcctagtggatctccgttctaagggtaccgatggtggaagggctgagaaggtactagaagcctgttctatcgcctgcaacaagaatacctgcccaggtgaccggagtgcattgcggcccagtggacttcgactggggaccccagcattgacatcccgtggacttttggaagaagacttcaaaaaagttgcacactttatccatagagggatcgagttgactctgcagatccagggtgacatggctgtgaaggccaccctgaaagagttcaaggagaaattgacaggtgatgagaagtaccagagtgctgtgaggactcttcgcgaagacgtggagagttttgcttccagcttctccctacctggcctgcctgatgtctgacag

SEQ ID NO: 4582 - DNA, 1419 bp, Cricetulus griseus
gtcgcgcggcgacagcggccatggctggaagcgagcccggaagagccggctccccgccgcccgccagcgactggagccgcctggaggccgccatcctgagcggctggaggaccttctggcattcggtgggcaaagagcgggcgacgcggacggtctcccaggaggaggcggaggaggacaccagcgcgctgaggcggctgccgatcgatgtacagctgtatattttgtcatttctttcaccccatgatctgtgccagttgggaagtacaaatcgttactggaatgaaaccgtaagagacccaattctctggagatattttctgctgcgggatctcccttcttggtcttctgttgattggaagtcacttccggatctagagatcttaaaaaagcccatatctgaggtcaccgacagcacgcgttttgattacatggaggtttataaaacgtgctgtccatatacgagaagagccttgaaagccagccgtcctatgtatggagctgttacttctttcttacattcattgatcattcagaatgaaccccgatttgctatgtttgaccaggtttggaagaattgaacacatctttggtgttgagtttgatgtcttctgaggaactttccccaactgctggtttgcctcatagacagattgatggtattggatctggagtcaatttccagttgaacaatcaacataaattcaacatcctgatattatattcgactaccagaaaggaaagagacagagcaagggaagagcacacaagtacagttaacaagatgttcagcctacagcgggaaggagatgagcagcaaggaagccgctacagtgtaattccacagattcagaaggtgtgtgaagttgtcgatggcttcatctatgtggcaaatgccgaagctcataaacgacatgaatggcaagatgaattttctcgtatcatggccatgacagatccagcttttggatcttcaggaagaccaatgctggttttatcttgtatttctcaagcagatgtaaaaagaatgccctgtttttatttagctcacgaactgcgtctcaaccttctaaaccacccatggatggttcaggatatggaggctgaaactctgactggttttttgaatggcattgagtggattcttgaagaagtagaatctaagcatgcaaaatgatgctcctttggacctctggaagctgcagtgcgtgacgtgtgtgtttcccatccatcctattcctgactttctataagagggctttatacaggacagctatagctgctgtggttctgattctttaccagaaatcagttgcaagtttcaatcctactactttccccccaaaatgaatgctcacatttttgataacttttatattttctgtctttttgaaaatattaaattctgcaaaaccaaaa

SEQ ID NO: 4583 - DNA, 1418 bp, Cricetulus griseus
atgaaaccaaagagaggacaccgtccccgtcgagagcagcctggtcgggagcgtaactgagtggccggtggacgagaaaggaaagccgctgtaagcctgagttttcctgcccttgagccattctagatgcggaaaaatgctttcagaaagcagttcatttttgaaaggtgtgatgcttggaagcatcttctatgccttgatcactacgctaggccacattaggattgggcacagaaacaggacacaccaccatgagcatcaccacctgcaagctcctaacaaagaagatatctcgaaaatctcagcggctgagcgcatggagctcagtaagagcttccgggtatactgtatagttcttgtaaaacccaaagatgtgagtctttgggctgcagtgaaggagacttggaccaaacactgtgacaaagcagagttcttcagttctgaaaatgttaaagtgtttgagtcaattaacgtggacactgatgacatgtggttgatgatgaggaaagcttataaatatgcctttgataaatacaaagagcagtacaactggttcttccttgcacgccccagtacttttgctgtgattgaaaatctaaaatattttttgttaaaaaaggatccatcgcagcctttctatctaggacacactgtaaaatctggagaccttgaatatgtgagtgtggatggagggattgtcttaagcatagagtcaatgaaaagactcaacagccttctcagtgttccggaaaagtgtcctgaacaaggtgggatgatttggaagatatctgaagataagcagctagcagtctgcctgaaatatgctggagtatttgcggaaaatgcggaagacgctgatagaaaagatgtatttaataccaaatctgttgggcttttcattaaagaggccatgtctaaccacccgaaccaggtagtagaaggatgctgttccaatatggctgtcacttttaatggactaactcctaatcagatgcatgtgatgatgtatggggtgtaccggcttagggcctttggacatgttttcaacgatgcgttggttttcttacctccaaacggttctgataatgactgacaaaaagcaagagcatgcatttggtaaccacattaagacatgttatgctttctaatcgataatgcatctaacacagtagtgtgtttcttttccttatctggtcacattgaagtctacttgtacattttcaaatggaatggtatttttcccttaaatcatttgtgagaaattttaatgtgttagaaataaatgttttaagaatagcaattttgcaaataatgtatttataaatattatatttatgtgataaagaccaaattatagacattaaaatctgtgatgtatctttgcctattgattttaaatgtttaatgtatctttttag

SEQ ID NO: 4584 - DNA, 1418 bp, Cricetulus griseus
  modified_base (1395)..(1395): a, c, t, g, unknown or other
ggagaagagagacacctggccattaagaactttggaaaagagcccatttttgtttttctcctgagcacccgggcaggtggagtgggcatgaacttaacggcagcagataccgttatctttgtcgacagtgactttaatcctcagaacgacttgcaggcggctgccagagctcaccgaattggccagaacaagtctgttaaagtcattcggctgattggcagagatactgtggaagaaatcgtgtacaggaaggcagcctccaaaattgcagcttaccaacatggtcatggaggggggccatttcaccctaggagcccagagaccgtccgctgaggccgacttccagttaagcgagatacttaaattcggcttggataaactgctgtcctctgaggggagcaccgtggatgaagtagacctgggatccatcctgggagaaaccaaagatggccagtgggtccctgatgctttgcctgcagcagcagaaaaccatatgtacttatttgaaggtaaagattactctaaagagcccagtaaggaagacaggaagtcctttgaacagctggtgaatattcagaaagctctgctagagaaaacaagtcatgggggccggtccctccgaaataaaggcagcagcgtccttatcccaggcctggcagaagggcccatcaaaaggaagaaacttctgagcccagaagagctggaggacagacggaagaaaagacaggaagcagcagccaagagaaagagactaatggaggagaggaagaaggagaaggaggaagccgaacacaggaagaagatggcctggtgggaatccaacagttaccagtccttctgcctgcccttggaggacagcgagcccgaggaccttgaggatggagaagacgagacttctggtgagctagatgatgaagacctagactcaatggctatcaagtacgttagcggtgacgtcacccacccacaggctgatgccgaggatgccatcattgttcattgtgtagatgattctggccgctggggcagaggtggcttattctcagctctggaagcacgatcagcagaaccaagaaaaatatatgagctggctgggaaaatgaaagacttgagtttgggaggtgtccttttatttcctgttgatgataaagagtcacgagacaaagggcaagatttgttggccttgattgtggctcagcaccgtgatcgctccaatgtcctgtctggcattaagatggaggctctagaagagggcctcaagaagttatttttagcagcaaagaaaaagaaagcaagtgtccatcttccacgcattggacacgctacaaagggttttaactggtacggcaccgaaaggctcattcggaaacatctgtctgcaagaggcatcccaanatacatatactactttcctagaa

SEQ ID NO: 4585 - DNA, 1418 bp, Cricetulus griseus
gtcaagatggctgctgggctgcggaaacgcggcccgccgggttctgtcgcccagccggcgggactctggaaacaatggctacagcgggcctggcaagaatgccgcctcctgctgcgggagccacgctacacactgctggtggcctcctgcctttgcctagcagaggtgggcatcaccttctgggtcattcacagggtggcatacacagagattgactggaaagcctacatggcccaggtggagggtgtcatcaatggcacatatgactacacacagctgcagggtgccaccggacctcttgtctaccccgctggctttgtgtacacctttatggtgctgtactatgcaactggccagggcactgacatccccatggcccagaacatctttgctgttctctaccttgtcaccttgctgctcgttttcttgatataccaccagacctccaaggtacctcccttcgtctttttcttcatgtgttgtgcctcttaccgtgtccattccatctttgtactgcggctcttcaatgacccagtggccatggcattgctcttcctaagcatcaacctcttcctggcacactactggggctggggctgctgctgtttcagtctggccgtctctgtgaagatgaatgtgttactcttcgcccctgggttgctattccttctccttactcagtttggcttccgtggtgccctccccaagctggccatctgtgctgccattcaggtggtactgggactgcccttcctgctggagaaccccattggctacctctcccgctcctttgaccttggccgtcagtttctcttccaatggacagtgaactggcgtttccttcccgaggccatcttcctgcatcgggccttccacctggccctgttggctgcccatctcaccctcctcttgctgtttgccctctgtaggtggcacagaacgggggaaagtattctgtcgctgctgaaggatccttccaaaaggaaagttccaccccaacccctcacacctaaccagatcgtttccaccctgttcacctccaacttcattggcatctgctgtagccgttccctgcactaccagttttatgtctggtatttccacacactgccctacctcctgtgggccatgcctgcacgctggctcacacacctgcttaggttgctggtgctgggactcattgagctttcctggaacacgtacccatccacatccttcagctctgcctccctgcacatatgccatgctgtcatcctgctgcagctctggctgtcccctcagcctttccccaagagcatccagcctagcaggaaaactcactgaaatccccctcatcctactaggacctgcccaggatcgtgggtggaatagactctgtgttcttagaataaaccttgccaagtccacctttgtgcagc

SEQ ID NO: 4586 - DNA, 1418 bp, Cricetulus griseus
gccgtcacgcgctggccgtctgggtccagcctgttgctgatgctgcggcactgtattcaccatggatctggcgtggcgtgtctgtccggtcccactgtggctgctgttgcagtcgctcctcctgggcctcagtgcaggagctgccgttgactggcccgcacaagaaggcaaggaagcatgggattatgtgaccgtccgaaaagatgcccacatgttctggtggctctattatgccaccaacccttgcaagaacttttcagaactgcccctggtcatgtggcttcagggtggtccaggtggttccagcactggatttggcaactttgaggaaatcggtcctcttgacacccatctcaagccacggaataccacctggctgcagtcggccagtctcctgtttgtggataaccctgtgggcactggctttagttacgtgaacacaactgatgcctatgcaaaggatctggacacggtggcttcggacatgatggttctcctgaaatccttctttgattgccataaagaattccagacggttcctttctacattttctcagaatcctatggagggaaaatggctgctggcattagtctagagcttcacaaggccgttcagcaagggaacatcaagtgcaacttttctggggttgccttgggtgactcgtggatctcccctgtggattcagtgctgtcctggggaccttacctgtacagcatgtctctccttgatgacaaaggcttggctgaggtgtccgacattgcagagcaagtccttgacgctataaacaagggcttctacaaggaggccactcagctgtgggggaaagcagaaactatcattgaaaagaacacagatggggtaaacttctataacatcttaactaaaagcactcccgagacctctatggaatccagccttgagttcctccggagccccttagttcgtctttgtcagcgtcacgtgagaaatctacaaagagacaccttaagtcaactcatgaatggccccatcagaaagaagctcaaaatcatccctgaggattgctcctggggaggccagtcatcttacgtcttcataagcatggagggtgacttcatgaagcctgtcatccacattgtggatgagttgctggaagccgggatcaatgtgattgtgtataatgggcagctggatctcattgtggacaccatgggtcaggaggcctggctgcggaagctgaagtggccatatctgtccaaattcaaccagctgaaatggaaggccctgtacagcaatcctaagtcttcggaaacatctgcttttgtcaagtcctacgaaaacctagccttctactggatcctaagggcgggtcacatggttcctgctgaccaaggggaaatggctctgaagatgatgaggctggtgactcatcaggagt

SEQ ID NO: 4587 - DNA, 1417 bp, Cricetulus griseus
aggtcacttggatgtcagcatggcagccacaaacctggagaaccagctgcacagtgcacaaaagaacctgctcttccttcagcgggagcacgccagcacactcaaggggctacatgctgagatccggaggctgcagcagcactgcacagatctaacatatgagctgacactcaaaagttttgaactgacaggagatggctcttctagaacgacggagctgaagaggcgctgtgaagagctggaggcccagctgaaggccaaggaggaagaaaaccgcaagttactgcaagaactggaacagaagaacgctgccatcgctgtgctggagaatacagtccgggagagagagaagaagtacctggaggagctgaaggtgaagagccacaagttgagcatgctgtctggtgagttagagcagcgcgccagcactgtggcctacctcacttcacagctacatgcagccaaagaaaaagctactgagctctagcggcacctctgatgccagcccagccggcagccctgcactggccagctataacgcccacacctcccaaggacaagctgcctgagacaccccgtcgccgcatgaagaagagcctgtcggccccactgcatcctgagtttgaggaggtctacaggttcggaggcgagagccgcaaactcctcctgcgggagccggtagatgcaatgcctgatcccaccccgttcctgctggcccgggagtctgctgaggtccagctcaaagagcggcctcttgtcatacctcctatcgcctcagaccgtggcgccagtgggcaacatagcccagcacgagacaagccacacaagacccacatcggggtggctcatcgcatccatcatgccagtccaccacaggcccagcctgagggggagaccagggccgtggaccaagtgaacacagggaaggtggtgcggaagcactcagggacagaccgaactgtgtgaagcctgcggccaccaccgcagccatccgtgcactgtgagcgccacagggaacctcacccacaccttcctcaccccacccaagccaaatgtttcctaccatcgcagcctggctcctggtcccatagtaacacactgctatgatggtgtcccctctgaagatatttactggcactgtggccaatgcctgcatgccaatagcttgcttctagcccatcagcacactcctagataaggcctaggccatggctgcatcacatgccacactcagaatcagaactgcttgaaatcaaagcatataaggacccgcccctcccaatatccagggcagcctatgagagcagagcagttttgaagcacgagggactgtggaggaagtgggagggaaggactagcaggtggggtgggagtacttgcagccccaacgtgcttgctgagatgttggtgctcctgc

SEQ ID NO: 4588 - DNA, 1417 bp, Cricetulus griseus
cggaggggcgtgcgcgcgcgcgccttcgccctgttgcgcgctggtgtcaccttgggcgcgagcggggctgtgcgtgcacgggacccaaagccgagggccatcaaggggcgatggcggcgacggcgagtcccggggatggccggatggacgggaagccccgtacctcccctaagtcggtcaagttcctgtttggggcctggctgggatgggtgctacagtttttgtgcagcctctggacttggtgaagaaccggatgcagttgagtggtgaaggggccaagactcgagagtacaaaaccagcttccatgccctcaccagcatcctgaaggcagaaggactgaagggcatttacactgggctgtcagctggcctactgcgccaggctacctacaccaccactcgtcttggcatctataccgtgttgtttgagcgcctgactggggctgacggtacaccccctggctttctgctgaaagccctgattggtatgactgcaggtgcaactggtgcatttgtgggaacgccagctgaggtggctcttatcaggatgactgctgatggccggcttccagctgaccagcgccgaggctacaaaaacgtgtttaatgccctaatccgaattgccagggaagagggagtccccacactgtggcggggctgtatccctaccatggctcgagctgtcgtcgtcaatgctgcccagcttgcctcctactcccaatccaagcagttcttgctagactcaggctacttctatgacaatattctgtgccacttctgtgccagcatgatcagtggcctcgtcaccactgccgcgtccatgcctgtggacattgtcaaaactaggatccaaaatatgcgaatgattgatgggaagccagagtacaagaatgggctggatgtgctgatgaaagtcgtccgctatgagggtttcttcagcctgtggaagggcttcacaccatactatgcccgactgggcccccacactgtcctcaccttcatcttcttggaacagatgaacaaggcctacaagcgtctcttcctcagcggctgatgtgtcaagtcctgggactagagtgccagggcccccaggtcacccactgctcctacagtgatgtgccctggatttctagtcacctctcggatgtcagtttcagggcacacaaaacagcagatctctctctctctctctctctggacaaaccagaggagacaggagagagcagaagctatccagatggccaacaaaagggtctgtggtggaaggacgaggcttcctcctccccgaggagataattaataaattggattgataacaccaaccccaaatctggatagtcttgaggatcctagtgggagctaactgcacaaagaagctgatatctctggaaaacaaaactggagtttttaaacaaaa

SEQ ID NO: 4589 - DNA, 1417 bp, Cricetulus griseus
  modified_base (1411)..(1411): a, c, t, g, unknown or other
caccatggcgtctgctgctctcgggctgacgccgcgctggctgatgctcctcggcgccgcactgctgctgcttctgcccatggcctccgcgcaggagcctccggcaatgggttgttctctgtatacaaacagatcctgtgaagagtgcctcaggaatgtctcgtgtctgtggtgcaacgagaacaaggcatgcttggactacccagtgagaaaaatcttgccccctgcttctctttgtaaattgagttctgctcgctggggcgtatgctgggtgaactttgaggccctgatcatcaccatgtcagtgcttgggggctctgtgctcctgggtattaccgtgtgctgctgctgctgctgtcgccgccgtaacaggagccggaagccagacaggagcgatgagcgggccatcagagagcaggaggagaggagagtgcggcaggaggagaggagagcagagatgaagtcaagacacgatgaaatcaggaaaaaatacggtctgtttaaagaacaaaacccatacgagaagttctaaagcagctggcacccactgcggcagatcttgcagttccaaagtttcctgggagtgccctcgtcagcatagcctgcggagaccttactgcagccacccttgacctgagtcatccctccagcctcagcatgggcaccagagtggccttgagaggacaatcctgcccttgttccctctatctctgtatgtaatcacctgagacattaatcttgttgacatccttttatggggggaggaaacgtacttggtccccacactctacaaagccggaaaacgtgcctgagcagacacacacgcccacctcacttcccaccctgcttccagccatgtctcagctcactgtgtctgagacatcatcatgggcccttggaaagcttgtcaagggacactaaggtccccatgattctgtccacaatgtacatttctctatagtcctgaatgtcactagtaagcagatcgcaagcttgatggtagggtaatgagcaaagctaccctcctgggagagcagccgccagcagatgaggtgaccttacgcctggctccttcatgcctggacacctcatctagctgttcagtaaccctttcaactccgtcggtctgtctagggatcaacatttctcccctccagttttcataaactaagggaatgaccttcaccagtctggagttttaccatttttctgccttgttaggcatttgatacaatttaaagcattgtcaaacatctcatattatagcagccattgagatttgcctttctactgtcagttgataaaggagccctcctcagcaggccttaatgaactttgtattaatatgtagcatgtatacatcatacctgttaggttgctgagctgatgttagagttgaataggaaaaaanaaaaaa

SEQ ID NO: 4590 - DNA, 1417 bp, Cricetulus griseus
ctgcctatcagatcagacctgtcacagaataaatcccgccgcctgctgcgaagcccctgcgcgcttcaaacttggcgaactgggtaatccgtgtctggatatgcagatctctgattttaaaggcggggtgacccggggagaacctctcccgcgggccgaagcccgcaggtgcagtgaggcgtgcgcggcgggtgctggcgcccccgaagctgccgagccccgggagaagagtcggggcgtccaggcggggcggggggtcttgctgctgcgcaccggcggcggctcttctcccgcagcagcggatgaaatatgaactttgcaagacggtgatgccaagaaagaagataaagtactacaatattaagactgtttgcctctggagactaaaacctatacttattagtaacactaacaacaaaatcctgatgatgtagcccactgacaaaagttacagcctcagttactctaaccaatatgtagcttttaatttgcattaagacttttacaaaggtgttttgctattctttttctatatatttcaagaatgttcactggacatgacagtgtaagttggaagcactgaagtacagaaatagacagcctgtttgccacatttagctttcaaaaccaaatgagccatgtataaacaagtttaaaaacttaattttttttaaagtttcatttgcagttttactatcccattaagtgccttgaaagttcccagctgtgtgggctgttgcctcacctcccacaatgtctcctttctacacatggtgctaaaacttcaaaactgaggagggctatgggattagcatgagtacacatgccagagtccttccggtctgtgcactaaaattctgtaccttgagttcctagctatctgcagttgtcaatttatagaaaggataaaatgaagtattttcagttgaagaatagatttctaacatttaccacagaagtgcttcagcattctaaaaggattagactactcattaagctactttacatgccaatttattaatgccttacattaatccactagtaggttgttggacccccagtagagtccctatgcagtcctaattctgtttcctgtaactggtgatgctgagtgatgaccatgtctgcctatcttgcactactatgttttcattctgaccagatcttgcatttaaataaccatgtggatggacacctgattaatcagtggtatatgtacatgtatatttgacgagcaatagtgtgtgttataaagacttttgaaagtctcatttgtaaagttatgtggtggaattttatgtatattcataaatcttgcactatattctgttaaaatattgggtgcatgagtttattttcagtcaaagtaataaaaatttaaaatcttttgttatgggtcaaataaatttcactatgt

SEQ ID NO: 4591 - DNA, 1416 bp, Cricetulus griseus
ccagatctcagcaaagaagctcaagcaggaacctgaagagaagatgacgttaggtaaagcagaagatcacaaagggaaagagccagaggccactgacagatgcaaggagcgtgcagggggcatacctgaaaacagctctccagtcaaaaaagctcccatcactccaggggccctggagagtgccacgtgcaaataaaatcataggccctgctggcatggctgacaaacagctatgaccttttgtataatacaaagaaaattaagttgtaatcagactgcatgaaagtcttctgggatcctaagacccacctggccctggctggctgcccttctcacattcaggaaggagctgcagccatgggctcatctgccatgccctgctcaggctgcccgctcagcaatgacatgatcttagcagtatggttacaactcactttgtattcgtgccaagttacctattgtatcatgtctgttttatcattcccattctgatatttccagtcatgaaacagttcggtttagcttgaagatgtttccaatagcatgttgcatgcttacagagagaaatatttgagtccttgcagaggaagaaattgttagctcatcattaaagttggcacttgccgattttcatagcttctgaccatcctagtttaaaaaatgcaactcagaaagatcactacattacaggaaaaatcaaatattaaagatgcttttttatggctaagtaaggtgtttcaagtaactgttaaagatagtccttacaattgaatgctcaaaatgaggaagtactaaccagcagaatgaacaaactcctgccagtagccaaccctaatgtagctacggtgtctcagatcacctgtcgtaggaagagaagtgcaggagcttgtggaagtaccatttgtttctcttccaagaaaagctactatctggatattttgattattaatcattagtctttaatactcagaccaaaattgtctacttagggagtatttgagcaatcattctgttaccctgtgagtctgacaaactccactgtgaccaactgtactggcccctgtaggtaacacatgcttccacccagaactatatttaacccatctattataactacttgaatagagcaaaattaggaggcttgataaatgctaagaatttagtaccacagaaatgatttattttccctatagtccacaattagtgatacaaatcctatttttattgttaattgtgacataactttgatgtcatatgttgtcattctgatgtggctcttccttaagtaacctgtcactgtactgatttatatactgacttagccacgtggccttggaatgctgagcaaaatatggatgtcctggttgtaaatgtttatatatgtacagtacctttatatatatatatatatatata

SEQ ID NO: 4592 - DNA, 1416 bp, Cricetulus griseus
atctgcccacctgagcaatatgaagatttcattcatcgagcccgccattctcctaaacgcttttgctatgaccctgaccatcccgctaacggcgcagtatgtgtactggaggatatgggaagaaaacggtaactacacctttgattccggtagcaatgtctctgaatgtcaccaaaacaaaagcgaaccgatctttgcattccgggaggaagttcagaaaaagacatctctcttcaatctgcaggtggaaatgagtgggttaattcctggtctggtgtccaccttcatgcttttatcaagcagtgacaaccatggacggaaactccctatggtcctgtcatctcttggctctctaggaaccaacatttggctgtgtgtgctatcctactttggctttcctctccagtttctcattgcatccaccttcattggtgccctctttgggaattacaccacgttttggggcgcttgctttgcctacattgtggatcagtgtaaagactacaagcagaaaatcattcgaatagccgtgttggattttatgctcggagtcgttactgggctaacaggcctgtcatctggctattttatccgagaactgggctttgtgtggtcctatttcatcattgccatagttcttacagtcaacctgacctacatttccgttttcctcagcgaccccataaaggagtcttcatctcagattgtcactgtgtcctgtagcgaaaacctcaaggacctattttaccggacttacttgctttttaaaaatggctccggtaagcggcggtctttgctctgcctgctgatttttaccatagtcatgtattttttgtggtaatcggaatttctccaatttttacactttatgagctggcctctccgctctgctgggatgcggtttatataggctatggaacagctttgggcagcgtctccttcttgactagtttcctaggcatatggctgttttcttattgcttggaggacatccacattgtcttcattggcattctgaccactgtggtgggaatgacactgactgctttcaccaagaccaccctgatgatgcttttagtcaggataccattctttttcaccatgataccattctctgtcctgcggtccatgctgtccaaggtcgtcccctcgactgaacaaggtgcattgttcgcttgcatagctttcttagagacactcagtggagtcactgcaacctctgtttacaacggtatttattcagccaccgttgcttggtaccctggcttcatttttctgctgtctgcgggcctcctcgtcctcccagccatcagtctatggggtgtcaagtgcattggctgggaagaaggaagctacacactcttcgtcccggaagagcccagtgagcatacatcagacgagtgacgccaggcagca

SEQ ID NO: 4593 - DNA, 1416 bp, Cricetulus griseus
tcgagttgtctctgatgctgacgactctgatagtgatgtcatatcagataagtcaagcaaaagagagaagacagcagcatctgatagtgaagaagaagtaggaaaagaagaattgtctgtaaagaagaatgaagagaaggatctatttgggagtgatagtgaatcaggcaatgaagaagaaaaccttattgcagatatatttggagaatctggtgatgaagaggaagaggaattttacagggtttttaatcaagaagatttggaggaagagaagagcgaaacccagctaaaagagcagaagattctgattctgatgataacataaagagaggaaagcatggactttctgtcggattttgagatgatgttaaaacgaaaaaaaaaacaatgtgtaggcaaacgcagacgaaatcgaggatgggggcacttttattagtgatgcagatgatgttgtgagcgccatgattgtaaagatgaatgaagctgctgaggaagacagacaattgaataatcaaaaaaagccagcactgaaaaaattaaccttattgcctactgtggttatgcaccttaaaaagcaggaccttaaagaaacatttattgacagtggtgtgatgtctgccatcaaagaatggctctcacctctaccagataggagtttgcctgcactgaagattcgggaggaattgttgaagattctgcaagagctacctagtgtgagccaggagaccctgaagcatagtgggattggacgagcagtgatgtatctgtataaacaccccaaggaatcaaggtccaacaaggatatggcagggaaattaatcaatgagtggtctcggcctatatttggtcttacctcaaactataaaggaatgacaagagaagaaagggagcagagagatctagaacaaatgcctcagcgacgaagaatgagcagcactggtggtcagacaccacgaagagacttggagaaggtgttgacaggagaggaaaaggctcttagacctggagatcctggcttctgtgcccgtgctagagtcccaatgccatcaaacaaggactatgtcgtcagacccaagtggaatgtagaaatggaatcatccaggtttcaggcaacctccaagaaaggtatcagtcgactggataaacagatgagaaagttcacagatatcaaggaaaaaaagcagatctgcacatgcagtgaaaatcagcatcgagggcaataaaatagccattgtgaccttgcctgggacgtatttaactttttttttggtttttttttgtttgtttgtttttgtttttttgagacagcattttttctttgtagccctggctgtcctggaactagctctgtagatcaggttggccttgaaataaccgagatccacctgcttctgcctcccgagtgctgggattaaa

SEQ ID NO: 4594 - DNA, 1416 bp, Cricetulus griseus
atccggttttagcagagctgggaagctcctgagttgcggactgagaagtaggcgtgctgagcagagttcggaaccatgaacatatttgatcggaagatcaactttgacgccctcttaaaattttcccatataactccttcgacacagcagcacctgaagaaggtctatgccagctttgcactctgtatgtttgtggcggcggcaggggcctatgtccatgtggtcacacatttcattcaggctggcctactctctgccttgggctccttgggcttgatgatctggctgatggcaacacctcatagccatgaaactgagcaaaaaagattgggacttcttgctggctttgctttcctcacaggagttggcttgggccctgctttggagttgtgcattgctatcaatcccagcatcctccccacagccttcatgggcacagccatgatcttcacctgcttcagcttgagtgcactctatgccaggcgccggagctatctcttcttgggaggtatcttgatgtcagccatgagcctcatgttcttgtcctctctggggaaccttttctttggatccatttggctattccaggcaaacttgtatatggggctgctggtcatgtgcggctttgtcctttttgatactcagctcattatcgagaaggctgaaaatggagataaggattacatctggcactgcatcgacctcttcttagattttgttacactcttcaggaagctcatgctgatcctggctttgaatgagaaggacaagaagaaagaaaagaagtgaccctttttctctgcacacattacaggtgtcgtgttctatgataatgaaaagcatcagaaaagcttttgtactttgtggttttctctattttgaatttttgatcaaaaaactgattagtgaatatagtttggagtttggcttcatattcctgaggttctcccatgctcccttttctgtcaaccgatccatagcctcttgctctgctcaggcagccagtccaccactgagtggccctcagggactctacctgctttccatctgtggggtgggaaggcctgagtaaaaaggaagaatatatggcaaggtagagatgacagttctcaagtttccctattgtattttgttgttgttggtttttaaaattaatacctttgttactgattggcctccactaggtggctatgggtaagtcttgggggaaggatagaaaaggggaatggttgggcctcagggctaattgtactgatgacttagttccacctcttgaagccagactccaccttcttgtgctttttgcttggcagctcaggctgcattctctaactcatactgtgaagacaaaggtgtttttgattaaaaaatatatctacatagtcttaatttgtaaaaaataaaagaaaaattcct

SEQ ID NO: 4595 - DNA, 1416 bp, Cricetulus griseus
ggaaccggcagccgcggctgctcgggccggcggggtcggtcgtcgtcatggaatacctgtgggatgagatgaccctgaccttcgcccgcacgtccatgttccccttttttgacatcgcccactacctggtgtcggtgatggcgctgaagcagcggccaggggcagcagcagtggcatggaataatcccctgtccagctggttgagtgcaatgctccattgctttggtggaggaattttatcctgtataatgcttgcagagcctccgttgaagtttcttacaaaccacactaatattttactggcttcttcaatctggtatattgtatttttttgccctcgtgacctagtttcccagggctattcatatctacctattcaacttctggctgcgggaatgaaggaagtgaccagaacttggaaaatagtaggtggagtcacacatgctaatagctattacagaaatggctggatagtcatgatagctgttggatgggcccgaggggcaggtggtgttatcgtcacatcttgtgtagaattgctaaaaggagattggaaaccagaaggtgatgagtggctgaagttgtccttcccttccaaggtaacactgctggggtcaatcatcttcactttacagcacaccaatcatctggcaatgtcaaagcatgatctcatgttcctttataccatctttctcgtgaccataaagctaaccatgatgataacaaaggacaccactgtgactcttgctccctttgaggacaccttgaaccggatgctgtttggctggcagcagcagttttcactgagtgaaaagaaactggaatcgaaactgtcttccaatggcactgcctcgtcagggtccaaggtcaccacagaggattcgggctcttcggagaggcatgccaagaaagaagactgacaattttatctgtgcttgggaggcaaaaagggagagttacttatttatagggtgtggtggtatttctatgtaaatgatgtgaaataagcctatctgtaaggatagaggagacaaaaaggaagaaacgccttatttcagggacaccgctctgttaattgttaactcttggagtcacgagtggatcatgtgaatttatttttctggtataagagattctcctaattacttgaatagttttatattgataaaatgataatttttcaaatgttagaaaaagttcacttgttactgcaaaattctaaggctttaacacttctaaaattcagtggtttttttcactttttgaatgattctaattgtgttttaattctgcagaattaaacttttacttcatatttccagtataattcctgtatatagaagacaattcctatttaattttgaacatggagaacttttcctaaataatttttaactgcaaataaactgatagtgt

SEQ ID NO: 4596 - DNA, 1416 bp, Cricetulus griseus
cctcaatacatgataagaatacgccgtggaagtctttccttgtcattgttgatggctcacccaagaatgatggacacacagaacaacccgatgatgaatatgcatcaaccaaactttcagatagattactatcttttggcgaaaatagccattttaacaacctattggaagttcaaagcaatgtgcctgccatgcaggagaatagttctacagacactgcttgcaaagcagtggtgtctcaggatgctctgcttaccaccaccatcaacgagcttggtgagctgactccacagccaggctcaatgaccacacaccttccctcgttgaccaatatggagtgagagcttcaagctgtgtgccgaacagtctgtgtgattgctgtattccaggtgatgccaggggctgagaaaaaaaagttgtctgtgcaaagatagaggcaagactggccttgcttgatgtctaaccactgcttgtcttaatcacagagtacatagcattgacccaacttaggaaactgctgtctgcggtctcttggtctcaccctgccttatacttccatgtgtatttacttcactctgatccttttggggaacttttctacaaagttaaagtaaaactggggccatatttcagctgtttcttccttactgagataaaagcaaataagatttgttttggagacattaagatggtactgaagattgcttttgttcctccccaaccccctatttgtatgcacgaaaagaggaatgacaaattgaacattttcagtgtagtacctcagcatgtgtgcaggcagggagtctgtcgtaaagtccaacctgggatgagatgttctcaatgaccctttcacaggggtcacctacagccattggaaaacacagatacttacatcacgattcataacaacagcaaaattacagttatgaaatgcaacaaaataattttatggttggggtcaccacaacatgaggaactatactaaagagtccaagcattaggaaggttgagaaccactgatctagagggtaccagaagccttggcttgctcaattcctatgccttaacaagtggataaaagaacggcaaatgtctcaaatgttccttggctttctcatgcagaattttaattattgctcaacaaacttcactatgggaaacgtattttgtggcatttgctattcctgatgtatggttgtagggcctttggataggtggacattggccacctatgacccttaaaagcattaattttatgagcgccttaatgggagaattattctgctttctagttgtttttcctgttttgaacttactaagcttgctgtgagaacactctggtttctaagatgaaggtaccttaagttcaggtgaagaaataaagttgttgaagtgctaaaaaaaaaaaaaaaaaaa

SEQ ID NO: 4597 - DNA, 1415 bp, Cricetulus griseus
tcacaggcacacaagccatgccccctctttttccctggggtaccaccagtgccgctggaactatgaagatgagcaggatgtgaaggcagtggatgcaggttttgatgagcatggcattccatatgacgtcatgtggctggacatagagcacactgaggacaagaaatacttcacctgggacaaaaagaggttcgcaaaccccagaagaatgcaagagctactcaggaagcaaaaaacgcaagcttgtggttatcagtgacccccacatcaaggtggatcctgactactcagtctatgccaaagccaaagaacagggcttctttgtgaagaatccagaaggtggcgactttgaaggagtatgttggcctggtctctcatcttacctggatttcaccaatcccaaggtcagagagtggtattccggcctttttgcttttcctgtgtatcagggatctacagacatcctcttcatatggaatgacatgaatgagccctcagtcttcagagggccagagctaaccatgcaaaagaatgctgttcattatggcaattgggagcacagggaacttcacaacatcgttggtaccaggctggagcttaccagcccttttccgtggccacgctaccatgaacaccaagcgtcgagaaccctggctgtttggggaagaatacactcggctgatccgggaagctatcagagagcgctacaccctcctaccctatctgtattctctgttttaccgtgtgcacatgtcttctgaacctgttatgaggcctctgtgggtcgagttccctgatgacttagagactttcagtgtggatgatgaatacatgctgggaagtgctttattggttcatccaatcacagagccacagaccaccatggctgatatattcctgccagggtcaaatgaggtctggtatgactctaagacatttgcacagtggaaaggagggtgcactgtgaagattccagtaaccttggatactataccagtgtttcaacgaggcggaagtgtggtaccaataaagaccagtgtgggcaagtccacaggctggatgactgactccccatatggactccggcttgctctaagcactcaggactctgctgagggagagctgtatcttgatgacggccattcattccagtacctccaccaggaccagttcttacaccgcaggttttcattctgttccggtgttctgatcaacaggtgtgctgatgagaagggtcattatcccagcaagtgcatagtggagcaaatcttggtcttaggccttaggaagaagccatcttctgtgactacccgctcatctgatggtaaagttcagcctgcagcttttacataccacactaaagcatcggccctaagtctggagaagctttccctcagcattaccgatgactggga

SEQ ID NO: 4598 - DNA, 1415 bp, Cricetulus griseus
acaggtggtcactatttgagcattggggatggttcagtgacagagtttgagttccctgaaaagagtgagggtatcattgtgatctctagtcagtactcgggacaggccaatggaacaggcctcagccctacactgagggttatatccctggacacagaggtgctgaccatcaagaatgtaagtgccataacctggggcagtgggggtggcttcgtggtgaacatccactcaggtctggctgggctggccccactccacctccagctcatggacctccatgagaccccacctttgctgattgaagaacggagagatttctgcatcagggtgtcacctgctgaagacatcccttctaccctcaaccccaacttgggccacttctcagagaacccaatcctctacctgctcctgcctcttatctttgtcaacaaatgttcatttgggtgcaaagtggaacttgaagttttgaaggagctcctacagagcccccaacccatgctgttgggcctcttgggccagtttctggtcatgcccttctatgctttcctgatggccaaagtcttcatgctacctaaggccttagctcttggcctcatcattacctgctcatcacctggcggtggggggagctacctcttcagtctcctccttggaggagatgtcaccctggccatctccatgactttcatctcaacagtagctgccacaggtttcttgccactttcatcagccatctacagccgccttctcagcatccatgaaacactccacgtgcccatctccaagatactggggactctgctgttcatcgccatccccatagcagcaggtgtggtaatcaagtctaagctccctaagttctcagagctgctgctacaggtcatcaagcccttcagttttgtacttctcctgggtggcctattcctggcctaccacatgggggtcttcatcttagtgggagtcaggttacccatcgtactggtgggcttcacagtgcccctggttggccttttggtgggctacagcctagccatgtgcctgaagctgccagtggcccagcggcggacagtcagcattgaggtaggggtacaaaacagcttgctagctttagctatgctgcagctgtctctgcgtcgccttcaagcagactatgcctctcaggcccccttcattgtggcactgagtggtacctccgagatgctggctttggttattggccagttcatctacagcaacttgtttcctgttccatgaggaccctggatcaagttttataaccccagcccccatactccatccactgtccccacagttctgtaccaaaggccttttgttctcatgcactatgcactcagacaaatccaggcttttttttttaataaaaaaaaaccaaaaaaacaaaaaaaaaaaaaaaa

SEQ ID NO: 4599 - DNA, 1415 bp, Cricetulus griseus
atcgagcccacttcagagaacaagagctcttttcctgctcctttcctggatgcaataaacaatatgacaaagcctgtcggctgaaaattcaccttcgaagtcatacaggtgaaagaccatttatttgtgactcagacagttgtggctggaccttcactagtatgtccaaacttctaaggcacaaaaggaaacatgatgatgaccggaggttcacctgccctgtggaaggctgtggcaagtcattcactagagcagagcatctgaagggccacagtatcactcacctggggaccaagccattcgagtgtcctgtagaaggatgctgtgccaggttctcagctcgaagcagtctgtacattcattctaagaaacacctgcaagacgtgggtgctccgaaaagccgctgcccagtatccagttgtaaccggctcttcacctcgaagcacagcatgaaggcacacaatggtggcgacagcacagccgacatcaagatcttgtacctcatctggaagactccaagttctctcacacccagcagtgaactgagtagcccgggccaaagtgagctcaccaacatagatctagcagctcttttctctgacacacctgctaacagtggcaattcagcacctgggtcggatgaagccttgaactctgggatccttaccatttgatgtcacttctgtgagctcctctctgggagggaatctcccttctaataataactccttagggcccatggaccccctcgttctcgtggcccacagtgatatgcctccaagtttggacagtcctcttgttcttgggacatcagccacagttctccagccaggcagcttcagtacagatgattctcaggccatgagcacaggagcagtaggctgtctggtagctctgcctgtgaggaacttgggtcaagacccaccagctttgactcccagcagtaacttggcagctccgccgcaccaacctcttcaggcactgcccaagagactgccagagtcccagatctgctggttccaataaaggtggaacaagacttgcctcctgtcccagatgtggtccaggggcaggaagaaagtcacaggccatcccagtctatgctgtccagctctgcagagaagccaggggctcacaaggactcagagttcagtgctggcaccggcagcctctacttggtatgaagcactctattccgtcaccaccactagctcactcccctaatgcaccttggatcatgtttgggatgaaccctgtctatgcagacggttctttctggtgtacagaaggacagatggagcctgggcaatagtctggaagcctgactgactttgactctggaattgacattcttgcagctttgtgcaaatcacttaacctatactgagccttaaatcctcagttattctaaaata

SEQ ID NO: 4600 - DNA, 1415 bp, Cricetulus griseus
atggcacgaagtcgagccaggcatgccatctccaaccacactgaagaagtctgagaagtccggtttcagcagcccctccccttcgcagacctcctccctgggaacagcattcacacagcatcaccgacctgtcattacaggacccagagcaagtccacacgcaacgccatcgactctccactttccaacatcacccatcatccagcaacctgggccttacttctcacacccagccatccgctaccaccctcaggagacgctgaaagagtttgtccagcttgtctgccctgatgccggtcagcaagctggacaggtgggcttcctcaatcccaatggaagcagtcaaggcaaggtgcacaacccattcctccctaccccaatgttgccgccaccaccgccaccaccaatggccaggcctgtgcctctgcccatgccagacaccaagcccccaaccacatcaacagaaggaggtgcagcttttttttttttttttttctttttttctttttttttttcttctatttaaaactttttttttttttttttttttttttttttttgtttttttttgttttttttgtttttaagttttggctatttttgctttttatgttttttattgttaaacttgtatccctttaaaaaaactgaaggaaaatttaaaaaaaaaacaaaaaaaataaacaaatactaatattaactttttttttttttctttttttttttttttttttttttttttttgtttgacatatgtgcactaaaaaaaaaaaaaaaaaaaaaaaaaaaaaaaaaaaaaaggaaaaaaaaaaaaaaaggaaggcaaagcaggcttgtgctgtttttctgccttcggtttcttgtcagcttaggtttgaggttatttcactgagaacgcgaactctgtcttccttccggctgtcttcagtatcttggaggtgtacacttacttaaattcagtattacgtgtctggccatgttaggcatgtgagggagctgctagacctcttctccctcaggcctctgtgactctgctggactcagcagccttgctgccaacatgccagccagactagacatgcagtgccagcaggtcccattagcccttaggaagacagtcaaggctaagtccatgcttccttctttgcccctcccactaacctttcccatcacacatgaaaacctgtctgctcagagtgcctctgattttcatttcaaattgtgggggaaaaggattaaaaaactctgaatgatggaaaaagagacctattgtgaaacgaaacgccccgtgttaataacttggtctgaaattgttttatgagccgggcccctgtgcctctagcatatttgtattgactctcattagttacccttttcgtttacttgtgttctgtgaaaacttgtaattggttgag

SEQ ID NO: 4601 - DNA, 1415 bp, Cricetulus griseus
aagtccactgaagctttggagttcatgaagcgggacctgacagaatttacccaggtggtacagcatgacacggcctgcaccatagcagccacagccagtgtggtcaaggagaagctggctactgaaggctcttcgggggcaacagaaaaaatgaagaaggggctatctgacttcttgggggtgatctcagacacctttgccccctcaccagacaaaaccatcgactgcgatgtcatcaccctgatgggcacaccctctggcacagctgagccatatgatggcaccaaggctcgcctctacagtctgcagtcagatccggcaacgtactgcaacgaacccgatgggcccccggaattgtttgatgcttggctttcccagttctgcttggaggagaagaagggggagatctcagagctccttgtaggcagcccctccatccgggccctctacaccaagatggttccagcagctgtttctcattcagaattctggcatcggtatttctataaagttcaccaacttgaacaggagcaggcccggagggatgccctgaagcagcgggctgaccagagcatctctgaggagcctaggtgggaagaggaagaagaggagcttgaaggcattgcaccatctccaaaagatgtaaagattccaaaagagaccaaaacctccacatctcctgaagatggacctggcccccagagcccttgtgaagatactccagtacgaaccccctgcagaggtgactccatcagagagcagcgagagcatctccctcatgacacagattgccaacctgctactgcacccgaggcgagctgaactcagatagtgggaagtctacaccctccaacaatggcaagaaaggctcaagcacagacatcagtgaggattgggagaaggactttgacttggacatgactgaagaagaagtgcagatggcactttccaaagtggatgcctcagatgagctggaagatgctgagtgggaggactgggaatgaggggagccagaacaagcagctccccctctcaccgcacatcccacctccctcgctcgctaatctcagccagccttggaagacactgagaatcgtccccccaaaaggcctctgccatccagaacttggtacagattctggtggctccctgctggccttctgctcacaccttggaagtatgtcacatgcacccaagtccttagcccagctgtgccactgcaagagtctgctcttgtattttttcccttccccaagaaaggaggaagccacattcaggcccttctgtgtgttgcctggttggatacctgctctgagcagctgcctaccttgactcctatagcttaggacacaagccagctgtgagcattttaattaacttttttgtttttgtaaaaggaacaaaaaaaaaaaaaa

SEQ ID NO: 4602 - DNA, 1415 bp, Cricetulus griseus
attactgtgtagctaggcaaactagaaaaataataacttaatgaataccgtcaaatagtccaacagagaatgaagcagtctcctgatctagtgagctttatgatggagttgaagatgattttggaagctgctttaaagcgtagacgagagttgtgtgtacaaccgccttctcgaggtttctgcaccgaccttctgaatgagataggagctgttggttgggataaacttgtgtgtgtggatacgtccttcagtaccatcaagttaaaagcagtggatgcttctggtagaaagcatgtgatcactgtcaagttgaaggcaaagtatcctgtagagccaccagattgtgttgtagactttcctgttccattttctgtttcctggacaccacagagctccttggtggatgtgcatagtcagttcttggcagcattggaatcactgaaggtattctgggatgttatggatgaaatagatgagaagacatgggtgctggaaccagaaaaacctccccggagtgcaacagcacgcaggattgcattagggcataatgtttccatcaacatagaggtagaccccaggcatcctaccatgcttcctgagttttgctttcttggagctgaccatgtgataaaacccctaggagtcaagctgagtgagaacatacatttatgggatccagaaaatagtctgttacaaaatttgaaagatgttttagaaattgattttccagctcgtactgttttggaagaatctgactttagcatggactgtggaatctgttacgcccgtcatcttaatggtgccattcctgatcaagtatgtgataatccccagtgtggacagcctttccatcaaatatgcttatatgagtggctgagggggctgagcaccagcagacagagcttcaacatcctctttggtgaatgtccctattgcagtaagccgattaccttgagaatgtctgtgagaaaaccctgaaatttatttgatgatttcagagaaaaatacaaagcgagacaaactagtaccaacaggcacaatatagtgagtccatagttatacacatctgccttcatgtcttcactcagtgtcactgggaaagctgcaggacaaagtcttggaggacttcccaagtctgtgacacccacatcactggtagaaatatatctgtactgagctggataccttggctttctgattgtatctctactggtgggatctggataggacttacaatacgaaccttggaaactcatatagctgggtgtctgttgaagactgtgcatgtcactctgaaaatctgaatactcatacatatttcttctccttgagttttcctatgaaaaaatatagtttgttagatttgagttatccaggcatttattgtgtactctgtaatagtgctaaataaaaca

SEQ ID NO: 4603 - DNA, 1415 bp, Cricetulus griseus
  modified_base (869)..(869): a, c, t, g, unknown or other
  modified_base (1404)..(1404): a, c, t, g, unknown or other
cgcagacgcctgcagcgcccagtctcctgcgccgcagtgtccccagatccccggccgggcgccctgggcagctgaggacagcatgcgggactacgacgaggtgaccgccttcctgggcgagtggggacccttccagcgcctcatcttcttcctactcagcgccagcatcatccccaatggcttcaatggtatgtcaatcgtgtttctggcggggaccccggagcaccgttgccttgtgcctgacaccgtgaacctcgagcagcgcgtggcgcaaccacagtatcccgttggagacgaaggacggactacaggtgccccagagctgccgccgctaccgactggccaccatcgccaacttctccgctttggggctggaaccgggagtggatgtggacctagaacagctggagcaggagagctgcctggatggctgggagtacagcaaagacgtcttccaggccaccatcgtgaccgagtgggacctggtgtgtcagaatgactggaaaggcccattcaccatctctgctgccactgtttgtcatacttcatcagagattggaggatgctgctgctggcactcactgtgccaggggtgctgtgtggagctctctggtggtttattcctgaatccccccgatggctcatctctcaaggccgaattagagaggcagaggtgatcatccgcagagctgccaaaccaatgggattgttgcaccttccactatctttgatctaaatgagttacaagacctaaattccaagaagcctcagttacaccacatttatgatctgatccgaaccggaatatcaggatcctcaccatcatgtctataatcctgtggcggctgttcgaagtcccagcctattgngtttggcctggctgttgctgcagcacttgccccggagatattccatctctgctgccctcttcctgggtggcagtgtacttctcttcttgcagctggtgccttcagaattgttttatatgtctactaccctggtgatggtaggcaagtttggaatcacctctgcctattccatggtctacgtgtacacggctgagctgtaccccactgtggtgagaaacatgggtgtaggggtcagctcccacaccgcatcccgccttggcagtatcctgtctccctactttgtttaccttggtgcctatgaccgctacctgccttacatcctcatgggaagtctgaccatcctgacagctatccttaccttgttcttcccagagagctttggtgtccctctcccagacaccattgaccagatgctaaggatcaaaggaataaaacaatggcaaagccaaaaccagacaaggatgctaaaaggatggtagaagaaagcccaacagtcctaaaaagcaacagccttttaacttttataataataaanaaaaaaaaaaa

SEQ ID NO: 4604 - DNA, 1415 bp, Cricetulus griseus
tctgcaggaagcactgaaggagaaacagcagcacattgagcagctgctagctgagcgtgacttggagagggctgaagtagctaaggccaccagccacatctgtgaggtggagaaggagatcgccctgctgaaggcacagcatgagcagtatgttgcagaagctgaggagaagctgcagcgggcacggttgctggtagagaacgtgaggaaagagaaggtagacctgtccaatcagctggaggaggagaggaggaaggtggaggacctgcagttccgagtggaagaagaatccatcaccaaaggagacttggagctaaccacagtgggaagtctcgagtgctgcagctagaggaggagttgagcctgcggcgtggtgagatcgaagaccagtgacctttctgaggagaagatccggatgaaggagaagctgacggggctggacaaggagaagtccctgtcagagcagagacgctactccctcattgacccagcttcagcacccgagctgctgcgactgcagcaccagttggtgagcacggaggatgccctgcgggacgcactggaccaagcccagcaggtggagaggctggtggaggctctaaggggctgctcagacaggactccgaccatcagcaattccggttctgccaatggtatccaccagccagacaaggcccacaaacaggaggacaaacactgaccccaaggaataccatggaccggccccattcacaccagaagcccctgccaggcttcctagcagctccacctccaggcaggagccagaactgtctcctttggagatgagacttgtgtttgcaagaacaggtacaaaactctttaaaagcgttcatatggtgttttgctggggtggggaggaaattaaacttgttccctttatttctgggaaccccctgtctatgttactccaaagaccccagcagcccacggaggttcgtgtcttcccagggcggaactacagtgggtaacaggtatggtaagtcataaggatggcccaggaggcctctgtgagcaccaccaggcaccagtaggtggcgctcacactctcgcccttaggagttgtattagcctctccaccttcctttctgcttcctgttggcttttgggtagcgctcgcctttaacaacagcagcctagagcctagaattgatgttgtagtggcctaaatgcagagccaaacattgctctttccagcacaatcggcagctcacggattaggaactaacagccaaaggctcccatagtagggaccaaaaggggctgagccccaccctggagtgggcttgcacctggtaggtgtgcaagaagccatttccccacaagcactggcctttgaaggccccctcagcctacctggtgtggccacccagctgtggctcagccactcccccccc

SEQ ID NO: 4605 - DNA, 1415 bp, Cricetulus griseus
gaaatatctcaaggtagctgggcctgcccctcttccctacctacctgttgtccttaccccaaactaccaccaccctggctccactccctcatgaccgcctggatcctccttcctgtcagcctgtcagcattctccatcacgggcatatggacagtgtatgccatggccgtgatgaaccgccacgtgtgtccagtggagaattggtcctacaatgagtcctgctctcctgaccctgctgaacaagggggccccaagacctgctgtacccttgatgatgttcccctcatcagcaagtgtggaacatatcccccagagagctgcctcttcagcctcattggcaacatgggtgcttttatggtggccctgatctgccttcttcggtatgggcaactcctggagcagagccggcactcctggatcaacaccacagcactcatcacaggctgcaccaatgctgctggccttgtggtggttggcaactttcaggtggaccatgccaagtctctacactacatcggagctggtgtggccttccccgctgggctgctctttgtgtgcctgcaatgtgttctcttctaccacggggccaccacaaccctggacctggctatggcctaccttcggagtgtgctggctgtcatcgccttcatcaccctggtccttagtggagtcttcttcctccatgagagctctcagctacagcatggggctgccctgtgtgaatgggtgtttgtcctcgatatcctcattttctacggcaccttcagctatgagtttggggcagtctcctcagacacactggtggctgcactgcagcctgcccctggcagggcctgtaagtcctctgggagcagcagcacctctacccacctcaactgtgctcctgagagtattgccatgatctgagtctggagggtggctggcccagcctccgaagcacccacaccttttaccttctttgcatttattttgtaccaaaaacagtttttagagagtattgttgggatctaggcttcctaactcctggagaagtggccatccaacatccacctgtgccatagaggacggtcttgccagctgcctctgctacatgtcctgttcccccagacccagagtagtattttgtgttaaaggtcaccggtcctcacttgccctgccagcccttcaggtgccttctactcccagtgccagagccagaccactggggtttcctgctgcaggaattgggggctggggcagcagggacccttaagtctggatgatgggaggagcatgccttagcctaagggaaagcccacccagctgcatttgggttcttcactctgcccctcacttcctttagggcaaataacacagcagaaccacatgagtattttagtacttttttatatctattaaaagaattctaatttgca

SEQ ID NO: 4606 - DNA, 1414 bp, Cricetulus griseus
atcttcggggccggggagacccagcgagaccgcgagcgcgcgcgtcccccgccctcgagccgccgcggcgcgccccaggccccggcgcccgccgcgctgctcgcggggagccccggcggagacgcggcccccggacccgccccggcctcgtcagcccccgcgggcagcgaggacgcggagaagaaagttctcgccaccaaagtccttggcactgtcaaatggttcaacgtcagaaatggatatggatttataaatcgaaatgacaccaaagaagatgtgtttgtacaccagactgccatcaagaagaacaatccacgcaagtatctgcgcagtgtgggagatggagagactgtagagtttgatgtggttgaaggagaaaagggcgctgaagcagctaatgtgactgggccagatggagttcctgtggaagggagccgttacgctgctgatcggcgccgctacaggcgcggctactatggcagacgccgtggacctccccgtaatgctggtgagattggagagatgaaggacggagtccctgaaggagcgcagctccaggttcatcggaatccaacttaccgcccaaggttccgcaggggacctgctcgcccacgacctgcccctgctattggagaggctgaagataaagagaatcagcaagcggccaatggtccaaaccagccgtctgctcgccgtggattccgacgcccctacaactatcgacgccgcccccgccccctgaacactgtttcacaagatggcaaagagaccaaggcaggtgaagcaccaactgagaaccccgctccagccgctgagcagagcagtgccgagtgaccctggcccccgggcaccttcaccaccagcagggtgaccttaagaattaatgaccattcaaaaacaaggcaaaaagcacacccacgaccttaccaacaccaaagaaacatctaagcaataaaatggaagactaaccaagatttggacattagaatgtttactgctattctctacgaaaccaacaaccacaaagggaatgagccagcaagtgtccatcaagctgcatcccgggaacctgcacagacgcaggagagcggcctccccagtttcagcagccactagctttatatttttttcctggtttttactgttttggtaatatgaattaaaagaagaaatattaataccacatggggattgccccaaccaaagaaatctgaaatatatagtaaatgctctttttcctttgttgttcattttggatgctggtgctaaacttccaagtgtcatgatttaagacgaaattttatgcccttatttattcctaggatgaggggagaacatttttgctttcttacatagctctctctgaaatgtgcagtaacaagttcctcaaaaataaaatttttaccttcaaagg

SEQ ID NO: 4607 - DNA, 1414 bp, Cricetulus griseus
gccagcttcatcttctccaagggcaccaaaaactgcagcttgagcggccggtgtctcctgaggcccaggctgacctccagcggaatctggtggctgaactccggagcatttcagagcagcggccatcacaggctcagaagaagccttccaaggctcccccacctgtggcccgcaagccctctgtgggagtccctcctccctcccccagttttcctagggctgagtctcttagtgctccagccaccaacgggctccctcacgctgaggacaggactaagggggagctggctgaggatggaggtgtgcagctggctggtacagagaagatgggcccccctggttcagatccatagaagagactggtctgaccttcaactggcactgctgacccatcccaggaacacaatctctcagggacccgagcagctccaaggaagaaaggatacggcaaacacagcctaagaaaggatgcctgcagccttaatctccacagccttccatgtttatgcaagcctggtgttgcccatcctccaagtcacccctcccacaagcttcccaggctggtggcaggagtgaggctgtggaattccaaagcacaaaaggtacagatggggctaactttcctgtgcctcaccttaccaccaaccactctcctgccttccagttctgtcaggtgctcctccttataaggggggttcatggatgaggggaggaagaaccagaggtctgtgggcactgtgcactaagaaaccaaaagccagaccagagtaggaagccatctgggatcttggcctgctgggtacctgtcctgtgacacttgattgggtttgggtggatgggcacagcttcagagccaggagctcatgggatgtgtccatttcatcttggcagggaatactgccaagatgggaggagagcctggcagggccttacttgggcagtgggcccaggcctggccctcattctttgtctgacctgtctctactctttggtgcatgtcctctgcagctgcctttcagccaggtggagggagctgaggctgagcggcaaggatgggaagccaactggagctcttgccctgacttgggatcttctctgcttgtttccccactgggtgggccagagtacaaagaagaaaggagaatcttaagagggacaacctctctttgtcctctggggtaaataagcttgaccctgtgtaaacggagagaccaaaagcctctgatttttaatttgcataaaaacattagaagagacaaatatatatatatatatatatatttccttaaatatttgagttctttgatatgtctatataaacagttctctccccacccccctctctgaagcttgagtgagacacatgacaaagctgtgtttcattaaaaggtattaaataaatgattgaaacttg

SEQ ID NO: 4608 - DNA, 1414 bp, Cricetulus griseus
cagctggagcggtggcgtttggagcagacgcgaaactggatggcttctacagggagccaggcctctgatatagacaagatttttggattcttcaatgatggcgaaccccccaccaaaaagcccaggaagctacttccaagcttgaaaaccaagaaacctcgagaacttgtgcttgtgattggaactggcattagtgctgcagttgcaccgcaagtcccagccctgaaatcctggaaggggttaattcaggccttgcttgatgctgctattgattttgatctttttagaagacgaggaaagcaaaaagtttcagaagtgtctccatgaagacaagaatcttgtccatgttgcccatgacctcattcagaaactctcccctgtcctggagtgggctcaggagaagcggaagctaagtgtgttacacatccatggggtctataccaatcctagtggcattgtcctccacccagctggatatcagaatgtgctcaggaacactgaagttatgagagagattcagaaactctatgaaaacaagtcatttcttttcttgggttgtggctggacggtggacgacaccactttccaggccctgttcctagaggctgtcaagcataagtctgatctagaacatttcatgctggttcggagaggagatgtagatgagttcaagaagcttcgagaaaacatgctggacaagggaattaaagtcatctcctatggaaatgactatgctgatcttccagaatatttcaagcgactgacatatgagatctccacaagaggcagaccagggatggcaagagaaggccagctaaatggttcatctgcagcacacggggaaataagaggctgtagtacatgagcaagctggaaaaatcaccattagaccacgcagtggggccttcctgtggatgtgtttaacaagcaaacatacaagaactcagcacagctcccaggaagtaccaatacccacaagttgaagcttggggtagaattgggtcgcggtgttgcaccttcccttcatgctggctgtttgatactctgctgcctggtccaatttaatacccaatgacatcagggcccaatgcagcccctacctaccccaaggctggacatgcttatctacacagcagaccaatgtgatgggacctagatatggctgcagctctgcaggacttggggagcaagaagtcatggagtcagtgtgggctcttgttgcagttttgtactctacttggttttttcaattgagcttatggccctttttaaaacatgacttgaagctctagttttctagatcttttacagtgtacagtattttacataactgagctgtattaaaagcttgttcatttacttgccatttctttatgaaatttattttcttatataaaattatgtattttctctg

SEQ ID NO: 4609 - DNA, 1413 bp, Cricetulus griseus
agtccttaacagtctgagtctgagcccctgagccttattgcaaatgtggtagctggctcatcctgccggggacccccactgtccacgagaccttcagggcgtccaggcgacagggctgaagttgcttccgcccttcgctccttctcaccgctacaacctggacaggctccccaaggccgggctcccagcaccatgacaggatctggagtggatgccaggacagccagctctgggagcagtgtgtgggaaggacagctgcagagcctggtgctgtcagaatacgcatccactgagatgagccttcatgccctctatatgcaccagctccacaagcagcagacccaggctgagcctgagcggcatgtatggcaccgccgggagagtgatgagagcggagagagtgcccctgaagagggggagagggtgcccgggcccccaacttatccccgatctgccagctatccctgtgctacacccggcctggagcacctgagaccaccgccctgcatgggggcttccagaggcgctacgggggcatcacagatcctggcacagtgccccggggctccctctcacttctctaggctgcccctgggaggatgggcagaagatgggcagccagcatcaagacatccagagcctgtcccagaggagggctcggaggatgagctgcccccacaagtgcacaaggtatagacaaggcagaagagggtccccatgctccaggatggaggcaacagctgccctgccaaccgtttgcctgccatgagaggacttctctgagtgttgcctggccccacgtgtgtggtgtttgtgtgtccctgcctggccaagggaggtgccaacactgggcttgccatagcccaagaagacttggaggcctcgggactaggggcacacaagactctagcctcgtccccaggactcccttggctcagagtgtggtgctagaaactggtccccagcccactcccagtactgccatctttgcatcacccctgcaagtctccagagggcttcctaccacagaagctgccaagcagaagaacctgtgccaaccgtggagtggggaggcagggcctgagccctcaacccctgaagcctagccgctgcttcttggacttataccacctgcacgggggactgacagggcatgattgtgacctcagccatttatcccagcaagagagctctgccctgcatccctcactcccctaaaggaggatggagggataatggactcaccctagcctagggctttgacattgcatgctgggattcagctcctatcctcccccacactcccttccccggctctgctcaactgtgggaggcaaactatgccgaaggtggtgaactctgctgtcccagtccacagcagaatagggtgggaaaccctatacagcttgataa

SEQ ID NO: 4610 - DNA, 1413 bp, Cricetulus griseus
gccaggatccaaaagcagtgacaaactgagtgccgttatccgtgtcgtggagggaggaagcggcctgaaggtggtggcgctggcccggctgactcccataccttttgggcttcagaatgcagtgttttcgattgctgatctttccttacccaactatctaatggcgtcttcagttggactgcttcccactcagcttctgaactcttacctgggtaccaccttgcggacgatggaagatgtcattgcagaacaaagtgttagtggatattttgtcttttgtttacagattgttataagcataggcctcatgtttatgtagtccatcgagctcaagtggaattgaaggcagctatcgtagcttgtgagatggaactgaaaacctccctggttaaaggcattttatattaataattaggctttgaaataagtattttattcttacaaaatggtaggcttaccatctctgaagttgtcattcaggtggccttgtttagtcaaaacgccttgttaaaaagaaacaagctttaaaatcatgtttatagttccattaaagtacttatgtatttgtccccatagtcttcagctttaaaactataaacataatattaacaaaatgcccatgtttgtgttatctgctgtgttattagactgttttaggggggcctttggtattccttttccctgacaggactcaggaattcttaaatgtgaagttttctcaattctttttcttgtagcattgtgtttactaacagcactttaggactgtagaatattataatccaaactcttcctggggaagttgctagaatttaaatttgttgtccaggagactatctttccagttcttgaaagctgctaggtgtgtgccacattggtgcaaataaatccttactgtatgggaaatgtgtgccattcacagaaaaggagcatttgaagagaaagaggtttgttgtgaagccagagaacaattgtaactaggttgatggccttggtgctgagattttgtttgagccacaggctactcccaggcgctgaacgatactccatgtaatactatcaagcttctccgattagaattttctggtttctcttataataaggtattttggatatatattttaatggtcattgctttaagctgaaaagccatttaaatgaggagagaaattactctcatgggatatttaaaactcaggagttcaaataaactcacatattgaacagacactgttgactttgcaactgaattataacatggtacatctgaactgcagagtgattgctgcaagctgttctcaaaggtggttgggatttacagtagacaattccaacagtgaagcggtacaatgtcttggaaattggtatctcacatcactcgtgtgcctaagaaaataaaaggaaataatttta

SEQ ID NO: 4611 - DNA, 1413 bp, Cricetulus griseus
ggcgggtgaccactgggggccgggagcggggagcagtggcgtggagctgtcctcgcgctcgcagccgggacccggagctgtggggtctgaagccagcgagcggaccgctgcggggacccaggccgaacggagcggcgggagcaggatggcagaggccgtcggagccttggctctgattgtagccccggctcgccggcgttggctgtggtcggtgctggccgcgatgctcgggctgttgacagccagaatgtcagccctggaggtacatactcccaaggaaatcttcgtggtgaatgggacacaagggaagctgacgtgcacattcgattctcctaatacaactggatggttgaccacagtctcctggagcttccagccagacggcaccgacagtgcagtgtcgtttttccactactcacaaggacaagtatacattggggactatccaccatttaaagaccgagtcacctgggctggggaccttgacaagaaagatgcatcaatcaatatagaaaatattcaggctgttcacaatggcacctatatctgtgatgtcaaaaatcctcctgatattgttgtccggcccggacacattaggctccacgtggtggaaatagacaatttgttggtgttcctggtttgggtggtggtgggcaccgttactgccgtggtccttggcctcactctgctcatcagcctggttctggttgtgctctacaggaggaaacactcgaaacgggattagggcccagtcatatacgcacagttagaccactctggcggacatcacagtggcaagattaataagtcggaatctgtggtgtatgctgacatccggaaagagagaagaccccaaacatatcttaagcaagaaaccaatccaaactggactcttgtgcagaaaatgcccataaccacgtgtggccttgactcgagcaaggacaagcacatgtatacgcatggaagaaaatgtgtataaaggatatgtatattctatttaatctttctgactcgagaggccagcggtgcatgaagaaatggtaggagtctacgtaagtgtaaattgtcttgctgtttctgtgtattctttcagagtcatttctaattggaaagtttcagaaacatccctgataccaagtgatatggtttgccttattggagacttcacacaactgttagtacttccaacagacgtggccttttcacctaagggctcaagcagtcttagcatttcttgttgttggagagatgttcagtggaagtgagtctctcacggtatcagaaccattttacaccacctcctttggagtatgtctatttcctgcaactgtgcattctgaggcctggctacagataacagtgagatcacgtccagatggcagacctgcccttcccatgtcctctgacctgaag

SEQ ID NO: 4612 - DNA, 1413 bp, Cricetulus griseus
aaaacggcgcgcactcgggcgcagccagtcacggcttcccggagtgcagtcgcccgtgcgcctcccagcagctgccagaatgccaaactggggaggaggcaagaaatgtggggtgtgccaaaagaccgtctactttgccgaggaggtccagtgcgagggcagcagcttccataaatcctgcttcctctgcatggtctgcaagaagaatctggacagtaccactgtggctgtgcatggagaagagatctattgcaagtcatgctacggcaagaagtatgggccaaaaggctatggctacgggcagggcgcaggcacactgagcacggacaagggggagtctctgggcatcaagcatgaggaagcccccggacacaggcccactaccaatcccaacgcatccaagtttgcccaaaagattggtggctctgagcgctgtccccgatgtagccaggcagtctatgctgcagagaaagtgattggtgccggcaagtcctggcataagtcctgcttccgttgtgccaaatgtggcaaaggccttgagtcgaccaccctggcggacaaggatggtgagatctactgcaaaggatgctatgccaaaaactttggacccaaaggttttggctttggacaaggagctggtgccttggttcactcagagtgaggcctctgctgcctgtgtaccccgcctcctcctgtgcttttcttctgtcatcaatcccttcccagaagccttggacacccccaagattctctctctcactcagccctggctcacatcactaatgttggacttgagtatctggcttcttttggtttaggggtctgcctgagctcctaccccactaaggacttcctcctgcctggcatttgataccaccacctttaagagacatctgtcatccttttagagagaacaggtccctctccccacacttcaccctccctacagacccgaatgtccaccctctactggtcacaatatctgagcccaagtctttggagcccagagtagtcaagcaacagacctggagggaggaagcaggaccaggaatccatgggaggcagagaggtgcagacagggttgtagaccacaggaaggaactctttctctgggctcttgcctttgaatgtggaactggtatcgtcccattgggaatggagaaccacccaggccagaggaccccacagtctggatgttgtctgatctccttaggcatcaagttccctgtttgatggggaagggaagaccctaacgaaatactttgaacatgtattcacatttatcagtggtcgagatcttggagtggtcaattctggtcctaatcctgggtctggtggctgggatggacagtttctccgtggcctgcatagcccagagtgctatgtgctagccactcctaatagttcatctga

SEQ ID NO: 4613 - DNA, 1413 bp, Cricetulus griseus
  modified_base (1102)..(1102): a, c, t, g, unknown or other
catggaggctgagcctcctcctctggaggagcggcggcggctgcaggaggagttgagtgagttcgtagagagctgctgccggactctggaggaggtgacggcgtccctgggatggagcctggatcagctggaccctggggaccaggcggaggccgaggatgaagtcacgatatgcccttatgattccaatcatcatatgcctaaatcatcactagcaaagcatatggaatcttgcagattgaggaagctgggttatgccaaagaggaagaggatgaaatgcacaatcctgcttttttctatgagaatttgaagattccttcagttactttgaataaggactcacagttccagataattaagcaagctagaactgcagctgggaaagatggggattgttatagtccaagaatgtattcttcagtgcctgttgaagttcctctgaatcacaaacgatctgtttgtgaccttacccaagcagatcgtcttgccctttatgattttgtcattgaggagacaaagaaaaatcgatctggttctcaagtcattgaaaacgacagcgatctgtttgtagacttggctgctaaagtcaatcaagataatagccgaaaaagtccaaaatcttacctggaaatcctggcagaagtgagagattacaaaagaaggcgccaatcctacagagccaagaatgttcatataaccaaaaagtcatacactgaggtaattcgggatgtgataaaggtgcacatggaagaactcagtaaccactggcaagaagaacaggaaagagcagaagatggtgctgaaaagaatgaagaacggcgatcagcttcggtagactcgaggcagtctggtggaagttacttggatgtggaaaattcaaggcatagaagggctcggagtaggagcccacacaaacgaaaaagaaataaggataaaaattccgagtcgagaaggaggaaagagagggatggagaaagacatcatagtcataaaagaagaaagcaaaaaaatataaaaagaaatagtgaactgcagtaattaatgcttatagaataaagtttgctgatgtttaattataatcttttggctgttatgatcgtntaatactcattttaataaatgctttcagaccatgaatcaaaattgtacccttacacattttataattttccttaatattttaatagattcttattactatttgtttcatttttcagtaatttatcacttttcctattttcacaaatcagtacttcaaatgggtaaattatacatgaaaacattctcattgtaagaagtcacaggtgaggctagattctacccctagcagtgactactgtctatccttctactggagttgtaataggggaacacaatctgattgtctttctgaatggggaatggcctggcta

SEQ ID NO: 4614 - DNA, 1413 bp, Cricetulus griseus
gactcgtttgcttcacctcgcccgcaaatcgagaccactggaaaatccctgatccaatctgcgtccttctacacccaggcagcgtcattggcctgccgggtctctgccggcagcctcaacaggaccgacccgatccccgggcctagcacgggaggggcccgagtcagggagaacaattgctacgttccagtcctggaggcttctgttagccagactgagagccgcgacgggtttccaaagccctgctggctaggaagtgcttctcccagtgctcacgaggaactgagcctggtctggtgtctggaggaacaagttgtagcaccgatcgtgcccagcacagacttgtccctaccccaccacccaacctactctcctgcttcattcctctcagagcccacggtccccaaacagtgcacctgccggaggtcccaacccagtgggagaagtggacatgaggttggcaggcccccttcgcatcgtggccctaatcatcactatgggtctctcctggatcctagtcaccatcctcctgggtggtcctggtggtggccttcctcgaattcaacaattcttcaccagcccagagaactcagtgactgcagaaccaaggaccaggaagtacaagtgcggcctgccccagccatgtcctgaggagcacctagccttccgaatggtcagcggggctgccaatgtcatcgggcccaagatctgcctcgaggacaagatgctcatgagcagcgtcaaggacaatgtgggccgtgggctgaacatcgctctggtgaatggggtcagtggtgagctcctggaagccagagcctttgacatgtgggctggagatgtcaatgatcttttgaagttcatccggccactgcatgaaggtaccctagtgtttgtggcatcctatgatgatccagctacaaagatgaatgaagagaccaggaagcttttttctgagctgggcagcaggaacgccaaggaactagccttccgtgacagctgggtgtttgtgggagccaagggtgtgcagaacaagagcccctttgagcagcatgtgaagaacagtaagcacaccaacaagtatgagggctggccagaggccctggagatggaaggctgtatccctcgaagaagcatggtgggctagcacagcagagctctgggaccagactgaaggaggcagcatggcaccagtgtagggtgaaggccttgtcccatgcccaagcatgaggctcccttgccccaatacatcagggcttgaaagtggcctcaaggttattagggctgcagggctggcccatttcactttgctatggagcttaggtagttgtgtccctgttttcctaaaattgattccacagtcagttccacccagccccttcctctgcccctcctgtgtcatcttctgtttctctt

SEQ ID NO: 4615 - DNA, 1413 bp, Cricetulus griseus
tcggaaacatacaggtgaaaaaccatacatatgtggtatttgtgggaaaagttttatttcctcaggagagctcaacaaacactttcgatcccatacaggagaacgaccatttatctgtgaattgtgtggaaattcttacacagacattaaaaatttgaagaagcataaaacaaaggtgcattctggtacagataaaactccagactgcagtgtagatgaccatgctttaagtgaacaagaccccacacaaagaagtcctttgtcagaaactctagacgtgaagccttctgacatgactctacccttagcgcttccacttggaactgaagagcatatgcttctgcctgtcacggagaaccagtctcccacgtcagacacactattgcggtcagctgtgaatggatattcagaaccacagttgattttttttacaacagttatattgactttgaggacatggaattgataagacatccctggtagtaaacataaacatccctggtaagatgcatattcatattaatccccattcatctgggctgtgcgaccattatttttcattcatggaagtcaaagcacctaacctgcttccatcagtgctcgttgtgattttggctatcattgtaaacagccagcctttcaaggagtgacttccactatggcagcactgttttgggagggtaagtttcagacactgttaaagctgccttaattccatttttattttgcattttagacttctttgttcctaaggtaaaatctgacctgtggattttttttttattgttgttctctcctaactgcgaaatctacagtaatattaacttcaaagtgtttctgtttgtaaaccctgtggagcagtatgtaaactgttgggggggttaaattcatatttattcctatgaaaatttagatactaaggatgaattgtgctatttattaatatattcctttagaggtaacttttctaatgaagccaaaagaagtatttctcttaaaactcagaaaaaaatttatgtaaatttttgttcatttagaatgaactcagtattctggagaaaaccaatagtcaaatcaatttctgttttcagttgagactatattttttaaatagatatttggtgtttttaagtggtcaaaagacagttttgaaatttgattcattttatattttattagatttgtagattattggaagtgaaatataacaagtttaaaaatttttgataagcctatcttttatcagttatgcacttactattctaacttttaattgtaagctacactttttgattatcaatttatttaccattttatatttgagttttctataagtgtaggttttaattttattaaattaaacttaacaacttttggttgttggctataggttcatagtagatctttccattc

SEQ ID NO: 4616 - DNA, 1412 bp, Cricetulus griseus
  modified_base (233)..(233): a, c, t, g, unknown or other
cagctacagatcaagtcttcctgcaaggagaacccttttcaaccggaagccgtctccctccgcatctccaaccgtaaggaaggccaccaaaggagccaagcccatgaggccacctgcccctggacatggctttccactcatcaaacgcaaggtccaggctgaccagtatatcccctgaggaggatatctatggtgagatggacactattgagcgccagctggatgcctggacnccgtggtgttttgctggaggagaagctgcgtggaggagcaaaggagggaagtgaggacaacatgctggtggactggttcaagcttatccacgagaaacacctattagtgcggcgagagtcagagctcatctatgttgtcaagcagcagaacctggagcagcgccaggctgatgtggagtttgaacttcggtgccttctcaacaagccagaaaaggactggacagaggaggatcgggccagagagaaggtgctgctgcaggaattcatgacccttatcgaccagcgcaatgccattgtcaactgcctggatgaagaccggcagagggaagaggaggaagacaagatgttggaagctatgatcaggaagaaagagttccaaagagaggctgagtctgagggtaagaagaaaggcaagtttaagactatgaagatgctgaagctgctgggcaacaagcgcgacaccaaaagcaaggtccccggggacaagagctgatggcaagggaagcgacttcctctcctcttgtggagcgctcacattcttcaaaccggtccagctcgggagctgggtcctcttgcagcccatgaggagcccttttccgttcctctatgtccttcccattggcaaagatgtttgaagtcttcgtttctccttctccagatctcctgtagggcccagaaatggtcttgttaaggtgcagagcacagatgtgggctccagtgcagaggaaatggacgttgaggggccgggaagataagcagttgacagccatgtgtctttctgggattaggaaaagctgcattaatttgaaaacagccataggaagataaagagggtcacctgcctgcgtttgttacccactactggaatggtgctgtctgtcccaggctgctatgaccccagaagacagaagggagcacctagcctaagctggtcacatactggtggcctgaggcttgaattgttcgcggctgtatgccccattggcttgacacatgctcgcaggccggaggtgggagtgggtagccaggatgggaggcaggtaggtggctgtagccggcttcttggaaggagaacccctgtggctggatgttgggtcgcactgcaggggcaggaggggctcctcctgggaatagaagggccaagtgacagcacctgtttgtctttcttttcaaagaaaa

SEQ ID NO: 4617 - DNA, 1412 bp, Cricetulus griseus
gcgcgtgtgcccggccacctggtcgtcatggaggaggccttggtagaagagctggacgatgaggagcagctggtgagaaggcatcgcaaggagaagaaggagctgcaagccaaaattcagggaatgaagaacgctgttcccaaaaatgacaaaaagaggaggaaacaactcactgaagatgtagctaagttggagcgagaaatggagcagaaacacagggaagaactggagcaattgaagctgactttgaaggagagtaagatagattctgttgctgttaacatttcagacttggtacttgagaatcaaccacctcggatttcaaaagcacaaaagagacgggaaaaaaaggactgcgttggaaaaagagcgggaagaaagaatagctgaggctgaaattgagaacttatctggagccagacatgtagagagtgaaaacttgctcagatattggcagccagagaattggaaattaagcaaattccgtctgatggtcctgctgagtacatgcagagccattctgaagacttcctgccatttttaaccaaccccaacacaggaaatatgtatactccagaagaatttggaaaatactgtgatgatattgtaaacacagcggcatggggaggtcagcttgagctaagagctctgtctcacattttacaaacaccaattgagatactacaagcagatgctcctcctattgtagttggtgaagagtatccaaagaatcctttaatactagtatacatgaggcatgcatatggcttaggagaacattataattctgtcacacggttggtgaactcagctactgaaaattgcagctagtttacaaaatgttacactgtgttttgtagagtgtgccaatctaggattaacaaaacaaaatattaaacctagtcattgcaaattacattttcaacaaagatagtctaaagtaatgcattaatgttttgacaagaatttaaatgtacttaattatgtatttctgttttttgtgtatatattttattttaaaatggccagtatatttatgaataaagtgaatggccaacttctaccatttttagttttaaatgaaaaaaaaaaccttttaaatatgcagatgttaatttagaaacaacataattcaaattaaatttgctgctgctgttgctggtggagctttttttagtcctgattggaaatgtgtatgtcaaaattctggaatttgtcttcagccaagaatttttatccacttacatatggtttatagcctgtaaaaaagtaaaaacaaaagaaatgtgtaactattatgagcaagatagctttgcctatattatctgatgtttgccaaaagaataaatgataaaggagttaaatcaaaaaaaaaaaaaaaaaaaaaaaaaaaaaaaaaaaaaaaaaaaaaa

SEQ ID NO: 4618 - DNA, 1411 bp, Cricetulus griseus
atgtctattctcaaggtacttgcccgagagatctttgactcccgtgggaaccccactgttgaagttgatctctacacctcaaaaggtctcttccgagcggctgtgcccagcggtgcctccactggcatctacgaggccctagaactccgagacaatgataagactcgctacatggggaagggtgtctcaaaggctgttgagcacatcaataaaactatcggacctgctctggttagcaagaaactggacgtggtggaccaagagaagatcgacaaattgatgattgaaatggacggcaccgagaataaatctaaatttggtgcaaatgccatcctgggagtatccctggcagtctgcaaagctggtgccgcagaaaagggggtacccctgtaccgccacatcgctgacttggctggcaaccctgaagttattctgcccgtccccgctttcaacgtgatcaatggtggttcccacgctggcaacaagctggccatgcaggagttcatgatccttcccgtgggcgcgtccaccttccgggaagccatgcgcattggggcagaggtttaccacaacctgaagaatgtcatcaaggagaaatacgggaaggatgccaccaatgtgggtgatgagggcggtttcgcgcccaacatcctggagaacaaagaagctctggagctgctgaagactgcaatcgggaaggctggctacacagagcaggttgtcatggacgtggctcgcctctgagttcttcaggtctggcaaatatgacctagacttcaagtctccggatgaccccagcaggcacatcacacctgaccagctggctgacctgtataagtccttcatccaggagtatccagtggtgtccatcgaggacccctttgaccaggacgactgggaggcctggaagaatttcacagctagtgcaggcatccaggtggttggggatgatctcacagtaaccaaccctaagaggattgccaaggctgtcagtgagaagtcctgcaactgcctcctgctcaaagtcaaccagattggctctgtgaccgagtctctgcaggcgtgtaagctggctcagtccaatggctggggtgtcatggtgtcccatcgctccggggagacagaggacactttcattgccgacctggtggtagggctctgcactgggcagatcaagactggtgccccttgccgatctgagcgtctggccaagtacaatcagatccttagaatcgaggaagagctgggcagcaaggccaagtttgctggcagaagcttcaggaaccccctggccaagtaaagtgtgtggagatcctgaaaacacctgccgcttagcccctgtccctggtgtcatcaacgaggctcaaggcagcctagtgcttgtccctcccatgccaccttttccttaggc

SEQ ID NO: 4619 - DNA, 1411 bp, Cricetulus griseus
cttctgggacttgatcaagctgctgtgcagtgtgcagtaacggctcggtgctgtttgtggcctggttcatgggttttggatacggcttcgtgttcaccttttctctactggcatctggaagatctgaatggaaccacaactctctttggggtctgctctgtcctgagtcacgtgtctgagttgacggcttacttcttcagccacaagcttatgagctgattggccaatgcatatgcttctaaataacaacacacacacacacacacacacacacacacacttactacacacacacactcttggttggttaggtctgagctaactcctttgccagggtctaagggtaggaagcagaactcacaccaagtcaggccaatgaacgggtctcaaggtgaaccatgatatcatctccttcttctgattatttattctaaatattgggttctcagtgcaaagcgaggtggaaaagagtatctatagatttatttgtcttgaagaaagcattttaaaaattataagacatatttaaaaggggaccagatggaagttagtagaacatatgcttctttgttgtttaaaagttcaaagtttcactgaactttgcacatctctagcaaatatatttttatatgcatatggtatatagttaaattagttcttggagcagcaaaactgttactgactactgaacactgagttgagctttaaaataccgttgtctcaacgggctgtgagaatgagcagaaatgagggcatatttcaaagaatctgaccaagtcattatcctaagacttgatgtgacagctctgcctgcccctgcatctgggaggagacatctacacctggatgtctagcttcaccacaaaacacagcttaaaagtgatggaaacagttaagcagaggttattttgcacttgagtggtactgtactgtcaatcactatgactcattttaagtgacctttcaactcagatgtatttattatgctcgagtagttacagaagtgaagtgggagccaggctgagccccacctatgaatgtaagcatgtggatttgtaactgactgtagggagccagaaccttgtgtcttgtgtttacagtcctgatcgattcctttgaaaagccctgctgttttggacatgcacagtggacgtgttggaataaaaagtaaataccacttttaaatatttcctaaatgaaaaacatgtgaccaaacaagtgaaaatccactgctctgtgatgaatgacaccaaattcaacatgcctttgttacaaaatgtttactgtgagcgttgatccaaacaatgcagtcatttccagccttttgagctgacaccttcatgagtttgtagactttgtgacttttccttcctgtccttaaagtgccatataccacttacaatattaaagt

SEQ ID NO: 4620 - DNA, 1411 bp, Cricetulus griseus
cagtcgggtaagtgcgcgtgttgggctgtaaccccgggtccccatgaccctgcaaggcactaacacgtacctggtgggaccggcagcaggagaatcctcattgacactggagagccatcagttccagaatatatcagctgcttaaagcaagccttggctgaatttgacacagcaatccaagaaatcctagtgactcattggcactgcgatcatgctggaggcatagtagatatttgtgaaaacatcagtaatggattaaacactacctattgcattaaaaaactcccacggattcctcaccaagaagaaattataggaaatggagaacagcaatatgtttatataaaaaatggagaattgattaagaccgagggagccactctcagagttatacatactcctggccacaccgatgaccatatggctttactcctggaagaggaaaacgccatattttctggggattgtatcctaggagaaggaacaacggtatttgaagacctctatgattatatgaactcactaaaagacttattaaaaatcaaagctaatattatatatccaggacatggcccagtaatccataatgctgaagctaaaatcctggaatatatttctcacagaaatagccgagaagaacagattctttcattaatccgtgataactttgaaaaatcatttacggtgactgaacttgtgaaaatgatttacaagaatgttccagagaatttacatacaatggcagagcgtaatctcctgcttcatttgaaaaaactagaaaaagaaggaaaaatattttacatcacaaatcctgacaagaagtggaaagctgtactttagtttcagatgagtgaagctctatcttgttttgcttttagaggatggtatgttcttttagctatagattatttatagagactatcaaatgtgggattttgaaaataaacttgatatctttaaaatatgtaaattacattgtacatctgtaggttattgatctaaccttggccttggaacattttaccaaaagttcagaacctagtactttgtcattttcctatggaataagtaaaatggttacttaagaataataaaatttgcacaattcaaaccagttactacattagagtttgcttataaaggaaaacatttaattgggtctggcttacagtttcaaaggtttagtccattatcatcatggtgggtggcattgtggcatgcaggtagacatggtgctggagaggtagctgagagttctacatcttgatccccaggcagccattttccagtaatactgttttctttagctacttcaatcaacagcacagatgtctgcatactccttccttttcttcaatcctttgtataccttttacataccaaatttatttcatgtttctatcaattttat

SEQ ID NO: 4621 - DNA, 1410 bp, Cricetulus griseus
aatgcagtgtggcctcagcagctggcagccggtgcaacgaggccttgcccggcccctgacctcctagcttgctctacagaatgaagacgtcggaggagcgactcttagtcccggacagtctctcttctgaccaggccccagctccagtgccccaagggacccctgtggatgaaaatacagactctgaaccggtgccaccgccatgcggtggagatgaccgaccccaggtagccacagattctgtggctggctcggttgtgttccaggatccgcaacaagggcctgatggttcctgtatcttgaccaatagtgctgataacaaactcggcggatttacaacctgcccccagagctgtacagtgaggcagagcaggtggactatgcagaaatggttcctgttcttcgaatggtggagggtgacaccatctatgattactgctggtattctctgatgtcctccagccagccagacacctcctatgtggccagcagcagccgggagaacccagttcacatctgggatgcattcactggagagctccgggcttccttccgcgcttacaaccacctggacgaattgacagcggctcactctctctgcttctccccggatggttcccaactcttctgtggcttcaaccggactgtgcgtgtcttttccacatccaggcctggtagagactgcgaggtgcgagccacatttgcaaagaagcagggccagagcggcatcatctcctgtatagcctttagtccatcccagcccctttacgcctgtggctcctatggccgtacactaggcctgtatgcctgggatgatggttctcctctcgccttgctgggaggccatcaagggggtatcacccacctttgctttcaccccgatggcaacctcttcttctcaggagcccgaaaggatgccgaacttctgtgctgggatctccggcagcctggccacctcctgtggtctttgagtcgggaagtgaccaccaatcagcgcatctactttgatctggacccgagtgggcagttcttagtgagtggcaacaccaatggaatggtctctgtgtgggacatcaatggagctgtcagtgacagcaagctgggacctgtgatgacttttctgccccagaaggactgcaccaatggagtgagccttcaccctagcttgcctctactggctactgcttccggccagcgcatgtttccagagcccaccaacagtggagatgaaggcgagccggagggggatcttcccctgctctccctatgccacgcccatcctgaatggcggcttcagctctggtggtgtggagggggaccaagaccccagccagccctaatgaccaccaagatgagaagggacaaggaaggacagagggctgtggggatgagttaatataaagattttgt

SEQ ID NO: 4622 - DNA, 1410 bp, Cricetulus griseus
cggtggagtacttgaaacgggagcactcgctgtcgaagccctaccagggtgtgggaacgagcagttcttcgctgtggaacctgatgggcaacgccatggtgatgacccaatatatccgcctcactccagatatgcaaagtaaacagggtgccttgtggaatcgggtgccatgtttcctgaaagactgggaactacaggtgcacttcaagatccatggacaagggaagaagaatctgcatggagatggcttggcaatctggtacacaaaggatcgaatgcagccagggcctgtgtttggaaacatggacaaatttgtggggctgggagtgttgtagacacctatcccaatgaggagaagcagcaagagcgggtattccctacatctcagccatggtgaacaatggctctctcagctatgatcatgagcgggatggacggccccacagagctgggggcgtgcacagccattgtccgaaatctccgttatgacaccttcctcgtgatttcgctatgtcaagaggcatctgacgataatgatggatattgatggcaaacatgagtggagggactgcattgagatgcctggggtccgtctcccccggggctattacttcggcacttcctccatcactggggatctctctgataatcatgatgtcatttccctgaagttgtttgagctgactggggtgaggaccccagaagaagaaaagctacatcgagatgtattcctgccctcagtggacaatctgaagctgcctgagatgacagtaccaccagcacccttgagtggcctggccctctttcttattgtctttttctccctggtgttttctgttgtttgccattgtcattggtatcatactctataacaaatggcaagaccagagccgaaaacgcttctactgagcctgctgccatcagtctctctatgatgtttacccatgaggtgttggactggatgctgcagaccttctacttcatttttaaattcccaaatagaaaaccagaactcatacaacctggaaaaccacttactagcttttgcttttgcccatgcctctttctacttgaggagctccttggcaatctggatggagacttctgccacacctgcctctctgtctccctttactcattgtcctcttcgtgtgcattctgagctaggaaagaagtttgctgctcccatcaggtggccctaggggctttctgcattagttcattgcttcggcctctgttctttgctgggcaaaccttgttcctgtctgtccccgtgtcctcagctttcctaatcagagcctttcagatccttggattctttggctaaagttgttaaccactcaaaaaaaaaaaaaaaaaaaaaaaaaaaaaaaaaaaaaaaaaaaaaaaaaaaaaaaaaaaaaaaaaaaa

SEQ ID NO: 4623 - DNA, 1410 bp, Cricetulus griseus
atggaggccctggccgaaccgcggtggcctccggggctggcgatgatgaagacaatagatgatttgcttcgctgtgggatttgcttttgagtatttcaacattgcagtgataatcccccagtgctctcacaactattgttctctctgtataagaaatttttgtcctataaactcagtgcccaacttgttgtgtggcagtaacagaaccagacctgagaaataaccgtcttttagatgaactggtaaaaagcatgaattttgcacggactcgcctgttgcagtttgccttagagtcaccacccatatctcctgtgtcttccacctcaaagaatgttgctgttaaagtacataatgctgaagccattaaacatcctgttaaacaggggaacaggttaatggacaagttcctggttagagaaactggtggttgtgtatcagagttgttgggaaaagaaaatgacaggaaattcagccctcaaaaggagataaatacctctgctgagattaaagagacaagtctcataggaaagactgtacttggtctttcagatgctaatggtcctgtgacaccctctacatccaccatgaaactggactctaaagtgtcttgtcctgtttgtggggtcaacattccagaaaatcacatcaacaagcatttagacagttgcttgtcacgtgaagagaagaaggagagccttagaagttctgctcacaaaaggaagccgctgcccaaaactgtatataacttgctctctgatcgtgatttaaagaaaaagatgaaacagcatggcttatctactcacggaaacaaacagcagcttatcaaaaggcaccaagaatttgtacacatgtacaatgcccagtgtgacgctttgcatcctaaatcagctgctgaaatcgtccaagaaattgaaaacatggagaagaccacggatgcgccttgaagcgagtaaactcaatgaaaatgtcatggtttttacaaaggaccaaacagagaaggaaatagatgaaattcacagtaaatatcgtaaaaagcatcaaaatgaattccagctcctggtggatcaggccaaaaaaggatacaagaaaactggcataatgtctaaagctatagtaataggaaaagatggacctgtggagaagctgtcgtcacaagaatataatgtgaacttctcggatacagtctcagtaacaaaccactttcctcagtccaaactggactccccagggcagtcggagcctgagagaccggatgattcttctagttgtactgatattcttctctcctcagaatcagattcatgcaatagaaacgatcagaacagagaaataaacccacaacagaatcaccgcactagagccatcgaaagtgctgagattgaaccaagaaacaagcggaataggaactag

SEQ ID NO: 4624 - DNA, 1410 bp, Cricetulus griseus
  modified_base (1407)..(1407): a, c, t, g, unknown or other
cccatgaaggccccggaggaggaatgggcagtggacatcgttcccatgaaggcccgggaggaggaatgggttctggtggtggacatcgcccccatgaaggccctggacatgggggacctcatggccaccggccgcatgatgtccctagtcatcgaggccatgaccaccgaggtccaccacctcatgaacaccgtggtcatgatggccatgggggaggcggccaccgagggcatgatggaggccacagtcatggaggagatatgtccaaccgccctgtctgtcgacatttcatgatgaagggcagctgtcgctacgagaacaactgtgccttctatcacccgggggtcaatgggcccccgctgccgtaggccggccccaccccgcccgcacccctgtcggactgcagccttgctcctttcactcttatggcttctgtgaggcctactttcccccttttccccagctgatgaggagccggccccctccgttcccacctggttgggttcctgggggtttctgatcactggtgcgcattgatgtacatactcccctccagtctggagaggagagagactggacacactctatatgctggactgctgagacggctggcttcacttttgtgaggagattcgccctgtgccccaaaccccttccagtattagccccgatgcctgagaacctaaagctggtcaccctggagacctctgctctccaattgcacatggaactgagtttggtcacctgcacttaggaaaccaagccaagccaagctcattatccccttggggtgaggggtgatgaggggtaccatatatcccactgcactgcactgcactgagggctcaagctggctggaattgagttctggaaccaccctctcttgtgcccctcatgggccagtcactgttgagtcctttctcaaggaagactgcaactgttagtacccaagtctttgtgggtctgccaggttcagtgagggcacattcatatccatacctagttaaaagtagctggcggaggggaggcctgcagcgttaggccactcttgcctacagccatgttagagactccgtgagaccagctttcatcaacttagcccgggcgcaccgggcctaacgcactacatgcactgcctttgggagtgggcttgctccttaccccatatggaccctgtctgcgaggcttctcgggtagattcagcaggagtggccccgccccagtcctctccttcccctgtcttggcatcagttgttttctatgaaaacagtgggttggttttgtgcagggtcttgggttagaaccacaatggatttgaggtagttttttcttttgattttgtattattttgtacattaataataaacagtggaaagagaagcagactaatttaaaaaaaaaaaaaanaaa

SEQ ID NO: 4625 - DNA, 1409 bp, Cricetulus griseus
gtgacagtgaaggtgatgaagaggagaccacacaagatgaagtatcttcccacacatcagaggaagatggtggggtagtcaaagtggaaaaagaattagaaaatccagaacagcctgttggtagtgggaatgaagtagtagagcatgaggtcacagaaagcctaaattctgaccccttgcttgaactctgccagtgtcccctctgccagcttgactgtgggagtcgggagcagctgattgcacatgtgtaccagcatactgcagcagtggtgagtgccaagagttacatgtgccccgtctgtggacgggcccttagctccccagggtccttgggtcgccacctccttatccattcggaagaccagaggtctaactgtgctgtgtgtggagcccgttttactagccatgccacttttaacagtgagaaacttcctgaagtacttaatatggaatccctaccccaagtccacagtgagggcccctccagtgctgaaggaaaggacattacctgtagtcctccagtataccctgctggaattctgcttgtatgcaacaactgtgctgcctaccgaaagctgctggaaacacagacccccaatgtacgcaagtgggccctacgtcgacagaatgaacctttggaagtacggctacagcgactggaacgagaacgcacagccaagaagagtcggcgagacaatgagaccccagaggagcgggaggtaagacgcatgagggaccgtgaagccaagcgcctgcaacgcatgcaggagacagatgagcagcgagctcgccggctacagagagaccgtgaggccatgaggctaaaacgagccaatgaaaccccagagaagcggcaggcccgactcatccgagagcgagaggctaagaggctcaagaggagactggaaaaaatggacatgatgttgcgagctcagtttggtcaggacccttctgccatggcagccttagcagcagaaatgaacttcttccagttgcctgtgagtggggtagagttggacagccagcttctggggaaaatggcctttgaagaacagaacaacagctctctgcactgaaccacaccctcctgcctgacctcccacccactccagcccacagggatcagtgctgctgtcacccaggaggctacagtccttgctgccacaggcaggcccgggttggttgcagggaaacctgtgcactctctgcctgtgggaccatgatggggtcaggatggacccagctcaaggcagctctagacaagggagcaggcactccagaaacctggactcctcagcccattgtggcaggccagggttatgggactgtaggaccccagtacagtccacgaagctgtgagagcaaataaattaattttatctttaaaaaaaaaataaaaaaaaaaaaaa

SEQ ID NO: 4626 - DNA, 1408 bp, Cricetulus griseus
aaaagaagcaacagtgagagcaaagagaaccgggaagcaaaattagatggtcctgttgagaatgtcagcgaggatgaggctcagtcaagcagtcagcggaagagagctaataagcacaaatgggtaccactccacttggatgacgtgagaccagacagccaggaaagacctgggtcccggaacagctctagatgtcaacctgaagcaaataaaccagctcacagtaataggaaaagtgatacaagaagttggagacgggatagagaaaagagagatgatcaagatgaagtatccagtgtgagaagtgagggtggtaccatccgaggttctgcaagaggccggggaagaggccggggccggggaagaggccgaggtcgaggaaaccctagattgaactttgattattcatatggttatcgagagccaggggaaagaactgatcaaccatttcccacagagcttaacaccagcatgatgtattactatgatgatggcacaggtgtgcaggtatatcctgtggaagaaacactgcttaaagagtacattaagcgccaaattgagtattacttcagcacagagaacttggagcgggacttctttcttcgaagaaagatggatgagcagggattcctgcccatttcactgattgctggttttcaccgtgtacaagctctcaccacaaaccttaatctcatcttagaggcactgaaggatagcacagaagttgaaattgtggatgagaaaatgaggaaaaggatagaaccagaaaaatggccaatcccaggccctcctccacgaaatgtgccacaaacagacttctctcagttgattgattgtccagagttcataccaggccaggcctttggctcccatacagtcagggtgatgatctactgatgctcttggatgtcatatgatcggaatgtacagtggagtaggtgactccctgaaataccatgtaaatatgagagcaaatcgtgctgcagaagtgagagtgaccatactgtcttctgtgcaagaatgtctacgcccacccccttgtggagaaggttgggccagcctgcagtggagataaccacctttacgataatgatgtgagacagaccagaggactgctgttgttactgtaggagcttctcctttctatgtcattagcttaggctgcacgggctacttcattcgtggtgggaaagttaattgttatcattggggaaatactgcaaattctatcttttgtttccaggcatttatactttgcccagatcaataaagcagaaaaagagaggattgagtagcatttccaaaattgttaggtcctttgcttatttgacttgcttctttaatatagtatactttgcataactcacatgttgtcatatttcacatgtactataagatgtattaatgt

SEQ ID NO: 4627 - DNA, 1408 bp, Cricetulus griseus
agctcctctccaacctgcgccgccccagctgggccgctccgccccaccgccggaacccgccctcgcggccacctggccctcgcatccacgacacgcgcgcctgcaacttgttcaaggcagagtcccggaacgcagggcagctgacttcccgcgggacacttgcgtttgaggaaggggtttgccctgccccaggaaccccagaccgctgccgccaagactaattagacattgctatgggagccacggcaacgcgccacgcatccccgaagcctatgtaaaacactccggttttcactcttctttcagaggaagctctccggttgctttttcccctctcgggtccctttttgcctgtgtggtttgggagaggcacagttggaggcgctgattcctacagaagtcccagagcgagcggcaagatgctgcggaggctggttcggcagtggagcgtcctggtgttcctgctcagctactccatgccctcctgcgggcgctccgtggaggggctcagccgcaggctcaaacgcgcagtgtcggaacatcagctgctgcacgacaagggcaagtccatccaagacctgcgccgccggttcttcctccaccacctgatagctgagatccacacagctgaaatcagagctacctcggaggtgtcccccaactccaagcctgctcccaacaccaaaaaccaccctgtgcggtttgggtcagacgatgagggcagatacctaactcaggaaaccaacaaggtggagacctacaaagatcagcccctcaaaacgcctgggaagaagaagaaaagcaaacccgggaagcagcgtaaggagcaggagaagaagaagcgaaggactaggtctgcctggccaggcacagctgggcgtggcctgctggaggaccccggcctcatacctccagaacctcgctggagcccagctcaaggacgcattgaaactttcatcgcagatcttccaaggacacattacaggattttgtaatagtaaacatatggaaagtattagacatatttattgcctgtacagactgtaaatgcattgggatccaaactgtctctccccaagaaactgcacattggtcatgtgaatatttttcttttttttgtccaaggctaatccaattattattatcactgttaccataatttattttgtcaaatgatgtatttatttgtaaatgtatcttggtgctgctgactctatttttttgtaaaataatgcactttaggtatacatatcaagtatgttgatgaatttgagatgaaaaagtgtctctatttgtggttgattttaatgaatgctgaaatataattatctagactgatttccttctgtgcatgtaaaaatggcaatattttaaatttgtaaagaatgtctaataaaatataatctaa

SEQ ID NO: 4628 - DNA, 1408 bp, Cricetulus griseus
ggtggagatcaacggcattttagctgaagctatggaatgtttttgtcagtatgtatatactggcaaggtgaagatcacaacagagaatgtccagtacctctttgagacatccagcctctttcagattagtgttctccgtgatgcgtgtgccaagttcttagaggagcagcttgacccttgcaattgtctaggaatccagcgctttgccgacactcactcgctcaaaacactcttcacaaaatgcaagacctttgcgttacagacttttgaggatgtgtcccagcatgaagaatttcttgagcttgacaaagatgaacttattgactatatctgcagcgatgaacttgttatagggaaagaggagatggtgtttgaggccgtcatgcgctgggtttaccgagctgttgatctgcgtaggcctctgttgcatgagctcctgacgcacgtcaggcttcctctctttttatttaattttttatgtgcattagtgtgaaggtgtcagatcccctggaactggagttacagacagttatgagctgccatgtgggtgctgggaattgaacccaggtcctctggaagagcagccagtgctcttaactactgagccatctctccagccccaaaaaataccaaattttgtgacttcatagactgttgtctgttattaaatactttttgtgagctttatgtaagagatataaaagtaaggagatttaaattacacattagtccctaaggaaaaattaaaataaccagtgaagaagaaaaaatgtgatccactttggttctcagggtatttaatgaataatttgagtccactaaagaagttcttcccttgaaactaacagaggagttgagatcccttttacagagccaggaagtgatggtgcacacctgtctccaagatctgtatcccaggaggtggtgtacacctgtctccaggctctggaaggtgcatccaaagaaaccaaattgggactgaagagctggctcagtgtttactgctcttgcagagaaccctggtttgactcccagcacccatatcagatggttcacaaaggcctataattctagttccagagaatccaacacctctggcctccctgagcacctacagcatatggtgtacataaattcacacagttttgtaaatgcttaggattctacaaatgataattgttattctcatgtatatttgtaagatcatgtccattcagaaatacatcatataaaagactttctcaaagtaaatttgtattttagtatttttgtctattgtaaaagtattatctacttgtattttgtaatgtttatctttcatatatccttgtgtttattgtagtaaattggaaaatatcctgaaaatctgaatttgtttaaacaaattaatttttcttttacgtaatta

SEQ ID NO: 4629 - DNA, 1408 bp, Cricetulus griseus
gagaagccagtggggaaccctacactgcagagctctcgtcccggcccggcccggcccggccccacgctatggagtttctttgggcccctctcttgggtctgtgctgcagtctggccgctgctgaccgtcacatcgtcttctggaacagttcaaatcccaagttccgggaggaggactacactgtacacgtgaggctgaatgattacctagacatcatctgcccacattacgaggatgactctgtggcagatgctgccatggagcggtatacactgtacatggtggagcaccaggagtatgtggcatgccagccccagtcaaaggaccaggtccgctggaagtgcaaccagcctggtgccaagcacggcccagagaagctgtctgagaaattccagcgcttcacacctttcaccttgggcaaggagttcaaggaaggacacagctactactacatctccaaacctatccaccatcaagaaaaccagtgcttgaagttgaaggtgactgtcaatggcaaaatcacccatagtcctcaggcccatgccaattctcaggagaagagacttccagcagatgacccagaggttcaagttctgcacagcattggtcagagcgctgctccccgactcttcccattggtctgggctgtgctgctcctgccactgctgctactgcaaactcagtgaagtcggatgcttcacctggcttacggattggaactgggctaagggccagccctgggaaccactcccactacatgcacaagctgccaccctgaagcctcagagggttcagtattaagggtttcgacccaaaggagttcaaccagcctgactgtgccattcctgcctccacttcagagggatggagaaagaagtggggacagtcctttccctgcgatttctacctttaagccaaagaaacaagctgtgcagtcctggcccgttttaagggcccagtgggagatgagctggaagggcctgaggtcatgcagttggacactaaagacacccttccccgaggaagccatgatgtccagatgaactgactgaaggaaaagcttgagacagcttcctgcgtgggagccaggtacaggagaggcagcatgcttgggctgacccagcatctctgcaaggtttccacctgctgagctgccagagaggtttgtagccaggcactgactgtatcctccccatccttcaggcagcattccctggagctgtgccaatacgaggactatactggttttagagtatagctgtaagggcagtgcccgtgtgtacagtctgtgtagaatgtatcttaaagggcagggcccacatgtacagtgtctgtatataaacatctgtgtctgctcatttctacaactggtagtttttttatacagtgttcttggattcataataaa

SEQ ID NO: 4630 - DNA, 1408 bp, Cricetulus griseus
gagcatctttggatatttcctcctgggaaccatggtgaacaaaactttggatggggcccatcgtgacgaagctggtgcagcaggagaagctggagggggattttaggtttaagcacatgcagattcgagtgaacgctgagcccgccgctttctacagagctgggctcgtagagcacatgaggacggaccgcaggctgcagagactccttcaaacccagagagagctgatgtccagagagctctggctctacattggcatcaacacctttgactatctgggcggcattctgagttatgttgtcatcgcaatccccattttcagtgggatccatggagacctgagccccacagagcttagcaccctggtcagcaagaatgcctttgtgtgtatctacctcatcaactgcttcacccagctcattgacctgtctaccacattctcagatgtcgctggttacacgcacaggattggagagcttcaggaggccctgctggacatgtcccgaaaatcacaagactgtgagagcctaggcgagagtgagtgggatttgagcaaggcctcagggtggccaatcgcagagccatcagacacagcttttctgctggatcgggtttccatcgttgccccctcctctgataagccactgatcaaggacctgagcctgaaggtctgtgaagggcagagtctgctcatcacaggcaacacaggcactggcaagacctccctgctgcgggtgctgggaggcctgtgggagagcatgaaaggctcagtgcagatgctggctgattttgggccccacggggtgctgttcctgccacagaagccattcttcactgatgggacacttcgggagcaggtgatatatcccctgaaggagatctaccctgattcaggttctgctgatgatgagaggatcatgaggttcttggaattggcaggacctgtccagcttggtggcaaggacaggcggtctggaccagcaggtggattggaactggtatgatgtcctgtccccaggggagatgcaaagactgtccttcgctcgcctcttctacctgcagccaaagtatgcagtgcttgatgaagccaccagtgccctgacagaggaagtggagagtgaactctaccgcattggccagcaactggggatgacatttatcagcgtgggacatcggcccagccttgagaagtttcactcctgggttctgaaactctgtggaggaggaaggtgggaactgactagaatcaaaatggaatgaagccaagcggcgcacgcttttaatcccaactctcaggaggcagaggcaggcagatctctgtgaggttcgagactagcctggtctatagagtgagttgcaggacaggtccaaagctacagagaaaccctgtctcgaaaaaaaaaaaaaa

SEQ ID NO: 4631 - DNA, 1408 bp, Cricetulus griseus
gaccccgtggttatcgtctctgcggcgcggaccgccataggctccttcaatggtgccctgtctactgtgcctgtccacgacctcgggacaactgtcatcaaagaagtcctgcagagggccaaggtggccccagaagaggtgtccgaggtcatatttggacacgttttgacggcaggttgtgggcagaatcctactcgacaggccagtgtgggtgcagggatcccctactcagttccagcatggagctgccagatgatctgtggctcaggcctcaaggccgtgtgtcttgcagcccagtccatagccataggtgactccagcattgtggtggcaggaggcatggagaacatgagcaaggcccctcacttggctcacctgagagcaggagtcagcatactgtgtgatggtacttacagatgcgtttcacaactatcatatgggcatcacagctgagaatgtggccaaaaaataggcaagtgagtagagaagcccaggacaaggttgccgttgtgtcccagaacagggcagagcatgcccagaaagctggccactttgacaaggagattgtgccagtgttggtgtcttctaggaaaggtcctactgaagtgaaaattgatgagtttcctcgccatgggagtaacatggaagctgtgggcaagctaaaaccttactttctttctgatgggacaggaacagtcaccactgccaatgcaacagggatgaacgatggtgccgctgctgtggttcttatgaagacgacagaagccaagaggcggatgctgaaacctttagcaagaatagtttcctggtcacaagctggtgtggagccttccattatgggagtaggaccaattccagccataaaacaagctgttgcaaattgccttgggccatcccctgggagcatctggctgtaggattctagtgaccctgttacacagccttgagagaacgggcgggactcgtggtgtggcagccctgtgcattgggggtgggatggggatagcaatgtgtgttcagagaggatgagctgcttgacagccattgcccttaaaggattcttgttaaatgagtgaaacactaactaatgtgtgaaatcagaggaccaaaatgagtgcaggaacccaggtggacagctcactgtactttaatgtgagatacccaaggctacattgcacctgacactgctataaataaaagggaaatccaatcagtcatcaagggctccagagtgaacagcattttcataacttccatgtttatcgtctttagtttccgggtgtaattttatcagatcatcgattcgaagaatagtgattgcagcttctgttgcaaacttcaggctcttcactttaactatggttggttcaaacacccctgcttgcttgttgtcttcgttggttttcca

SEQ ID NO: 4632 - DNA, 1407 bp, Cricetulus griseus
tgaaaaagtatgccttggtggactttggtttggcccaagggactcatgacacaaaaatagaacttctcaagtttgtccaatctgaggctcagcaggaagattgctcacaaagcaagtaccacggagtcactggacaaaagggctcactgagtcgcccagcacctaaaaatctggatcagcagtgtgctgcaaaaacttctgtcaaaagatcctatgccagcgcacaaattcacattaagcaagggaaagacgcaaaggagggatctgtaggtcctttctgtccagcgctctgtgtttggagaaagaaatttacaatatacacagctccatttcacatgagagccctgcagagaaactcataaagcaatcaaagactgtggacataatctacaagaaagccagcaaacaaaaaagacagccatgtctacaaaagctgtggctagtgcgatgaggaaaaccaccagtccttgcccggctgtcctgacctgcgactgttatggaacagataaagtctgcagcatttgcctgtcgaggcggcagcaggttgcccctcgggcaggcacaccaggattcagagcaccagaggtcctgacaaagtgtcctaaccaaaccacagccattgacatgtggtctgcaggtgtcatactcctctccctgctcagtgggcggtacccattttacaaggccagcgatgatttaactgctctggctcaaatcatgacaattcgaggatccagggaaactatccaggctgctaaagcttttggcaaatcagttttgtgtagcaaagaagtcccagcacaagacctgaggaaactgtgtgagagactaaggggtctagaccccaccactcccaagttagcagttgatccaccagggagaacactgaccataaagcttcttccctcggacagacgcctccagcacagcactcagagggttccttgtgtaaaggggacagtgatgactgtgggagtcgtcccagggagtgcactaccaacttggaaggctgggactcggtacctgatgaagcctatgacctgcttgacaaacttctggatctaaacccagcttcaaggataacagcagaggcagccttattgcatccattctttaaagatatgagctcctgaggtggttttccatttaccatcactgctgtgtgttgtgaggtggggtagataatcacaggttcttgtttgcatccaagtccagggaaggatgactaacttatttttaaagttacaatattttgctctgatgtcagattgtaagcagatggggaattattcaagatccagggggaggcctctatgtgatcttagagttaaaccaccaagtatagtcagatctttagttccctggttttctctgcttctggagcagccttaagcctgatgcatgggt

SEQ ID NO: 4633 - DNA, 1407 bp, Cricetulus griseus
gaggaaagatggcggcgccctcggctcctgcagagctccaggcttccggggctccccagctccccgtgtgtctcttggtgttggggatggcgggatccgggaaaactacctttgtacagaggctcacaggacacctccacaacaaacgcttcccaccctacgtcatcaacctggaccctgctgtgcatgaagtccccttccccgccaatattgatatccgtgacacagtgaagtataaagaagtcatgaaacaatatggactcgggccaaatggtggcatagtgacctcactcaatctctttgctaccagatttgatcaggtgatgaagtttatcgagaaggcccagaacacattcaaatatgtcctgattgacacacccggacagattgaagtgttcacctggtcagcttctgggacaatcatcactgaggccctggcatcctcatttccaacagtggtcatctatgtaatggacacatcacgaagtactaacccagtaaccttcatgtccaatatgctatatgcttgcagcatcttgtacaaaaccaagctgcctttcattgttgtcatgaacaaaaccgacatcattgaccacagctttgcggtggagtggatgcaagattttgaggctttccaagatgccttgaaccaagagactacctatgtcagtaacctgactcgttccatgagcctggtgctagatgagttctacagctcactcagggtggtgggtgtctctgctgtggtgggcaccggcttcgatgaactctgtgttcaagtcaccagtgctgcagaagagtatgaaagggaatatcggccggaatacgagcgcctgaagaaatcactggccagtgcccagagtgatcagcagaaggagcaactggagcgccttcggaaggatatgggctctgtagccctggacccagggaccagcaaagacagtctgtctcctgtgctgaacccttctgacttgatcctgactcggggaaccttggatgaagaggatgaggaagctgagagtgacactgatgacattgaccacagagttacagaggaaagccgagaagagccagcatttcagaacttcatgcaagaatcaatggcacaacactggaagagaaacaagtagaccgtcccacttgttgctagaagtctgacatgctgggtctccacgcagagaagtccttccgggagtcagggctgcagtcgagcagtttcctctaggataataacttctttggggaaaccaggacttagatgaagttagggttgaaggtggagctggcaggtggatgcccacccttggttagcttctcttggtatttagcaaggagtgtattctcaccactctggaagctgatgactattgagcctgaaatttcaagctgcatcatttgaactcaagt

SEQ ID NO: 4634 - DNA, 1407 bp, Cricetulus griseus
atgctgctgcacagtttgccctgcttcgtagagagtgacttaaagaagactctgagccggtttatagaagaagaatcccttagagaccatgacagagatgctgaggcatccttggatgctgttaaatcgggtgaagtcgacctacaccagctggcgagtacatgggccaaagcttatgctgagaccaccttagagcacgcgaggcctgaggagcctaactgggatgaagattttgcagatgtgtaccatgacctgatccattccccagcctctgaaactctcctaaatctggaacataattacttcgtcagcatctcagaactgattggggaaagagatgtggagctgaaaaaattacgagagagacaaggtattgaaatggaaaaggtgatgcaggaattggggaaatcactcacagatcaagatgtaaactcactggctgcccagcaaaaaccccaacaacagctccctcagtgaagaaattaaagttcagccaaaaccagttcagagaatctgcagatgccgttggaaggatctatgaggagcaaaggaagttggaggagagtttcaccattcacttgggagcccagttaaagaccatgcacaatttgaggttgctgagagcagacatgctagacttctgcaagcataaaagaactcctgggagtggtgtgaaactccaccggctccagacagcgctgtcactgtactccacgtctctctgcggcctaagttttactagtagataatcgaattaactcttatagcggcatcaaaagagattttgccacggtttgccaagaatgcacagacttccactttccacggattgaagagcaactggaggtagtccagcaggtggcgctgtacgccagaacccagcgcaggagcaagtgcaaagaggcacgtgattctggaaaccaaaatggcggaagtgatgagaagtctaagaattctgagagaaactatttaaatattttacctggagaattttatattacacgccattctaatctctcggaaatccatgttgctttccatctctgtgtggatgacaatgtgaaatcgggaaatatcactgctcgggaccctgctattatgggactccgaaatatactcaaggtctgctgtacccacgatgtcacaacaataagcatccctctcttgctggtgcatgatatgtcagaggaaatgaccataccctggtgcttaaggagagcagaactggtatttaagtgtgtcaaaggtttcatgatggagatggcttcatgggatggaggaatttctagaacagtgcaatttctggtaccacagagtatttctgaagaaatgttttaccagctgagtaacatgctcccccagatcttccgggtctcctcaacactcactctgacgtccaagcactaa

SEQ ID NO: 4635 - DNA, 1406 bp, Cricetulus griseus
acagactctgtggcagcagatgacgaagtgataggggtcgagtgtgagtgtcgggaccgagaggacgtcatccaggtctggaatgtcaacgcctccttagtgggcaaagctactgtgcttgagaagatccatgaactcctgccccacgtatcttttaaagccgtgttttataaaccccatgaagagcatcatgcttttgaaggtggacgtggaaaacactaattgcactctgtaaagaattctttatcctttgctgattggttttggaaacggtcttaacaggagggagagtgaagagaagacttgccgaagcccgatgctggtccatttagagaaagaaagagaagaaaagaaagaaagaaagaaagaaaagaaaaaaagccttcagtagctccactgtaccttgctaaggaacacctgccacagggctgcctgtgaagccacagagcaccaggaggaagcctagcctagccaagccccctttctgataaattgttgtgacacttgcctgcatactgtgagccgggcattgtttcttttgtgtgtgtgctccatagaaaccatacccattgacagcacacgcatcttaagacctttttaaaaagcagtataaggaaaagaaattgttggtttgcctagcatgaaaactttaatcacaattgagtgttaggctcagaatcaaactctaggatttgggggcccactgtgcaagtatttctaactagaatcccactctggcctccagcagggttgtctttcccttcatttatacattgttgcaggaagcacccaggcactcacacagttgagcttgagtgcatatatcgttcctataactgtgttgttagatattggattatactaccaaagaaatattggtttcagtagaagaaaacctttcagagtgttacaacttctcccagatgctcctgtctccctctcaactgtgtccacttcctggttattttccctgtgaaaggggcctccctcctcttggcctggatatagagctgtgggaccagtgaagcttctatatttctcaaaaggatgactttttaattcccttgcactgttggccagtggagagatggggctactctaatcctcccacatgtatttgtaaataaaattccccattcagaatttttaaatggctctcagtagcacctgtttataaaagttgtggcctccacttgcactgctaaacactcagcaaacaataattagttttctgatagattagcaaaaaggactaattgacttccttattataattgtcatatatatatttccataagtaaataaattttgaggaattttttatttttgaacttatttaaagcatttgtgatgacatgttcaatttttgcttgtatgtagcttttgagtaaaaataataaaataaa

SEQ ID NO: 4636 - DNA, 1406 bp, Cricetulus griseus
  modified_base (1343)..(1343): a, c, t, g, unknown or other
tagtgggtgatgtgcctttccagcttaagccagccagcgacacagagggcgaccagaacaagaaaaagtacttcctgcacacgtcggccccactggactatgagaccaccccgggagttcaacgtggtcatagtagctgtggactctggcagtcctagcctctccagcaacaattccttggtggtcaaggtgggagacacgaacgacaaccctcctgtttttggtcagtctgtggttgaggtttacttcccagagaacaacattcctggtgagagggtagccacagtgctggcgacagatgctggcagtgggaagaacgcagagattgcctactctctggactcctcagtgatggggacttttgccattgatcccgattctggggacatcctggtcaatacagtactgggaccgggagccagactgacaggtatgggagatccctcctagatcaggccacagccacagtctccctgtttgtgatggatgaaaatgacaatgctcccacagttaccctccccagaaacatttcctacacgttgctgccaccttcaagtaatgtcaggacagtagtagctacagtgttggcaacagacagtgatgatggtatcaatgcggacttgaactacagcattgtgggagggaatcctttcaagctgtttgagattgatcccaccagtggtgtggtttccttagtaggaaaactcacccaaaagcattacggcttgcataggctggttgtgcaagtgaatgacagcggccagccttcccagtccactacaactttggtgcatgtatttgtcaatgaaagtgtttccaatgcaactgtgattgactctcagatagtcagaagtttgcataccccactcacccaggatatagctggtgacccaagctatgaaaattaagcaaacagagactcagtattgtcattggggtggtttgctggcattatgacagtgattctaatcattttaattgtcatgatggcaagatactgcaggtccaaaaataaaaatggctacgaagccggcaaaaaagaccatgaagacttttttacaccccagcagcatgacaaatctaaaaagcctaaaaaagacaagaaaaacaaaaaatctaagcagccactctacagcagtattgtcactgtcgaagcttctaaaccaaatggacagaggtatgatagtgtcaatgagaagctgtctgacagcccaagcatgggccgatacagactctcgttaatggtggcctggcagtcctgacctggcaaggcattacaaatctagttccccattgcctactgtccagcttcacccccagtcaccaactgcagggaaaaaacntcaggctgtacaagatctaccaccagccaacacatttgatattagctagcaagcaaagaatgt

SEQ ID NO: 4637 - DNA, 1406 bp, Cricetulus griseus
aactgactggtgacagatttgaagccagaactcagaagtcaagacttagatgaagaacctagaagttgtgcagctggagagatttgtgaaacagatggttccaatgggaaaggcgatgagatgccactttcatctgtgaagacagaggcatcccctgaaagcatgttgtctccatcacatggctcaaatcctattgaagatcctttagaggcagagacgcaacacaagtttgaattgtcagactcattgaaagaagaatcagggactatctttggaagccagataaaggatgctccaggtgaggaggaggaagaagatggagtcagtgaagtagctagcctagaggagcctaaggaagaggatcaaggagaaggctatttgtctgaaatggataatgaaccccctgtgagcgaaagtgatgatggctttagtatacataatgccactctacagtcacacacactggcagactctatcccaagcagccctgcctcttcacagttctctgtgtgtagtgaagatcaagaagcaattcaggctcagaaaatatggaagaaagccattatgcttgtatggagggctgcagcaaatcatagatatgctaatgtgttcctgcaacctgttacagatgacatagcacctggctaccatagcattgtgcagagacctatggatttgtcaacaattaagaaaaacattgaaaatggactgatccgaagcacagccgagtttcagcgtgacattatgctgatgtttcagaatgctgttatgtataatagctcagaccatgatgtgtatcacatggcagtagagatgcagagagatgtcctggaacagatccagcaattcttggccacacagttgattatgcaaacatctgagtctggaatcagtgctaaaagtcttcgggggagagattctacccgaaaacaagatgcttcagagaaggacagtgtccccatgggctctcctgccttccttctctctctctttgatgggggaaccaggggacgccgctgtgccattgaagcagatatgaaaatgaagaagtgaagcctcagagttccctctttgagctgaacctgaaatagaaataaacaagatatagcttgggcttgtgggctcaggtctacacttgatcttagtcaaaaggctgagaagcagtatgggcccagaagagaaggttcctgggtcaaatgacatgagttgagaaaaatctcttttcagagagttggagtagcacagttgcccgttttagggcaaaaatcatgggctgtgttagtgccctaatgtgtagctagaagattgtagcttatttgtattatcttgtgaaagtgtacagtactttttaaaaaaataaaaataaacctgtgacgtgtgtgtatataacaaataagaaaggaaaa

SEQ ID NO: 4638 - DNA, 1406 bp, Cricetulus griseus
cgcgagtcccgaaaccctggcggagcgcagcgcgaatggaggcctgagggcggcgggggcggggcgcgccgcgagcgggggcctggccgcggctgggcgccgtctagaggaggcccggccgtccgccaccaagcagtcggggaacgagtgaaccgaacagaaagacaatttcgatcacttccacataaccagcagcaactgcttcctcgctttcctcttcacttggacgagatccggaaatgcattgatcataatcaggaaatactgctgaccattgtgaatgattgcatacatatgtttgaaaataaagaatatggagaagatggtaatggaaagattacgccagcatctacttttgacatggacaagttaaaatctacgttgaaacagtttgtaagagactggagtgaaaactgggaaaacagaaagggatgcctgctataagccaatcataaaagaaattataaaaaactttccaaaagagagatgggatccttctaaagtaaatattctggtacctggtgctggactaggaagattggcctgggaaatagctatgctaggttatgcttgtcaaggaaatgaatggagtttttttatgctcttttcttccaactttgtactcaacagatgttctgaaattaacaaatatcaactttatccctggatccatcagtttagcaataatcggagatcagctgatcagattcgacccattttttccctgatgttgacccccacagtcttcctccaggttctaacttttcaatgacagcaggagactttcaggagatttactcagaatgcaatacctgggactgcattgccacctgtttcttcatagacacagctcacaatgtaattgattatatcgatacaatatggagaatactcaagccaggtggaatttggataaaccttggtcctctactataccattttgaaaatctggcaaatgaactttctatagaattgagctatgaggatattaaaaatgttgttctgcagtatggattccaactggaggtggaaaaagaatctgtattgtcaacatatactgtgaatgatctctccatgatgaaatactactatgaatgtgtcttgtttgtagtccggaagccacagtaatggtcttaagtgatattacccagaaaaaagtttaatatgagcaaatactgaaataaacaactcaacagtcaactatcagtgacagcaggacacaacctcaaatcagtggtgccttcttattcctaacaaaaatttagaaatagtgtctattttcttaataatatctattgctttttcagaaatacactatacgatgcagatttgtactgcacaagaaaacatctgaaatacataaaaaaaaaaaaaaaaaaaaaaaaaaaaaaaaaaaaaaaaaaaaa

SEQ ID NO: 4639 - DNA, 1406 bp, Cricetulus griseus
agacccagcggcgggcttctccctctcggactccaagatggggaagtcgttcgctaattttcatgtgcaaaaaggacttccatcctgcgtccaaatccaacatcaagaaggtatggatggcagaacagaaaatatcatatgataaaaagaaacaagaagaactaatgcaacagtaccttaaagaacaagagtcgtatgataacagattgcttatgggagatgagcgtgtaaagaacggcctgaatttcatgtatgaggccccaccaggagttaaaaaagaaaacaaagagaaagaagaaacagaaggagagacggaatacaagtttgaatggcagaaaggtgctccaagagaaaaatatgccaaagatgacatgaacatcagagaccagccctttggtattcaggttcgaaatgtaaggtgtattaaatgtcacaagtggggtcatgtgaacacagatcgagaatgtcctttgtttggtctttctggaatcaatgcaagttcagttcctactgatggctcagggccgtcgatgcacccctcggagctaatagcggagatgagaaacagtgggtttgcactgaaacgaaatgtactggggagaaacttgaccgcaaatgatccatcacaggactatgttgcaagtgatggtgaagaagaccctgaagttgaattcttgaagtccctgacaaccaaacagaagcagaagcttctcaggaaattggatagacttgaaaagaaaaaaaagaaaaagaaaagtgataagaaaaagaaaaaattaacagaagagcagaagtaaacacaaaaacgtaaaaacaaatctccttcctcctcctcctcttcctcctcctcttcctcctcttcctcctcctcctcctcctcctcctcctcctcctcttctgacacttcagaaagcagcagtgaaagtgacaacaaagaaaagaaaagagagaaggagaagaggaagaaaagaagaaaaccaaatgttcaggaagtaaaacaaatgactctgaagaggataagtctaagaacaaacttcatgaagaattttctagtagtcacagtgacaggggaaaagccaacgaaacattaaggcttccaaaacaagagagttctggggagaatagcacccgggtccattttggttctgaccgaaagtccagaaaccatcgtcatagtccagagatgaaagggtctgacagaaatgggggaatccgaagtcatagcagggctgagagcagcaggagaagcagaagcaggagtcctggtagtcacaggcaaagggagatgagggactggcctcagttgagccctactgaagagcgcaccagaagaaaagacaacagaaaccatggcaatggtgaacacagaagagagagggcgcggtgagcacccaggagatcaaggg

SEQ ID NO: 4640 - DNA, 1406 bp, Cricetulus griseus
agagcccggcgccgccgcccgcacactcgcgcaccgcgcctgggcgcacacggagcagccccgcgaggcggcagcccgggacacgcggacccgccgcagcccccgccgcctgccccatggcgctgaagcggatccagaaagaattaagtgatttacagcgtgacccacctgctcactgctcagcgggacccgtaggagatgacttgttccactggcaagcaaccatcatggggccccctgacagtgcgtatcaaggcggagtcttcttcctcactgtccacttcccgacagactatccctttaaaccaccaaagattgctttcacgacaaaaatctaccacccaaatataaacagtaatggaagtatttgtcttgacatcctgcggtcccagtggtcaccagctttgactgtatcgaaagtgttgttgtccatatgctcgctgctctgtgatcctaacccagacgatcctttagtaccagatattgcacagatctataaatcagacaaagaaaaatacaacaggcacgcaagagaatggactcagaaatatgcaatgtaatgttttaaaccacttccacttctgccagagtactgtaaaacctgtctttttcaacattagcagtaagttgagtgccatttgctgtctcctctgttccacgaaccctttggtttttactcattttaaatgtgtttctgaagcaagacagaacaaacctccaaagctacccttgaaactattcggagagcatttagcattctatgctccttgaggaggacatttattttggtttttgagacacttggacacctgcatcttcaaagcgagatcttcaacatgactgagaagcaaccagatgatttttttgtcttgctgaaaggagatgtttttacatgagaaacactgtacgtgttgtccaagatgtcgtcacttttataaatctgaattcagatttcattctttgttagctcactttataatttgtattttttactgtatagactaaatatattctatgtcaactcatgactgtgaacagtattgaaaccccaacagctgatgatgaattaactgtgccccctgtccccttgtcttaggatattctgtgggttgaatgcatatttcttaaaccagaactgatcttcacactgtatttctcagtatattgactagaatggagaaacacttgtttcggttttattgtacttgacttaactttattgcaatgtgaattaattgcactgctaagtaggaaggtgtgtcactttttctgttgttgctcttcacatttgtaatttttttttttcttgttataggcaatattatattgacacctttactagatctgactgtagtcttttcctatataaataaaatagtcttttacttaaaaaaaaaaaaaaaaaa

SEQ ID NO: 4641 - DNA, 1405 bp, Cricetulus griseus
cccagaagatggcctgaagatattcactgaagacctgccggaggtagagtctctgccacgagatcgagtgctcaacttcttaatagagaatttcaagggtctggccattccttacctggagcacgtcatccacgtgtgggaggagacgggctcacggttccacaactgtctgatccagctgtactgtgagaaagtacagagtctgatgaaagactaccttttgtccctacccacaggcaaaagtcctgtccctgctggagaggaaatgggcgagctgggagaataccgacagaaactgctcatgttcttggagatttccagctactatgacccaggccggctcatctgtgattttccctttgatggcctcctagaagaaagagctctcctgttggggcgcatggggaagcacgaacaagctctcttcatctatgtccacatcttgaaggacacaaagatggctaaggagtactgccacaaacactacgaccaaaacaaagaaggcaacaaagatgtatatctgtccctgcttcggatgtacctgtcaccccccagcatccactgcctgggaccaatcaaactggagctactggagccacaggccaacctccaggctgccctgcaggtcctagagctgcactacagcaaattagataccaccaaggcgatcaaccttctaccagcaaacactcagatcaatgacatacgcatctttttagaaaaggtcttggaagaaaatgcacagaagaaacggttcaatcaagtgctcaagaaccttctccatgccgagttcctgagagttcaggaagaacggattttacaccagcaggtgaagtgcatcatcaccgaggagaaggtgtgcatggtgtgcaagaagaagattgggaacagtgcatttgcaagatacccaaatggagtggttgtgcactacttctgttccaaagaggtcaacccagccgacacctgagcacagaatcctaaggactcagcagtggatagctcaactttcccagagagttgaaggagcagccacattaggaaccctggcttccttgctccctggatcatctctgaattaactggatttgtgacctggcattgctggctttttcctagaaaaagattagttatatcttacactgttatgttgcagacgatcccaggaatttaacccctccttggacaggaggaaatgcaccgtcttgcctttgtatgccagtcacctggacaagatttcatctcaagtgtttgtacccatggggttgttgactgagagttttctattatgatatttgcacagcttcacaagaccctcaccctcagcatggcagcctggagagtcccatgggagcctggtaccagagctctacagccccactgaccgagcatcgtccaccagtctagc

SEQ ID NO: 4642 - DNA, 1405 bp, Cricetulus griseus
cgtctgtccgtctgcctgtctcgccatggctgtgccggcgccctctccgcggaccctgttgctgctgctgctgttgctgctgttgctgccgccgcctccgggtgcccagggtgagccgtgcaggcttattggcgaagacaacctgatcccattgtcctgccctgatttctgctgcggttcctgttccagccagtattgctgctctgatgtgctgaagaaagtccagtggaatgagaatgtgtgcactgagccggaggccagattttccacccacccggagacaccggagcagctgggttcggcgctgagatttcgatccagttttgacagtgaccccatgtcagggtttggagcgactgtcgccattggcctgacaatcgttgtggtgttcatcgccaccatcgtcatatgctgtacctgctcctgctgctgtctgtataagatgtgccgccgaccacgccctatagtgaccaacaccacaaccaccaccgtggttcataccccttaccctcagcctccaagtgtggcgcccagctaccctggaccaacataccagggctaccaccccatgcccccccagccaggagtgccagcagcaccctacccgacacagtacccaccgccctacctggcccagcccgtgggaccaccagcctaccatgagaccttggctggagccagtcagcctccatacaatccggcctacatggacccccaaaggcagttccctgagcctgcccccgcctctttggctgccatttgattgtcatgtgtgagtgagtggcatgcagttctttactgctctctggggtgtatgtgccttgtctaaccctgtgactcctgatgctgaccaggtaggcacaaacccttaccagtgtggcttgggaccaacctgttttcttcctcacttgaattatactttctgaaatctcaagtaaattagaaacattggggtaggaggtatttcccagttcaccccaaggtgaccagccatggcctgtcacacttaggagagtaagctttttgtgggcacatgtcctgctctggggagtaaccagctagctgctggtcagggccatggcttgtccccaggggttggctgcattttgcagtgaggcaggtaggtggggagggctacatgcactcagcattcaggcttcagtgaggaagtttttctacctttgctgcctggctcctgccactaggcaaggggcctctgtctaccatggcttgtttctacttgcactgccttggttttacttttagccaaacatttttgccttgttttctgcctcgagatgtgctagttggtgtgaggttgaaatccctggttcctggaggataacctggcctctgataatctgtttcccttgacaccagcttcatagaatacctgactcctgta

SEQ ID NO: 4643 - DNA, 1405 bp, Cricetulus griseus
ctcagcagactctaacctcaacatggaacaacctcaggcagagcccccagcacctagtaaggccagtagtgtagaaactgttgaatctgaaaaacatgaggccctgtccggaccagaaaaaaacccgcaggacaaaggtggtgcagaggctgatggggcagctggagaacaggagccagaagaccaagctttgccaccagctgaggatgcagattcgggaaatcttgagtgccctcctcctgaagctagctcaagtacgtgtgggacgtcacctgagacagagacaagagagatgagttctaagccacaggagcttccccagtcccccaggacccaacagcctgatctggatctctactgtgtcaagtggatcccctggaagggagaacggacccccatcatcacccagagcaccaatggcccttgtcctctcctggccatcatgaacatcctctttcttcagtggaaggtgaagctgccccctcagaaggaaatgatcacatcagatgagctcatgacacatcttggaaactgcctcctatccatcaagccccaggagaagtctgagggccttcaacttaactttcagcagaatgtggatgatgcaatgacagtactccctaaactggccacaggtctggatgtcaatgtgcgattcacaggcgtctctgactttgagtacacacccgaatgcagtatctttgacttgctgggcatacctctgtaccatggctggcttgttgatccacagagtcctgaggctgtgagtgctgttgggaaactgagttacaaccagctggtagagaaaatcatcacctgtaaacactccagtgacctcaacctcgtgacagaaggcttgattgcagagcagttcctggagaccactgcagcgcagctgacctaccatggcctgtgtgagcttacagcaactgctaaggaagatgaactcagtgtcttttttcgaaacaaccactttagcacgatgactaagcacaagagtcacttgtacctcctggtcacggaccagggttttctacaggaggagcaggtggtgtgggagagcctgcacaatgtggatggcgacagttgcttttgtgactctgactttcacctaagtcattccctaggcaaaagccatggggcggaaggtggaggcggctctccagagaagcagctgcaggtggaccagcagcagcagcagccacaaggcacgctgggccttagcgacctggaactggcccagcaacttcaacaagaggagtatcaacagcagcaggcagttcaacctgggcatacaagggccccttctccccaggggagaggaaccacatctggacgcccagctggtgatcggcggcagaggtcgaagcccgagtcagactgtgttttactctagctctgcccc

SEQ ID NO: 4644 - DNA, 1405 bp, Cricetulus griseus
tttctcatcgacattgttccaagagatgaactgaaacctccaaagcgtcaggaggaggtacgccagtctgtgactcctgcagagcctgtccagtactacttcacgctggctcagcaacctactgctgtccaggtccagggacagcagcaaggccagcagaccaccagttccacgactaccatccagcctgggcagatcatcattgcacagcctcagcagggtcagaccacaccggtgacaatgcaggtcggagaaggtcagcaggtgcagattgtacaggcccagcctcagggtcaaacacaacaggcccagagtggcactggacagaccatgcaggtgatgcagcagatcatcaccaacacgggagagatccagcagatcccggtgcagctgaatgccggccagctgcagtatatccgcttagcccagcctgtgtcaggcacccaagtcgtgcagggacagatccagacacttgccaccaatgcccaacagatcacacagacagaggtccaacaaggacagcagcagttcagccagttcacagatggacagcagctgtaccagatccagcaagtcaccatgcctgcaggccaagacctcgcccagcccatgttcattcagtcagccaaccagccctccgatgggcagaccccccaggtgactggagactgagggcctgacctgacaaggccaggacaccaacacaatatttgccatagagccccaggtgatgggacacaccctccctcaccagaggacccgggacttcaatgcctcccgcaggctaagatactggtgcactactttccacacctggggactgagattctacaacagaaagatgcaatattttttattttcttttttccatttttgtctccaaggaatcaatatttcaatatattgagctgtgtgtccaatgctataaaacaagaatattaagtaacatatttatggcattttcttgaaacgtggttgaggaaatgatttgtttcctggcttgggcattcactgccattgctaaggggcagcccgtgctcctccttcacaggggtgcacagggtttccactctgccagttctgccttcagaacaggtcagacccttcccgccagcgttcctctctgccccttccccagattcctctgcatccagaaaccgtggaaacattccttgcctgtgggccatgaactcatgccccacagagagctggtttcctccccagccccttctctccaagacccaaggagactaggacgttgaggacgttgtgctcttctctgcccactgttttattttttgtaatacattaaagaattgtgctcatctccgttgctgcatggacttcaaactgcatgaaatgcaataaatactccttttaggttaaaaaaaaaaaaaaaaaaaaa

SEQ ID NO: 4645 - DNA, 1405 bp, Cricetulus griseus
tcacttaacctccagaagatggctgaacctgcaggaataccagagcaagaagctcatgtcagagcatggagtgagagttcaaaggttttttgttgccaacactgctacggaggctcttgaggcagcaaagagactgaatgcaaaagaaattgttttaaaagcccagatcttagctggaggaagaggaaaaggtgtcttcgatagtggcttgaaaggaggtgttcatttaacaaaagaccctaaagtggtgggacagctggcccaacagatgattggttataatctggcaacaaagcaaactccaaaagaaggtgtaaaagttaacaaggtgatggttgctgaagccctggacatttctagagaaacctacttggccattctgatggaccggtcccacaatggccctgtgatagtgggcagccctcagggcggcgttgatattgaagaagtggcagcttccaatccagaactcatctttaaggagcagattgacatttttgaaggaataaatgatagccaggcccagcggatggcagaaaatctgggcttcctcgggcctttaaaaaaccaggcagccgaccagattaaaaagctgtatcatctcttcctgaagattgatgcgactcaggtggaagtgaacccctttggtgagactgcagaaggacaagttgtctgttttgatgccaagataaactttgatgacaatgctgagttccgacaaaaggacatatttgctatggacgacaaatcagagaatgagcccattgaaaatgaagctgccaggtacgatctcaagtacatcggactagacgggaacattgcctgcttcgtgaatggcgctggattagccatggctacttgtgacataattttcctgaatggagggaagccagctaacttcttggaccttggaggtggtgtaaaggaagcccaagtctatcaagcattcaaactgatcacatctgatcccaaggtggaagccatcctcgtcaatatatttggtgggattgtcaactgtgccatcattgccaatgggatcaccaaagcctgccgggagttagaactcaaggtgccactagtagtccggcttgaaggaactaatgtccaagaggctcagaaaatcctcagaaacagtggcctccctatcacatcagctgcggacctggaggatgctgccaagaaagctgttgccagtgtggcaaagaagtgatgtgatggcttcccccggctcccgtgaagaagggcacttcccgcatcactgtgaaagcaattgttatctcactgggaaagggtcatacacaaggatcattgtctgaaaaaatcttaagtctgaactttctcaaatgcgctatccacagtgcctgaagctgattttacactgtagtcaattaagtaaaaaaaaaaa

SEQ ID NO: 4646 - DNA, 1404 bp, Cricetulus griseus
aggcttcagaaatgtcagacatcctcaaggaactgctccgtgtctccgagaaggctgctaacatcgcccgggcatgccggcagcaggaaaccctattccagctgctcatccaggagaagaaagatgaggagaaaaacaagaagtttgcaacagatttcaagaccctggcggatgtgctggtgcaggaagttataaaacagaacatggagaataagtttccaggcttaggggaaaaaaattttgggagaagaatccaatgagtttacaaatgatttgggagaaaagatcactgtagaactgcagtccacggaggaggaaacagcagaactgctcagcagagtccttaatggcaacatgctggcatccgaagcattggctaaggtggtgcaccaggatgtggacctaactgacccctctctggaggccctggagatcagcatcccgcaggacattctgggaatttgggtggatcccatcgattcaacctatcagtatattaaaggttctgccaacgtgaagtccaaccaaggagttttccccaatgggcttcagtgtgtgaccattttaattggcgtctatgacatacagacaggcatgcccctgatgggagtcatcaaccagccttttgtgtctcaaaacctaactactctaaggtggaagggacagtactactggggcctttcttacatggggaccaacatccattccctgcagttctccatccctaaagggaacaacagtgaaactcacactgaaaacttggacctggagttctcccgccctttttctgcagtcatcagtacaagtgaaaaagagaccatcaaagccgcgatgtcacgaatatgtgaaggtggtgtcttctctgcggctggggctggctacaagagcctctgtgtagtgcaaggcctggttgacatttacatcttctcagaggacaccacatacaagtgggactcctgtgctgctcatgccattctaagggccatgggcgggggcattgtagacatgaaagaatgcttggcaagaagtcccgaatcagggctggacttgccacagctgctgtatcacatggagaacaaaggtgcttccggggtggatctctgggccaacaagggaggactgattgcgtataggtccaggaatcggctggacacctttctgagctgcctcacccaaaacctcgggcctttgaagacacaaacataggactctgactgcaactcgcccttaagccgaactgaaccccttcctgttatcgctatctttcaaagatagttttgtcttgttggttaacgttcatcttcctcttttgaggaacatcttctcattatgtgttcataatgttaatttcagtaaattaattatgttcatgtaacaactaagttggtatatgatattcttata

SEQ ID NO: 4647 - DNA, 1404 bp, Cricetulus griseus
gtacctgagcagcccaggaaagacataattcctaatattgcagcagacagtcaccctcctgcagaaggataaagagtacctcaatcgccaaaacatggagctcagtgtccgctgtgcccatgaagaggatcgcctggagaggctgcaggtgcaactggaagagaccaaaaagactagagaagatatgtatgaaaaatacgtgtcatccagagaccattataaaacagaatatgaaaataaactacatgatgagctggagcaaatcaaattgaaaactaatctggaaattgatcagcttcgaagtgcctctagggagatgtatgaacgagaaaacaggaatctccgagaagccagggataatgctctcgctgaaaagagccgagcagtggcagctgaaaaggatgctctagaaaagcatgagcagctccttgaaaggtacagggagctccagcttagtacagaaagcaaagtggctgaatttctgcaccagagtaagctgaagtcctttgaaagtgaacgtgttcaactcctgcaagaggaaactgcaagaaacctcgcacagtgccagttggagtgtgaaaagtatcagaagaaactggaggttttaactaaggaattttatagtctccaaacttcttctgaaaaacgcattactgaactagaagcacagaactccgagcatcaggcaaggttagacatttacgagaaattggaaaaaagagcttgacgaaataataatgcaaacagcagaaattgaaaatgaagatgaggctgaaaggattcttatcctatggctatggtgctaatgttcccacaacggctaaaagacgactaaagcaaagtgttcactttggcaagaagagttcttcaaagttagaaaaacaaaattcattaattttaaaagaccaagtaaggcggctttcccaagagcttgacagagccaattcactgttgaaccagactcagcaaccctacagatacctcatagagtctgtgcggcaaagggattccaagattgattcactgatgaagtgtacaggtcaacttgagaaagacatcagcaatttaaataaggaaaagtcagccctgctgcagacgaagaaccagatggccttggatttggagcagcttctaaatcaccgtgaggaatttgcagccatgaaacaaattatcattaatatgtgtagcaaacattctgagaacaacttactccgccctaaaatggaatcagggggtgtcacagaagatcaagcatcaaagattttgagcatgccaagagaacatgaagataatatatttatacccaagccaacattgtttactaaaaaggatgcacaagaatggtccaagattcaaaaaacgaaggcatagtgtttggtgctggagaaagccagagcctaaccc

SEQ ID NO: 4648 - DNA, 1404 bp, Cricetulus griseus
gtattttcttgcaccgagtaatgcggcggcggtggccgctgaggagggcggagatttctgtggtgaagtagtgggagggctccaaggaggtctcgcgaagagccgcggtctgaactaaaaagtgagaagttgatgtgggtactgcttgtctcggaccggcggcttgaagtctgagatcatcgtggaaccatcagctttgaaatttataaaacatggagaagactcaagagaaagctgaaagaattcttctagagccctataggtacttacttcaattaccaggtaaacaggtgagaaccaaactttcacaggcatttaatcactggctgaaagttccagaagacaaactacagattatcattgaagtgactgaaatgctacataatgccagcttactcatcgatgatatcgaggacaattcaaagctccgacgtggttttccagtggcacacagcatctatgggatcccatctgtcatcaattctgccaattatgtctatttccttggtctagaaaaagtcttaacacttgatcacccagatgctgtgaagcttttcacacgacaacttttagaactccatcagggacaaggcctagatatttactggagggacacctacacctgccccactgaggaagaatataaagccatggtgttgcagaagacaggtggattatttggactagcagtaggtctcatgcagttgttctctgattacaaagaagatttaaagccactgcttgatacacttggtctcttcttccagattagagatgattatgccaatctacactccaaagaatacagtgaaaacaaaagcttctgtgaagacctgacagaaggaaagttctcattccccactattcacgccatttggtcaaggccagaaagcacccaggtacagaatatcctgcgccaaagaacagaaaatatagatattaaaaaatactgtgtgcagtacctggaggatgtaggttcttttgaatatactcgatacactcttagagagcttgaagctaaagcctacaaacaaattgaggcctgtggcgggaaccctgcactagtggctttagtgaagcatttaagtaagatgttcacagaagaaagggaataatatttgccattcttgattagactcagagtttctttcagttgaaaatgaagagtgacttatttatcttttcaagtactagtctccaaaaccaagtaaatgagggtgatgtgggtgaaacagttttattgtcagaatccctttgtataaaaatacaaacttaagagctagagaaatggctcagtggttaaggggctgctcttccagaggacccaggttcaatttccactgcccacatagaagtttatcagcatctaagtccagttccaatgatctaatggcctcttctggc

SEQ ID NO: 4649 - DNA, 1403 bp, Cricetulus griseus
ccggtgcgggagcgtctcccgggtctcttgccaccctctctgttagtcctggcaggactttactagaatatcatttggagaaagtgtcatggatgttctgcgcccacagcttataacaatcgatggtcggaattataggaagaatcccatccaggaaaattatccacatgaagatgatgagggtttctatcaagactccatggaatattctgatgagccctgtgatgcctatgaggtggagcagacccctcaaggattccggaccactgtcaatgcccctagcctgctctacaagcacatagttggaaagagaggggataccaagaagaaaatagaaatggagactaaaacatctattagcattcctaaacctggacaagaaggagaaattgtgatcactggtcagcatcgaaatggcgtaatttcagcccgaacacggattgatgttcttatggacacctttagaaggaagcagcccttcactcacttcctgtcctttttcctcaatgaagttgaagttcaggagagatttctgaagttccaggaggaagttctggagaagtgctccatggaccgtggggttgacagctccatttttcagaatcccaaaaagcttcacctaactattgggatgttggtgcttttaagtgaacaagagatccagcagacgtgtgagattctgcagcgttgtaaagaggaattcattaatgacatttctggtggcaaacctctggaagcagagatggcagggatcgagtacatgaatgacgatcctggtatggtggatgttctttatgccaaagtccatatgaaagatggctccaacaggctgcaggaactagttgaccgagtgctggagcgctttcaggcattgggactaatagtgaaagactggaacagtgtgaaactgcacgccacggtcatgaacacactcttcaggaaagaccccaatgctgaaggcaggtacaatctctacacagcagacggcaaatatatcttcaaggaaagagaatcatttgatggccggaacattttaaagaagtttgagaacttctactttggttccctgaagctcaattccattcacatctcccagaggttcacagtggacagtttcggaaactatgcctcctgcggacaggtggacttctcctgaagtggaagaacagcagagaactgtgaccagctgcagcatcaggagcctggaaaatgtggcggcagcaggcactccggcctccagctgactggcagaggggggagctccagcctccactcctccctcctgcctcctcccccctccccctcatccctttctatcttgttcttcactccttaccctcaaaaaaaaaaaaaaaaaaaaaaaaaaaaaaaaaaaaaaaaaaaaaaaaaaaaaaaaaaaaaaa

SEQ ID NO: 4650 - DNA, 1403 bp, Cricetulus griseus
ttgctgagggtgatccagactcgggacctcggcgcgcggcgctgggtccgggcgctacggcgcagcccggtgagagtggtgtttccctccggacaagtggaggaacggaagcgtgctcctgtccagcagcctcgcaaggcggtccctggaggccagttctcagcagcagcgacataaacacgctcttgagacatccccatcccagacacctcacacctgggaagaaacagggcttcgctatgataaggcctttcccggggacaggaggctaagcagtgtcatgacaatagttaagtccaggccttttcgggaaaagcaagggaagattctactggaaggtcgcaggctgattgcagatgctctcaaggctggagctgtcccgaaagtgttctttttagccgtctggaatacatcaaggagttgccagtggataagctcaaaggtgtcagcctcattaaggtgaaatttgaagatatcaaagattggtccgacctagtaacgccacaaggaataatggggatttttgccaaacccgaccctgttaagatgacatatccagagactcagcttcaccattcactgcccttagtgttgatttgtgacaatctccgtgaccctgggaacctggggacaattctgagatctgcagctggagcaggctgcagtaaagtcttactcaccaaaggctgtgtggatgcctgggagcctaaagtgcttcgggcaggcatgggggcacatttccaggtgcccattgtgaacaatctggaatgggaaacagtgcccaatcacttgccccctgacacccgagtttatgtggcagacaactgtggtctctatgctcaggctcagatatctaataaaactagtgaccatgactgggcatgtgatcgacgattcctgaagtttcacaagtatgaagaagaggacctagactctaaaaccagaaaagactggcttcccaaacttgaggtccagagttacgatttggactggacagaagcaccagcagctgtggtgataggtggggagacacatggagtgagcctggaatccctgcaattggctgagagtactggtggcaagagactgctgatccccgttgtacctggagtggacagcctgaattcagccatggctgcaagcatcctgctctttgaagggaaaagacagctaaggataaaggtggaagacttgagcagtgagaggagttaccactgaaggaacacagaaatcctcagtgtgagggttcctcctgttcctgctacactggaatgatgttaggagactggccaaggtgataataggagccaggaggtaggtattgccaccattatgtggttactagaaagatacgaatttctattagtttctgctgcttctcattaaataacaaaggtacaaaa

SEQ ID NO: 4651 - DNA, 1402 bp, Cricetulus griseus
  modified_base (178)..(178): a, c, t, g, unknown or other
gacaatccagtgcaaaggaaatgactcaggcgctttggacacagtgggtgctgtggttgtcgatcatgaagggaatgttgctgctgctgtctccagtggaggcttggccttgaacatccagggagagttgggcaggctgcgatgtggagagcatcttgtgcgcaccatactggctagngaatgttctcacgctttacaagctgaagatgctcaccaagctctgttggagactatgcaaaacaagtttatcagttcacctttccttgccagtgaagatggcgtgcttggtggagtgattgttctccggtcatgcagatgttcttcagagtctgactcctcccaaaataagcagacacttctggtggaattcctgtggagccatactacagagagcatgtgcgtgggatatatgtcagcccaggatggaaaagccaagactcacatttcaagactccctcctggtgctgtggcaggacagtcagttgcaatcgaaggtggagtttgccgcctggagagcccagtgaactgactccaggctgaatagaaagtgtctgagaggcatttcaaaacctgagctttgggctatttaattgaaatggggtgttttatcttctttgttttgtaattcctattgcaacctcgggcactgcttgggacacaaagtgctgctatacttagtgctggttgacactcgagtctttgatgggtgagtgggagcatgtgtggtgtgtattagtgtacagtttgtgtgctggcttttccctgacgggctaggatctcctcaagtgtaacctatgacaaagactgatcaaatctttacaaaaatgtgtgctttaactgtttacaagtaaagactaaagttgtataaaactgtaatttcataaaaaggtatgaactatggttgacacaaggtgtctgaagagtgaatctgcttgtttaaatgacttgaccttcattgcagttcatttaataacggtaatcagtaatatggtgtcagtttaagtggatggtatggtaacttaaactgttgttcttatccctcatacagggcatttttccttgaacacaggatggtttcagtgaaacaatctagtagagaataaagtcagaacctttaaagtaatagttttattgatgaagtctgtacttctttcctcagctgtttgaagcttaaatattgcatagctttgcgccgtgtgtactgtattatgaaagaatttgtaaagagagtgttcggtaatgcagtctgaatgtgtgtataatggaatgttatttacaatgaaacactgtaaataagaaagcaaagtttatgggaaaattcaatattatctttgtttcttgtttaaattattatttttaagtattaaaaggaaacaaaaaataaaaagaagacaatattact

SEQ ID NO: 4652 - DNA, 1402 bp, Cricetulus griseus
agggatgtgctggatgtgataggccaggttctgcctgaagcaacgacgacagcgttgaatatgaagatgaagatggtgataggattacagtgagaagtgatgaagaaatgaaggcaatgctgtcatactattattccacagtaatggaacagcaagtaaaatggccagctaatagagccactgcagatatttccaagagcctgcaagcctcctggggaacggaacatacatggcctgaaggtgaatactcgagctggaccatctcagcataccagccctgtagtctcagattcacttccaagcaatagcttgaagaagtcctcagctgaactgagaaagatactggccaatggccagatgaatgaacaagacatacggtatcgagacacccttggtcatggcaacggaggcacagtctacaaagcatatcatgtcccaagtgggaaaatttagctgtaaaggttattctgttagacattacactggagcttcagaagcagatcatgtctgagttggaaattctttataagtgtgactcgtcatatatcataggattttacggggcattttttgtagaaaacaggatttcaatttgtacagaattcatggatggggggtctttggatgtatataggaaaattccagagcacgtcctgggaagaattgcagtggcagttgttaaaggccttacctatttgtggagtttaaagattttacacagagatgtcaagccctccaacatgcttgtaaacacaggcggacaggtcaagctctgtgacttcggcgttagcacacagctggtgaattctatagccaagacgtatgttggaacaaatgcttatatggcaccagaaagaatttcaggagagcagtatgggatccactctgatgtgtggagcctaggaatctcattcatggagcttgctcttgggaggtttccatatcctcagattcagaaaaaccagggatctttaatgcctctccagcttctgcagtgcattgttgatgaggattcaccagtccttccgcttggagagttctcggagccattcgtacatttcatcactcagtgcatgaggaaacagcccaaagaaagaccagcgccagaggaactgatgggtcacccgttcatcgtgcagttcaatgatggaaactccactgtggtgtccatgtgggtatgcagagcactagaggagaggcggagccagcaggggccccgtgaggcctcagtgggacactgactacccagggccaagtcaccaaggacacaacaagcttcaaccagctctgtctgctgatggcacctcttcttgcctcagccccttatgtttccctactgttcattgtaaagggtcagaccctatcagcagcactggtgagagagtaaaagtgttactgcttt

SEQ ID NO: 4653 - DNA, 1402 bp, Cricetulus griseus
gccggtagcgggcgcgatggcggcggatggggactggcaggatttctatgagttccaggagccggcccggagcgtccaggaccaggagaactgtaacgcgagccccgaggccggagctggggcacccgcgggcggcgacagcttcccggccttggcctgcagcctggaggagaagctgagcctgtgcttccgcccctcgaaggacgccgagtccccgcgggcgaccgtgcggcccatcacggagcacagcctcctgcaaggggacgagatttggaatgccctgacagataattatgggaatgtcatgcctgtagactggaagtcgtcccatacgagggctttgcatttgctcactctgaacctctcagagaaagggatgagtgatagcttgctctttgacacctcagatgaggaggagctgagggagcagttggatatgcattccatcatcgtctcctgtgtcaacgaggagcccctcttcaccgcagaccaggttattgaagaaattgaagaaatgatgcaggaatcaccggacccagaagatgatgagacccccacacagtctgaccggctctccatgctctcccaggagattcagactctgaagaggtctagcatgagcagctatgaagagagagtgaaaaggctctcggtgtctgaactaaatgaactgctagaagagatcgagacagccatcaaggagtactctgaggagctggtgcagcagctggccctgagagatgaactggagtttgagaaggaggtagaaaacagctttatttctgctctgattgaagtgcagaaccggcagaaagaacacaaagagacagccaagaagaagaagaagctcaagaatggcagctctcagaatgggaggaacgagagaagccacatgccaggcacatatttgacgacagtcatcccttacgagaaaaagaatggcccaccgtctgtcgaggatcttcagatattaacaaaaattctgcgtgccatgaaggaggacagtgagaaagttccaagcttgttaaccgattatatattgaaagttctgtgtcctacatagagcagctcacagtggaagcgcttccctttctgtggactccaggcgtgatttcctgcagtgtcactctggaagttggctgtcatgagtccctgcttttggagacccagcacacttgaacttggatttgcaattcagtgttacttgatcacgacttcactaatccatcattgtattagagcaccgagagggctatggcactcttgaattctggagataggttttggaaaattgacagtgtggctgttagtgtttgacttcctccatctgaactgcactgaagaacaaaagcactggaagacccacccatagctgttttccagtaaaggtgagaatcagtgt

SEQ ID NO: 4654 - DNA, 1402 bp, Cricetulus griseus
ctgtcctcgccgcccgacgacccgagcccgctgagcaggatgagggaaggcagagatgtcaataaccctatgcctaaccgaggaggcaatggattagctcctggggatgacagattcaaacctgtggtaccatggcctcatgttgaaggagtagaagtggacttagagtctattagaagaaaaacaaggccaaaaatgaacaggagcgtcatgctggaggagattcccaaaaagacataatacagaggcagttcctcacatttaagcctcagactttcacctatcatgatcctgtgctacgcccaggggtccccactgtgaggtggcagttaactggtatgctccacttgtagctcccatatctaaggacagaaccatttgcactgtgccgattatagatgtcataaatggcaacacatatgaaattataccccaagggggtggtgatgaagatgggtatgcccgaggagcatgggattggagtatgctctggaaacgggttcctctgacctctcgcgagaagagactgagaaagacaaaaactgaaccgtatcggtctccagctatggctggtggattatttgccattgagagagagttcttcttcgaactgggtctctatgatcctggtctccagatttggggtgcgaaaactttgaaatctcatacaagatctggcagtgcggtggtaaattattatttgtcccttgttctcgagttggacacatctaccgtcttgaaggctggcaaggaaatcctccaccctttatgttgggtcttctccgactcttaagatccgaggcctcgagactgcatactgcattgatagcatggggaaaccaatggagggtttgttgaactaggaccctgccacaagatgggcgggaaccagcttttccgaatcaatgaagtaaatcagctcatgcaatatgaccaatgttgacaaaggggcccgacggatccaaagtcatgattacacactgtaacctaaatgagtttaaggaatggcagtacttcaagagcctgcacaggttcactcacatcccttcaggaaagtgcttagatcgatcagatgtccttcatcaagtcttcatctccaactgtgactccaataaaatgactcagaagtgggaaatgaataacattcacagtgtttaagaagagtgcacaaaaccaataatctacctactgacaagtacacttacagaggactgaaaatcgcctggaacctgctgcaaccgttattactaattctgtacagctccaatcctggaacctctgatcagattgaaggacattgataaactgtgatttttacaataacattatcatctgcagttactgtttacaaaactgctttacttaaatctgtagatgtttacattcctttttcttttgtttt

SEQ ID NO: 4655 - DNA, 1402 bp, Cricetulus griseus
gaggtccggaggtctgcgcccatggccgccgcgctgctcgcccgggccggtggcccgctccgccgagctctccagcctcaagactggcgcaggttacacactgtttaccagtctgtggaactgccagagacacatcagatgttgcgtcagacgtgccgtgactttgctgagaaggagctggtccccattgcagcccagctggacaaggagcatctcttccccacagctcaggtgaagaagatgggtgagcttgggctgctggccatggatgtcccggaggagttcagcggtgcgggcctggattacctggcttactccattgccctagaggagatcagccgtggctgcgcctccactggagttatcatgagtgtcaacaattctctctacttggggcccatcctgaagtttggatccccagagcagaagcagcggtggatcacccctttcactagtggcgacaaaatcggctgctttgccctgagtgagccagggaatggcagtgacgcgggggctgcttccaccacggcccgggaagagggtgactcgtgggtccttaatggcaccaaagcctggatcaccaactcctgggaggcttcggccacggtggtgtttgccagcacagaccggtccctgaagaacaagggtattagtgccttcctggttcccatgccaacacctgggctcacactgggcaagaaggaagataagctgggcatccgggcctcatccacagctaacctcatctttgaggactgtcgcatccccaaggagaacctgctgggggagccagggatgggcttcaagatagccatgcaaaccctggacatgggccgaattggcatcgcctcccaggcgctgggcattgcccaggcctccctcgattgtgctgtgaaatatgctgagaaccgcattgcctttggagcaccccttaccaagctccaaaacatccagttcaagctggcagacatggctgtggccctggagagtgcccgtttgctgacctggcgtgctgccatgctgaaggacaataagaagccattcagcaaggagtcggccatggccaagctggctgcatctgaggctgcaaccgccattagccatcaggccatccagatcctgggtggcatggggtacgtgacagagatgccagctgagcgctactaccgagatgcccgcatcacggagatctatgaaggtaccagtgaaatccagagactggtgattgccgggcatgtgctccggagctaccggagctgagcccttctggggggcttgcctgcctgcggcctgaggcaaagggcagagtctcatggcttaactctgaggtctggtcagaccatgaagggacctacctcattctgagaagaaatgagttgtcagcttagagctgggcttggct

SEQ ID NO: 4656 - DNA, 1401 bp, Cricetulus griseus
gtcgcacgtgtgcggaggccgcgggcgggcccatggcgagctccgcggggctggcgctgtgcggccaaacgctcgtggtgcggggcggcagcaggttcctggccatctccactacaagcagtgacgatgactgcgtcttcacatacgactgcagtgctgcggagaaaaagtcagtgccaggagataaaggggaggacggacagcccatcgacaaggggagtgacacgattctggcgtccaccttctccaagtctggcagctattttgctttaactgatgacagtaagcgtctgattcttttccgtacaaaaccatggcaatgtctgagtgtcaggactgtggtgcggaggtgcactgccctggttttcacagcctcagaagatcaggtcttggtggcggacaaatctggagatgtctactccttctcggtgctggagcctgatggatgtggcaagttggaacttgggcacctctccatgctgctagatgtggctgtgagtcctgatgaccagtttgtgctcactgcggaccgggatgagaagatccgggtcagctgggctgctgctccgcacagcatcgaggctttctgcttgggacacacagagtttgtgagccgcatcttggttgtgcccagtcatcctgagctgctgctttcctcctctggggatggtaccttgagactttgggagtacaggagtggctgccagctgcagtgttgtgacctggctagccttcgggagcctgcagaccatcaagaccacaaggggttggctgcatccaggattgcattctggggacaagagagctgcgtagtgcttctgtgtgagtgcgttcctgtggtcttcatcttccagcttgatgccagcaaacagcagctggtgttcagacagcagctgactttccctcatcgagtgtgggatatcgtctttgaggattcgcaggggctgtgggttctgcaggactgtcgtgacgctcccctagtgctctggaggcctgtgggtggtcagtggcaggctgttcctgaaggtgctgtgtccaggagactctgcagccatcttcgtgagagctgggccatgctagaaggctctgtgggtgcagatgatggcttccgcagtctttacaaggccacctttgacaacatgacctcttacctgaagaagaaagaagagagactacagcagcagctgaagaagaagcgacaaaggagccccctcccacagtccccagaacagaccaaaaaggcatgctccgagcagtcagcccttggttgctgaccctgagcttggcagcagctctcagccctgaggcctcatgggccactctccctcctccctcctgcctggttcatccacaaggagagagggaggtcatggcagctcagtccccactactagctccaca

SEQ ID NO: 4657 - DNA, 1401 bp, Cricetulus griseus
gcgcagcggcctgcggcgcgtggacgacttcaagaaggccttctccaaggagaagatggagaagaccaaggtgcgcacgcgcgagaacctggagaagacgcgcctgaagaccaaggagaacctggagaagacgcggcacacgctggagaagcgcatgaacaagctgggcacgcgcctggtccccgtggagcgacgcgagaagctgaagacgtcgcgcgacaagctgcgcaagtccttcacgcccgaccacgtggtgtacgcgcgctccaagaccgccgtctacaaggtgccgcccttcacctttcacgtcaagaagatccgcgagggcgaggtggaggtgctgaaggccaccgagatggtggaggtgggccccgacgacgacgaggctggcgcggagcgcggcgaggccgccgacctgctgcgcgccagcagccccgacgtgcacacgctgttggagatcaccgaggagtcagacgccgtcctggtggacaagagcgacagcgactgagcaggactctctcggggctctgccctggaggccggtgcctgaccccgccgctccctgacccccacccctgcccacctcctttctcttctcaaactttctatttcgcattctcctcagccccatgctggttgagctttttttgcaccccttcagagcacaagccttaggccgaggggaggtggtctcccaccatggacagcctcaatttggacacactctgggtaggaagtaggaagaatggcccatgccctggttgtcctggtctaggaatctttttcttagctctccagttctcggcccctctccaccacagcttcatactcagcggcaccactcccgctgtctgagctcttttaccttacccccatcccaggagactctaaagccaaaatttctgcaagaggaaagagggaatcctaaagacaacccttgcaggggcagccttttagtgccagcttgctatcccagctacctgggaggctgagatgggagaattgaaaattcaaggcctgtctggactatagagtgagttcaaagccagcccgagtaattcagtgagaccctgtttcaaaataagagtggatctttccctagtgtaaagttgttcagagcttgccaaggggcaggggatggaaaccacaaatcttttatacaacacgaagctttgctttttattttttaattttattttttttttcttggttcccctccctcctccaaatgattgaagacacataagcagagggggaggaggtaggatgaggtcccttggtgctggtgggctgaaggggcctaagttgtgggcagatgcagtttcctgtgggctctaggggagcccctcatgttgctgtgttctggtgagcagccggaccaataaacctgcttttctaaaa

SEQ ID NO: 4658 - DNA, 1401 bp, Cricetulus griseus
atggcgcctcccaggctcattcattcggcgccgggtctgctggacacctgttctcagctcccgccgccgtccgccgccgtccgccgtcgcagagaagatgtcaggccccgccaccgacacgccgtccgcgatccagatctgccggatcatgcggccagatgatgccaatgtggctggcaatgttcatggagggaccattctgaagatgattgaggaggccggggccatcatcagcacccggcactgtaacagccagaatggggagcgctgtgtggctgccttggcccgggtggagcgcactgacttcttgtcgcccatgtgtatcggtgaggtggctcatgtcagtgcagagatcacctacacttccaagcactctgtggaagttcaagtccacgtgatgtcggagaatatcctcacaggtaccaaaaagctgaccaataaggccaccttgtggtatgtgcccctgtcactgaagaatgtggacaaggtcctcgaggtgcctcctattgtgtattcgaggcaggagctggaggaagagggccggaaacgctatgaagcccagaagctgcagcgcatggagaccacctggaggaatggggacatggtccagcctgtcgcaaacccagagccgaacacagtgagctacagccaatccagcttgatccacctggtggggccctcggactgcacccttcatggcttcgtgcacggaggtgtgaccatgaagctcatggatgaggtggctgggattgtggctgcacgccactgcaagaccaatatagtcactgcctccgtggatgccatcaacttccacgacaaaatccggaaaggctgcgtcgtcaccatctctggacgcatgaccttcacgagcaacaagtccatggagattgaggtcctggtggatgctgaccctgtggtggacaactcacagaagcgataccgggccgccagtgccttcttcacctatgtatccctgaaccaggagggcaagccgctgcctgtacctcagcttgtgcctgagaccgaggacgagaagaagcgctttgaagacggcaaaggccgctatgtgcagatgaaggcgaagcgacagggccacacggagcctcagccctaggcgtgcaacttgctcctgtccctggggtcaacacacctggggcagtagccccatgtgcagtcacttagaagtaacccccttggccaaaaccccaatttccactgagagctggtgttgtatgaagtattgtgtggcagtgttacctttgccctattcccgaaacctgtacaccaaagctttatttatatccctcagtgtcatcccaaaggccaccacggacacagagcacacggaatggtctgtgaagaaaccagcaccactaataaagctgctgtctggctggaccc

SEQ ID NO: 4659 - DNA, 1401 bp, Cricetulus griseus
aaggtaccctgctatagcctctgtgcagacagcagtggggctgtggagacaaagctgcaggcagccttctcccgggcccgccgctgcaggcctgctgtcctgttgctgacagctatagaccttctgggtcgggaccgcgatgggctggatgaggatgcccgtgtggtggccacactgcgtcacctcctccttgatgaggaccccgtcagcaattgccctcctctgatggtggtggccaccacaagccgtgccccaggaccctggccccaccgatgtgcatacagcgtttcctcatgagctggaggtgccagtgctgtctgaggaacagcggctcagtgtcctgcaggccctcagctcactcccaagctgtgggccggcaccccaacgatccttcagtgtcctggcacgatgtgggtgggctgcaggatgtaaagaaggagatcctggagaccatccagcttcctctggaacatcctgagctgctaagcctgggcctgagacgatcaggccttctactccatgggccaccgggcactggcaagaccctcttggccaaggcagtagccactgagtgcagcctcaccttcctcagtgtaaagggaccagagctcatcaacatgtatgtgggccagagtgaggagaatgtgcgggaagtgtttgccagggccagggccgctgctccatgcatcatcttctttgatgaactagactccttagcaccaagccgggggcgaagtggagattctggaggtgtgatggacagagtggtatctcagctcttggctgagctggatggccttcacagcactcaagatgtatttgtgatcggagccactaacagaccagacctcctggatcctgcccttctgcggcctggcagattcgacaagctggtgtttgtaggggcaagtgaggaccgcgcttcccagctgcgtgttctgagcgccatcacacgcaagttcaagctggaggcctctgtgagcctagtgaacgtgctggatcgctgcccgcctcagctgacaggtgcagacctctattctctctgctctgacgccatgacaactgccctcaaacgcagggttcgagacctagaggaagggctagagatggggagctcagcactgctgcttaccatggaggacctgttgcaggctgcagccaggctgcagccctcagtcagcgagcaggagttgctacgatacaagcgcatccagcgcaagtttgccgcctgctaggagctgcctgccatctttgtctgcatctccccacatgtctgaaagtacctgtaccatgtcacctgaagcctgccttcctccaggagatccccttgtgagccatagtagaaggcccttgtgtttagaaggagagccaggcctggcagtctgggagcttggcagcctg

SEQ ID NO: 4660 - DNA, 1401 bp, Cricetulus griseus
tccaagatggagggcgccctatcggcgccgctgcccgtccggctgctgctgttggtggcgctgccagccgcggggtggctaaccaccagcgcgcccaggccgccgtccacagccccgcaggatggcatcagaattaatgtaactaccctgaaagacaatggggaggtgtcaaaagaacaggttgttcttaacataacctatgagaatggacaggtctatgtaaatgacttacctgtaaatagtggtgtaacccgaataagctgtcagactttgatagtgaagagtgaaaatctggaaaatttggaggagaaagaatattttggaattgtcactgtaaggatcttagttcatgagtggcctatgacatctggttccagttcacaactaattgttattcaggaagaagtggtagagattgatggaagacaagctcaacaaaaggatgtgattgaaattgacattttagttaagaaccagagaatactcagacattcaaacttttcccttcctttggaagaaagcatgctttattctctttcccaaaacagtgacattttatttactcttcccaacttttctaaaaaagtaggaagcgttacttcattgcagaccaccagccattacctcatcgggagtgtggaaaccactgtggagggaaatgctttacctggcaaattgcctgagactcctctcagagcagagcctccatcttcatacaaggtgatgtgccagtggatggaaaagctcaggagagcactctgtgggctctggggcagcgtgttcccagtgctcttcatgtttctgaacgtcatggtggttggagttttgggtgcagcaggagtcatagccatgttaaaggtgctttgcccagtttatgagaacaaaggaattcttcaggtggataaaatgaatgtcatccctgtggtacctactatcttatatccagaaggttctgagaagacagaagaaaagcttaaagataaaatgtgtatttaaaacaccatctccaatcatggactctggctgcctgctcaggagatgaattattaagggaaatttaattggaaagatgtgactttgatataaccagaaataaccaggtgaaacagaacaccaagtgccagtagcttccaggtgcctttgctgcagaaactgtatctattgattactattgtaaggttttataagaagcactttatgaaattgtaatttaaaagctgaagactttactttttttttttttctcagtacaatgtgcctttatattacacacaggactcagtatgaaatcacataagtgtatcatgtctgtgtttgtgccaaaactgcttaccctgactgcaccaggatttaaagtgacatgttctcactactaaaattaaaactttttttaaaaaagaa

SEQ ID NO: 4661 - DNA, 1400 bp, Cricetulus griseus
tctctgcctgagagaggatcatgcagctggagatcaaagtggccctaaacttcatcatctcctatttgtacaacaagctgccccggcgacgggcagacctgtttgggaggaactagagcggcttttaaaaaaaagtatgaaggccactggtaccctgagaagccattgaaaggttctggcttccgctgtgtccacattggggagatggtagaccctgtggtggagctggctgccaagcgcagtggtctagcagtggaggatgtgcgtgccaatgtgccagaggagctgagtgtctggattgaccccttcgaggtggaactactgcggcagtgagttcagcccagaccgacactgccaacccccctccttgcattgggcactagctctacctccctcccccagcagggcaaggctggccctgagttctcagcccagcaccacctgtccctagtctgctccagccagcccgatctgggcctcctcttccttcagcctcagtccctggtcaatagcctctctgggacaagtcaggtgttgccttacccccacttccagcccctcctcccacgtgcacacaggtaccacctgcacccaagccagcttgttttctcacacaggggagactggagcccagccccttgtgtcatttgatataggaagagaagcgagtgttcaggaacgtgactcctgggctgggctcttgggcccagttcagtgtctcatcgcaaatctagacatttttgcttcaattttatttattttttttaaaggaaaaaaaaaaaaaaatctgcactaatttacctggtttcatagtaaaaactttttttaccttttacattttttggtgtccgtttgtattgaataatttgctacatttgtaaaatgtaagaggtatatataatatatgtatatttctaatgtaagaaacgtaatttttttcttttcaagatttttttcttaaaaaaggagagaaaccaatatttttttcaggaaaaacaaactttaaaaaataggaacataaaaccttttcctcccctttcccatcctctctagccctctcacccaggagcaaacctgaaggtggatcatcttgctaagaatgtagccgtcagtccagaatgctgtctttttcctgattctgtaggtctccctggggtgggaataggcattgaggcagcagccatggagaggagctggaagcagggcgatgacctttttttctctagtgaaggaagaatgcaatcaagacattttgtattcagaacgttgtgcaatattttggaatgagacattggtgtgtttagagatttagtttcaaaacaaagattgatcaaatctgtacagttttatattgttccagtatttttttaagtttgtaattaaaagcatgatatataata

SEQ ID NO: 4662 - DNA, 1400 bp, Cricetulus griseus
cccagcaccagaaggttcgggagtacctatcggagacctatgggaacaagtttatcacaacctgattgaaaggagacgcaggttcaacatcaacgaccgtatcaaggaattgggaatgctgatccccaaggccaacgacctgggatggtgcgctggaacaagggcaccattctcaaggcctctgtggattacatccggaggatgcagaaggacctgcagaaatcccgagagctggagaaccactctcggcgcctggagatgaccaacaagcagctctggcttcgcatccaggagctggagatgcaggctcgggtacacggccttcccaccacctcaccatcgggtgtgaacatggctgagctggcccaacaagtagtgaagcaagagctacccggtgaagacggcccaggggaggctctgatgctggggcctgaggtccctgaccctgagccgatgccggcgctacctccccagggcccactgcccccagctgcccagccacagtcccctttccatcacctggacttcagccacagcttgagctttggggtgggggtgatgaggggcccacaggctaccatgatcccctggggacagaacatggctccccattccccaacctgtccaagaaagatctggacttaatgctcctagatgactccctgctacccctggcctccgatcccctcttttctaccatgtcccctgaggcctccaaggccagcagccgacggagcagcttcagcatggaggagggtgatgttctgtgacgctggctgcccctgtgccgaggagcaggggctgcctgggggctgggaggacagggcagagccctcccacccttcaggctgcacttggtgtgaggtagctgcctaccctgcccgtccttcccctcggttgcggccccccctgtttggacttagtgcctgcctggcagccaagggggcaggagaccccctccggttcggcaacgacccccctccgcgggcagcactactttatgaattgtggtggggaagaacaagggtgagggggtgaggagtaagaagaaaccccggtaggggagccctctcttctgagcctgctcccccaacctccccgtgaaggacattttggagaaggaggtataaaaagcatctctgggcagcagtgggtctgggggtgcccaggcctgctttcctgggactagatggcacccagcctgtcccccagactgatacgtccccacagatggggcacccaccccctttggtgctaacagctctcccctggtggtatgagggtggggtggccagaagaggagtctgggtccagggtggagagcacccggccccagacctcccactttgtgcctttagtaaacactgtgctttgtaaaaaaaaagaaaaaaaaaaaaaaa

SEQ ID NO: 4663 - DNA, 1400 bp, Cricetulus griseus
tgtccccagcatggcggcgcccaccggagtggccgcggcggtgctcggtgaaggcgacggcggggctttcggatcctggctggacggacggctggaggcgctgggagtggaccgagccgtgtacggcacttacattcttggtgtcctgcaggaggaggaggaggaagagaagctggacgccctgcagagtatcctctccgctttcctggaagaagattccctccttgataactgtaaggaaattgtggaccgatggtcagaaacacaaaaatgtcaccatcaaagtagaaaaagaagatgaggtccaggccattaccaccttgattgagaagcaggcacagaattgtggtgaagcccaggatggtttcagaagaggagagacagaggaaagcagccctgctggcccagtatgccgatgtgacagacgaagaggacgaggcagatgagaaagatgatccgggtgcctccacaacaaacatcagttctgataaatctctgtttcgaaacaccaacgtagaagatgttctcaatgctcgaaaattggagcgagactctcttcgggatgagtcccaaaggaagaaggaacaggacaagctgcagagggagaaggacaaactagccaagcaggagcgcaaggagaaggaaaagaaaaggacacagagaggggaacgcaagcgataacctcggccactctgttccttccacccgtgaattgattgtgcgtctatatatttaagagaactgagactaatgcatttcccaaaatttcttaaggcttttccccctctgtttacatgttcaaaaggaaaatcacaatcacttgtactgcaggtatgtccaaccttttgatattgtgacataacatttttttaaaacttgcaaaacaaatcatgtttttaaagtaagtttatgattttgtgttaggctgaatttacagctatcctcagccacatgttggacacacctgcaacatgagtattaagacctaataattcctggtttagagaaaccgaaggaattactcttttagagaaaaacacctgaaattttgctaatacaagatatatagttggtggttaacaaacttatgaaatgagagagtagacaaactggcagagtcaagggtgagcagaaactctccagtcctatttctgttacagctacatccagctgtaaataaattccttctttacttgactttgggcaacagctatcaaaagcctcaagagaacaatttctctaacaagattattttataccaggggttagaagactaccactcacaggccaagtttggcccagtcttttttgtacggggcgaactaaaatggtttttttacatttttaatagaaagacattcatgattgagaccatatgtggcctataaaacttagtattt

SEQ ID NO: 4664 - DNA, 1400 bp, Cricetulus griseus
gaagatcaagtgcctcttctgccgcataggtgggtctggcagagatgggtcggcacagcactgctcagagagtcggaggacatcttctgccatgtcgagccactctcgctccttcctctctcgggagctgagggagatcagcagcacatctcagactctcctgtacctgccagacctaagtgaaagcagcctcggaggcaggaatttgcttccgggtgtgcatggcatgggcctgacccaagcagataccacctcgacaagaactttgcgaatatcagagacctcggactcctcccaggggccaggactcagagagtgtcctgttggtggatgaggtcggtgggagcggcagggaggagcctgcctctaaaggaaactctctgcaggtcacgttccccagtgaaacgctgaacttatctgaaaaatgtatatagtagctaaaggggctactgaataggaagatggcagaagctgttatttccgtaacttcagaccttcgattttggcacataccagaggtccggatactggaagggctctaccccaaactctgaggactatcttacagctgatttaagtgtctctctaaagcatgaaatgtgaatttttattgttggaaatgtaatttaaggtatttatgttcttctctgtgagaaggtttattgttaatacaaggtataagaaaattatgatccgccctctcctgccagtataaccagctaatattgtcaatgttatggttttatccataaagaagtcaggccaaagtattgaaaagagtgaaactaatatctataaaacagatataaatttttaagagtttagcaccaatcaaaaggaaaaaatatttaagatgtaaaaattaacctaaaatatattttccaaactatatataataatgaaaaaaatcagaaacataatattacatttatttatccaggaaactgtgattcaggagtacctaatattgctggtaaatattttcaacctttgtccccactaatgggtatttttaaagctgtaatatacttttttaaagtctctagctacccatcattgaagtgtgtagtataagaagtccaagtagcttgttctgtcctgaaagcctgtgtagttttacttgccaacagaatgtctgacagcatcctttctgatttaaagaggaagatccactctgtggtgtgtgccaagagacactgacagtcttctgtgacacccagtaatgctgtacctgtgtttggagatgctgtcttggagaaatattacgcatgttttgttgctcaacgtgttcttgtgaactgcttggttgtgattgaattctgagcctgatactgataaggattaaggagtagctggaccgactgaaattattctggagatgacaataaataattgcattc

SEQ ID NO: 4665 - DNA, 1400 bp, Cricetulus griseus
caggccgttggggctatttaaaggtgggcgccggagccggagccgcacagttgccggtcctggtgcgcagcgtgcagccgtcatggtcagccacctgcagctcaacaacggcgccaagatgcccatcctgggcctgggcacctggaagtcccctcccggccaggtgactgaggccgtgaaggctgccattgacattgggtaccgccacattgactgtgcccaggtgtaccagaatgagaaggaggtgggaatggccctccaggagaagctcaaggagcaggtggtgaaacgccaagacctcttcatcgtcagcaagctgtggtgcacgtttcacgacaagagcatggtgaaaggagcttgccagaagacgctcagtgacctgcagctggactacctggacctctaccttattcactggccaacaggtttcaagcccgggcctgattacttcccactggacgaatcaggaaatgtgattcccagtgagactgattttgtggacacttggacggccatggaacagctggtggatgaaggtttggtgaaatccattggtgtctccaacttcaaccctcttcagattgagagaatcttaaacaaacccggcttaaaatataagcctgcggttaatcagattgaatgccacccgtacctaactcaggagaagctgattgagtactgccaatccaaaggcatcgtggtgaccgcgtacagtccccttggctctcctgacaggccctgggccaagcctgaagacccttctctcttggaggatcccaggattaaggcaattgcatccaagtacaataaaacaacagctcaggtgctgatccggttccccatacaaaggaacttggtggtgatccccaagtccgtgacaccagcaagaattgctgagaacctgaaggtctttgacttcgagctgagcaaggaggatgtgaccactctactcagctacaacaggaactggagggtgtgtgccttgatgagctgtgctaaacacaaggattaccccttccacgcagaagtctgaagcttcggatgcctgctctctcccacgagacttgcacctgctcttcctgtttcatctgtccttgtgggtgtagtgtagactgtgtccctctgcactgtgtggaacctggaagatcagacaacgagggtctgttagtttgatgtagtctccagagagcattatcagtagctgagtgattttcttcagcctttcttgatctttcttcttacccacctggaaaatgtttaacacaagtaccctttccaaccaaagagaagcaagatttatagtccaagtagtgccactaacagttaagttttgagtgctcagagctgtagtctttgggtcagtcttctctttgcttcaaataaaaactgcttttgtagaa

SEQ ID NO: 4666 - DNA, 1399 bp, Cricetulus griseus
tgcctccgcgggcggagttgtgcataccccactggagaaataatgcgacatgtgtgggcgagcaggccttcgcacccttcgggagtgcggcccacgcaggaagctcatagaagggcctgcgttgaagcccatgagagagagatatggagctctcctttgctgtgcagcgcagcatggacaaaagtgtgtggcatctgcatggaggttgtctatgagaaagccgaccccagcgaccgccgctttggcatccttttcagctgcaaccacacctactgtcttaagtgtatccgcaggtgggagaagtgccacacagtttgagaacaggatcagtaagtcctgcccacagtgcagggtctcctctggctttgtcattcctagtgagttctgggtggaggaggaagaggagaaggagaaacttgtgcagcaatataaggaggggatgagccagaaagcctgcaggtattttgctggaggcctaggtcactgcccatttggagagtactgtttttacaagcatgaataccctgagggctggagagatcagcctccgaggccaggtggtggcggatcgtcaaacgcatactggcatcaagttttggagcctgtgcagttgcgagagggaaaagtgctgttcaaaagccgtaagaaggagcttgctgtgcttcgcctgggcaatcagttgcttaagaagttgctttgcctgagaggcagtttttccttctctgatgaccggtggctcttgcttcagttccagctggaagagtatttcaatttgaatctgtagtatcatgctatcgcatgtggtctagtctgctaaggctctgttgtctgctagttgcttacttccctctattgactgaacaaccctattgctttcaaaggctgttgtggcaatctttatgcagtactgctgttttcgcttctatttcccatttcttctcactaggattgtgatgtttctctgtgttacaagataagaagaaatcttaaaagtattgtttggtggaattaatatttctgtcagctgatgacttgtggtgtctttttccaacaggattcaatcacttctagtctagtgtttacagtttctcattgtgaagtcccttaagagtaaatgtgacaaggtgacaaaagtctttaaattatgagctttttgctatatagccttaaaaatgcaaccttacagggccttgcagctgctgtctgtgtttgtttacatgtctgtttcttcccttctctttcaagtgcaattgttaacttgtggttactttgtggttctgttttacttgaccaaaataaggtgcatatgtttacatgtttttatcctgtttggcttgatgtgaaattatttatatttggaaatatatatttaagaatgatatatatgcgtatatgtata

SEQ ID NO: 4667 - DNA, 1399 bp, Cricetulus griseus
agcggagcccggcatccagctgccaactttgtgcctgtatctgtctcctcgcctcggccctcggggcatgtaactgccatgcccgtggacacgctgagccctgcagcccctgcagctcccaccctaccttttcgcctgcgaaccaaggtcccaagctacctgctaccaaggccagcagttgcgggagcccggaagccgagtgctgtggaacgcctggaggctgacaaggccaagtacgtcaaaagccttcatgtggccaacacccgccaggagcctgtgcagcccccgctagcccgacagcccttcttcagcgctgctcgtgggccagtgctcacacccagccgccgagccctgccctgtcctggacgcaggccccagctggacgttgacatccttaccagtctcatcaacctgtgtgatagtcccgtgtccccagctgaggccagccgaacgcctggacgggcagaaggatctgcccacaaggtcccaccagccacccctcctcgtccaccgcctagtacagtcgccgtgcgccgagtggatgttcgtcccctgcctgcttcacctactcgtctgtgtccatcgcctggcaacactgccacctctagcccaggccggccccctggtctgcaacgttccaaatcggacctgagcgagcgctttttcagggcagcagctgacctcgagcgcttttttaatttctgtggcctggatccagaggaagcacgaggattgggggtggctcacctagcaagggccagctcggatattgtctctctagccgggccgagtgctggaccttgcagctctgaaggcggctgttcacaccgcagctctgctacagtggaggagcgggccctggagcgtgtcccctacggggtgtctgtaatagagcgcaatgcccgtgtgatcaagtggctgtatgggttgcggcaggcccgtgaccctccggctactgagggctaggtctcccggactcaggcttcctggaaggacatcgtgaagcggcagttggcaccttgtcctttcttgtatccattggctgccttcggcagaccagaggcagctcccttgggtgaacttggtatagaggccaggacttagctgagttgggaaccaagtacctggccaagcctgtctgccccgaggctccgtttcctccttccttctctgtccccctttgctgatttcctcttccttaccgaatgggccctggcttactgggaactcactccggggaggagattgagaggatgggatccatctaatgctcttcctggtctttggcagttggcctaggtgggtaaactataggagggactggttaggagcctgctgctcagacttctctttggttaataaacacaaatgtttgtttctacaaaaaaaaaaaaaaaaa

SEQ ID NO: 4668 - DNA, 1399 bp, Cricetulus griseus
tcgcgggagccggacggcgcaggcccgtcccggcgcccgggggcgccatgtggttcatgtacgtgctgagctggctgtcgctgttcatccaggtggtctatttctattcactctggccgtcgcggctggactgtactacctggcagagctgatcgaagagtatacagtggccaccagcagaatcatcaaatacatgatctggttctccacagcggtcctgattggcctctatgtctttgaacacttccccaccagcatgattggcgtgggccttttcaccaacctcgtctactttggccttctccagaccttccccttcatcatgctgacatcacctaacttcatcctgtcatgcgggctagtggtggtgaaccattacctggcatttcagttttttgcggaagaatattatcctttctctgaggtcctggcctacttcacattctgcctgtggataatcccgtttgcattcttcgtgtcactttcggctggggagaatgtcctcccctccaccatgcagccaggagatgacgtggtctccaattatttcaccaaaggcaagcgaggcaagcgcttaggcatcctggtggtcttttccttcatcaaagaagccatcctacccagtcggcagaagatatactgagcctttggggagggcatgtggggggcaagaccagcagagctaggcccctgggcttctgggctaagtgcctaggagcctggagggtgtcttctgccagcccgggtttccctcccctctgttctgaagccccatccctaccctcctcaggggacctgaatgctgccaggggcaccagagagggtagcagagcctgctttgccaggaggctatgtccccagccttccccgtcccgaagtcgggtctggctcagatggggcaggcagggaagggtctgtgaagctggggcacagacagcaagttctcaggcaggtgaccataggaggagctaagggttggcacttctggaaaagtgcattttgctgttgtgtccaatgctggttccctttgaataaagattctaggtggcactgtttgccttaacaccccaggagtccatcttcctctctactcgctaactttctgcctagactgggctagccttctactccagggactcctcttctggctcttgcccttctgaagaaattcttgtggccctaagtgggaagggaacagagataagggtggataaaggcagttttctgaggctcctccctctttttccatgtcttccttccctagactgatagtctagatgggagggagcagaaacagtttgtgactgggttagggatgcagaagaccatctacaatatcctatttatgtcttcctttgaggaaaagaagaggtttcttggtgaattctatctcaggctc

SEQ ID NO: 4669 - DNA, 1399 bp, Cricetulus griseus
  modified_base (205)..(205): a, c, t, g, unknown or other
  modified_base (1390)..(1390): a, c, t, g, unknown or other
gatggcagcgaccgaggccgtgcaccacattcacttacagaacttctctcgctcactcctggagaccctcaacgggcagaggctaggcggccacttctgcgacgtgactgtgcgcatccgtgaggcttccctgcgtgcgcaccgctgcgtgctggcggcgggctcgcccttcttccaggataagctgctgcttggccattcgganatttcgtgtgccaccagtggtgcctgcgaagaaagaggggaggaggaggaggaggaggagacggatgaagagacggatgctgaagaaggcgaaggtggcggtggcatgggtgaaggccaggcgcccctgccttccccgactgcacaggacccttccttaccaccacagctgacatcgcgcgtgaggacccgcctgcatccactagcatccctgattatggtggtgccgggagagatttccttcgggggactgcggtgaccgaggatggggttcccagacagctttgtgtcagcttggcatgaggaaggcaacgggggtcccgaaggttgtccagtggaaacctcggctccaccggactgcgccctggctgggccccgccccactggcgtaaagacccctggaccccctgtggctctcttcccctttcaccccgggtgccccagggccgccagcaccaacccctcctactccagcggggccagcccctgctcccccgcctaccttctaccccacgctccagccagatgcagcccccggtgctcagctcggggaagctccagctgtgcccgctgcccctgctgctccagccacagccatctcgggcactcccgtgcgcgcccccggtgcctcaggtgctgagcaacccgcctatgagtgtagccactgccgcaagactttcagttctcggaaaaactacaccaagcacatgttcatccactctggggagaagccgcatcagtgcgcggtgtgttggcgctccttctcgctacgcgactacctgctcaagcatatggtcacacacactggcgtgcgagccttccagtgtgctgtgtgtgccaagcgcttcacgcagaagagctcactcaatgtgcacatgcgcacacaccggccagagcgtgctccctgccctgcctgcggcaaggttttctcacatcgggcactgttggagcgtcacctggcagctcatcctgcaccttgatggggacccagctgtgcacagtgcgcaggtgcactcagacccttgaactaggttcactccaccagaagtcgcttgctccggagtaccgatgctttcccttgccctcactcacaccgttttccctgtggacttgggacccagaacccaatttccctcctacacacgcttagcatctctaataaagacactgagcaagttaaaaaaanaaaaaaaaa

SEQ ID NO: 4670 - DNA, 1399 bp, Cricetulus griseus
gttgtgtgcgctgttgtccctctcctcccctcccgcagggtttgcggccaccatggcgtattagaggcagcagtgcctgcggcagcgttggcctttgcagcggcggcagcagcaccaggctctgcagcggcaccccccaccggcttaagccatggcgtttttcacggaatccagcagcagcgttgctgtaacggacaaagacagcttcgatttaagcacattcctcgattccagcaaagccctacaacatgaccgagatgagcttcctgaacagcgaagtgttggctggggacttgatgtcccccttcgaccagtcgggtttgggggctgaagaaagcctagggctcttagatgactacctggaggtggccaagcacttcaaacctcatgggttctccagcgacaaggctaaggcgggctcctccgaatggctggctgtggatgggttggtcagtgcctcagacaccggcaaggaggatgcattctccgggacagactggatgttggagaaaatggatcttaaagagtttgactttgatgctctgtttcgaatggatgacctggataccatgccagatgagcttttggccacgttggatgacacatgtgatctttttgcccctctagtccaagagactaacaaggagcccatgacagtgaacccaattggccatctcccagaaagtgcaacaaaaatagaccaggttgccccctttgcattcttgcaaccttttccctgttccccaggggtcctgtcttccactccagatcattccttcagtttagagttaggcagtgaagttgatatctctgaaggagacaggaagcctgactctgcttatattactctaatcccccagtgtgtaaaggatgaagacaccccctcagataatgacagtggcatctgtatgagccctgagtcctacctgggctccccccagcatagcccctccacctccaggggatcaccaagcagtctgccctctccagttgttacccgtgggtcaccaagacccaaaccttatgacccccctggagttactttaacagctaaagtgaaaattgaaaagttggataagaagctaaaaaaaatggagcaaaacaagacagcagccactagataccgacagaagaagcgggctgaacaggaagccctgacaggcgagtgtagagagctagaaaagaagaatgaagctctaaaagagaaggcagattctcttgccaaagagatccaatatctgaaagatctgatagaagaggtccggaaggcaagggggaagaagagagctccctagtagggtagtgctttgtgcttgtatatatagtcttgtgatgaagctgtgtttgctgtaataaattattttgtagtaaagtaaaaaaaaaaaaaaaaaaaaaaaaa

SEQ ID NO: 4671 - DNA, 1399 bp, Cricetulus griseus
taagagacatggctgcaacccaccctacctcctcccctacagattacgattgttgtgtttttacctgtgcctgactgtggttggatgggtcaccagcaactactttgtggaccctattcaagtgatcccaaggcaaaggtcttcatggctagtttctacaaggtcatacctttggggaaggaagaaactctggtccatgatgcaaccatggaaaaagtagaacttggtaactgcccttctgtgtctccaaacctcagaggccagagcaagctcatttttgagccggacctcactttggaggaagtacaggcaaaaaccccaaagtgtctggaggccggtatcaccctgaggaatgtaaggctgtgcagcgggttgctgtcctcattccccaccgcaacagagagaagcacctgacatatctgctggaacacctgcaccccttcctgcagaggcagcaactggactatggcatctacatcatccaccagactggaagtaaaaagtttaatcgagccaagctcctgaatgtgggctatctggaagctctcaaggagcaaaactgggactgctttatattccacgatgtggacctggtgcctgagaatgacttcaacctttacacatgtggtgatcagcccaagcacctggtggttggcaggaacagcactgggtacaggttgcgatacagtaaatattttgggggtgttactgccctcagcagagaacagtttttcaaggtgaatggattctctaacaactactggggatggggaggcgaagacgatgacctcagactcagggtggagctccataaaatgaaaatctcccggcccaatcctgatgtgggtaaatacactatgatcttccataccagagacaaaggcaatgaggtgaacgtggaccggatgaagctgttacaccagatgtcacgggtctggaaaacagatggcttatcaagttgttcttacagattactctctgtggagcacaatcctttatataccaacatcacagtggatttctggactggtgtgtgacctggatctttggatgatgttcaggagaactgatgatttgattataatagttttggcctagagacttccatagtagttacacatttcgaactcattccagctaatcatcaggccaaatttttccattttgtgctcaccagagctcttggttatgtagaatgtagaaccatcatagaaagacagctttcttagttgttttgatcatggtggtgaaactttgaaatgcacatacttgaaggactaaagatcaaaggatgcaatgaaggcaaactggaagaaccatgtccttgaaggattggcttcaccattcctatgagattaaagagtggggactaaaaattcccaagtatcttagagaacca

SEQ ID NO: 4672 - DNA, 1399 bp, Cricetulus griseus
ggtaaccaaggtagaaaacgctcgggccgaagctttagtggctcttagggatggcggcacctgcagcaggatctgcaacgtcccagcggttttcccagagcttctcagatgctctgatcgacgaggacccccaggcggcgttagaggagctgactaaggctttggaacataatccaaaggatgcacagtattactgtcagagagcttattgtcacatgcttcttgggaaacaccttgatggtattgctgatgtaaagaagtctcttgaactcaatccaaataatcctactgctatcctgaggaaagggatgtgtgaataccatcaaaaagactacgcttctgctttagacacttttatagcaggacaaaaattagatagtgcagatgcaaattttgccatctggattaaaaggtgccaggagactcagcctgcatcagagtctgaagtgtctgcatctcagagaactcagtcaaaaatcaagtatgactggtatcaaacggaatctcaagtaatcattacacttatgatcaagaatattcagaagaatgatgtaaatatggaattttcagaaaaagagttgtctgctttggtgaaactcccttctggagaagattaccatatgaaactgaggttgcttcaccctatagtccctgaacagagcacatttaaagtactttcaacaaagattgaaattaaaatgaaaaagccagaggctgtgagatgggaaaagctagagggtcaaggagatgagcccacaccaaaacagttcacatcagatgtaaagaacctgtatccatcatcatctcattataccaggaactgggataaactggttggtgagatcaaagaggaagagaagaatgagaagctggagggtgatgcagcgttaaacaagttatttcagcagatctactcagatggttctgatgaagtgaagcgtgccatgaacaaatcatttatggagtctggtggtacagtcttgagtactaactggtctgatgtaggtaaaagaaaagttgaaatcaaccctcctgatgatatggaatggaaacagtactaaataaatgaatttggtatcacagagtacgtttgttcacgagtgcccattgtgtactttatcacattcttgaattttgaacaatatcttcttgaaagattaaacctctgcctctttgtgctctagaaatgattttcctgcaagtattctaaagagtgatgatcacatcttatcacttctgttcataaggatttcacacatcctgaaactgaatgaaatgtcatttgatactagatagatcagctctgtctagttatgggagtggagaaatctttaatggcatcttggtaattgtccttattttgatgctagtgttctgttaataatttattagtacctgg

SEQ ID NO: 4673 - DNA, 1398 bp, Cricetulus griseus
agcgaggacgcccccgccccctcccgccataggccgggcccccggcgccgcctcttccttgcggcctccggcccgcgtctgcttccggccctgttgcctggcccggccctgcggttccctcgggacgaagtcctgggccgcggcgccctggggagtttagaaacctgaggaagctcagacctggtggtgaagaggatgtggtccctggacccatcccagaaagaggtgctgagatttgcagtgagctgccgcatcctgactctaatgctacaggcactcttcaacatcatcatcccagatcaccacgcagatgccttctctcctccccgcctggcctcctcctgctctgtggatcagcttgtggaaggctctcctgggtggtctgtctagatgggatgcagaacacttcctgtttattgctgagcacggctacctttatgagcacaactttgccttcttccctggcttccccttggccctgctgatgggaactgaactgctgagacctttgcagggcctcttgagccagcgcagttgcctactggtctcagtagcacttctcaactttctgttctctgtgctggctgcagtcacacttcatgatttgggttgtctggtgttgggctgtccccgccaggtccttttatgcagccatgctcttctgcctcagccctgccaattgttttcttggcagctggttactcagaagtctttgtttgccttcctgacattcagtgccagtggggcagcgtggaggagggggccgtactatgaactcaggcaggtgccccaattttctactagtctacaccagtggctgtactggttgtgtgggcagcctggacatatgtgactacccacccttggctctgccttacacttggacttcgaagaagcaaggacagtaagaagaccctagagaagccccaccctggcttcctcagtccaaaggtgtttgtgtacctggtccacgctgcagggctgctgctctttggaagcctgtgcatgcatgttcaggttctcacacgattgttgtgctcttccactcctgttgtgtactggttcccagctcacttgcttcagaatcaagaaccactgttgagatctgtagacacagtacctgagaagcttcttgagaaaaactccccaccaggacagaaggcccccagaaactgtatcatgaaactcttgtacaactggagggcctgttctccagtcacaagatgcattcttggctacttcctgacttattggctcctgggactactcctccattgcaacttcctgccttggacttgatctggaatctcaaggtgtgggtgctgggaatcaaacctcaggacctctggaagagcagccagtgctcttaaccactgagccaactatccagactccctg

SEQ ID NO: 4674 - DNA, 1398 bp, Cricetulus griseus
gttcagcacctacttccagctcaagtcccacatgatccagcacaagaaggagcaggtgtacaagtgcgtggtcagaagctgtgcccagatgttccccaagctggacacctttctggagcacatcagaagccaccaggaggagctgagctaccgctgccatctctgtagcaaggacttcccctcattgttatgaccttggaagtgcaccagtactcccaccagtctcctgccgcagcacagccccaacgaaggacagcaccgtctacaagtgtgtcaagtgtgtcaataaatactccactcctgaggccttggaacaccatgttcagacagccactcacagcttcccctgtccacactgccagaaggtcttcccctcgtgagcgctacctacggcgtcacttacctacccatggcagtggtggccggttcaggtgccagatctgtaagaagttcttgcagcaagtccttcagccgccgggcccacctggctgagcaccagcgtgcacatacgggcaactacaagttccgctgcgcgggctgcgccaagggcttctcacgacacaaatacctcaaaggatcaccgctgccgcctgggccccacgaaggacaaggacttgcaagcccggagaccttcccggaggagagcagccccacgtggtggaggcagcatcgttggagtgcacaaggaggagagcccggtgcccgacccactggggctggaggagctgaaggccgcagggcctgcacccgaggctgctcctggcaagccacccttcgagcaagacgccgtgctgtccattgtggtgggtggggacccggagctggtggtgcccgggcacaccgagggtctgggctccaacctggcactggccgagctgcaggctggggctgagggagcgtgtgccatgcttgctgtcccggtctacatccaggcctcagaatgaccaggctggattttccggatgccctgtgatcagctgggggagccctgcagcactcacagggtctgaggcatgcaccgtagctccaggacatagcagtgctaagagagatggccagaaaatgaggtgcccagagactggctgatggaggcttgtacttgggcctcctaacacttcctgatggcgtcctcaaaggactgtggggtgagtatgtaagaggcactcagcctgggcttagagtgtagctgccagccagacctggcttcagatttaccagtgtgacctcgagcaaggcacttcacctctttctgctccatgttcctcacctgttcaacaggacttaatatagtactacctcttagagtgtcctgaggacaaagtatgttgaaattcgcaaaagggccgcgcacagtacccatggcttggaaagtgctcaataaatctcaataaatgtttt

SEQ ID NO: 4675 - DNA, 1398 bp, Cricetulus griseus
gaacggtcgtgtgctgcctgcctgcagtcgcttcggagtctccgcacggagccgcagtaggagaggcagtgtcttctctctctctctccgaactcttgtgagtatttttttgatcttcagctacattttcagctttgtgagaaaccttatcatcaaaggaaatggctagcaatgttaccaacaagacagatcctcgatccatgaattcccgtgtattcattggaaatctcaacacacttgtggtcaagaagtctgacgtggaagcaatcttttcaaagtatggcaaaattgtgggttgctctgtgcataagggctttgcctttgttcaatatgttaacgaaagaaatgcccgggctgctgtagctggagaagatggcagaatgattgctggccaggttttagatattaatctggctgcagagccaaaagtgaaccgaggaaaagcaggtgtcaaacgatctgcagcggagatgtacgggtcagtaccagaacacccttctccgtcccctctactcagttcctcatttgatttggactatgactttcagcgggattactatgacaggatgtacagttacccagcacgtgttcctcctcctcctcctattgctcgagctgtggtgccttctaaacgccagcgtgtttctggaaacacctctcgaaggggcaaaagtggatttaattcaaagagtggacagcggggatcatcatccaagtctggaaagttgaaaggagatgaccttcaggccattaagaaggagctgactcagataaaacaaaaagtggattctcttctggaaagcctagaaaaaattgaaaaggaacagagcaaacaagcagacttgtccttctcatccccagtagagatgaagaatgaaaagtctgaagaagaacagagcagtgcctctgtgaaaaaagatgagaccaatgtgaagatggagtctgaggcaggtgcagatgactctgctgaggagggtgacctgctggatgacgatgacaatgaagatcggggggatgaccagctggaattgatcaaggatgatgaaaaagaggctgaggaaggagaagatgacagagacagcgccaatggggaggatgactcttaagcacatagcggagtttagaaacttaccctgttattcatttacctaggcgcttgtgagagatgaaagtaacaccagatcctctcccctagtatcttcagcacattctcactgttcgcccactcctcatccttcctgtgttcattgattcataattgccttgcgcctagttccattttcacttcctttgatgctccttagtagttttgttaagtcttaccctgtaagttttgcttttaattttgatacctctttgacttaacaataaaaagatgtatggtttttatcaaaaaaa

SEQ ID NO: 4676 - DNA, 1398 bp, Cricetulus griseus
  modified_base (422)..(422): a, c, t, g, unknown or other
ccgggatcgccgtcaccactgtcgcctctgtgggtctatcatgtgcaagaaatgtatggagctcattggcctgcccttggcaaataagctcaccagtgccagcaaggactccctgagcacccataccagccccagccagtcacctaacagtgtccatggctcccgccggggcagcctcagtagcatgagcagtgtcagctcagtcctggacgagaaggaggatgaccgcattcgctgctgcatacactgcaaggacaagctgctcaagagagagcagcagatggacgagaaggagcacacccctgacatcgtgaagctctacgagaaactacgactttgcatggagaaagttgaccagaaagctcctgaatacatcaggatggcagcatctttaaaccctgcagagggtgctaccagccccngctgctgcagaggctttcctgggcccttcagctcctgtcaccagagaatacaatccttttgaggaagatgctgaggaagaggaggcaggagagtcaggggcagggaatcccttcactgacccaaacagtccagcacccaacccctttgatgaggatgaccatcccaggcctgccagcccacctgcccctggaaacccttttgaggagtgcccctgcaccaacccctttgaggtggacagtgacagtggcacagaggctgaggagcacattgaggaggagctgctcctgcagcagattgacaacatcaaggcttacatcttttgatgccaagcagtgtggtcgaatggacgaggttgaggtgctgactgagaaccttcgggagttgaagtgtacccctggctaagcagaagggggccctaactgacagcagtggtcagggaccaggcagtttattcccagcactcgggaggcagaggcacagatctctatgagttcaagaccagcctggtctacagagaaagttccaggataggcttcaaagctacacagagaaaccctgtctcaaaaaacaaacaaataaataaataaaggagcacatccttgacagggagttggcagctcctctagacagaggtcacgctcgtctgtggaagggcttctgactttgtccccttctaacacactaaggaactggagcctcactcacggcacttactgctcatcatgtctttgttgtcagatgctaaaatgtccttctaagtcatcatgagtcatgtggcatagctaggccattcgatccgcattgaggagttggtctctgtactaggtcagactggaggaacaggtgtgctaataatcatggtggctgtcagctcgatggtcattgatgtgcatgcactacactggggccttgtatcagaggcttttattaaaaataaaacaacatgtatgtgagtcttttattaaaaataacatg

SEQ ID NO: 4677 - DNA, 1397 bp, Cricetulus griseus
  modified_base (1190)..(1190): a, c, t, g, unknown or other
gattggccaacggctcctttcaaccctgcctcgttggtggccactggagaagcgcggggggctccccagacagccgtggggacaagttagagccagcactttaccccgggcctcgcgtgtagctttccctcccctgttgtaggtgccccagtgttcagaggggggtgcgggtgtgccctccttacatgttccaccgcccgggcaacccttcggtctcgtgttccatatcgctcttgcttcctgtactgtagtcaagtggagccactttgcatcatgtcccggtatagctaccaaagtctcctggactggctctatgggggtgtcgaccccagttttgcaggcaatgggggccccgactgtgctgccttcctgtcttggcagcagcggctgctggaaagtgtggtggtcctgaccctggccctgttggagatcctggtggccctgcggcacatcctgaggcaaacggaggacggtaggggtggccgtggccgacagccacagcaggtgacccagcggccagaggaaggcaaggagagcctgagcaagaatctgctcttagtagccctgtgcctgatcttcggggtagaggtgggctttaagttcgccaccaagaccgtcatctacctgctcaacccttgtcacctggtcaccatgatgcatatcttcctcctggcctgccctccatgtcccggagctatcgtcatcttcaagttgcagatgcacatgttgaatggagctcttctggcattgctgtttcctgtggtaaatacccggctgctcccctttgaactggagatttactacatccagcatgtgatgctctacgtggtccccatatacctgctttggaaaggaggtgcttataccccagagcccctcagcagtttccggtgggctcttctctcaacgggcctcatgttcttttatcacttcagcgtcctgcagatcctcggcctggtcaccgaagtgaatttgaacaacatgctgtgtccggccatctcagacccattctacggcccctggtatcgcatctgggcctcgggacaccagactctcatgaccatgacccacgggaagctggtcatcctgttctcatacatggctgggcccttgtgtaaatatctgctggatttgctccggcttccagccaagaaaatagactgaaggtgcttggttttttttttggttgngtttgttttgtttgttttgtttttgtttttgcaggtagtgactcgtcctgccactcctgcttagaggtccttcctgccaccagtatttggcttttgtgtatatgagacttggcccaacatcctttcagaagcctggcagcaagtacttctgtcatcctgtgatacactgtgggctttaggagccaccacatccacctctctaagtct

SEQ ID NO: 4678 - DNA, 1397 bp, Cricetulus griseus
ggtggagtggtggttctgactggttcgtgctgacacgcagctttgtggaatatgtggtgtatacagatgacccccttcgtggcccacgcttcgccagttctatacatacacactgcttccagccgagtccttcttccacacagtgctggagaatagcccggcctgtgagagccttgtggacaacaacttgcgtgtcaccaactggaaccgtaagctgggctgcaagtgccagtacaaacacatcgtggactggtgtggctgttccccaacgacttcaagccacaggacttcctgcgacttcagcaagtctccagacccaccttctttgcccggaagtttgagtcaactgtgaatcaggaagtcctggaaattttggacttccacctgtacggcagctacccacccagcacgccagccctcaaggcctactgggagaacacctatgacgtggctgatggccctattgatccaacctatgttgtggccacatcatatgacatcacggtagatgaggacactgaagtcacgcagtacaagcccccctgagccggccactgcggccaggagcctggactgttcgattgcttcagttctgggaacctctgggcgagattcgcttccttgtgctgccattgaccttcaaccgcaaactacctctcaggaaagatgatgccagctggctgcacgcgggaccaccccacaatgaatacatggaacagagtttccagggcctaagtggcatcctgaacctgcctcagccagaaaccgtggaggaggctgcccggaggcacacagagctcacgggtcctgcacttgaggcctggacagacagggagctgagcagtttctggtctgtgggaggactgtgtgccactggcccttctgcttgtccctccctggaactctgcagactgaccagttggagctctctgtctcctgaccctaaatcagagctgggacctgtcaaagctgatgggcgactcaggtagcagggccccagccagcacaacccggaggagccgggggattgcaccttacagacagtggagggacttctctcccacagacaagagccagaggcccaggcagtgtgcccgtttgagccatcaggaacctgcacccaggcaggaatagtgggtgtagtgctcactacttactgctaatggctctgcaagagatcagaggtccaccggaaccatgaggggcgcttcctctgcccctctctagtttgtacttttttaaaatttaaaacaagtggcaggaggaggaagatgtgcaatagggctccaagcagacctaagaagtgggctgtggccatggggagcaccgccaagcccatctgctcctgctctggagaggttttgtctgcctcaccctccagagcctccatccccagc

SEQ ID NO: 4679 - DNA, 1396 bp, Cricetulus griseus
aagagggagctctgggtttctattgtaaggttcacgaagagaagcggcgtcaccaagtactgtcagtcatgttttctttcaacatgtttgaccacccaattccccgggtcttccagaaccgcttctctacgcagtatcgctgcttctccgtgtctatgctagcagggcctaatgacaggtcagatgtggagaaaggagggaagataattatgccgccctctgccctcgatcaactcagccggctgaacattacctatcctatgctgtttaaattgaccaataagaactcagaccgaatgacacactgtggtgtactggaatttgttgctgatgaaggcatctgttacctcccccactggatgatgcagaatttgctgttggaagaagggggcctggttcaggtggagagcgtcaaccttcaagtggctacctactctaagttccagcctcagagcccggacttcctggatatcaccaaccctaaagcagtattagaaaatgcattgagaaactttgcctgtctgaccactggagatgtgattgctatcaactacaatgaaaagatctatgaactgcgggtgatggagaccaaacctgacaaggctgtgtccattattgaatgtgacatgaatgtagattttgatgctcccttgggctacaaagaaccagaaagaccagtgcagcatgaggagtcaatagagggagaagctgaccacagtggctatactggagaagtgggcttccgtgccttctcaggttctgggaatagactggatggaaagaagaaaggggttgagcccagtccctcccccatcaagcctggagacattaaaagagggattcctaactacgaatttaagcttggtaagatcactttcatcagaaattcacgcccattggtcaaaaaggttgaagaggatgaagctgggggcagattcgttgctttctcaggagaaggacagtcactgcggaagaagggaagaaagccctaagtccaaaactgttggctgactggaaaataaaagatccgtttgcaacatactggcttatggttactggctttgacaagttcagagaatgctctcttatttatggtttgtttagttacctaaggactatcaagcttgttgtaggtgcaaaacagcagaactggagcttgtgcgcgtaacctggggaagagattttcaagtactaggacggagctgaagcctcgtgaatattaagcatgccacataactctgccactgaggttcacccacaccccattttcttactgttttattgtcctcagatctgcgctttgtatgatgtaagatcttttgacatgctgatcattatttaaaattgttccttgagaataattcttattcaaaaaattaaataaaactgattaaaa

SEQ ID NO: 4680 - DNA, 1396 bp, Cricetulus griseus
  modified_base (44)..(44): a, c, t, g, unknown or other
gccagaaagtccaggtggctcctaccgcttcagaagggcctccnatctgtgccttgtcttttctgtgaggaacattttcccgtggctgaacaagacaaacttttgaagcacatgattattgagcataagattgtcatagctgatgtgaagctggttgcagatttccaaaggtacattttatattggaggaaaaggttcactgaacagcccatcacagatttttgcagtgtgataagaatcaattccacagctccatttgaagaacaggacaactattttttgttatgtgatgtgttaccagaagatagaatcctcagagaagagcttcaaaaacagagactgaaagaaattctggatcagcaacagcgagagcgaaatgatacgagctttcatggtgtgtgtatgttttgcagtgaggaattccgtggaaacagatccgttctgttgaaccacatggccagagaacatgctttcaatattggtttgccagacaacattgtaaactgcactgaattcctatgcacattacagaagaaactggacaatttacagtgtttgtactgtgagaagaccttcagagacaaaaacacacttaaagatcacatgaggaaaaaacagcatcgtaggatcaacccaaagaacagagactatgaccgattttatgtcatcaattacttggaactcgggaaatcatgggaagaggtgcaattggaagatgatcgcgagttgctgggccttccagaagatgactggtctgactggcaagaataccctgtctgtgctgtctgtctgttttgtgaaaagcaagaagaaacaatagataaattgtatgtgcacatgaaggacacacatgagtttgatctcctcagaataaagtcagagctcaggttaaatttctatcagcaagtgaagctggtcaattttattcggagacaagttcaccagtgcaggtgctacggttgccatgtgaagttcaaatccaaaacagacttaagggctcacatggaagaagctaaacacacctcactacttcctgacagaaagacctgggaccaactggagtattattttcccacctatgagaatgacactctcctgtgtacactgtctgacagtgaaagtgacctgacagctcaagagcacaatgaaaatgtccctgtcatcagtgaagatacatccaaactgtgtgctttgaaacgaagcagtgtcttgaaccaactgctactccaggaacgcctagaaaactaggagagactgctgcagattctgttgcatggttttctccatgagacaaataggaaagaagagctcagatttgattgtcagcaaagtattattcactggagaaatcatgcttgttcttaaatgaaacttttttcaaggaataaagaagaaa

SEQ ID NO: 4681 - DNA, 1396 bp, Cricetulus griseus
tgtccacgtcgcctgtgcgcatgcacagtttggggaccccgacccatcgaagactctcgctgtgaggtgaggttctctgaagagggatgtgcaaagtccctgctctggcttctaccccctcaacgacttcgcaggacagcgggggcctaggccgtcctgcgcgtgattctggaagccggggcctcgctcctccttggggtggggcttcctcttcaccgacggacttaagccgaggcctagcgcctcagtactggagtgcagagctcaattctgagcacattgtcttctccacggcctgcgctcactgccagggggacgatggcttcctgtgtcctcctacacactggacagaagatgcctctgattggtctggggacatggaagagtaaccctggccaggtgaaagcagccattaaatatgcccttagtgtaggctaccgccacattgattgtgctgctgtctatggcaacgagattgaaattggagaggccctgaaggaaaatgtgggaccaggcaaggcagtgcctcgagaggagctgtttgtgacatccaagctgtggaacactaagcaccaccctgaggatgtagaagctgccctccggaagacactggctgatctccagctggagtatctggacctctacttgatgcactggccttatgcctttgagaggggagacaatccatttcccaagaatgacgatggaaccatccgctatgactcaacccactacaaggagacctggaaggctctggaggcactggtggcaaaggggctggtgaaagccttgggcttgtccaacttcaacagtcgacagattgatgatatcctcagtgtggcctctgtgcgcccagctgtcttgcaggtggaatgccatccatacctggctcaaaatgagctcattgctcattgtcaagcacgaggcttggaggtgactgcttatagccccttgggctcctcagatcgtgcgtggcgccatcctgatgagccagtcttgcttgaggaaccagtggtcttggcactagctgagaagcatggccgatctccagctcagatcttgctcagatggcaggttcagcggaaagtagtctgtatccccaaaagcatcactccttctcgtatccttcagaacatccaggtttttgatttcacctttagcccggaggaaatgaagcaattagatgctctgaacaaacattggcggtatattgtgcccatgattacggtggatgggaagagtgtccccagagatgctggacaccctctgtatccctataatgacccatactgaggccatagtttctcagcttcccttttgcttgcctgcatagtgttgcctgctacccttagaaaaaagagtcaataaagccattaaaatagtaaaaaaaaaaaaa

SEQ ID NO: 4682 - DNA, 1396 bp, Cricetulus griseus
cagccccagccccagccccagcctcagactccagcacctcaacagacttggtctcccttgagtgaaggcctcctcaagcccctgccgagctggagccagagccggagctagaggggctactggctcccgtgctggaggctggggaccccgatgaaggcgccgccgtcactcggcctctcagcccgaccaggctgcagccagcgctgccccccgaagcccagacggtgcccgagctggaggaggtggcccgagtgctggcagagataccccggcccctcaaacgcagaggctccatggagcagagccccgccgcggccctgccccccacccacaagaaacagtaccagctgatcatcaatagacttttccatcggcatggcggcccggggcctggagggcccgagccagagctgtccaccatcacagagggatctgaagccagggcagggccccccgcccccgccccaccagctcccatcccacccccagccccaccccagagcagtgttcccgagcagccacagagcatggaaatgcgttcggtactgcgcaaagtggggtccccgcgcaaggcccggcgtgctcgcctcaaccccctggtgctgctgttggacgcagcactgactggcgagctggacgtggtacagcaggcggtgaaggagatgaatgacccaagccagcccaatgaggagggcatcaccgctctgcacaatgccatctgtggcgccaactaccccattgtggacttcctcatcgccgcgggcgccaatgtcaactcccctgacagccacggctggacaccactgcattgcgcggcttcctgcaacgacacagccatctgcaccgcactggtgcagcacggtgcggccatctttgccaccacactcagcgacggggccactgccattgaaaagtgcgacccttaccgagagggctatgcggactgtgccacctatctggcagacgtggagcaaagcatggggctgatgcacagtgggattgtgtatgcgctctgggactacagtgcggaattcggggatgagctgtccttccgggagggcgagtccgtcaccgtgcttcggagggacgggccagaggagaccgactggtggtgggccgcactacatggccaggagggctatgtcccgcgcaactactttgggctcttccccagagtgaaatctcagaggagcaagatctagcagctatgaaggaagatcgtcaaggacaaaagagcaaacccgcctgccttccacccggaccttcccagtgcagctactgctgagtttacctgcgccctgctctccagagggcccaaccaagtgccttcacacccatgtggcttaatgtttgcaatgacaccgggaactgtttcctttatgaataaaggtagttt

SEQ ID NO: 4683 - DNA, 1395 bp, Cricetulus griseus
gtgactggccgggctgcacggaggccggcttggtcactatggaggagataggcattttggtggagaaggttcaggatgagatcccagcactgtctgtgtctcggccccagaccggcctgtcctttctggggcctgaacctgaggacctggaggacctgtacagccgctacaagaaactgcagcaagagctggagttcctggaggtccaggaggagtatatcaaagatgagcagaagaatctgaagaaagaattcctccatgcacaggaggaagtgaagcgaatccagagcattccattggtcattggtcagtttttggaggctgtggatcaaaacacagccattgtgggctctaccacaggttctaactattacgtgcgcatcctaagtaccattgaccgggaactgctcaagcccaatgcctcggtggccctgcacaaacacagcaacgcgctggtggacgtgctgccccctgaggccgacagcagcatcatgatgctcacctcagaccagaagccagatgtgatgtacgcggatatcggaggcatggacatccagaagcaggaagtgcgggaggcggtggagctcccactcacacacttcgagctctacaagcagattggcatcgatcctccccggggcgtcctcatgtatggcccacctggctgtgggaagacaatgctggcaaaggctgtggcacaccatacgacagctgcgtttatccgtgtggtgggctcagagtttgtacagaagtacctgggcgagggcccccgaatggtccgggacgtgttccgcctggccaaggagaatgcacctgccatcatcttcatagatgaaattgatgccattgccaccaagagatttgatgcccagacgggagccgacagggaggttcagaggatcctgctggagctgctgaaccaaatggatggatttgaccaaaacgtcaacgtgaaggtaatcatggccacaaacagagcagacaccttggatccagctctactgcggccaggacgcctggaccgcaagattgaattcccactccctgaccgtcgccagaagaggctgattttctctaccatcaccagcaagatgaacctctctgaggaggtagacctggaagactatgtggcccggccagataagatttcaggggctgacatcaactccatctgtcaggagagtggaatgttggctgtccgtgagaaccgctacattgtcctggccaaggacttcgagaaagcctacaagaccgtgatcaagaaagatgagcaggaacatgagttttacaagtgaccccctccccacacttccccaggcacctgtcccaaaagctagttttgtctttgcccatgattggtttagtcaataaatggacgtgattggatctatttaa

SEQ ID NO: 4684 - DNA, 1395 bp, Cricetulus griseus
ctctcgcttcccggcttctccagtcacggttcccggagccggtaccgagcccggggccgcggggtgccatgctgcccgagtggcggcgttgaagcatggcgacgccgatccctcctccttccccacggcacctgcggctactgcggctgctgctctccggcctcatcctcggagcggctctgaacggtgccaccgcccgccgcccggatgctgccacctgtcctggaagcctggattgtgccctgaagaggcgggccagatgcccaccaggcgcacacacgtgtggaccatgccttcagtccttccaagagaaccagcaagggttttgtgtgcccaggatgcaccagtcttctggggaggacttgccccagcccagactggaagaggagatcgattctctggcccaggaactggcactgaaggagaaggaggctgggcacgcaaggcttacagcaccgcccttgcctgaggctgcacagaagctcctggagcctgcagctaccttgggattctcacagtggggtcaaggactggagcccagcctcccctccactcacggaacctccacgcccacgccacgctccttagggccccctgtatcttctgggcctgtgcacatgtccccactggagccccggggtgggcatggaaatggcctcacccttgtgctgatcctggctttctgcttggcaagcacagccgccctggctgtggcagccctctgctggtgtagactacagagggagatccgcctgactcagaaggccgactatgctgccacagccaaggcgcccacttcatccacaacaccgcgaatctcgcctggggatcagcggctggcgcacagcgctgagatgtatcactaccagcaccagagacagcagatgctgtgcctggagcggcataaggaacctccaaaggaactggagtcaccctcctctgatgaggagaatgaagatggtgacttcacggtatatgagtgcccaggcctggcaccgacaggggagatggaggtgcgcaacccactgtttgaccattcctcgctgtcggcaccgatgccagggccccattcctcacctccgctgcagtgactcctagactgatgcccacctgcctgcagcccacagcccaccggtgggagaagcaagtcctggtgttccctattggaaagaacagcattgtgaccctctgcatgcttttggcaggagggaggcaccagcccctgggctcccttgccagggagaatctccacctcatgtgggagacctagcctctgcttgcacagtctctggtctgaaccctcacactggagggaccagtccagtgatcctagagcccaggcatggatagagaggtttctggagataaaagccaattaaagtctttttcaaacct

SEQ ID NO: 4685 - DNA, 1394 bp, Cricetulus griseus
tctgaagccgtctgtacagagcctcaattcagttcctgggaagacaagaaaataaaaagacacttctttaaaaatggcgatggtatcagaattcctcaagcaggcctggtttattgacaaccaagaacaggaatatgttcaagctgtaaaatcatccaaaggtggtcctgggtctgccgtgagtccctacccatccttcaatccatcctcagatgttgctgccttacacaaagctatcatggttaaaggtgtggatgaagcaaccattattgacattcttaccaagagaaccaatgctcagcgccagcagatcaaggcagcatacttgcaggaaactggaaagcccctggatgaaatgctgagaaaagcccttacaggccatctggaagaggttgttttggctctgctaaaaactccagcccagtttgatgcagatgaactccgtgcggccatgaaggggcttggaacagatgaagacactctcattgagattttggtatcaagaaataacagagaaatcagagaaatcaacagagtctacagagaagagctaaagagagatctggccaaagacatcacttcggatacttctggagacttccggaaggccttgctttctcttgccaagggtgaccgctgtgaggatttgagtgtgaatcaagatttggctgacacagatgccagggctttgtatgaggctggagagaggagaaaggggacagatacgaatgtgttcattacaattctgactactagaagcaaatctcatcttcgcaaagtatttcagaactacagaaagtacagtgaacatgacatgaacaaagttctggatctggaaatgaagggtgacatcgagaagtgcctcactgcccttgtgaaatgttccaccagcaccccagcttcctttgctgagaaactttatgaagccatgaagggagctggaactcgccataaggcattgatcaggattatggtctcccgttctgaaatcgacatgaatgaaatcaaagcattttacctgaagaagtatggaatctctctttgccaagccatcctggatgaaaccaaaggagactatgaaaagatcttggtggctctgtgtgatggcaactagatgtccccgctgctcagaagcactgtgatgagagcatctcttagctgttgctttcctctatcacacaagcttaagtaagagggttgctttagcagataacaagctaattacccactttgaataatataacatatgaataagttttacatcatacctctgtacaatagagaaataattgttttattatgttttccccagattataaatccctataagcaagttactctgttagcattcctgagaaacaagtttatgtagactaaaataaaacaattttata

SEQ ID NO: 4686 - DNA, 1394 bp, Cricetulus griseus
atacaccgagacatcaaggagccaacatcctcatcaatgactctggggaggttaagctggctgactttgggatctcagcccagattggagcgacactggccaggcgcctctccttcattgggacaccatactggatggctccagaggtggcagctgtggacatgaagggtggatacaatgagctgtgtgacatctggtctcttggcatcacagccattgaactggctgagctccaaccacccctctttgacgtgcaccctctcagggttctcttcctcatgacaaagagtggctaccagcctcctcggctaaaggaaaagatccacagcacagctgcctggacacatccctctactaaagaccaacatctgctcctgggtgccgaggaaggcattttcatactgaaccggaatgatcaggacgccacgctggagatgctcttccctggccggacaacctgggtgtattgcatcaacaaccttctcatgtctctctcagggaacgaccccccacctgtactctcatagcatcctaggcctcctggagaggaaggagatccggacaggaagccccattgctcacatcagtcctcaccgctttctggcaagaaagaacatggtctccactaaggtccaggacaccaaaggctgccgagcctgctgtgtggccgagagtgccggctctgggggcccattcctgtgtggggcattggagacttccgtggtcctgctgcagtggtaccagccaatgaacaaattcctgcttgtccggcaggtgctcttcccgctgcccacgccgctgccagtgttcgagctgctgatggcgccgggctccgagctgccggccgtgtgcatcggcgtgagccccgggcacgcggcgaggtcggtgctcttccacaccgtgcgcttcggtgccctgtcctgctggctggacgactccagcacgggccacaagggaccagtgcaggtgacccaagttaaggaagacacggtgatggtgttgatggacggctctctgaagctagtgaccccggagggggccccagctcccgggcttcgaaaccctgagatccccatgaccgaagcggtggaggctgtggctatggttggagacaaactccaggccttctggaagcacggagttcaagtgtgggctccaggctcggagcagctgctgcaggagctgagagaccccacacttaccttccgtctgctcggctcccccaggcctgttgtggtggagacacggccctcggatcgaccccaccgcccctagccaacctctatatccaggaatgagcctctgagagggcatgagacgtggaccctgcagactctaacagacaccagtggtcacgacatgtccttatcttccaataaacacgacctcagtct

SEQ ID NO: 4687 - DNA, 1394 bp, Cricetulus griseus
gtttctcgcgcgcttggcgctgcggcgagtgcggtcggcgactgtttgcgcaagtctgcttgccggggacagtgctttgtggccgaaagcgatcgcttccttgctacaaagactccactggcgttcctgcttcggcggctgtccctgccttagatagccactgtaccccgacgctgcagatagccttccccagaactgctgcaggctttgagcgcttggcaggagccatgcctaggggacggaagagtcggcgccgccgaaacgcaaaggctgcagaggagaatcgcaacaatcgcaagatacaggcctcagaggcctctaagaccccaatggcggcttctgtggtcccgagcacacccgaagactgcctgagcggccctgaggaagacacaagcactccggagaaggcctccactacccctgcagaggcttcgagcactgccctagtgcaaaagcccattacccggagcagttttcagggcaccaagaaaagtctcctaatgtccattttagccctcatcttcatcatgggcaacagcgccaaggaggctctggtgtggaaagtgctggggaagttagggatgcagcctgggaggcagcacagcatctttggagatccgaagaaggtcgttacagaagagtttgttcgcagagggtatctcctttataagccagtgccccgcagcagtccggtggagtacgagttcttctggggccctcgagcacacgtggaatcgagcaagctgaaagtcatgcattttgtggcaagagttcggaaccgatgctccaaagactggccatgtaactatgactgggattcagatgatgatgcagaggttgaggctatactgaattcaggtgctaggggttattccactccatagatagatcccagacagacccttaggagtggaaaggagaatccaaagtactctgtgcagtagataggcagagtcctgaaatcaaaataatgtggagggtggggagggcactgtatttggtatttgtgatcagtgctaattgttaaactgagaaatagtgtttgcattagatattgtaatcttgtgttcattttataacactgttgattaagaatcacaatatgtttaaatatggacttgagaagatgctgatgttatttttcctgtcattgacatttgctacaacagctgtgctaaccttattaaatgaagaccttctgtcatgttgtaggatgtacaggatttgaaccacggaaaggagctgttctttgaaagtttggaatacccagtacaatgtgagtgagggaaaataacagacttgttttgtcttacctttgtgtctgatgtcttgtaaagaaacacatctgtgaatatgctcactgcgcaagtagcataaaataaaagcatagtaaa

SEQ ID NO: 4688 - DNA, 1394 bp, Cricetulus griseus
aagggagctagtggtttaggtagcagtctccatcatgcttaaggctgtgattctcatcggaggccctcaaaaggggactcgcttcaggcctttgtcttttgaggtgcccaaaccactgtttcctgtggcaggcgtccctatgatccagcaccatatagaggcctgtgccccaggtccctgggatgcaggaggttctgctcattggcttctaccagcctgatgaggccctcacccagttcctagaagctgcccagcaggagtttaaccttccagtcaggtacctgcaggagtttgctccccttggcacagggggtggtctctaccattttcgggaccagatcctggctgggggcgcctgaggcattcttcgtgctcaatgctgacgtctgctctgacttccccttgaatgctatgttggatgctcacagacgccagcgtcaccctttcttactcctcggcaccacagctaacaggacacaatccctcaactacggctgcatcgttgagaatccacagacacatgaggtcctgcactatgtggagaaacccagcacatttatcagtgacatcatcaactgtggcatctaccttttctccccagaagccctgaagcctcttcgggatgttttccagcgaaatcagcaggataggcaactagaggaatctccaggctcatggcctggggcagggaccatccgactggagcaggatgtattctcagccctggctgggcagggccaaatctatgtgcacctcaccgatggtatctggagccagatcaagtctgcaggctcagccctctatgcctcccgcctctatctgggccgataccagatcactcacccagaacggctggccaagcacactccagggggcccacgaatcagaggaaacgtttacatccatccaactgctaaagtggccccatcagctgtgctgggccccaatgtctccattgggaagggggtgactttgggcgagggtgtgcgtctgcgagagagcattgtcctccacggagccactttgcaggagcacacctgtgtccttcacagcatcgtgggctggggaagcactgtggggcgctgggcccgtgtagaggggacgcccaatgaccccaatcccaatgacccccgagctcgcatggacagtgagagcctcttcaaggatggaaagctacttcctgccataactatcctgggctgccgtgtccggatccctgctgaggtgctcatcttaaactcgattgttctgccacacaaggagctgagtcgaagcttcaccaaccaaatcatcctgtgagggtgctacataaaggcccccaggactcctgcccacactccttagggctgctgcctgcctggccatctctgtccagaaaggatctgaggaagcca

SEQ ID NO: 4689 - DNA, 1394 bp, Cricetulus griseus
caataaataaatgtgacaaagcagatgctgatcctgaaagagtgaagaaagagcttctggcttatgatgtggtgtgtgaagattatggtggcgatgttcaagcagtgcatgtctctgcacttacgggagataatctgactgctttggcagaagcaacaattgctctctcggaaatgttggaactgaaagcagatcctacaggtccagtggaaggaacagtaatagaggctttcaccgacaaaggaagaggtcctgttacaacagctataattcaaaagaggaactctaagaaaaggctcaattctagttgctgggaagagttgggcaaaagttcgactaatgtttgatgaaaatggaaaaacacttaatgaggcctatcccagcatgccagtgggaatcattggctggagagacctcccttctgcaggagatgaaattcttgaagtagaatctgagccaagggccgagaagttgttgagtggaggaagattgagcagaaagaggaaaaaggcaaagatgacttgaaaataattgaagagcagagaaaggagcaccaagaagcacatcggaaagcccgtgagaagtatggcagtctgcattggaggaagaggtcatacatgaagtatcttgaaagaaaagaacaaagacccttaaagcccaaggaaaaggcagaaaaggactcaaatgtgctttctataatcattaaaggtgacgttgatgggtctgtggaagccatcttgaaccttctggatacctatgatgcttcccacgaatgtgaactagaattagtacattttggattaggtgacattagtgaaaatgatgtcaactttgctgagacatttgatggtgttatttatggctttaatgtggatgcaggcaaggctatccagcaatcagctgcacaaaagggagttaagattaaacttcacaaaatcatctaccatcttattgaagatttgcaggaggaactaagcagcagattgccccacaggctggaggaattcccaataggtgaggcttgcatactagctaccttctctgtaacagaagggaagagaaaagttcctgtggctggctgcagagttcaaaagggcagctagaaaacagaagaagtttaaattaatccgaaatggacacgtgatttggaagggctcattaacctcactgaaacaccataaagatgatgtttcagtcatcaaaactggaatggactgtggtcttattttagatgaagaaaagtagaatttaaagtgggagatgaagttgtttgttacgaagaaaatgaagttccagccaagacttcttgggatccaggattttaaaagtacaataaaaatgataaatgggtgtggtggtgcacgcctctctagaggtccagcacttgggtggca

SEQ ID NO: 4690 - DNA, 1394 bp, Cricetulus griseus
cgcccgggcctcggctccgctcccgaccggctcctgctgctgcgtggtctcggtgcggggagcggcccaggctcggcggctgctgcgcatgtactcgggccgccggtggctggactctcagggcacctggcttccggggcgttgtgtcatccgcaggctccggctgcccaccgaggcttcggatctaggtccctttccctttaagacccggaaggaattacagagtcggaaggcagagaatgaagcttttaccctagccgacctaagacagctaccggagctgaatccaccagtgctgatgcccaatggcaatgtgggcacgcccctgcgggtcttcctggacctgatccgggcctgccgtctgccacctcgaatcatcactcagctgcagctccagttccccaagacaggctcctcccggcgctatggcaatgtgcccttcgagtacgaggactcggagaccgtggagcaggaagagcgtgtgtacactgccgagggagaggaaatcccccaggaaacccgcttggaagatccaccagccagcctcttggatgagcctgaggatgaagggcagcaggaagaggaagaggagtctcactctgatgacgacgatgaccgatgtgaggagtgggaacgccatgaagcactgcatgaggacgtgaccaggcagggagcggacttccgagcggctcttcgaggaggagattgagctcaagtgggagaagggtggctcctggcctggtgttctacaccgacgctcagttctggcaggaggaggaaggagattttgatgagcagacagccgatgactgggacgtggacatgagtgtctactacgacaaagatggtggagacaaagatgcccgtgactctgtccagatgcgcttggagcagagactccgtgatggccaggaagatggctctgtgacaggacgccaagtgggcactttgagcgccacaccaaggggcattggtcggaaggtgatggagcgccagggctgggctgaaggccagggcctgggtagtaggtgctccggggtgcctgaagccctggatggtgatggccagcaccccagatgcaagcgtggattggggtaccatggagagaaactacagccatttgggcagctgaagaggccccgtggcactggcttggggctcatttccacagtctacgatgagcctctgccccaggacaaaatggagtccttgctccgacgccagccacccaccagcatcaagtttcggacagatacgacttttgtgaggggttccagctgtgcctcggagagaccctcggagcccgagtgaggctctgtccttggtcagggtcactcagctgcaggaaacagcctgggtcttgccttgtggacctctgaagcagccaagagcct

SEQ ID NO: 4691 - DNA, 1393 bp, Cricetulus griseus
aaaggatttaaatcatggcaaatatgaacgcacaatggtgtcacagcaggaaaagggtactgaaggagcacaagttggtcccttgatacctggtgctggagaaatcatcaatgtggacaacattataaagtttgatcatgtacctttagcaacaccaaatggagatatcttgatccgagatcttagttttgaagttcgatctggggccaatgttctcatttgtggtccaaatggctgtggaaagagttccctcttcagagttcttggtgaattatggcctctttttggaggacaacttactaaacctgagagaggaaagttattttatgttcccagcgaccctatatgaccttgggaacactgagagaccaagtgatatatccagataggaaaagaggatcagaagaagaagggatatctgaccaaatgaaacaagaatgcatttgttaatgcaaagtgcattgtaaaataaagttaagcttgtttttttaaaaaaacaaagcaacaaattgactagatacaggataattgaaacatgttaaaacacttaatattgtataggatattgctaattgtgtatatgttggtttaattattaattatgtactaagaatgtccttattcttgtggttaaaaaacctgcctgaattaaattgggcttaaatcagtgtaacctgattcatcctgggatgtaaaccatttgaagtcagcttaatttgacttttatggctctatcttttcttttaatgaagaaccctatttaaaactggggtcattagctgctctattctaacaaagtcttgagtttcatttctatgtgccccatggtaatgggaaccaaccaatcacaatgtattattaaaatgtataccatcggtacaggatagcatttattacacagtggcagatttctttagctgctacatttatactcattccttcactacatgccttgagctatttgactccaagagagccatttggattttctttagctaaataataagtgtaaccctctcggtctcttagactgagttgtttcgaaggtttcttgtggtgtacaacagtgtgtgcatttgtgcttacagattgtggttactacacactacactcagtcttagcaatgtttggaatatctaggcatgatcctcttgtgtcaaggtcttacaagaaatttagatttttgtgacaagaattggacaggttcatcagaaatgtggttgtataatggtgaacaccttatgactgtagaggcactacatgaagtaacacactgagcacgaaatgttactgctgtccttgactgtagttttatgtttttaaaaatgctaaacattatcatgcacttgggtgaatgacatttcctggaacggtctctgactcctgtacaact

SEQ ID NO: 4692 - DNA, 1393 bp, Cricetulus griseus
tttctttccttttcttttcttttgtatattggaggacgcggcttcatccctgtccaggatggaagttttgaagtcttgtgtacttacaagaagtgtgtgtgctgccgccgcctgcttctggagaagcaaagctatcccaaagcggccaattagagagattagcactacgcctgcaaggagcactgtcatgcccgcttgggtgatagataaatatggaaagaatgaagttcttcgattcaatcagaacatgatgttaccgatcatacactatccaaacgaagtcattataaaagtccatgctgccagtgtaaatcctatagatgttaatatgagaagtggttatggagcaacagctttaaatatgaagcgtgaccctttgcatatgagaaccaaaggagaagagtttccgctgactctgggtcgggatgtgtctggtgtggtgatggagtgtgggctggatgtaaagtatttccagcctggagatgaggtttgggctgcagttcctccttggaaacaaggcactctctcagaattcgttgtggtcagtgggaatgaggtctcgtataagcccaaatcactcactcatactcaagctgcctctttgccgtatgtggctctcacagcctggtctgccattaacaaggttggtggcctgaatgccaagaattgcatgggaaaacgtgctttaatcttgggtgcctcaggtggagttggtacttttgcgatacagataatgaaagcatggggtgctcatgtgacagcagtttgctctcaggatgccagtaaacttgtaaggaagcttggagcagatgaagtcgttgattacacgtcaggaagtgtggaagagcaattgaaatccttaaaactgtttgactttatccttgataatgttggtggatctactgaaacatgggctctaaattttctcaagaaatggtcaggagccacctatgtgactctggtgactcctttcctcctgaacatggaccaactgggcattgctgatggcatgttgcagacaggagtcaccatgggaaccaaaacattgaagcatttctggcaaggagtccattaccgctgggctttcttcatggccagtggtccatatctagatgaaatttgcgaactggtggatgaaggaaagattcggccagttattgaacaaacctttcccttttctgaagtcccagaagccttcctgaaggtggaaagaggccacgcccgagggaagactgtggttaaagtcatttaaatgaatatgtgcgtgccagctgccagctgctttcctcttgctgagtgcctgtgatccagacatctagccctctagatatttttccaagttagattcaaaatttcatgatgtgtttataaacctagatgtggactggtgaga

SEQ ID NO: 4693 - DNA, 1393 bp, Cricetulus griseus
ccagcccttgccgtggagccccctgccgggtcgccttaggagccacaaagtggatcatcctacaacctgctgacatgatgctggctgcccgtctctccagacccctgtcacaactcccaggaaaaactctaagtgtctgtagtagagagaatggggcaagacacacactgttttacccagcatccttcaccgcatccatccagcggacttatgccagtgaggcaaatgaggctagcggcaaagctgtcctggtcacaggctgtgactctggatttgggttctctttggctaaacatctacactcaaaaggtttccttgtatttgctggatgcttaatgaaggacaaaggtgatgctggggtcaaggagctggacagcttaaagagtgaccgactgagaaccatccagctcaatgtctgcaatgatgaagagatagagaaagcggtggagactgtccgctccagtctggaggaccctgagaagggaatgtggggcctggttaacaatgcgggcatttcaacgtttggggaggtggagttcaccagcatggcgacatataaggaagtggcagaagtgaacctctggggcacagtgcgcacaacgaaatccttcctcccccttctccggagagccaaaggccgagttgttaacatcagcagtatgctgggccgaatggccaacccagcccgctcgccgtattgcatcaccaagtttggggtagaggctttctccgactgcctacgctatgagatgcaccctctgggtgtgaaggtcagtgtggtggagcccggcaatttcattgctgccaccagtctctatagccccgagcgaatccaggccattgccaagaagatgtgggatgagcttcctgaggtcgtccgcaaagactatggcaagaagtactttgatgagaagatcgccaagatggagacctactgcaacagtggctccacagacacgtcctccgtcatcgacgctgtcacacacgccctgaccgctgccaccccctatacccgctaccatcccatggactactactggtggctgcgaatgcagatcatgacccactttccaggggccatctccgacatgatctacatacactgaagagctacagaggtccccgtgaccagggttactgatgggagggagaaggctgaggggagggagtttgtacagttaccttctgattacacttgtggattatccactgtcttaggaagacctgttttagcattaaccttgtctacgtgaatggtgaatggcctgggccttcacagatgtgggggcacaggcgggtggccctaagcctcaggggcaacatggtgcttctatctaccccaagctgattttatacaaagatttgtgggaaatatctttataattaaaaacag

SEQ ID NO: 4694 - DNA, 1393 bp, Cricetulus griseus
cctatcaagcctttccccccatgcccaacccaccccggcccccacccggctacaggaccgactgctgaagaagttgggccagcatgcccatcccttttttttcacattaccccagaatttgccttgctctgtcacactgcagccaggaccagaggacacagggaaggcctgtggagtcgactttgagattcgtgccttctgtgccaaatctctagaagaaaaaaagccaacaaaaaggaactcggtgcgacttatcatcagaaaggtacagtttgctccagagatacctggcccccagccctcagcagaaaccacacgccacttcctcatgtctgaccggaggtccctgcacctagaggcttcccgggacaaagagctgtattaccacggggagccactcaatgtcaacgtccatgtcaccaacaactcggccaagaccgtcaagaagattagagtctctgtgagacagtatgccgacatttgcctcttcagcaccgcgcagtacaagtgtcctgtggctcagctttgtagcaagatgaccaggtatctcccagttccacgttctgcaaggtgtacaccataaccccactgctcagtgacaaccgggagaagcgtggccttgccctggacgggcagctcaagcatgaagacaccaacctggcttctagcaccattgtgaaagagggagccaaacaaggaggttctgggaatcctggtatcctacagggtcaaggtgaagctggtggtgtctcgaggcggggatgtctccgtggagctaccgttcgttctcatgcaccccaagcctcatgaccatatcacccttcccagaccccagtcagtcccccaggaaacagatgtccctgtggataccaacctcatcgaattcgataccaactacgccacagatgacgacattgtgtttgaggactttgcccggcttcggctgaaggggatgaaggatgacgactgtgacgaccaattctgctaggaaaaggggctgggagaggtaggggcaggaccaagatcccactgtcacttcgggtgggagggtcccagcctctcctccttcccctccacccaagatacgcactggacccatcacttgttgaaagtgggcattaatcttttgacttcagctctgctgccctagccctgctccctagggaggcatgctgtgggcacacctaaagttttgggaaggggacactgaaagtgaggagcgactgtagagaaaaggagtagaaagaactcccacacttggcctcataccaacctgccacccaagtcaccacttctgcctcccattccttgaagatgaaactgtgggtgggtggggagggcaaggccatttctttgtttcagagcatagggaagaaataaacctttgaatagg

SEQ ID NO: 4695 - DNA, 1393 bp, Cricetulus griseus
aagatggctgtcctcgcgcctctgattgctctggtgtactcggtgccgcggctttctcgatggctggctcgaccttattgccttctgtctgccctgctctccgctgctttcctcctcgtgaggaaactgccgccgatttgcaacggtctccccacgcagcgcgaagatggtaacccgtgtgactttgactggagagaagtggagatcctgatgttcctcagtgccattgtgatgatgaagaaccgcagatccatcaccgtggagcaacatgtaggcaacatcttcatgtttagtaaagtggccaatgcaattcttttcttccgcctggatattcgaatgggtctactgtacctcacactctgcatagtgttcctgatgacctgcaagcccccctgtacatgggtcctgagtacatcaagtatttcagtgataaaaccattgaagaagaactggagcgggacaagagggtcacttggattgtggagttctttgccaactggtctaatgattgtcagtcatttgctcccatctatgctgacctgtccctcaagtacaactgtacagggctgaattttgggaaggtagatgttggacgctatactgatgttggcacacggtacaaagtgagcacgtcaccactcaccaaacaactccctaccctgatcctgttccaaggtggcaaggaggtaattcgtcggccacagatagacaagaaaggacgagctgtctcttggaccttttctgaggagaatgtgattcgagaattcaatttgaatgagctataccaacgagccaaaaagatgtcaaagggtggagacaatgtgtcggaagagaagcctgtggtctctactcccactgctgtgccagatggggaaaacaagaaggacaaataggatcctgcattgttcttgcttcttctgtcaatttctggcacctctgaggcccaattccagcagtaaccacaatccttgcctgaggctgtggccgtttgttttttttccatttggctgtgcctgggttggggcagggtgcctgcttctgatttctgaagaagcgtgtgtccagggaaccatgaagcattcattctatggaagggctgttctgtcctagccaagtgtttctcccagggagtgatctcatgcatagaggtagaaatggtatccttccaaggttgggtcagcatataaactgctagtcaacgcctggatatcaccagtctgtggtttcattatgtctcctagtgagcctgcaaagcacagactataaactctaatattagatgtcagagtatgaaacactaagaatttttcctcaaggaccctttcttccttaggcctttctggcttgatctgtggcattaagatagttaagtttaagggattggagaaatggc

SEQ ID NO: 4696 - DNA, 1393 bp, Cricetulus griseus
ggaagaaaacggctcaaagatgagggtgattcgtgtgggtacccgtaagagccagctggctcgaatacagaccgacactgtggtggcgatgctgaaaaccttgcaccctggcatgcagtttgaaatcattgctatgtctaccacaggggacaagattcttgatactgcactctctaagattggagagaaaagcctgtttaccaaggagctagaatacgccctggagaaaaatgaagtggacctggttgttcactccctgaaggatgtgcctactatactacctcctggctttaccattggagccatctgcaaacgggaaaacccttgtgatgctgttgtttttcacccaaaatttattggaaagaccctagaaaccttgccagagaaaagtgcagtgggaaccagctccctgaggagagtggcccagttacagaggaagttcccacatctggaattcaagagtattcggggaaacctcaacacacggctacggaagctagatgagctgcaggagttcagtgccattatcctggctgtggctggcctacagcgcatgggctggcagaaccgggtggggcagatcttgcacccagaggaatgtatgtatgctgtgggtcagggagccctagcagtggaagtccgagccaaggaccaggatatcttggatctagtgagtgtgttgcatgatcctgagactgtgcttcgctgcattgctgaacgggcctttctgaggcacctggaaggaggctgcagtgtcccagtagcagtacataccatgatgagcgatgggcagctgtacctgactggaggagtgtggagcctagacggctcagatagcatgcaagagaccatgcagactaccatccaggtccctgtgcagcatgaagatggtccagaggacgacccccaactagttggaatcactgcccggaacattccaagaggagcccagctagctgctgaaaacctgggcatcagcctggccagcttgttgcttaacaaaggagccaagaatatcctggatgttgcacggcagcttaatgatgtgcactaactggtctataggttacgggaacctggctgccactttctagtgcccacatctggctttcaagtgctctgtgctccctaacttggagagggtgactagcccaggagattgaaccacagggtgttgagacttccagagacacgaatcaccttggggccttgatgactgcgcctttcctcctcagtagttagggcttcatctctttagaaaagtcagtgccaatctcgaatgtaaccaatgccactaatattaaaccagctctcaatgtggttgttttggtggaattggggaaaatataaataaacccaaagcccttttaaacctaaaaaaaaaaaaaaaaaa

SEQ ID NO: 4697 - DNA, 1393 bp, Cricetulus griseus
gctgggacgcgcaagcggcgcgggtccgggcatgaagctaggccgggcctcactggccctgctgctgctggcgccgtgcgcggttcgtgcggtggaacccatcagcctgggcctggccctggccggcgtactcaccggctacatctcctacccgcgcctctactgcctctttgccgagtgctgcggccagaagcggagcctcagccgggaggcactgcagaaggatctggataacaagctctttggacagcatcttgcaaagaaagtcatcttaaacgccgtgtctggtttcctaagtaacccgaagcccaagaagccccttaccctctctctgcacgggtggacaggcacgggcaaaaacttcgccagcaagatcatcgcagagaatatttacgagggtggactcaacagtgactatgtgcacctgtttgtggccacgctgcacttcccccacgcctctaacgtcaccctgtataaggaccagttacagatgtggattcgaggcaacgtgagtgcctgtgctcggtccatcttcatctttgacgagatggacaagatgcatgcaggcctcattgatgccatcaagcctttcctcgactattatgatgtggtagacgaggtctcctatcagaaggccatcttcatcttcctcagcaatgctggggcagaaaggattacagacgtggctttggatttctggaaaagtgggaagcagagggaagaaatcaagctcagagacatggagcacgccctggcggtgtctgtcttcaataacaagaacagtggcttctggcacagcagcctcattgaccggaacctcattgattattttgtccccttcttgcccctggagtataagcacttgaaaatgtgtatcagagttgagatgcagtcccgtggctatgaagtagatgaggacattataagcaaggtggctgaagagatgacattcttccccaaggaggagagagtcttctctgataagggctgcaagactgtgttcaccaagctggactactacctggacgactgagccctgccacagaggctcgcactgtcaggccactcccttcccaggaagaggctcaggacacttcctgatgagattactgtttctgctcctcagagcctgcaggtggccctatagtagggaccgcagacacaacagggacccaaagcttcctggcacctccagaggatgaaacttcccagcctgcccattcccaggctcatgatttttaaaaattatgttttaatttcaggtgtttctgttttgaggcagaataagtaagttttactgcaaatgtgataacttttattttacgtggttttttaattattatgagaaataaaaggtttaaaaaaaaaaaaaaaaaaaaaaaataaaaaaaaa

SEQ ID NO: 4698 - DNA, 1393 bp, Cricetulus griseus
tggcagagcaacttattttcaactccctcaccaactgcctgggtccccggaagcttttgcacagcgggaagttatataagaccaagagcaataaagaactgcatgggtttctcttcaacgacttcctgctgctcacctacatggtcaggcagttcgcggcttcctctggctctgagaaactcttcaactccaagtccagtgctcagttaaaaatgtataaaacgcccatcttcctgaatgaagtgctggtgaagctgcccacggacccttccagcgacgagcctgtcttccacatttcccacattgatcgggtgtaccaccctccgaacagacaacattaatgaaaggacagcctgggtccagaagatcaaggctgcctcagagcagtacattgacactgagaagaagaaacgggaaaagacttatcaagcccgttctcaaaagacttcaggcattgggcgtctgatggtacatgtcatcgaagctacagagttaaaagcctgcaagccaaatgggaagagtaatccatactgtgaaatcagcatgggctcccaaagctataccaccaggactctacaagatacactaaatcccaagtggaacttcaattgccagttcttcatcaaggatctttaccaggatgtgttgtgtctcactatgtttgacagggaccagttttctccagatgacttcctgggtcgtactgaagttccagtggcaaaaattcgaacagaacaggaaagcaaaggccctacgacccgccgactgctgctgcacgaagtccccactggagaagtttgggtccgctttgacctgcaacttttgaacaaaaaactctcctctgagggcctggagaagccagcaccagaggagctgcccacaaggctgggtctaaagaatgaaagactatcttctcctggggccgaggagcatcacatggcttcatccatcacaaagccactcgctgggactgtatgttattgcacactaaattgctagcaatctatgcaaacatgatctctcctataaacagacgccacagcacagtgccttgtattagtgttaacatgttcggctgtgttagatgccagggtttccattgtcagggctataaaagtattatgtggaaatgaggcatcagaccaccagatgttaccacttggcgaatgtgtccactgtggagttggtgatgttggaaccattccacacatgtgacctctgctgggtcacagcactcaggaggtgaagggctgggatgaagtgctgcagcctggggcttgtgcagcctgatactgaaatagcatccacttgtgcactgaataaacagaaacttgattgttttattctgattagattttatccttctctgctcagacaatacagtttgaaatat

SEQ ID NO: 4699 - DNA, 1392 bp, Cricetulus griseus
agttttcccggaggcactaattccttctttttccggcaagctcggcccggaagcgcagtgtcggggctgcggacttaccggctccttgtccttccccggtggcagtcggggcgtggtcgctgcgggccgggctcacgcgtgccagcgatggaggggcagcgggtggaggtggacggcgggatcatggaagggggcggccagatcctcagggtctccaccgccctgagctgcctcctgggcctccccttgcgcgtgcagaagatccgcgctggccgcagcacgccgggcctcaggcctcagcatttatctggactggaaatggttcgagatttgtgtgatgggcacctggagggggcagaaatcggctcaacagagataaccttcataccagagaagatcagaggtggaatccacactgcagatacgaagacagcagggagtgtgtgcctcttgatgcaggtttcaatgccttgtgttctgtttgctgcttctccatcggagcttcgcttgaaaggtggaactaatgctgaaatggcaccgcagattgattacaccatgatggttttcaagccaatcgttgagaaatttggtttcaaatttgattgtgacattaaaatgaggggctattacccaaaagggggcggtgaggtgattgtccgaatgtcaccagttaaacagttggacccaataaatctgactgatcgtggctctgtgaccaagatttatgggagagcttttgttgctggagttttgccattaaaagtagcaaaagatatggcagcagcagccgtacgatgcatcagaaaggagatcagggatctgtacgtcaacatccagcctctgcaggagtccagggaccaagccttcggcaacgggagtggaatcatcattgttgctgagacatctactggctgcttgtttgctggctcatcacttggcaaaagaggtgtgaatgcagacaaggttggaattgaagctgctgaagtgctattagcaaatctcagacatggcggcactgtggacgagtatctgcaagaccagctgattattttcatggcactagcaaatggaatttccagaataaaaacaggaccagttacactccacactcagactgctatacattttgctgagcaactagcaaaggccaaatttactgtgaagaaatcagaagaggaagaagatgcctccaaagacgcttacatcatcgagtgtgaaggaatcgggatggcaaatccgcatctctagggtgtttacctaagcggtgcctccatgttgcactaactgattttatacctgctgcaacacagtgaataagaagtaagatatttcaggactgaatttggagatgaagtatagtagtttcagctgctgacagtgcttcatcatgtt

SEQ ID NO: 4700 - DNA, 1392 bp, Cricetulus griseus
gcggggcgggccgagcgcgggcttccggcgaggctcggcaggcgccgaggaggaagagcgagcccggacggcgcccctgaggccgagtgtgagcacagccaggatgacgacttcaggcgctctgttcccaagcctggtgcccggctctcggggatcctccaccaagtacctggtggagttccgggccgggaaaatgtcattgaaaggaaccacggtcaccccagataaacggaaagggctcgtgtacatccagcagacggacgactccctcattcacttctgttggaaagacaggacctctgggaccgtggaggatgacttgattatctttcctgatgactgtgagttcaagcgggtgccgcagtgccccagcgggagggtctacgtgctcaagtttaaggcggggtccaagaggctcttcttttggatgcaggagcccaagactgaccaagatgaagagcattgccggaaagtcaacgagtgtctgaacaacccccccatgcctggagcactgggaacaagtgggagtggtggccatgagctctcagcactgggcggtgagggtggactgcagagcctgttggggaacatgagtcatagccagctcatgcagctcatcggaccagcgggccttggaggactgggtgggcttggagccctcactggaccaggcctggccagcttgctggggagcagcgggcctccggcaagcagctcttcgtccagctcccggagccagtcggcagccgtcaccccatcctccaccacctcttccgctcgcgccaccccagccccttctgccccagcagctgcctctaccaccagtccaagtcccgcacccagctcaggtaatggaaccagcacagcagccagcccgacccagcccatccagctgagtgacctccagaacattctggccactatgaatgtgcctgcagggccaggaggcagccagcaagtggatctggccagcgttctgacaccagagatcatggctcccatcctcgctaatgcagacgttcaggagcgcctgttgccctacctgccctctggggaatctctgccccagactgcagatgagatccagaacacattgacctcaccccagttccagcaggccctgggtatgttcagtgcagccttggcctcgggacagcttggccccctcatgtgccagttcggccttcctgcagaggctgtggaggccgccaacaaaggtgatgtggaagcatttgccaaagccatgcagaataatgccaaaccagagccgaaggagggcgacgcaaaagacaagaaagacgaagaggaggatatgagtctagactaaattattcgctgtccttcctgagctggaattcatagctgtgtgattctgtagtggcgattgtgatt

SEQ ID NO: 4701 - DNA, 1392 bp, Cricetulus griseus
tgactgtagaacagtttcagaaaatcaatggctttcctaatgccttctgggggctggggcggagaagatgacgatctgtggaacagggtacaaaatgcaggttattctgtgagtcggccgaaggggacacaggaaaatacaagtccattcctcaccaccatcgaggagaagtccagtttcttggaaggtacgctcttctgaggaagtcaaaggagcggcaagggctagatggcctcaacaacctgaactacttttgcaaacatcacatacgacgccttgtataaaaacataactgtcaacttgacacccgagctggctcaggtgactgagtactgagatgtggagagaagtttcatttatcacttgtcttagtttttttttttttttttttttaaagtaaaaatgttcttgcttttttccttgtgttttgttctttttgtagaatagagtggtatctagggaacagatggcattgcagactgcttcccgctcgtatgagagagcaggtgcctgcccttgagagcgctggtgagctgcgtcatctgtttgcactgggcaaggagctgcactgctgcgttgacttgcctttgtcttacggtacacacagcaataaagattgtgttggtccccagtcctgaccctctctgccctcctcttgttggttttacagtgctggggatgaaactcatggccttggcgtgctaggcaaatgctctgccactgagccatggacccagcccttgctcccctcattctcctgtttttgcactgaaggccaggaactgctttcagtgtggcagagtcatggtcctttggcgggacagcggtgcatgcagcatgtgtcccggttggagctctgcgttctcacacttgccacagggtactgctttgggccaaaggctgatacttgattgaagaaagaaaacgctgattgggggacaaaaggaaaggtctttttactgctcaaagtagggtcgcttatattcttttgcaatcatgtccaagtttgtttttagtgtggactctaagtgggcactgtcaatcattgtccaccaggtcacatgctgagtggggggactcttatcagcacttccctccctcagaggacagtagcagagcagcggagcatgtactgacggtacccacacaccactgatgaggcattgaacgcagctagcttattccatcattacttttgtttgttttcagcttgctctctgttttaaaaggtgccaggggtacatttttgcactgaaatctaaagatgttttaaaaacacttttcacagagaaagtcctttgtcattacattattcactcatgtgtttgtacatttttgtatgttaatttatgaatgattttttcagtaaaaaatacatattcaagaaccaaa

SEQ ID NO: 4702 - DNA, 1391 bp, Cricetulus griseus
cgcaaagtcgtgttaccgatttctatccgcgccgtcggccgggccttgctgctccgcgggctaagtcggcctgtctcaccccgagccccagtgggcttgtgacccctcagttcatccggagcagcagccgcaagcgcgcccgtccctccaccgaacccagatgccaaggtttccacagagcaaccatgtgtcaagaaagtccctgcctaccagcgcttccatgccctggcccagcctggtccccctggccttgtcctgccctacaagtatcaagtgctggccgagatgttccgtagcatggacaccattgtgggcatgcttcacaatcgatctgagactgtgacctttgctaaagtcaaacaaggtgtccaggacatgatgcgcaaacgctttgaagagcgcaatgtgggccagattaaaaccgtgtaccccacatcctattgcttccgccaggaatgcaatgtccccactttcaaggacagcatcaagagatctgattaccaactcaccatagaacccttgctggaccaggagactagtggtggtgccacccagctcacagccacgtgcctcttgcagcgcaggcaggtcttccgacggaacctggtagagcgagtcaaagagcatcacaaggctttccttgcttcattgaacccccccatggctgtgcctgaagaccagctgacacgctggcacccacgcttcaatgtggatgaagtgcctgatattgaaccagctgaattgccccagccccctgtcacggagaagctcaccactgcccaggaggtgttggcccgagcccgcagcttgatgtcacccaagatggagaaggccttgagtaacctggtcctgcgctcggctgagtctagtagccctgggtcctctagtccagcactcccagccaccccaccagccactccaccagctgcttctcccagtgccctgaagggtgtgtcccaagccttgctggagcggataagggccaaggaagtccaaaagcagctggcacagatgacgcggtgcccagaacaggagcttcggctgcagcggttagagcgcttgccagagctggctcgtgtattgcgtggtgtctttgtgtctgagcgcaagccagcactcactatggaggtggtctgtgcaaggatggtggacagttgccgagctgccctgagcccaggggagatggagaaacatgtgttgctcctatctgagttgctgccagactggctgagcctgcatcggattcgcatggacacctacatcaagctggacaaagctgctgacttagctggcctcactgaaaggctgacccaccagatccacactgaggggttgtgactaataaaattaatactgagacaaaaaaaaaaaaaaaaaaaaaaaaaaaaaaa

SEQ ID NO: 4703 - DNA, 1391 bp, Cricetulus griseus
ttctttcccacccgtgactatcgctgtctgagaacagactctgagcagagcaattcattcaggcttctgctctggacacctgtccccgcgagcgtagatccatgctaggtcctgggggcctgggagtgtcattggtggatgaccgcagcgctcgccgctgcagctgccactgcgaccatggtctccggcagcagcggcctcgtagccgcccgcctgctgtcgcgcaccttcctcctgcagcataatgggatacggcatgcatcttatgacgcttcccggaaacatatctacattgataaaaataccaaggttatttgccagggtttcactggcaagcagggcacctttcacagccagcaggccttggaatatggcacaaaactcgtgggaggaacctcgccagggaagggcggcaagacacacctgggcttgcctgtttttaatactgtgaaggaagccaaagagaagacaggagcgacagcttctgtcatttatgtacctcctccttttgctgctgccgccatcactgaagcagttgacgcagagattcccttggttgtgtgcattactgaaggtatcccacagcaggatatggttcgggtcaggcacacactttcacaccaaggaaagacgaggctaattgggccaaactgccctggaatcatcaatcctggagaatgtaaaattggcatcatgcctggccatattcacaagaaaggaaaaataggtattgtgtccagatctggcacgttgacttatgaagcggttcaccaaacaacccaagttggcctggggcaatctttgtgcattggcattggaggtgacccatttaatgggacaaattttattgattgccttgaagtcttcctgaatgatccagccacagaaggcatcgtactgattggtgaaattggtggtaatgctgaagaagacgcctctgagttcctgaaggaacataattctggtccaaatgccaagcccgtagtgtcgttcattgctggtgtaactgctcctcctggcagaaggatgggccatgcaggggcaattattgctggaggaaaaggtggtgctaaagagaagatctctgcccttcagagtgcgggggttgttgtcagcatgtcccccgcacagctgggatccaccatatataaggagtttgaaaagaggaagatgctgtgaaggacacaacatgaagctcttcaaggctgtggaagaactctcgtggactgagagtcagtccagagtgtcagctcacacatctgacactggtctctcagttcatcggaagcccaggcaaattttagaatgtcctaaattgagctattttcacttactgtgtaacagagacagataataaatctatcatttgatttgaaaaaaaaaaaaaaaaa

SEQ ID NO: 4704 - DNA, 1391 bp, Cricetulus griseus
ggctggagtcgttggcgggttgccgggtgcgttagctaccctcgttctggtgtagttggaggctgtagatttacaggtttgaacctcttgtgctaagagctgtgcatcaccaacaatgaggcttgtaattcttgataactatgacttggccagtgaatgggcagccaagtacatctgcaattgtatcgttaagttcaaacctggaaaagacaggtatttttcactgggcttaccaacagggagcacaccattaggatgttataaaaaattaatagagtaccacaaaaggggagacctttcatttaagtatgtgaagacttttaacatggatgagtatgtaggacttccaagaaatcatcctgaaagctaccattcttatatgtggaataacttttttaagcatgttgatatagatcctaacaatgctcacatccttgatgggaacgctgaagatttgcaggcagaatgcgatgcatttgaaggaaaaaataaaagaagctggaggaatagacctttttgttggaggaataggtccagatggtcatattgctttcaatgagccaggatccagtttagtatcaagaacaagattaaagactctagctatggacaccattttggcaaatgctaaatattttgatggagacttatcaaaagtgccaaccatggctctaactgttggtgtggggacagtgatggatgctagggaggtgatgatcctcataacaggtgcacacaaggcatttgccctgtataaagccattgaggaaggaattaatcacatgtggaccgtttcagcttttcagcagcatccccgaacaatttttgtatgtgatgaagatgctactttagaattaaaagttaaaactgtgaaatactttaaaggtttaatgcatgtgaacaataaactcgtggagccactgtacagtatgaaagaaggaaactggaaggagccttcacttttggaatgtatattcttttgtgcatcacccacatgcattttgcctgtagttgccttagtcatctttctgcagtagcatcaggacaccagaggtcctgctattcattaccaaggaaatctgaagagatgacagtgccccaaagtagtttacatcgtttcagaaagtatctgtaagtgcacgcttctatgcaccttcttatgtagtactttttttactagatatgcttatttttatttaatgacctgggtcagggcccttaataaagaagtatattggcaatgataagctttatacttagctgtaaattaaagaaaatccttttgaagaacattttctgattattaaattttataaatcatccttatatatgtttaaagggataaataaagtttacaataaaaaaaaaaaaaaaaaaaaaaaaaaaaaaaa

SEQ ID NO: 4705 - DNA, 1391 bp, Cricetulus griseus
ggcgggaggcgcaggaggcgagcggcggaacatgtaagggcacatcccgccagcagccgcccagcgcgcacacggagcccagaggagcgggcgtgcgggcggagaggcgcagggcacccggcagaggctcggggcggtcggagcgctgcgcagggtccccagccggagacgagcgagcagcatcttcccgcgcctcccgggcgccgcggtctgcgaggcgtccccggccgcgggctcggctagacagcgagcaaggccagccagcccagggcggcgcgagaagccggcgctcaagagccgggaccgccgcaggctccggcgccgtgggaaccccggggacgcccatgacggcggcggcgaccgtgctgaaggagggcgtgctggagaagcgcagcggcgggctgctgcagctgtggaaacggaagcgctgcgtgctcaccgagcgcgggctgcagctcttcgaggccaagggcactggcggccggcccaaggagctcagcttcgcccgcatcaaagccgtggagtgcgtggagagcaccgggcgccacatctacttcacgctagtgaccgagggcgggggtgagatcgacttccgctgccccctcgaagaccccggctggaacgctcagatcaccctgggcctggtcaagttcaagaatcaacaggccatccagactgtgcgggcccgacagagccttgggactgggaccctcgtgtcctaaaccacgaggcataccattttatcgacatgcccccaccgctaccacctccgtgcccagaggacacgtcagcctctctgtccaccctggttggttggggcctgactacacatgatgcagcagaaactatcagcattcggaagaagcatatcatggaaggagcctagcgtcccagggcggagagcagaagccacatgaggggctgaggatgaagattcagctcctggatgctgagactgttctgctcctgcccttggttctgggttctgcagactactgtttggcccctggccttgagacttgcccaaaggagagcagttcctcatggtgtgctaagccaaggtctcagaactcaggaggacagcctgagatccagaagatggccaccctgccttaggacagctgctggacttagcttgcagatgggatctgctgggcatgaggcctgtgcctgggggtctcttgctgcttaggtccttttgggacctccccccacccatccataccctctctttgcacacttcttcctttacctctattgccctctcctcactttggtgctgggcctggaggtggtggggatggggtaagggtttggccattaccatttcatgcctattccagaatgaagatgcccagtacgtgggtagtaactaaaaaaaaaaaaaaaaa

SEQ ID NO: 4706 - DNA, 1391 bp, Cricetulus griseus
ggggcagctatggggctgctgactggagatggtctgtggtctgtggccgtgctcacagtcatcttcatgttactggtggatctgatgtatcggcgccagcgctggactgcccgatacccacctggccccatgccattgcctctactgggcaacctgctgcaagtggacctcaagaatatgccatacagctgtacaagcttcagtgtcgctttggtgatgtgttcagcctgcagatggcctacaagccagtcatcgtggtcaatggactgaaggccgtgcgtgaggtgctggtaaactgtggcgaagacactgctgaccgtcctcgaatgccaatctatgaattcctgggctttgggcctaaatccagaggtgtggtccttgcaccttacgggcctgagtggagagagcagcgaagattctctgtgtccaccctgcgcaacttgggcctgggcaagaaatcactggagcagtgggtgacagacgaggctggccacctctgtgatgccttcgccgaccaggctgggcgtccttttaatcccagcaccatgctggacaaagctatgtgcaatgtgatcgcgtccctcatttttgcccgtcgctttgagtatgaagacccttacctcactgaaattttgaaaatagcagaagaacttttggaagaactttctggcttcattcctgaggttttgaacatgtttccggtgctcctgcacatcccagggctggctgataaggtcttcccacaccagaagggggtttctgccatgttgaagaagctgttggctgagcacaagatgacttgggatcctgcccagccaccccgaaacctgactgatgccttcctgggacctgttcatggcggggatggtgacctcttcaaccacactgtcctgggccctgctcctcatgatcctgcacccggatgtgcagagccacgtccaacaggagattgatgatgtcatagggcaggtgcggcatccagagatggcagaccaggcccgcatgccctacaccaatgctgttattcatgaggtgcagcgctttggggatattgccccattgggttttccacacatgacatcccgtgacattgaagtacaaggattcctcatccccaaggggacgatcctcatccccaacctgtcctcagtgctgaaggatgagactgtctgggagaaacccctcctcttccatcctgaacacttccttgatgcccagggccgctttgtgaagcatgaggccttcatgccattctcagcaggccgcagagcatgcctgggggacgcccctggcccgcatggagctcttcctcttcttcacctgcctcctgcagcgctttagcttctcggtgcctgatggacagccgcaagcccagtgaccatggggtcttt

SEQ ID NO: 4707 - DNA, 1391 bp, Cricetulus griseus
ctgagagtgaaactagaggaggatcctgatggtgaagagggtcaagcatttcctggaatcatctccctgacccagaagttttccgacagcggttcaggcagtttggataccaggattcaccaggtccccgagaggctgtgagccagctccgtgaactttgccgcttgtggctcagaccagagacacacacgaaggaacagatactggagctggtagtgttggagcagtttgttgccatcttacccaaggagctacagacttgggttcgagaacatcacccagagaatggagaggaggcagtgaccgttctagaggacttggagagtgaactggatgatcctggacagccggtttctctccgtcgccgaaaacgggaagtgcttgtagaggagatatctcaagaagatgctcagggattaccaagttctgagcttgatgctgtagagaatcagctcaagtgggcatcctgggaactccactctctgaggcactgtggtgttcctcaaatttttaaatatggagaaacctgtttacccaagggcagatttgcaagaaaagagaaaatccttctcgaaagaaacagcacatatgtgacgaatgtggaaagcacttcagccagggctcagccccttattcttcatcagagaatccacagtggggagaagccttatggatgcgttgagtgtggaaaagccttcagcagaagttccatcctcgtgcagcaccagcgagtccacactggagaaaaaccttacaagtgtcttgagtgtgggaaagcctttagccagaattctgggctcattaatcatcagcgaatccacactggggagaaaccatatgaatgtgttcagtgtggaaaatcctacagtcaaagttcaaatctttttagacatcagagaagacacaatgcagagaaacttttgaatgttgtgaaagtttaaaaattagggggaaacaataagcactcaggtctttgtcttcagaaatgaagacaaaattaaaaacatagaagtgatacagaaaagatttttttaccctgtttgactatatttccatcgatttgggttctatctggtgcttggtcaaattttaaaatgaaaatgagatttttgcgtgagcctattgaaaaacagtaataaatactatgccagctggtgaagtgaggccgaatgaagcttgttcatagagttctgataacaattataagaaatgtgctttatagattaagatttattgaagtataaatatgtagtaatgctataatgtatttttaagttatacaagaaaatgtagggactttgtttgggtcttttctctgtggctgagaggaaacaagttaatgtccaataaagctctaaactcctctgctctaaaataagaaaaaaaaaaaa

SEQ ID NO: 4708 - DNA, 1391 bp, Cricetulus griseus
gtttgatgtagaagatctttatgagccagtggcgactcctttctcataccccaatggactcagtgaaaatacaaccgttgttgagaaactgaagcacatggaggcgcgggcgctgtctgctgaggctgcattggctcgagcacgtgaggatctgcagaaaatgaaacaatttgctcaggactttgtgatgaacgtagatgtcagaacctgctcctccacaactgccattgcagacctgcaagaggatgaagatggtgtctacttcagctcctacgggcattatgggatacatgaagaaatgctaaaggacaaagtccgcacagaaagctacagagatttcatataccaaaatccacacatcttcaaagataaggttgttctagatgttgggtgtggaactggaattctctcgatgtttgctgccaaagccggggcaaagaaagtgattgcagttgaccaatctgaaatcctctaccaggctatggatatcataagactaaataaacttgaagataccattatattaattaaagggaagattgaagaagtgagtcttcctgtagaaaaggtggatgttattatatcagagtggatgggctattttcttctttttgagtcgatgttggattctgtcctttatgcaaagagcaaatacttgacaaaaggaggatcagtctaccctgacatttgtaccatcagcctggtggctgtgagtgacatgagcaagtacactgatagaattgacttctgggatgacgtctatggcttcaacatgtcctgcatgaagagagcagttattccagaagctgttgtggaagttgtagatcacaagactcttatttctgacccttgtagtatcaagcatatagattgccacactacatctgtctcagacttggagttttcttccgattttaccctgagaactacaaagacagccatgtgcacggcagttgctgggtactttgatatatattttgagaagaattgccacaacagggtcgtgttctctacgggccctcagagcaccaaaacacactggaaacagacagtgtttctgctggaaaagccgtttccagttaaagcaggtgaagccttgaaaggaaagatcacagttcacaagaataagaaggatcctcgttccctcattgtggctctgaccttgaacagctcaactcagacttacggtctccagtgaccatcatggtctccagctgccacaaagcctgaagcacacacaactctccatctttaaagctataaatttgtttttaattaacaagcagcacaaagcagtgttttattgtagactttctttctggagaaacagtttttggttatactctttgctgtaatatcagggtatctcaagactagggagccagtgcaca

SEQ ID NO: 4709 - DNA, 1390 bp, Cricetulus griseus
aggatgaggttggcgcccccggcatagtgatcggagtttctgtagatggaaaagaagtctggtcagaaggtctaggctatgcagatgtggagaaccgggtaccctgcaaaccagaaacagtcatgagaatcgcaagcatcagcaaaagccttaccatggtggctctggccaaactgtgggaagcagggaaactggatctggatctcccagtgcagcactatgttcccgagttcccagaaaaagaatacgagggtgaaaaggtttctgtcacaacaagattattgatttcccatttaagtggaattcgtcattatgaaaaggacatgaaaaaagtgaaagaagagaaagcttataaaaccatgaagatgatgaaaggggtaatgccatctgaccaagagaaagaactgaaagaaaagggaggcaaaaatcatgagaagagtgactcccctaaagcaaaagccgagcaggagaatgaagtcaggtgtcggcactcaaagccaggcaagaaaagaatgattttgaccaaggcgaattatatttgaaagaaaaatatttgaaaattcaattgaatccctaagattatttaaaaatgatcctttattctttaaacctggtagtcagtttttgtattcaacatttggctataccctgctggcagccatagtagaaagagcttcaggatataaatatttggactatatgcagaagattttccatgacttggacatgctgacaactgtacaggaagaaaacgagccagtgatttacaacagagcaagattttatgtttacaataaaaagaaacgtcttgtcaacacaccttacgtggataactcctataaatgggctggtggtggatttctgtctacagtgggtgaccttctgaagtttgggaatgcaatgctgtatggttaccaagttgggctgtttaagaattcaaatgagaatctcttacctggatatctcaagccagaaacgatggtgatgatgtggaccccagtccctaacaccgaaatgtcctgggataaagagggcaaatatgcaatggcatggggtgttgtagaaaagaagcaaacttacggttcctgcaggaagcagaggcactatgcctcacacactggaggtgcagtgggtgccagcagtgtcctgctagtccttcctgaagaactggacccagaggccataaataacaaggttcccccacgaggaataatcgtctctatcatatgtaacatgcagtccgttggcctcaatagcactgctttgaaaatcgccctggaatttgataaagacagagctgacctgtcctaaatggtacaggtccacagtgagccttttgttctttgaaatgttgacgttccaaaatacataaaaatttaagaatacattt

SEQ ID NO: 4710 - DNA, 1390 bp, Cricetulus griseus
aggcgccgcccaagagaccctgggcccgcgctaggcgcagctgcctctccgcctttgcctgtccgtctttgtgtctgtgtctgtctggctgttccgagcttgtctccactccagaactaagcctcccggacgccgacatcccaagacgcccctccccttttccatggcaggctacttatcctccaaaggctatgcccctacgcccccacctccataccccgtgacagctgggtatccagagcctgcgctgcatcctggaccgggacaggctccagtgcctgctcaggtgccagccccggcgcccggcttcgctctcttcccctcgccaggccccgtggccccagggtctcctgctccgttcttgccactgccaggggtgccttctggcctcgagttcctagtgcagattgatcagatcttgattcatcagaaggctgaacgagtggaaacgttcctaggctgggagacctgtaataggtatgaacttcgttccgggaccggacagcaactgggtcaggcagctgaagagagcaactgttgtgcccgtctgtgctgtggtgcccgccggccacttcgtgtccgcctagcggaccctggggaccgagaggtgctccgcctcctccgcccacttcactgtggctgcagctgctgtccctgtggccttcaggagatggaagtgcaggctccacctggtaccaccattggccatgtgctgcagacttggcatcctttccttcctaagttttccatccaggatgctgatcgccagactgtccttcgagttgtggggccttgctggacctgtggctgtggtacagataccaactttgaggtgaaaactaaggatgaatctcgaagtgtgggccgcatcagcaagcagtggggagggttgctgcgagaagccctcacagatgctgacgactttggcctacagttcccaatagacctagacgtgagagtgaaggctgtgttgctgggagccacgttcctcattgattatatgttcttcgagaagcgaggcggcgctgggccctcggccatcaccagttagaagccacctcagcatgaggagaccatcacctcaaccagaattcgagatggtcacctgccctggcctttccctcctgaggcaaccccttccttggtatacactgcagcggacagatgggtggctgagtggttgggagccattgtgtcccaccccttccctctcctcctcctaaccccctggggccctgctggtgctttctgcagctttctgtgccttatttaaccattaactccttcctttccctgctccaggaaggaggctgtgtctttgtatgttgtactcatataaactttgcaactttttaaacattagaagatgtgtgtgatgaaagagggaaga

SEQ ID NO: 4711 - DNA, 1390 bp, Cricetulus griseus
cgactcagacatcttacatgctctgaagatagctgtggtggatatctatcattccaggttaaaagagaggcaaagacgaaaaaagattataagagatcatggattagtcaaccttagaaagttccgattaatggaacggcggtatcccaaggaggtccaagacctttatgaaacaatgaggcgatttgcaaggattgtgggaccagtggaacatgacaagttcattgaaagccatgcattggaatttgaactccggagggaatcaagaggctccaagaatataggacagcaggcattaccaatttttgtagtgccaggacatacgatcacctgaagaagactagagaggaggagcgcctcaaacgcaccatgctctcagtaagttctccagtacatccaggacagtagtgcgtgccagcagtggcctccggccggcaggctgacattgattctgggctgagtccttctgttctgacggcttcaaactcaggaagacgaagtgcaccacctttgaacctcactggcctccctggtacagagaaactcaatgaaaaagaaaaggagctctgtcaggtggtgaggttggtacctggagcctatttagaatataaatctgctctgttgaatgagtgtaacaagcaaggaggcttgagactggcacaggcaagagcactcatcaagatagacgtgaacaaaacccggaaaatctatgacttcctcatccgagaggggtacatcaccaaagcctgagtctctgcttagcaatgcaaaccagaagtttggaatgcggcgggtcaaaggtcaatgtacacatgttggagacttgggtttgagttggattcttattgtgaaaagaaggaaagactcggggactccaagtgcatcagtttcttctctgccttgctgtaaagtgctcctgttgtgggaatagtgatgcagtgtgtgtgctcacctagttattattaaacatgagtgggcattctttcctagcacctcttgtaactcagacaagaaccatagtacctcacatcatggctttggtgaaaatagaaccaagccaagccacgacacagcatttcatcccaggagtccagcccagatccttgcacttgagagtgaagctcgctgactctatgccttctcattttgcagatagattttaaataaagaggagggtttttaaagcacaggaaaaccttttctttcaaggatttttttttttttaagctgacgtcttagtttatgagctgaagaggtggaatatatcccccgtgatggtctgtctcaagctgctatttttaacttttgtgtctggctttgtactttgcagtcctggctgtctgatctgcagtagactcttgaggaggtggcaccggatataaaatgtctc

SEQ ID NO: 4712 - DNA, 1390 bp, Cricetulus griseus
ccaaacttctccagcagagactgaatgtgagcaagatcctcattgtggactgggatgtacaccatgggaatgggacccagcaggccttctacaatgaccccaatgttctctacatgtccctgcaccgctatgatgacggcaacttcgttcccaggaagtggagcaccagatgaggtgggcacagggccaggcgtgggtttcaatgtcaacatggctttcacgggtggacttgaacccccatgggagatgcagagtacctggcagccttcagaacggtggtcatgccaattgcaaatgagtttgccccagatgtggtactggtgtcatcaggctttgatgctgtggagggccatcccacacctcttggagggtacaatctctctgccaaatgttttgggtacttgacgaagcagctgatgggcttagctggtggccggattgtgctggctcttgagggaggccatgacctgacggctatctgtgacgcttctgaagcatgtgtttctgctctgctgggaaatgagcttgagcctctgccagaaaaggttactgcagcagagacccaactgccaatgctgtccactccatggagaaagtgatggacattccacagcaagtactggcgctgccttcagcgtttgtcctccactgtggggcactctctgattgaagcccagaagtgtgagaatgaagaagctgagacagtcaccgccatggcctcactgtctgtaggcgtcaagcctgctgagaagagatcggaggaagagcctatggaggaggaaccaccactgtagccccgaagctgctgttctctcctttgtttgtctgtcttgaagctcagccaagaaactttcccgtgtcactcttgtgtcctgcctcggtgctctctctgagtgcaaagggacaccaggcgtgcagcagcaacgggaggcctttctgccaccctggaccacaggtctggagatgcacacgaacaccaggtgtggcagatcacatggaacacaggacagcgcgcaacacacaggcacacagacacgcggaagccaagcacacgctggtggttcccctggggacgcccgagaaagaagaggcctgtggcaacttgggcagagttgctgaaccgagttgacaatgaggataatgaaaatcaaagatctaataatacagaaaaaacttgattaaaactggtgcttaacatttgattcttacccacaatcccacagtctctgtgtaaaccactcaactcatcttgtagcttttttttttttttaaactaaagaagttttctatggctctggcctgccttgtgaaccttagtggggtgctgtgggggttcacagcttagtgagggacagagttggaagaaactttaaaggaaaaaaaaaaaaaa

SEQ ID NO: 4713 - DNA, 1390 bp, Cricetulus griseus
catgcttcggaactcagatgctagcctacttcctttcggttagcagatgtggttcaagatgtcttggccaccttggatcaattttattgataagagagctgcttcctttgttcagcgttctgcatgctctactggcagctttagtccactggttcccagatgcagattctactgggcagctccagcagagcgatttagaagagggaaggcaaacaccagcagcctgcgaggctagcaccacagccgaggacatcgagcagtttgtgctgagctatctcaaaagagaaggatgtggcagaggggaatgtttctgaccttgaaactgaagaagaagagcagtcatccacccccaaacgtggacgagaacgacacccttccagatgtggagccaccactgccagtgcacatccagatagccaaggatgtgatggagcgctgcatccacttagcatcagataagaatctgaaaatccgcctgaagatcttggatgtgctcggtttgtgtgtagtggttctgcagttccacaagaaccagctcctcccactggctcatcgggcctggccttcactcgtgcaccgactcacaagtgatgaccccctggcagtgctcagagccttcaaggttttacagacacttggaagcagatgtggtgattttctccggagccggttctgcaaagatgtcctgccaaaattggccagctccttaacctcccaggcccccatcagtgcccgggctggaccagtttattctcacacactggccttcaagctgcagctggctgtcttgcagggcctgggtcccctgtgtgagagtctggacttaggtgagggtgacctgaataaagtggctgatgcctgcttgatttacctcagcaccaaacagcccgtgaaattacaagaggctgccaggagcgtcttcctccacctgatgaaagtagaccccgactctacctggcttgtcctgcatgagctgtgctgccccgtgcagcagttcacagccccacaccccagccttcacccagtgcagctgcaggcggccactgagcagcagaacccttttgccaccaatgtgctctacctgctccagaagctacagtgaccctgccagtccctgccagacagaagttgagctgagccacccctggtggaggtggttgcagcatcacagagacgtggtgaaggtggattagacagccggtcaatgtataaattgatcgatcacacaactgtgtagaaattggattgaaggaaagtagctgactgttgtttatatttctctcttcatgttttcacatgacattgtctggctgctctaagaacttaactctttagcccactatctgtacagcccctctgcctcacaggttgttacacacacacacacaca

SEQ ID NO: 4714 - DNA, 1390 bp, Cricetulus griseus
  modified_base (1364)..(1364): a, c, t, g, unknown or other
aggaggaggaggaggctgcccagagtgagcaaggacggccttacactctgagtgtggccctgccaggctccatcctagacaacgcccagtcacctgagcttcgcacctacctggctggccagattgctagagcctgcaccatcttctgtgtggacgagattgtggtgttcgatgaggagggccaagataccaagactgtggaaggagaattcaagggagttggcaagaaggggcaggcatgtgtacagctggctcgcatcctgcagtacctagagtgtccacagtacctgagaaaggctttcttccccaagcaccaggatctgcagtttgcagggatcctcaaccccttggacagtcctcaccacatgcggcaggatgaggaatctgagttccgagaaggcatcgtggtagaccggcccaccaaggcaggccatggctctttggtcaactgtggactgaagaaggaggtgaagattgacaagaaactggaacctggacttcgagtgaccgtgcgactgaaccagaagcagctcccagaatgcaagacatacaaggggacagttgtgtcatcgcaggacccccgcaccaaagctggtctctactggggctacactgttcgactggcctcctgtctcagtgctgtgtttgctgaggctcccttccaggatgggtatgacctgaccattgggacatcagagcgaggctccaacgtggcctctgcccagctgcccagcttcaggcatgctcttgtggtgttcgggggcctccaagggctggaagctggagtggatgctgatcccaaccttgaagtgtcggaacccagtgtcctgttcgacttttatgtcaacacatgccccagccagggcagccgtaccatccgcactgaggaagccatactcatctccctggctgccctacaacctggcctcacccaggtagagatggtcaagacttgtctccaaaaataaccacctttaatatgagccagccccttctcccagtgtcttcagtccttcaccctcacttgctgccagcagtgatggccttgaggtttccagctcgagccaggatattgggcacaaagagcaacccagaggcacgctcaatgctctcgatcggcaccaggaagcgctccaaagggatagtctcatccacaggggcattgggcatcacataggaacgcagctcaatttgcccactggtggcctccaggatgagcaccttgaagaagtgtgtgggcactgctacgtggttttttccaataacctggtacttcacataggacttcccatcagcctccgtcctgaggatagaccaggcacacatggccacctctgcttttctgcccaatactggttcagccngaatgggtagcaataaatgctgctag

SEQ ID NO: 4715 - DNA, 1389 bp, Cricetulus griseus
  modified_base (118)..(118): a, c, t, g, unknown or other
ctgtttttatgtgtgtgtgtccctgtgtgaatggacattggaagagttcctgggtgagcacagagaggaacccatggagaacagtgaagatacatttgctcgcaatgtgctattgtcngtttttaaggctgttcaaacactacacttggaaggatatacccatcaggatctgcagccacaaaacatcttaatagattccaaggaagctgtttacctggcagattttgatcagagcatccaagggacgggagatccccagaacgtcatgagagacttggaggcccttggacggctggtcctctatgtggtaaagaaaggtgagatcccttttgaggaactgaaagatcaagataataaaaaggtggctgaaacatctccagatgaggacactaaggacctcattcagtgcctgtttttctcctggaaaagaatgtaaagaactgtctgaaggacctacttggccatcctttcttttggacttgggagcaacggtacagggtgcttcgggatgtggggaatgaatctgacatcaaaaaacggaaaaagaatagcaagcttctcaaactactacagcctgggacacctgggccttccagaagtttcaatcagtggaaatctaagatcgacaaatgtgttatggaagaaatggatgatttccatctgcccaatagacctagaaatccttatcaggaaactgtgggcgatctactgaagttcattcggaatataggagagcacatcaatgaggacaaaaacaagcatatgaaggagaggcttggagacccttctcgttattttcaggaaacgtttccagatcttacaatctatgtctacaagacactaaaggacacagaatacagcaaacatttcctacagactcaaccaagctgcagcgtgcctgaggcagtaggaccacacacacacacacacacacacacacacacacacacacacacttcactgagtaatcaatgaaccatccttgtacatgaatgatgatgatgatgaagataaattgtatggactttagaatttatacgttacacctacatatttttaaatctaattttgttttgaaaacagcactgtaaggtaagcattgtgatctttattttgataacgaagaaaccaaggctagaaatatttttctgtactctgggcatatagtatgagatgtcactgtcttgatttgggcagattttctggtgtgacatctagtgttctttccacctatcattgtggttgctaagatgcagctttggaatgagaattaaaggatatcttaacgtctttcctaaaaggaggcatctggaaacgaatgatggctgtcactgcaaggagttaacggtaccctggaagagacaagcttatagcttaaaagaaggtttt

SEQ ID NO: 4716 - DNA, 1389 bp, Cricetulus griseus
agcatgtttgtctccaagagacgttttcatttttgaagacatgtggtccaccctcttactgaaagcactggttcccctcttgaagctttgctagggatttacagtgggttttgactcgattcaaagcttcttttattctcgtaagaatttcatgaagccttctcaccaagggtacccacaccggaatttccaggaagaaattgagtttcttaatgcaattttcccaaatggagcagcatattgtatgggacgtatgaattctgactgttggtacttgtatactttggatttcccagagagccgagtaatcaatcagccagatcaaaccctggaaattctgatgagtgagcttgacccagcagttatggaccagttctacatgaaagatggtgttactgcaaaggatgtcactcgtgagagtggaattcgtgacctgataccaggttctgtcattgatgccacattgttcaatccctgtggctactcgatgaatggaatgaaatcggatggaacatattggactattcacatcactccagaaccagaattctcttatgttagctttgaaacaaacctcagtcagacctcctatgatgacctgatcaggaaggttgtggaagtcttcaagccaggaaaatttgtgaccaccttgtttgttaatcagagttctaaatgtcgcacagtgctttcttcaccccagaagattgaaggttttaaacgtcttgattgccagagtgctatgttcaatgattacaattttgtttttaccagttttgctaagaagcagcagcaacagcagagttgattaagaaaaatgaaaagagcaaaaatggactaaaattcctatttatttccctcttttttttggttagtttcttggactgatgcagtgatgttttgttccttccatatttataatgaaacacatttttagcgtttctaaacatagaatctacttggtttggaatcaagtggttggaacactgtctggatttttactttaagcattgctgtttattgaatgcttcattggggaagcctccagtcagctttatcagtttgattctgtgatatgcacagcacctttttgaactgctatttggaggaccagtgcttatttaagctggattttgtgacccagtagattttgttggaggtctgattaccccatttgatagaattatggattctaatgatgaaatttgcataggtttctgtggaataaaagcctagaaaagaacctgtagattgaatagtgatgctggtgtgattacagaaggggaagttttggtgccattatttctttggtgtttgggactttttaaatcagttgaaatgtatttctgtaccacaatgtaagtttcaataaaagtttgcttcattgtacta

SEQ ID NO: 4717 - DNA, 1389 bp, Cricetulus griseus
agccttctgttgggtctgaaggagttcttgatcagaatggcttcaggacggttttacctgttctgcatggtcctggggtccttgggatccttgtgcatcctcttcaccacctattggatgcagtattggcgtggcggctttgcctgggatggcagtgtgcacatgttcaactggcaccctgtgctcatggtctctggcatggtggtgctctatggagctgcctcgctggtgtaccgcctgcccatgtcatgggtagggcctaaactgccctggaaagttctccatgcagcactgccacacctctattccctgcatagctggctgggcatcatcactgtcatcttcttcgcctgtcagtggtccctgggctttgccatctttctcctgccctgggcacctcagtggctgcgaagcctcctgaaacctgtgcacgtctgctttggagcctgcatcctttccctgtccatcacatctgttatttccggcatcaatgagaagcttatctttgttttgaaaaatggcaccaaaccctattccagcctgcctagtgaggcagtctttgccaacagcactgggatcttggtggtggcttttggcctactggttctctatgttcttctggcttcaccatggaaacgtccagatccaggagctctgactgacagacagcccctgttgcatgacagggagtgaagcgggcaggggctcccaggaacagtcggtggtgcagtctctgctccctcagaagcgcttctgtacttggagctcctggctcatttcagcaaccaacttctcttgggccagagacaaacttgctactccagttcctggcttgctctctccagctgcttgctgtcaatctgcttttctccatggctttgacttcctttgctctgccctgggtgtggatttgggtgggcagagatgctgggaggtcttaataggacagcagcagcaggaaaaggctttgcaggagtcaggtgctggtcactctgctctgttcactttgatatactgtgttgtgtgtattgtgactatgtggctccccctcttctagttgctgcttcagctgctgcctggatcccgccctttccctgtgacttacatgcctgtccccctcaggcaaccctatgagccctggtaaactgttctcccatgaacagagaacctgaccctagagtcccaagtgatgagtaacagaggtttctgtgaccttcctttctgtccccttgtgggtatgggctttcctgcctcctctagtgatgctcttccctgacagggtccagcccactatgagattgaaaccagcattatgacgaaatttgctgggcagagttcagggagccactgctgacttcagaggtgttccctactgagtactgggtgctt

SEQ ID NO: 4718 - DNA, 1389 bp, Cricetulus griseus
tatggatatactcttcagaataagaggaggctttgatctggcttttcagctagcctctcctaaagaaatgtttatcaagaatgctctaagacaggtgttgaatgacctgactaccaagctgtcttcagacgctcttgtattcagagtctccaacagctccatgtatctgtggcccaacagtgacacaaacactggcgagctgactgacagctccacctgtaagaacatagtgcacctcatccagtttgagcaggaagaggataaaaagcgaaaattcacaaaaaagaaagacaaaaagtcatcagacatgcaacaaatagtaaacatagatctcatgctggaaatatcaacctctctgggagctgtaacccccatcattgaaagggaaaatgaagaacaccactacattaatatgaacttgccgatcgatgtagttgtagctgttgctccagaagaaacgtggggaaaagtccgaaaacttctagtggatgcagttcataaccaactagttgatgtggaaaaatgcattttgagatacataaaaggaacatctattgtggtccctgaaccactgcacttcctattgccaggggaaaaaaatcttgtaacagttttatatccatcaggaattccagatgctcagctgcaggcctatagaaaggagttacatgacctcttcaatctcccacatgacagaccttatttcaaaagggctaatgcgtaccactttccagatgaaccatataaagacggctgcattaggaacccacatgcttatctgagtccacctaacatagagggtagtgtgatgtgtgtggtccagggcatctacgcttatcatcactatatgcaggatcggatagatgacaatggctggggctgtgcttatcggtccctgcagacgatctgctcatggttcagacatcagggatacacagagaggtccattccaacacacagagagattcagcaggctcttgttgatgctggtgacaaaccagcaacatttgtgggatctcggcaatggattggatctattgaagtacagctggtactaaaccaactgattggtgtaacttcaagaatactgtttgttagccaaggttcagaaatgacctctcaaggacgggaactggccaaccatttccagaatgtgggcactcctgtaatgattgggggaggagtattggctcacacaatactaggagtcacatggaatgaaactacagggcagataaaatttctaattctagacccacattatacaggtgctgaagatctgcaagttatcttggaaaagggctggtgtggatggaagagcccagacttttggaacaaggatgcatactataacttatgccttcctcaacgaccaaatgctgtttaaat

SEQ ID NO: 4719 - DNA, 1389 bp, Cricetulus griseus
  modified_base (451)..(451): a, c, t, g, unknown or other
tgcgagctgcggctgcggctgttgctaaggcaagggacgcgcggggtagcacgacccgagaggaatctaggcaccgtgtgaaccgggatagctctccccttttctttgggaccctccctgagccgtgcccaggtcgccatcctccgcccttgaagaaatcggatcgcagaccccaccctggggcgcaacccaagaatcccacgcgaccccggagcgccactcggattcttgctttctggttcggttgctaacgctgggaccttccctaaggggcgcacgcactgctgtccctgagcgcccgcagagcggaggaagaactgttccagcgggggagtcccagagaggattggaggcgacccgcggaccccaggcctcctgcgctcgccggggatgggagcccgcagcccggcggcgcccggagctgccggcgcgggccccgcggcgccggcgngctgagcacggccacagagtcggccgcacccggaacgcctccagcttctgctgcagcagaagcgtctgcgaaggaaggccaggcgggacgctcgcggtccctaccactggacccccagccgcaaagctggccgcagtgacagcagcagcagtgggggtgggggtggccccggagaggctggaggcttgggcctcgactttgaggactctgtctggaagcctgaagttaacccggatattcagtccgagtttgtgatggcttaaaggatccagcccccttgggtctgtcacatccccaccccagacatggggcgggtgggacaccacagcctggacgctgagcagcccagctccggggggcaggaggttacctccactgccactctcaccagcctttctgatcctttttagctcttctcccgattgtctgccctgcgtccctggtcacatgcctatctctttcccttggcctctgtgccagggccccttcctacccaccttctccagctccaaatatgtagcagtctgttcccagatggcccagacggaggaagccacccacccccagcccttccgttctgcctagttcctcccccaccccaattcccataacccgattcaggtttttgactcaaaatgtagattctccaagaagaagcactacacatgatgagggtggggaccctgggatgagtgtatcccacccccacctctgtctgcagacttggcctccattccaggccagctggactcccccaccccacccaccctgagaaactaatagaatggtctcacaggggaaccctttgtccacaattcccattcagctccttcctcctgcctcagtctgcagcgctacaccaggcctcggccactgtgcctggctggccctgctcttgccatgaaaagctagttggatggagaacactgaggcaggtg

SEQ ID NO: 4720 - DNA, 1389 bp, Cricetulus griseus
aggcgggctttagctccggttgtacggccgctgagttgacgaactaggtctgcgagctctaaggaaatgactcccgtccaggtgttggagagggcgatgtgaaagcgagaaagcaggccctcccctttccagctccgagcgcggttcctgcgggtccccgggaacggcaggattctggatctggatccgtggggtggggtctgtccttgccgggatctgagcgccccctcctggggacgggtctctggccgcagtcagtgttggactgactggagatttcggaaatctccagtggatttcagtccttttgggggaggcgccctggtctggtactccagaatctcttacattgctgggcttctctagtgctctatgtccctgggccatggaaccattgcaggcagcacaacggcgcctctgtctgaagaaggggaagtgacttccggcctccaggctctggcggtggaggacaccgggaggtccctctgtctcggctagtaaggccgaggaagaggggcaaggaggtcgggaggaggccgggcgtgagggatccagggctgaggaggcactagaagctcccaacgctgcgggcgacgagcgcgccgagggagaatccgaagactggtgcgtgccctgcagcgatgaggaggtggagctgccggccaatgggcagtcctggatgcccccaccctccgaaatccagcgtctctatgaactgctggctgcccagggtactctggagcttcaagcggagatcctgccccgccggccacctactcctgaagcccagagtgaagaggagagatcagatgaggagccggaggccaaagaggaggaggaggaaaagccgcacatgcctacagaatttgactttgatgatgagccaatgacaccgaaggactcactgattgacagaagacgtacgccaggaagctcagcccggagccagaaacgcgaagcccgcctggacaaggtcctctcggacatgaagcgacataagaaactagaggaacagatccttcgcactgggagagacctcttcagcttagactcagagagccccagccctgccagccctccgctccgatcctccgggagcagtctctttccccggcaacggaagtactgactattgctgctggggcctacaggtgcagactttttctgctggtcgtggccagcccttcccagcccaggctctgggaagcttgtcacagagaaaagcttcaagctcccagcgcagtgccttgcaggagagtgtgtgttctgttgaatgtctgcttgcagttctgagctgggtttgctgagcctaataaaagatgcagaatgagtcttttggcagagactgccaactaaagaaaaaaaaaaaaaaaaaaaaaaaaaaaaaaa

SEQ ID NO: 4721 - DNA, 1388 bp, Cricetulus griseus
aagatgagcagcagctgctcagggctgagcagggtcctggtggccgtggctacagccctggtgtcttcctcctccccctgcccccaagcctggggtcctccaggggtccagtatgggcagcttggcaggtccgtgacgctgtgctgtcctggagtgaatgctgggatcccagtgtcctggtttcgggatggggagtcaaggctgctccagggacctgactctggactaggacacagattggtcttggcccgtgtggacagcactgacgaaggcacttacatctgccagaccctggatggtgtatttgggggcatggtgaccctgaagctgggctttcccccagctcgtccggaggtttcctgccaagcagtagactatgaaaacttctcctgtacttggagtcccagccaggtcagcggtttgcccacccgctaccttacttcctacaggaagaagaccccgccaggagctgagagtcacagggcaagttcatccgcaggaccttggccatgcccacaggaccctcaagaggttttccgatgtgcggtccatggggcagagttctggagtgagtaccggatcaatgtgactgaggtgaacccactgggtgccagcacgtgcctcctggatgtgagattacagagcatcttgcgtccggatccaccccagggactgcgggtggaatcagtacctggttacccgagacgcctgcatgccagctggacataccctgcctcctggcgccggcagccctacttcctgctcaagttccggttacagtaccgtccagtgcggcatccagcctggtccatggtcgaaccaattggcttggaagaagtgataacagatgctgtggctgggctgccccatgtggtacgagtcagtgccagggacttcctggatgctggcacctggagtgcctggagcccagaggcctggggtactcctagtactggccccctgcagaatgagatagctgatgacagccaggtacacaaagagcagcaagaggcagtagctcaggaggatggtcccactcctccaaggccttccttgcagtcagacccaagaccacttgatcacaaagaccccttggagcaagtggctgtgttagcatctttgggaatcttctcttttcttggcctggctgttggagccctggcactggggctctggctgaggctgagacggggtggcaaggatggacctcaaaaacctgggttcttggcaccaatgattccagtggacaagcttccaggcattccaaacctgcagaagacccaggaggacttcagctgattccacctgtaaccctgtcaggctgggtggctaaatggacagaacagaaagacacatagggcagtggatccctatggatggaagtctca

SEQ ID NO: 4722 - DNA, 1388 bp, Cricetulus griseus
agcctcagagctcattttgtcctgagcatttagccatggcggcagtgaccttgagacgggcgcggtgctggtgtccgagtctcctgcaggtctttaggttcccagtggctcaggtgcacttgggcagaccaacgatgagagccagtcagcaggactttgaaaatgcaatgaaccaagtgaaactcttgaagcaggacccaggaaaccaagtgaagctaaaactctacgcactgtataagcaggccacggatggaccctgtaatgtgcctaagccgggtgtgtttgaccttgtcaataaagccaagtgggaagcatggaattcccttggcaacttgccaaaggaaactgccaggcaaaactatgtggatctggtgtccagtctgagtccttcatctgaagcctctagccagggaaagcgtggagctgatgagaaggtccaggagtctaaggacattgtggtaacctctgaagatggcatcacgaagatcatgctcaatcggcccgccaaaaagaatgctttaacatttgagatgtataaggagatcatactgacacttaaaaatgccagcacagacaactcagccatagctgttttcacaggagctggtgactactactgcagtgggaatgacctaactaactttactagtgctgctggtggaatggaggaggcggctaaccagggtgctgtggtactgagggaatttgtgaacagttttatagactttcccaagcctctggttgcagtagtaaatggcccagctgtaggaatcgccgtcacccttctggggctgtttgatgctgtctatgcatctgacaaggcaacatttcatactccattcagccacctcggtcagagcccagaagcatgttcttcgtacacatttccaaagatgatgggctcagcaaaggcaactgagatgcttctctttgggaagaagctcacagcaagagaggcttgggctcaaggccttgtctctgaagtttttcctgacagcacttttgagaaagaggtctggaccaggttgagagcatatgcgaagctcccaccaaattccatgagaatttccaaagaattaatcagaaacaatgagaaggaaaagctccacgcagttaatgctgaagagtgcactaccctcaaagcaaggtggctgtcagaggaatgcattaatgccatcatgaacttcgtatccagaaaagcaaagctgtgaagacctccagagcagttagacttctcagaggaactatgttctgtgagttccggtttctgatttaaacgacaaacacttgagtgtgccttttccttgcctaacatctcagttatgatgagactgtctcataacactgacaaataaacactttcataaaaaaaaaaaaaaaaaaaaaaa

SEQ ID NO: 4723 - DNA, 1388 bp, Cricetulus griseus
ggtggttggaggcttcccgcgaccgcagtggaccagggatcgggcggggcgatgggtgaggctgagacgccttccttcgaaatgacctggagcagcacgaccagcagtggctactgcagccaggaggactcggactcggagctcgagcagtacttcacggcgcggacctcgctggtccgcaggccccgccgggaccaggacgagcctgtacagcgggagacacctgacctttctcaggctgagactgagcagaagatcaaggattacaatggccaaatcaacagcaaccttttcatgagcctgaacaaggatggctcctacacaggcttcatcaaggttcagctgaaactggtacgtcctgtctcagtgccttccagcaagaaaccgccttctttacaggacgcccggcggggcccagggcggagcacagctgtgaggcgccgcacctccttttacttgcctaaggatgctattaagcacttgcatgttctgtcacgaacacgggcacgtgaggtcattgaggccctgctgcgcaagttcatggtagtggatgatcctcgcaagtttgcgctctttgagcgaacagagcgtcatggccaagtgtacttccggaaactgtcagatgatgagcagcccttgaagctacggcttcttgcagggcctagtgagaaggccctgagctttgtcttaaaagagaatgactctggggaggtgaattgggatgccttcagcatgcctgaactgcacaatttcctacgcatcctgcagcgggaagaagaggaacacctccgacagatcctgcagaagtactctcgttgccgccagaagattcaggaagccttgcacgcctgtcctttggggtgaccttttgtgtccctgggtggcaggaggaaaataggcaatgcgaagggcgtgccgtgtgagtgtgagcgggcccgtgaggcctgaggagtgtgtgtgtgtggaggtggtcctctactaaagggactgagcccagagaagagtgaaggagctggccctctccagtggatataacggggcatggctttgcatccctctgccccttatatactgggtcgtactctgggtagctgttccaggctttcatcagggtgtcagctgtgaaaagcttaagagactccagaagcagaacgaggttctgtttgcaggggttcagtgcctcctctaaggaagatgttgctggaccagacccacttcttgattgccaaagccagagtctccctcagatacttttgatcgaagtgtatgaatgtatgaaatgctttgtggcctcaactgaatgcctcctgtggggaaagggatgggggtgtgacagtcatcatcagggcctgagacctgagaggattggctgaataaagatttaagaa

SEQ ID NO: 4724 - DNA, 1388 bp, Cricetulus griseus
cgcacaggagttggcagggacccgggccgagggcgggacagaagacgcgtcgtttggctttggacagcgtcgcagagtcgtctgggtccaaccgctgggccgccgaaagcttttgtcagggacctgggcgagaacgaggcccgcgaggttcccgatggtgtccatgactttcaagcggagccgcagcgaccggttctacagcacccggtgctgcggctgttgccatgtccgcaccgggacgatcatcctggggacctggtacatggtggtcaacctattgatggcaattttgctgactgtggaggtgactcatccaaactccatgccagctgtcaacattcagtatgaagtcattggtaattactattcatctgagagaatggctgataatgcctgtgttctttttgccgtctctgttcttatgtttatcatcagctcaatgctggtatatggagcaatttcttatcaggtgggctggctgattccgttcttctgctaccggctttttgacttcgttctcagttgtctggtggccatcagctctctcacatacttgccaagaatcaaagagtatctggatcagttacctgatttcccctacaaagatgacctcctggccttggactccagctgccttctgtttattgttcttgtgttctttgtggtattcatcatttttaaggcttacctaatcaattgtgtttggaactgctacaaatacatcaacaacagaaacgtgccggagattgccgtgtaccctgcctttgaagcgccgccacagtatgttttgccaacctatgagatggcggtgaagatgcccgaaaaagagcctccgcctccttatctgcctgcctgaggacatctgccttgtcaataaaccttataccagcttcttgtcttgtttatttacagaaagctgcaacgcagggccctcagacttgtttgatctaaagtgcactgtcctgtctgagcatttactttcaaacactaaggagcttctggacatgtattaaaaactttttgttaagtatcacattttagagactttttgaagacaatctaggttaagcaagaacaaagtgccattgttagcctttaactgaggggtagggaggggaagggttttctccatattttctttttaactttgcactttctttgtataatggtttgtatttcagatgtttggtgccctggatagtttcaggagagtgaatacagtgtttaggatgaatgagttggctataagatctgcagtttccagctctgtgaaacagaaaacataaatagcattttgacttgtccgtggaagaggatggttgcatgcttctaatttgtacatttccatctttgtgataagatgctttaataaacctctcaaattttac

SEQ ID NO: 4725 - DNA, 1388 bp, Cricetulus griseus
gaagccatgtatcatcagcttcagctcactggctgtgctggagtggctcccaataaactattggcaaagttagtttctggtgtttttaaaccaaatcaacaaacagtcttattacctgaaagctgtcaagatctcatccacagcttgaaccacataaaggaaatgcctggtattggctataagactgccaaacgtcttgaggtgctgggaatcaatagtgtgcgtgatctccagaccttttcagtcaaaacattggaaaaggaattagggatttcagttgctcagcgcatccagaagctcagttttggagaggacaactctcccgtcactccctcagggccacctcagtccttcagtgaagaagatacatttaaaaagtgttcatcggaagctgaagctaaaactaagattgaagaactgctttccagccttttgaagagagtatgccatgatggaaggaagccccatacaataagattagtcatccgtcggtactctgagaaacactgtaatcgtgagagtcgccagtgccccattccttcccacgtcattcagaagttagggacaggaaattatgatgcaatgactcccctgcttgatatccttatgaaacttctccgaaatatggtaaatgtgaagatgccatttcaccttactcttctcagtgtgtgcttctgcaatctgaaagcactgagcactgctaagaaggggcccatggatttctatttaacgtccctgtcaacaacgtcctactccagcaagcgaagttttaaagtgaaagatagtcacaatgaagacctttacaaagagaaaggaactgaggagtccccactggatgccacgtatctttcaaaagaaaaagacacaagtgactttctccaggcccttcccgagggtgttgaccaagaagtctttaagcaacttccagcagacattcaagaagagatcctttctggaaaatccaaagacagtctccaagggaaaggaagtttaagttgtccactgcatgcctctagaggagtattgtctttcttttctaaaaagcaaatgcaagctacttccttaagccccagaaatactgtgtctactggcaaacaggtatcggctatgtctccctgcgaaccaggaacatcaggcttgagtaccagtagttcttcccatccatcatgcagaaaggattgttcctattatatagataaacaagttaaaagatgaacgcatgagccaggggacctaaagaatctcaaggattccacctttccaatacaaacccagctgtttctgtgtttcattcatttccaaatctgcagagtgaacaacttttctccaaacatcgccctgtggatagtcacaagcagacactagctaccacctctaatcaaggacta

SEQ ID NO: 4726 - DNA, 1387 bp, Cricetulus griseus
atggcggaggtgggggagataatcgagggctgccgcctgcccgtgctgcggcgcaaccaggacaacgaagatgagtggcccctggctgagatcctgagcgtgaaggacatcagtggccgaaagcttttctatgtccattacattgatttcaacaaacgtctggatgaatgggtgactcacgagaggctggacttaaagaagatacagttccccaagaaagaggctaagacccctaccaagaacggacttcctgggtcccgccccggctcgcctgaaagagaggtggaaacggaaggtggaagtggtttcaccagcaactccagtgcccagcgagtcagccccagcctcagttttccctcagaatggatcagcccgtagggcagtggcagcacaaccaggacggaagaggaaatctaattgcctgggcactgatgaggactctcaggacagttcagatggaataccgtcagcaccacgcatgactggcagcttggtgtctgaccggagtcacgacgacattgtcacccggatgaagaatatagagtgtattgagcttggccggcatcgcctcaagccatggtacttctccccgtacccacaagagctcaccacactacccgtcctctacctgtgcgaattttgcctcaaatatggccgtagcctcaagtgtctgcagcgccacttgaccaaatgtgaccttcggcaccctccaggcaatgaaatttaccgcaagggcaccatctccttttttgagattgatggacggaaaaacaagagttactcacaaaacctgtgtctgctggccaagtgcttcctcgaccacaagacattgtactatgacacagaccccttcctcttctatgtgatgacagagtatgactgcaagggcttccacattgtgggctacttctccaaggaaaaggaatctactgaagattacaatgtggcctgcatcctgactctgcctccctatcagcgcagaggctatggcaagctgctgattgagttcagctatgaactctctaaagtagaagggaagacagggacacctgagaagcccctgtcagatcttggcctcctatcctatcgaagttactggtcccagaccatcttggagatcctgatgggactgaagtcagagagcggggagaggccacagattaccatcaatgagatcagtgaaatcactagtatcaagaaagaagatgtcatctccacactgcagtatctcaatctcatcaattactacaagggccaatatatcctcactctgtcagaggacatcgtggatgggcatgagcgggctatgctcaaacggctccttcgaattgactccaagtgtctgcacttcactcccaaagactggagcaagagaggaaagtggtga

SEQ ID NO: 4727 - DNA, 1387 bp, Cricetulus griseus
ggtcccggacgcttggtagatgctagcaccatgagcttcgtggcctacgaggagctgatcaaggaaggcgatacagccatcctgtcgctgggccatggctcgatgatggcagtgcgtgtgcagcgtggggcacagacccagacccggcatggcgtcctgcggcactcggtggacctcattggccgcccatttggctccaaggtgatctgcagcagaggcggctgggtgtacgtgcttcaccccactcctgagctctggactgtgaacctgccccaccgcacacagatcctctactccaccgacattgccttaatcaccatgatgctggagctgcgacccggttctgtggtctgtgagtcaggcacgggcagtggttctgtctcccacgccatcatccgcagcatcgcccccactggccacctacacactgtggagttccaccaacagcgggcagacaaggcccgggaggagttccaggagcatcgtgtgagccagtgggtgacggtgcacacccaggatgtttgccgcagtggcttcggtgtcacccacgtggctgatgctgtcttcttggatattccatcaccctgggaaactgtgggccatgcctgggatgccctcaaggttgaaggtgggcgcttctgttccttctctccatgcattgagcaagtgcagcgcacatgccaggcactggcagcccatggtttcacagagctcagtaccctggaggtgctgccacaggtctacaatgtacgcaccgtcagtctgcccttgcctgacctgggggcaagtgacttagaggtcagcatgggctctgatgccagccctttccgtagtggcacacccatgaaggagactgtgggccacactggctacctgacttttgccacgaagactccaggatagtgggcctcggcaggagtatcacaggcaaacaaggaggccagaggctaccttatatggccagccgctgcctgtggggcttgtgtttagaaatagatggcagggtggggcaggggcctcctgggtagttgaggggggtgagtaggctggccctgttgagcagggaggcattcctatcttctgagagggaagcctccacctcatcactgctcatcctggccattctttgttgtcaacatgaagcttcctctgccataggctcccctgggtgttgagaccaaatggtacaagttgagggccgaggcagctctgggcactccctgaagcctgggctgacctacagggttccccagggctgatggagggaccaggctggcctagggaacaaaggaggtgacgtgtgtgtgtgtgtgtgtgtgtgtgtgtgtgtgtgtgtgtgtgtgtgtgtgtgtgtgtgtgtgtgtgtgtggagttactgtgtgtgctg

SEQ ID NO: 4728 - DNA, 1387 bp, Cricetulus griseus
cgagtaacttggctccgggggctccgctcgcccgcacgcccgcacgccgcacgcctctcgggaccacgccgcctccgccagccgcctccttccgacggccctcgccgcaaaggccgggtcgcctctcccccctccgcccccgccgcggaaagttaagtttgaagaggggggacgaggggaacatggacatgaagaagaggatccacctggagctgaggaaccggactccggcggctgttcgagaacttgtcttggacaactgcaaagcaaatgatggaaaaattgaggggttaacagatgaatttgtgaacctagagttcctcagtttaataagtgtaggcttattttcagtttcagatctccccaagctacctaaattgaaaaagcttgagctcagtgataatagaatttttggcggtctggacagactagcagaagaacttcctagtctaacccacctaaatttaagcgggaataaactgaaagatatcagcaccttggagcctttgaaaaagctggattgtcttaaaagtttggatctgtttggctgtgaggtcactaatttgaatgattatcgggagagtgtctttaagctcctgccccagttgtcctatctggatggctatgaccgggaggaccaggaagcacctgactcggatgtggaggtggatggtgtagaggaagcccccgactccgatgccgaggtggatggtgtggacaaggaggaagaggatgaagaaggagaagatgaagatgaagaagaagatgaggatggtgaagaagaggaggatgatgaagaagaggatgaagatgaagacgaagatgtagaaggagaagatgatgaagatgaagtcagtggggaggatgaagagtttgggcatgatggagaagttgatgaagatgaagaggatgaggatgaggatgaggatgaagaggaggaagaaagtggaaaaggtgaaaagagaaagagggaaacagatgatgaaggagatgatgattaagacccgaaacaatctgcaagaaacagaactgttgagtattggttggactgctcatggatttggtagctgttttaaaaaggtagctgtgatacaagccccaggacacccccacccaaagagccaaagaatagttcccaagacattccgccttcctccgtttagccccttggtaatccaccaccaagcctggggactgccaccccaacaaaattgtaaacgttgttaggtttccgtgtaagactcttgctgtatcgtgacagctgtgattggtgagttgaccgtcctggctgccagttacactgcgattgtaacaacatttttactttctgtacaacaaggaaaagctttgtaaataaaatcttaacattttgaaaaaaaaaaaaaaa

SEQ ID NO: 4729 - DNA, 1387 bp, Cricetulus griseus
ggagtccgggtgcggactgtggtttcgggttcatgtgctgctcacagcctccttatcaccacagaagggaagctggtggaggcgtggggtcggaacgagaaggggcagctgggccatggtgataccaagagggttgaagcccccagactcattgaggccctcagccatgaggcaattgtgctggcagcatgtgggcgcaaccacaccctggcgttaacagatactggctccgtgtttgcctttggagagaataagatgggacagctgggccttgggaaccagacagatgctgtcccaagccctgctcagatcatgtacaacgggcagccaattaccaagatggcctgcggggctgaattcagcatgctgatggactgcaaaggcaacctctattcctttgggtgccctgaatatggccagctgggacacaactcagatgggaagttcatcgcccgagcacagcggatagaatatgactgtgagctggtaccccggcgggtggccatcttcatcgagaagaccaaggatgggcagatcttacctgtcccgaatgtggtggttcgagatgtagcctgtggcgctaaccacacactggtcctggactcacagaagcgagtcttctcctggggctttggtggctatggccggctgggccatgccgagcagaaggatgagatggtgcctcgcctggtgaagctgtttgacttcccagggcgcggcgcaacccagatctacgccggctacacctgctcctttgctgtcagtgaagtgggtggcctgtttttctggggcgctaccaatacatcgcgtgagtctaccatgtacccgaaagcagtacaggacctctgtggctggcggatccggagccttgcctgtgggaagagcagcatcattgtggcggctgatgagagtaccatcagctggggtccatcaccaaccttcggagaactggggtatggggaccacaagcccaaatcttccactgcagctcaagaggtgaagaccctggatggcattttctcagaacaggtggccatgggctattcacactccttggtgatagcacgagatgagagtgaggctgagaaagagaagctcaagaagctgcccgagtacaccccacgcaccctctgaggcagggtggcactcccctcgtggcagctgtcattttcacgtgcactgggaccagaagtcagacaaggaatttaagaagcaaaagttgaccgaaggtgcattgggtcagcctccccgcggttccgtttccaagcaattcaacgttaactacctttttctgtatgctttccaaagtgtttttccctcaatgtttgattaaaacatttgctcatagccagcttgcctttctacgagacaggcaggaactctgagc

SEQ ID NO: 4730 - DNA, 1387 bp, Cricetulus griseus
gaagtccaaaacgtgtgagaaagtcatctctgtgggtcagacagtcataacaaagcatcggaacactcggtactacagctgtagagtgatagatgtgacgtctcaaaccttctatgaggtcatgtttgatgatggctcctttagcagagacacatttcctgaggatattgtgagcagaaactgtttaaaactgggccctcctgctgagggagaagtcatccaagtcaaatggcctgatggtaaactctatggtgcaaagtatcttggatcaaatattgcctacatgtatcaggttgaatttgaagatggatcccagatagcaatgaagagggaagacatatacacttttagatgaagagttacccaagagggtaaaggcccgcttttccacagcctctgatatgcgattcgaagacacattttatggggcagatgtaatccaaggggagagaaagaggcaaagagtactgagctccaggctgaaaaacgagtatgtggatgaccctgtgtatcgtactttcttgaagagttctttccagaagaagtgtcagaagagacaatagttgataacctgctgcaaccaaagagcagctcagaaagaaggaagacaaagggaaagtcttggtgtatgcactgggacatgtgatggggtgggtgcttctctggcattggtaacagacaaggcttccagaatttggttaccaagcaaccaggaagacattgattctgtagtctgatcactccctctgtcatgtatttgaccccaaagaatatgcattcctaagtgaaaggagatgacagtgaatggcccactatatagaactcgtgccagagaagagggggttacctctctgtggctcaggtccctcctcagggaacaaatatggaggctcctctcccggaaagagtcttactcacatttgttttaagtggcagttttataaaacattttaaaacacaaatggtatgaatggtaatggaatttacctatgtgctatctgtattccctttgtatagtaacttttcctatttttttatattattacttttgattgtgtctgaaaactgagttggcctttgtaggaggaaaatttgtgctcttgaaaaggaattcatatgaagtctatgggaattttatatatttacagaggaaaaatctgggtatggtattttaaacacttcacaattcctgttctgaacagatatttataaaaatatatatttctttcattatgtgtttgtaaaaattaggaattaaaataaatataacttaaagcatagttttgaactaatataatttgatttttctttgcaagacagcccagaaatgtactagtaatttaaaaattaaaatcctgttttctcctgaaaaaaaaaaaaaaaaaaa

SEQ ID NO: 4731 - DNA, 1386 bp, Cricetulus griseus
atagtaaccttgccaaaagcacctgcttgccggggacagaggatgtgatggagctgcttgaggaagacctcacgtgcccaatttgttgcagtttgtttgatgatccccgagttttgccctgctcacacaacttctgcaaaaaatgtttagaagggctcttagaggggaatgtgcggaattcattgtggagaccatctccattcaaatgtcctacttgccgtaaggaaacttcagcaactggagtcaatagtctacaagttaattactccctaaagggcattgtagagaaatataacaaaatcaagatttctcccaaaatgaccagtgtgcaaaggacacttgggacaacctctcaacattttctgtgtgactgataggcagctgatttgtgggatgtgcgctacttgtggcgatcacactaagcatgtcttctctttctattgaagatgcctatgctcaggaaagggatgccttttgagtccctctttcagagttttgagacttggcatcggggagatgctctttcccgcttggatactttggaaacaaacaaaaggaaatccctacagttactcactaaagattcagataaagtaaaggagttttttgagaagttacaacacacattagatcaaaagaagaatgaaatcctgtcagactttgagacgatgaagcttgcagttatgcaatcctatgacccagagatcaacaaactcaacactattttacaggagcagcggatggcctttaacattgctgaggcttttaaagacgtgtcagaacctattatatttttgcaacagatgcaggagttcagggagaaaatcaaagtaatcaaggaaactcctttgctaccctctaatttgcccacaagccctttaatgaagaactttgataccagtcagtgggaagacattaaactagtcgatgtggataaactttctttgcctcaagacacaggtgtgttcattagcaagattccctggcactcctaccagttgttcatggtggcagttctgctgggtctcctcatattctttggtcctaccatattcctggagtggtctccatttgctgaattggcagcttggaaagactatctttcaagtgtcagttcttatctgcctaaatcagctgattttgtagaacagtctgtttttttctgggaacagatgacagatgggtttttcatttttagtgaaaaggtaaaaattttagtttggtgacactgaacactgtggcagaatttgtgtgcaaatataaactactataaaatctttcaactacacagttttgtttcttgatgggattgttggggaacacagtaatgattcagatttggttaagattccagtccagtgtttcttttaagagtattcctttaat

SEQ ID NO: 4732 - DNA, 1386 bp, Cricetulus griseus
cccgctcccatgcccgagccggatcgatacagactcggacactgaggggaggagcgactggcggagaggcagagatggacttcctgcggaatctattctcccagaccctgggcctgggctcccagaaggagcgtctgctggatgagctgagccttgaaggagttacccgttacatgcagagcgagcgctgtcgcagggtcatctgtttagtgggagctggaatctccacatctgcgggtatccctgacttccgctcgccgtctactggcctctatgcaaacctggagaagtaccacctcccttacccggaagccatctttgagattagttacttcaagaaacatccagaacccttctttgcccttgccaaggagctctatcccgggcagttcaagccaaccatctgccactacttcatccgtctgctgaaggagaaaggcctgctggtgcgctgctacacgcagaacatagacacactggagcgagtggcagggctggagccccaggacctggtggaggcccacggcaccttctacacctcacactgtgtcagctccacctgcagacaagagtacacgctgagctggatgaaagagaagatcttctcagagacaacccccaagtgcgagaaatgtcagagcgtggtgaagcctgacatcgtgtttttcggtgagaatctcccgccacgcttcttctcctgcatgcagtcagacttctccaaggtggacctccttattgtcatgggcacctccctgcaggtgcagcccttcgcctccctcatcagcaaggcaccactgtcaaccccacgcctgctcatcaacaaggagaagacaggccagacagatcccttcctgggcatgatgatgggcttgggcggtggcatggattttgactccaagaaagcttacagagatgtggcctggcttggtgactgtgaccaaggctgcctggccctggctgacctcctcggatggaagaaggagctggaagaccttgtccggcgggagcatgccagcatagatgcccagtcagggtcacaggcccctaaccccagcactgccacctcccctaagaagtccccccctccagccaaggaggcggccaggaccaaagagagagaggagcaccagtgaccactacctcccaagcaggacagtggagcccagccagcactggtccctctaacatggagctggtgtggggctcagtagatccttcattctcttaaccgctttcttgaaaccagggtccccaactcaatcccagaaagttctaatatacctgagggctgaggcctgtgcagctggcctcaacatatacaacccctttcctagggtcccacttgccagccagttttgggggatgagcaggagacctttgtttatt

SEQ ID NO: 4733 - DNA, 1386 bp, Cricetulus griseus
acctaggatgctctcagaagacctgcaatcactggagctctacatcaacaggatgaaggataagaccctgtggaggtggtgggcccagtaccttgagagccaggccgagatggacactgcattgcgctattacgagctggcacaggactacttctccctggtccggattcactgctttcagggcaacattcagaaggctgctgaaatagccaacgagactggagactgggctgcatcctaccaccttgcccggcagtatgagagccaggatgaggtaaacaggcagtgcacttctacacaagggcacaggctttcaacaatgccatccgcctatgcaaggagaatggcttagatgaccaggctctgcagctgtgcctagaacagaacatgaccatcactgaggagatggcagagaagatgaccgtgtccaaggactcaaaggacctgtctgaggagtcacggcgtgagctgctagagcaaattgccaactgctgtattgcgccagggcaactatcacctggccaccaagaagtacacacaggctgggaacaagcctgaaagccatgagagcactgctaaaatctggagacacagagaaaattgtgttctttgcgggcgtctcaagacagaaggaaatctatatcatggcagccaattacctacagtccttggactggcggaaggagccggagatcatgaagaatattatcagcttctacaccaaagggcgggccttggacctcctggctggcttctatgatgcctgtgcccaggtggagattgatgaataccagaactatgacaaggctcacggggcattgactgaggcctataagtgcctatccaaagccaaggccaagagcccctggaccaggagaccaagctagcccagctacaaagcaagatgaccctagtgaagaggttcatccaggcccgaaggacatacacagaggaccccaaagagtccatcagacagtgtgaactgctcctagaagagccagacctggacagcaccatccgcatcggggacgtctatggcttcctggtggaacaccatgtacagatggaggaataccaaatggcctttaagtatcttgaggagatgaggaaaagaattccttcagccaacatatcatactatgtggaccagcgcactgtggacactgtgcatcagggcctgggcctcccgccatcccgcatcttgcccgagcgggtccggcacaatagcatggaggaccacaaggatgtgtatgaagaggtgatggaagaggtggaaaatgatccctgacagtcctgggcccctactgctgctgggagaagtcttccaggaaaggcagctctttttggtttttgtttgtttattattgtttttaaattctgcattgt

SEQ ID NO: 4734 - DNA, 1386 bp, Cricetulus griseus
cgccgcgaggatctaaaatgtccactgaggcacagagagttgacgacagtccaagcactagtggaggaagttccgatggagatcaacgggagagtgttcagcaagaacctgagcgagagcaagttcagcccaagaaaaaggaggggaagctatccagcaagacagctgccaaactgtcaaccagtgccaaaagaattcagaaggagcttgcagagatcacgctggaccctcctcccaactgtagtgctggacccaaaggagacaacatttatgaatggaggtcaactatattgggacccccaggatctgtctatgaaggaggggtgttctttcttgacattaccttttcaccagactacccgtttaaaccccctaaggtcaccttccgaacgagaatctaccactgtaatatcaacagccaaggggtgatctgtctggacatcctcaaggacaactggagtccagccctgaccatctctaaagtcctcctgtccatctgctcactccttacagactgcaaccctgccgaccctctggtgggcagtattgccacacagtacatgaccaacagagcggagcacgaccggatggccagacagtggaccaagcggtacgccacctaggggcctacgtgtgccagctgtgtgcaagcacattcaccaagtgcatcaatagcccacctgcccctccagacctccgttctgtttcctgtttttattaaattttgaactgttttgtgatggtatgtcatttgtccctcctccttcctaccctcaccctcctccccttcgctctgctcctcttttctcccttttattcccttttcaatttctgttaacttgaaagattcgggattcccccaccactgcagtgtggatgggagcttctgttttaagtgcaaaccatgtcagatctgtgctagtaagagctttcatacaaagctttgtattactgtgtggttttgggttttttgttgttgttgttttgttttattcttttttttttctcctttatgtgctcttcagaaaaacacattcagaattatatctcgtttctacttaaatgtagtgcttagggttaattttttgtactgaagtctttattggtgggtgcatgctactgggaacaaggttttgtacaaaaggtccaatcagaatcactgtgcattactgagaccctgtttatcacgagccttctgtaccccacgcagaagactgttagattgaacaaaataatatgtattttgatttacttaagtgcttgtaaatttcttagggacctgccacttttgactgtggatcagttgatgtacacttgtattattaatgcctcaataaatcactgtggcggatcaacaaaaaaaaaaaaaaaaaaaaaaaaaaaaaa

SEQ ID NO: 4735 - DNA, 1386 bp, Cricetulus griseus
ggaaggcgctgagcttaaaactgaagcaagttctggggacaccggtggcgccgtggtttgaagacagggttccaggtccccgcgtccggaggtgagagcctgaaggccgacccagagatggggcgccggtcatcagacactgaggaagaaagcagaagcaagagaaaaaagaaacaccggagacgctcctcttcaagcagttcttcagacagcaggacgtacagccgtaagaagggcgggaggcggccaaggtccgagtccaggtcctggtctagagaccgtcagcctcgctcccattcttatgagagaagacgcaggcacaggtcaagcagcagctcttcctatggctcccgaagaaaacgaagccgaagtcggtccaggggtcgagggaagtcctatagagttcagcggtctcggtccaaaagcagaacaagaaggtccaggtcaagacctcgtccacgttcccatagtcgaagcagtgaaagatccagtcatagaagaactcgcagtaggtcaagggacagagaacgacgtaaagtgcgggacaaagagaaaagagaaaaggagaaggacaaaggcaaggacaaagaagtacacagcattaaacgaggggattctggaaacatcaaagctggattagaacatctgccaccagctgagcaggccaaagccagattacagttggtccttgaagctgctgcgaaagctgatgaagcattaaaagccaaagaaaggaatgaagaagaagcaaagagaagaaaagaggaagaccaagctaccctggtggaacaagtaaaaagagtgaaagaaattgaagccatcgaaagtgattcttttattcaacagacattcagatcaagtaaagaagttaaaaaatctgtagaaccaagtgaagtgaagcatgtgactccagcatcaggaccaacatcagtagctgctgacccacccagcattggaaaggaaatagaccctgacagcatccccacggctatcaagtaccaagatgacaattctctagctcatccaaatttatttattgaaaaagctgaagctgaagaaaagtggttcaagagattaattgccctccgtcaagaaagattaatgggcagtcctgtggcctgaggaagagacttatggttgaattgacagaagccttgtgaaaattgaggtttttaaataccaatattaacttttactcagaataatttagccaattacatagaaagaaaatctcatttcttctattgtgttcaactgaatatttgttgatttgaatcaaacattgtgaatagtaaatctattataaaaggtatgagtgcatgaaaacatattgtcctgttaataaagctaatcaaaaaaaaatgtcagggatgaagtaaataaaca

SEQ ID NO: 4736 - DNA, 1385 bp, Cricetulus griseus
attctcggacctcggcgacctccttgcatcttagtttgcagagaacttgtaagtagctggccgccgcctcaggtgtttgaaccatgaatcttttactcctcctggccaccctgtgcttgggaacagccttggccactccaaaatttaatcaaacgtttaatgcgcaatggcacaagtggaagtccacatacagaaggctgtatggcacgaatgaggaagaatggaggagagcagtgtgggagaagaacatgaaaatgattgagctgcacaatggggaatacagcgaggggaagcatggctacaccatggagatgaacgcctttggtgacatgaccaatgaagagttccggcagttagtgaacggctataagcaccagaagcacaggaaggggaaggtgtttcaggagcctctgatgcttcagctccccaagtctgtggactggagagaaaaaggttgcgtgactcccgtgaagaatcagggacagtgtggttcttgttgggcttttagcgcttgtggggccctagaaggacagatgtgccttaagactggtgtgctggtctcccttagcgaacagaaccttgtggactgttctcaggctgaaggcaatcagggctgcaatggtggcctgatggattttgccttccagtatgttttgaacaacaaaggtctagactcggaggagtcctatccctatgaggcaaaggatggaacctgtaagtacaaacctgagtttgctgcggctaatgacacaggatacgtggatatccctcagctagagaaggcccttatgaaggccgtggcaaccgtgggccctattgctatcgctatagatgccagccacccatctttccagttctatagttcaggcatctactatgaaccgaactgtagcagcaaagaacttgaccatggggttctggtggttggctatggatttgaaggaacagattcaaataagaaaaaatattggattgtcaagaacagctggggttcttcatggggtatgggaggcttcttccatatagccaaagacaagaacaaccactgtggagttgctactgcggccagctatcctactgtgtgaattgatggaaagtggtaattaaagacttatgggtactacatctgaaggaatttatcttaaaattgaccaaacccttactgagaccatagtacttgaatcattgaagatccaagtcgtaatttgaactctgtgacatttttacatgggttaaatgttaccactagttaaactactcttatacacagctttataatattgaacactcactgcctacttctgagtctggaatatttgttttgtaaaggatgtataaagctttgtttagcttttaaaaataaattttagttcagtgtgtatgta

SEQ ID NO: 4737 - DNA, 1385 bp, Cricetulus griseus
gcggaccctccaccggccgcggagccgctatgggcccgccaggcccctggcgcggcgcggcgcaggcaccggctcagaaccaggattgaaagtccaagatggacgatcaggatcctgggggcattagccccgttcagcaaatggtggcctcaggagctggggctgtggtcacctccctcttcatgacacccctggatgtggtgaaggtccgccttcagtctcagaggccctcagtagccagcgagttgacgccttccagattctggagtctcttctacaccaaatctccctctactctgcaatccccagggaagtgcctcctatactgcaatggtgtcctggagccgttgtacctctgccctaatggtactcgctgtgccccctggtttcaggatcctacccgattcactggcaccttggatgcctttgtgaagatagtgaggcatgagggcactaggaccctgtggagcggcctcccagccaccctggtgatgactgtgccagctactgccatctacttcactgcctatgaccaactcaaggctttcctgtgtggtcaatccttgacctctgacctctacgcacccatggtggctggtgccctcgcccgaatgggcactgtgacagtcatcagccccttggagcttgtgcggaccaagctacaggctcagcacgtgtcataccggcagctagctacctgtgttcaagctgcggtggctcaggggggctggcgctcactgtggcttggctggggtcccacagcccttcgagatgtgcccttctcagctctgtactggttcaactatgagctggtgaagagctggctgaatgggccaaaagaccagacatctgtgggcgtcagctttgtagctggtggcatctcaggaatggtggctgccacccttactctgccctttgatgtggtgaagacacagcgacagatcacactgggagcactggaggctgtgagagtgaagcccccaagaattgattccacttggctcctgcttcggagaatcaaggcggaatcgggcaccagaggactgtttgctgggttcctcccaagaatcatcaaggctgctccctcgtgtgccatcatgatcagcacttacgagtttggcaaaagtttcttccagaggctcaaccaggaacagcctctgggctcctgaaaggcgaggagcaaccagctcttgaacgggtggggacaggagactgagccaagtgccttcctccccaacccagtcacccaggctaccctcacattttgattcctgctgttctccctaccacggtcaccactcgtccacctccaagttcaagaccaaatctgacagctgcccctttctttgtaaccctttatgtttgttgaagcctggccccgagga

SEQ ID NO: 4738 - DNA, 1385 bp, Cricetulus griseus
ctcttctgtgtgggttgggaagctccccaaggccttgagctaccctcagacaaggatatggtgtttgaggaggcctgtgggtactaccagcgacggagcctgcgaggtacccagctcaccccagaagaactgagatgcaacagcatgtttcgggcacctcaggccttggcctcctatcctccagggccacctgcccccatctgcactgttgactatgctgagggctgagcttcgggattaccggagtttagagctgctcaaggcccaactggtggcaggggacgaggaggaggccggctggactgagttagcagagcgcgaggtggcccgcctgctgagaacccagctgaccggcgaccagctggcccaactcaacaccattttccaagcccttcctacagcagcttggagtgccaccctccaggccctgcagctccagccagatagaactggcaggctgcggtcccaagcaccccctgatgtgtggaagaaggtgctgaggggcccagcatctgggaaggagcaccccaatggaatcctgcccccctttgaactcctctgtcagtgcctgtgcaagctggagcctcagtggctgcccccatttgtggagctggcacagcagcagggtggaccaggctggggggctgaaggccccagtctaaccctttatcgtcgggccctagcggtgctaggtgaggaagggaagagacccgaggccctggaactggaactgcttctgggcaggtgggcggcccaaggctgtgctgcaggctgtgaggcagctgatagagaaggagcagtgggacagggctctggaggcaggcctggccctcgactcctccagccccctgcttcggagtgagatctttaagctcctgctggcagagtttgcccgccaccgtcgccttgatgctcacctccccctcctttgtcgcctgtgccctccagaactggctccagatgagctcctgcttttactgaggacacatctcccagatgatgtgggaacctccaaccctttccctgagcctggggcagagccgcctctcacagttggcttggtcagagccctcctagaacagaccggggctcaaggccggccctctggcccagttcaaagcaaatatgaggacatcctatgggatccagggactccaccccctaccccacctcgtggacctattgctacggtacaggcatcagaccacccaggaccagaggcctgggtaccatctggacaggggctctgtgcaactgacatgggaggtcatttgtagaccatagagagaaggggaagggtccctagggttggcaagtacaaaagtgaaacttgtagtgtgcaatactgagttgtggaactaatttttaaaatataatgacaaata

SEQ ID NO: 4739 - DNA, 1385 bp, Cricetulus griseus
ctatgtgtacagtccactgggctctgcctataaactccagagttacactgaaggctatggtaaaaacaccagcttagtaactattttatgatttggaataccatgatgggaacatctatactaagtattccttggggcataaaacaggctggattcactactggaatgtgtgtcatcgtgctgatgggccttttgacactgtattgctgctatagagtggtgaaatcacggagtatgatatgtacatcggacacaactacctgggaatatccagatgtctgcaaacattattttggctcctttgggcaatggtcgagtctccttttctccttggtgtctcttattggagcaatgatagtttattgggtgcttatgtctaattttcttttcaatactggaaagtttatttttaatgttattcatcacattaatgacacagacactatactgagaaccaataatagcaaccctgtgatttgtccaagtgctgggagtggtggccatcctgacaacagctctgtgattttctacaatgacacacaagtccagcagtttgaaaagtggtggaataagtccaagacagtgcccttctaccttatagggctcctcttgccactgctcaacttcaaatctccttcttctttattcacaattgtattatcacactcttaaaaacaacaagaaccaagaaaataatgtgagagacctatgcattgcttatatgctggtgacgctaacttatctctatattggtttcctggtttttgcctcatttccttcacctccactatccaaagattgtattgaacagaacttcttagacaacttccctagcagtgacaccctgtccttcattgcaaggatattcctgctgttccagatgatgactgtctacccactcctaggctacttggctcgtgttcagctcttgggccatatcttcggtgacatttatcctagcattttccatgtgctgattcttaatgtaattattgtgggagctggagtgaccatggcctgtttctacccaaacataggagggatcataaggtactcgggagcagcatgcggcctggctttcgtgttcatatatccttctctcatctacataatttccctacaccaagaagagcgtctgacatggcctaaattagtttttcacgttttcatcatcatcttgggcctggcaaacctgattgctcagtttttcatgtgaaaactgtgttctcaagatttctcatggtattctgaaccttggcaacggttctgcataaaagaacttgaaaatgctgtcattgctgtaattctaagtgtttttctaagataattgaaaccaagggaatgatggtctgctgataactatttttgtactggaacagggaggg

SEQ ID NO: 4740 - DNA, 1385 bp, Cricetulus griseus
cgaggccgccgggaccggaagccgcggtgggatgcggctgacgcggacacggctgtgctcgctcctcgtcgccctgtactgcctcttctccatctacgccgcctaccacgtcttcttcgggcgccgccgccgggcgacggccgccagctcccggggctccaggaaagcggcggtgcaggcgaaggagaggcgcggccgagatcagtcggccctggagagtgaagaatggaacccttgggaaggagatgaaaaaagcgagcagcaacacagaattaaaactagcctgcagatgttaactaaatccacaagagaaaaaactgagcgcagtatacaaatctggggcaaagctgccattggtttgtatctctgggaacatatttttgaaggcactcttgatcccactgatgtgactgctcaatggagggaaggacagtcaattgtaggaagaacacattacagctttatcactggcccagctgtacttccagggtacttctccatagatgtggacaatgtggtacttgttttaaatggaagagaaaaggcaaagatcgtccatgccacccagtggttgctttatacacagaatttaatacaaacccaaaaactgcagcatctagctgttgtcttgcttggaaatgagcactgtgacaatgactggataatgaagttcctcaaaagaaacagaggctttgtggacctgcttttcataacatatgacagcccctggattaatggtgccgatgttctccagtggcctttaggtgtagcaacatacaggaagttccctgtggttgaagccacctggtcaatgctgcatgatgagaggccctacatatgtaatttcttaggaactgtctatgaaaattcatcaagacaagcattaatgaacattttgaaacaaaatggaagtgagaaactttgttgggtttctgcaagagaacagtggcagcctcaggagacaaatgaaagtcttaggaattaccaagatgctttgcttcagagtgacctcacattgtgtcctgtaggagtgaacacagaatgttacagaatatatgaggccagctcctttggctcagttcctgtggtagaagatgtaatgacagctggccactgtggaaacacatccagtcaccacagcactcctctgcagttactcaaggccatgggggctccctttatcttcatcaaggactggaaggagcttcctgctattttagaaaaggagaagactatcattttacaagaaaaggttcaaaagaagaaaaatgactacttcagtggtaccaacacttcaaaacagaactaaagcggaaatttactaatactttagaaagttcatttttatgaataataaaggttaatcatatctaaaaaaaaaaaaa

SEQ ID NO: 4741 - DNA, 1385 bp, Cricetulus griseus
ctcgcgaataacaaaagaacctggaaaagttggagaagataaagtatattcagtatccagtcaggagatcaacaaaccaggaaatgcacaattttgaggaggagttaacgtgtcccatttgttacagtatttttgaagatcctcgagtactaccatgctctcatacattttgtagaaattgtttggaaaatgttcttcaggcatctggtaacttttatatatggagacctttgcgaattccactcaagtgccctaactgcagaagtattattgaaattgcttcaactggtatagaatccttacctgtaaattttgcattaagagcaattattgaaaagtaccagcaagaagaccacccagatgttgtcacctgccctgaacattacaggcaaccattaaatgtttattgtctactagataaaaaattagtttgtggccattgtcttactataggccaacatcatggtcatcctatagatgaccttcaaagttgcctatttgaaagaaaaagatacacctcagaagttgtttaaacagttaacggacacacattggacagatatcactcgtcttattgaaaagcttgaagaacagaaatgtcattctgagaaaatgcttcaaggtgataaggaggttgttctccagtactttaaggagcttactgatgcattagaacagaagaaaaaaaaaatttttaggcagctctctgtgatgttggcaagctgattaatcaagaatacactccacagattgaaagagtgaaggagataagagaacaacaacttgagttaatgacagtgactacatctttacaagatgagtctcctcttaaatttctagaaaaaattgatgatgtccgacaacgtgtgcagatgttgaaacgaagaccacttcctgaggctaagcctgttgaaatttatcctcgagtaagcaaagtattaaaggaagaatggagcagaacagaaattggacatattaagaaagctgtcattcctgaaatgagaatttcttcaagaaggatgccatgttcctggcctgacaaggatgaaaaagaaatcgaattttttaaaattttaaatattgttatagtttcactaatttcagtgatattaatgttgatactccttttcaaccaacacataatcaccttcttaaatgaaatcacttcaatatgtttctctgaagtctctttgtctgtttaccaaagtttatctaataatttatgtgacttaaaaatatggtatgctatcctttatatttgttaaaggaattcatgtggaaaatagtttctcgttgaaaacccaaatcaacaattgtaagtgggcttattctttattgcagaggcttaccattgctagatggaagtcagggtagcataaatagca

SEQ ID NO: 4742 - DNA, 1385 bp, Cricetulus griseus
aagctaagggtctggcgagattccttcctggtggagagaggcaaactgctccacaagagagatggtgacaaagtggatgcccaggagagaacttcttgcccaagtaccagcgtgtgaaggacttgtgtcagcgtgccgagtaccagacagcatgcgagcagctgggccagaagtggcagtgtgtggaagatgcttccgggacactgaagctgcacaagtgtaagggccccatgcggtttggtggtggcggcggcggtggcagagccctctccaacctggtgcccaagtactacgggcagagcggtgaggcctgcacatgtgacggcggcgtcggggactacaaactgggcctggctggacgccgcaaactctttaagaaaaagtacaaggccagctatgcccgcagccgctccacccgttccgtggccattgagctggatggtgaggtataccatataggcttggataacgtgccccagcctcggaaccttacccaagcggcactggccaggggccccagaagaccaggatgacaaggatggtggcagcttcagtggcactggtggccttccagactattcctcccccaatccccattaaagtaacccataggtgctacatcctcgagaatgacacagtccagtgtgacttggacctgtacaagtccctgcaggcgtggaaagaccacaagctgcacattgaccacgagattgaaaccctgcagaacaaaattaagaacctacgggaagtcagaggtcacctgaagaagaagcacaaaggctccagtctgcaccctttcaggaagggtctgcaagagaaggacaaggtgtggctgttgcgggagcagaaacgcaagaagaaactgcgcaagctgaacaacacatactggtgcctgaggaccatcaatgagacccacaacttcctcttctgtgaatttgcaaccggcttcatagaatactttgacctcagtaccagacccttaccagctgatgaacgcagtcaatagcacaaaaacagcaccattcacctggccgggccgctgcctctgaaactgccttcttcactgtacatatgtgaccactcccatgtaaccacacagggctttaggggactctcaccaatacaaaaatcccattctcaagagtcgtggtgtcaataaacgctctgtggccagtgtcaacgaaagtcccttgagctttgtggacatttctgttcccgcccaggagtcattcccgatatccatcccagaactgatgttttctaaggtactgaacacccaagttgatgtgtgtcctgtgtttcaatgacattgtatttgtaaagaaattttgtagtgttaagtaccatcttacagtgttcacagccccagccaatgactagcaatt

SEQ ID NO: 4743 - DNA, 1384 bp, Cricetulus griseus
cctgcaggccttacacaccttactggggtctccttatgcacgaatccacattgcagaagatcagctgattggtgttgagctgctaagtgtcctgcaccgcctgctgctgacctggaacccacctccatccagctgctggtcactggggttgtgcagcagattgtcggggctgctcaggatcatttacaggaaaagagaaacaccataaatgaagaggatatggaaaaagagtcctgtcctacattaggagaaggaggtgacagcggtggcctcattcctggaaagtctcttgtgttttcaaccatggagctcttgatgttcatcttagtgcgtcatatgccacacctgtctactaagatgtcggactctcccaagtcacggtaccacgaaaactcgcctgtcagaagaaagtgctcgtttggtggcagccacggtggccattctgtctgatttgccgtccctttgctcaccagctggctgtatgacaatcctgcccacaattctgttcttaattgcaagaatattgaaagatacagcaataaagtctgcagacaatcaggttcctcctcccgtcagtgcagctctgcaggggataaaaagcatcgtgacactttcgatggccaaaaccaaggaaactacagaaacagtggacatctctaatccggagcacgctggcctgcatcctggagtattcacagccagatgattccatgcctgcgcctgatgaagtgagcacactcacggccattgcgctcttcctgtggtctgccagcagtgaaataataggagtgcagtccctacagaatggctgcatgaacagatttaaaagtgctctgaattcatgtgacccatgggttcaagccaaatgctaccagcttctcctctccgtctttcagcatgccaatcgcgccctttcaactccttacatccactcattagctccactcgtggttgaaaagctaaaggctgtcgaaagaaacagaccagccagcagtacagaacttctggctgtccaggaaggaatcaaagttcttgaaacattggttgctcttggagaagaccagaacagagtccagttactggctcttttagtgcccactttgatctcctacctgctggatgaaaattcttttgcctcagcaagttctgtctccaaagatcttcatgagtttgcactccagaacttaatgcacattggacctctgtacccacacgctttcaagacagtaatgggggctgctcccgaactgaaagtgcgcctagaaacggctgtgcgagcaagccaagccagccaagccaaagcggctgcccggcagccggcccctgccacacactctgcaccaacaattaagcttaagacaagcttcttttagtgtgttcttcc

SEQ ID NO: 4744 - DNA, 1384 bp, Cricetulus griseus
gcagcaacgtggagttcatgtgtaaggtgtacagtgacccacagcctcacatccagtggctgaagcatatcgaggtgaacggaagtaagattggcccagacaacttgccgtatgtccagatcctgaagactgctggaagttaataccaccgacaaggagatggaggtgcttcatttacgaaatgtctcctttgaggatgcgggggagtatacgtgcttggcgggtaactctggggtcctcctggttcggccttcacgactctcctccagtgggacccccatgctagctggagtctctgagtatgagcttcctgaagacccccgctgggagctgccgagagacagactggtcttaggcaaacctcttggagagggctgctttgggcaggtggtattggccgaggccatcgggctggataaggacaaacccaaccgtgtgaccaaagtggctgtgaagatgttgaagtccgacgcaacagagaaggacttatcagatctgatctcggagatggagatgatgaagatgattggcaagcacaagaatatcatcaacctgctgggggcatgcacacaggatgggtcctctttatgtcatcgtggagtatgcctccaaaggcaaccttcgggaatatctgcaggcccggaggcctcctgggctggaatattgctacaaccccagccacaaccccgaggaacagctgtcctctaaagatctggtatcctgtgcctatcaggtggcccggggcatggagtatcttgcctctaagaagtgcatacaccgagacctggctgctaggaatgtcctggtgacagaagacaatgtaatgaagatcgcagactttggcctagctcgagacattcaccatatcgactactataaaaaccaccaatggccggctgcctgtgaagtggatggcacccgaggccttgtttgaccggatctacacccaccagagtgacgtgtggtcttttggggtgctcttgtgggagatcttcactctgggtggctccccataccctggtgtgcctgtggaagagctcttcaagctgctgaaggagggtcatcggatggacaagcccactaactgtaccaatgagctgtacatgatgatgcgggactgctggcacgcagtaccctctcagaggcccactttcaagcagctggtggaagacctggaccgcattgtggccttgacctccaaccaggaatatctggacctgtcgatgcctctggaccagtactctcccagctttcccgacacacggagctctacctgctcttcaggggaggactctgtcttctctcatgagccgttgcctgaggaaccctgtctgccccgacacccgacccagcttgccaatggtggactcaaaagacgctgact

SEQ ID NO: 4745 - DNA, 1384 bp, Cricetulus griseus
tgctgctgcttacttccccattttctggttggttttgctctcaagatcgtgcccacctatgagaggatgatcgtgtttcgactgggccggatccgtaccccccaggggcctggcatggttcttctcctgccctttattgactccttccagagggtggatctgaggacccgagccttcaatgttcctccttgtaagttagcctctaaggatggggctgtgttgtctgtgggagctgatgtccagttccgcatctgggacccagtgctgtctgtgatggctgtgaaggacctaaacacggccactcgaatgacagcccgcaatgccatgaccaaggccctgctcaggaagtcactgcaggagatccagatggagaagctcaagatcggtgaccaacttctgttggagataaatgatgtgaccagagcttgggactggaagtagaccgtgtagagctggcagtggaggccgtgctgcagccacccaagacagcccagctgtcgcccagcctggacagcaccctccaacagttggccctccacttgctgggcggaagcatgaactcagcagttggaggtgctccatcctcagggccagtcgacaccctggaaatgataagtgaagtggagccacctgcctgtcttgctgggactgggcctgagcccagcccgaagcagcctgtggctgaggggcttctcactgccttgcaacctttcctgtcagaggcactggtcagccaggttggggcctgctatcagttcaacgtcatcttgcccagtggcacccagagtatctacttcctggaccttactgcaggacaaggcagagtgggacagtggagcacctgatggcatccctgatgtggtggtggagatggctgaggcagacctacaggccttattgtgcagggaactgcggcccctgggggcctacatgagtgggcggctgaaggtgaagggtgacctagctgtggtcatgaagctggaggctgtccttagggccttgaagtagcagtgttggttgtccatccatgacctagccctgaacctggtgccaagccagagaagcctcttgggataggaggcattggtctgagccacagaaaattgaggcctgaagatgttttagactcaaccaggagcccagcaggctgggagacatctgctgctgggcagtgctgagtcaggcatcctgcgctttcacccattgtggttctctggacaggcctttgcttattcgatccccaacaaagtgcctagtcctgagcttgctacagcgtgaagacagacagcccagcctgtcctacccagctgataacctgactggacagacaagagccccagaagcagcctgtatgtcaccagtgtgaaagaccaaagcgcatgga

SEQ ID NO: 4746 - DNA, 1383 bp, Cricetulus griseus
ctgaattttgtcacggaggagatgatcaacccctacaggaacctgcccctggccatcatcatttccctgcccattgtcacattggtatatgtgctgacgaatctggcctacttcacgaccctgtctaccaaccagatgttgatgtctgaggctgtggctgtggattttgggaactatcacctaggagtcatgtcctggatcattcctgtcttcgtgggcttgtcctgctttggctctgtcaatggttctttgttcacatcctccaggctgttctttgtgggatccagggagggccacctgccttctgtcctctccatgatcccacccacagctcctgaccacctgtgcccatcactggtgttcacatgtgtcatgaccctgatgtacgccttctccaatgacatcttctccatcatcaacttcttcagtttcttcaattggctgtgtgtggccctggctatcattggcatgatgtggctccgcttcaagaagcctgaactggagcgtcccatcaaggtgaacctggccctcccagtgtttttcatcctggcctgcctcttcctcattgccgtgtccttctggaagacacccaaggagtgtggcattggatttgccatcatcttaagtgggctacctgtctacttctttggcgtctggtggcagaacaagcccaagtggcttctgcaggccatcttctctgtgacggtgctgtgccagaagcttatgcaggtggtccctcaggagacttagctgctatccttagtgccacagagagtgagtggcatctacttcaagacaactgacctttggaagagcagcatccaggcctgtcactcccccacacgcgccagtgagcaccatgctgtgagctgaggcctggtctttctgactttcaggggactgccacatctggcctttctcccctctctgatttttgtttggttttgtttttgtagcttgcatttgggtcaagtttacactaccaagatgattattttttaacaaaacagggtagcaaggagcaggagctccgtagccagagcagcccagctggaaatgtgacgctgctggccacagctcttcacccaaggctgttgttcagtagcacagtgtgcctcaaggggaccacatcactgtcaccaggtcaaaagaactactgagactcagatgttatctgttctactgtgaacttggactgacagatggatgacgcatattctagcttgggctgttttgttttctgggatcctagagatggaaccccagcctcattcatatgaggcaagtgctctactgaccacattgggtccatctactgtgccatctgagttggtgatgtggttgtaacatcttcactgttgtattaatggctaacctgttaca

SEQ ID NO: 4747 - DNA, 1383 bp, Cricetulus griseus
gagtctttttgagtgtcctgtctgctttgactatgtgttgccacccattcttcagtgtcagagtggccatcttgtttgtagcaactgtcgccccaaactcacatgttgtccgacctgccggggcccattgggatccattcgcaacttggctatggagaaagtggccaattcagtacttttccccttgtaaatatgcctcttctggatgtgaaataactctgccgcacacagaaaaggcagagcacgaggagctctgtgagttcaggccttactcctgcccctgccctggtgcttcctgtaagtggcaaggctccttggatgctgttatgccccacctgatgcatcagcacaagtccattacaaccctgcagggagaagacatagtttccttgctacagacattaaccttcctggtgctgttgactgggtgatgatgcagtcctgttttggctttcatttcatgttagtcttggagaaacaggaaaaatacgatggtcaccagcagttcttcgcaattgtacagctgataggaacacgcaagcaagctgaaaattttgcttatcgacttgagctaaatggtcataggcggcgattgacttgggaagcgactcctcgttctattcacgagggaattgcaacagccattatgaatagtgactgcctagtgttttgaacaccagcattgcacagctttttgacaagaaaatggcaatcttgccaacctaaaactcctggtaggtagaagctagacacatgaaggtaaataaaaagaaaggctgttaatacaggaaacagttgcatgtagtaacactaatatatttaaaaataattcaacgtaaaccactgaaaaaatatatatacctaagatgggcatcttttgtatttaagaaaggaaacatttgtaaaatatttctgaaactttgtgtttgttgtagattgattgtattgttgacaactaactaaaatttttgggggtgtgtgtctgtgctacacattcgtgcacatgtgtggttggaatttctttaactgacaagccatctgtgtggtcatggaccactgctttccccttgtgagtcaatacatagtgctgctgtgttttgtgtgtgtatttgctaattttctagtttttcattaaataaaatttgactttcttttctgtaattcaggtttttctcacttttgtaccttttaagttagtgtctttttgatattcataattgcttatgtcaaaagtttgtgttgagtacatactttcttttccttcaatcaatttattagaaatattttttaattcagcccttttgtgaaaataggaattccagaaaggaaagataacatgagagcagctgtcaaagctgtagcaggtgtaagatggtcttgtct

SEQ ID NO: 4748 - DNA, 1383 bp, Cricetulus griseus
ctggctcatggtgtgaactctggccaggggtctgggcattgagatcatcggcaccctgcagctggtgctgtgcgtgctggccaccaccgaccggaggtgccgtgacttaggtggctcagccccgcttgccattggtttttctgtggccctggggcacctgctggcgatcgactacactggctgtgggatcaaccctgcccggtcatttggctctgctgtgatcacccgaaacttctcaaaccactggattttctgggtggggccattcattgggggtgccctggcagtgctgatctatgacttcatcctggccccacgcagcagcgacctcacagaccgcctgaaggtgtggaccagtggccagagggctgaaatcatattgtagatgctctgacaagctgaccaaagtcactccccaagacctgcctgacctgagtggtcccgccttgtccggggcagcaatatcactgtctttctttctgtttcctggtctcagagcttcctggggatcaagatttaccaactcagcacctcattccattcccatcatagaggggtgaaagggaggagctcacctgctattgtcccctcagagagtgctaggaagtccccctcatcccaaagttgcccagcaagtcacccacctcaggtgcctgggattctgctgttgttgctttgtgcctttgatcatgaccttccttgagtaggcatcttgtccccaaagaccctttgagggagaggaggtcccccaacatttgcctttggtctgacttatctccaggacctatgcccttagactcactataggaccttgaaattgtcccaatgctggggcctcagtgaccacgtatgtcaagtggcaaggaagggacagttacggggactcattaagtgtggacataccacaggttctagaaggaacattgtagacagcactgctgtgtctacctggcctgagctctttcccaacatccaaagcccatgagcacatgtggatgagctttgaagcagagatgtagttcaggatgctggaagtgcctgttcaccagagaggctttctttagtaggtttgctgtagcagaatgaaggccggtttgtggtggaagaaaagttcacacgctgcacgctcttctccattccctagcaggcactgtagcccacttaacagataaggacactgaggacccatgtgcccaactagatcatattgggtcaatcttagcagccaaggccttgtctgtccactccctggtcaatgaagtggtctcctctcccctccagtttctcagtttctgcctgggtaatggctaagggccaaggtgtgtgctggagaaggcggggcaggcccatcccacctggttctgaccactatgatcaaggacc

SEQ ID NO: 4749 - DNA, 1383 bp, Cricetulus griseus
ccgccgtctctgccgggccggaggcgattgagtgctggttcgtggaagacgcgggtcggggcggcctgaacaagaagcctgccgcattgctgctgcgcccaggacccaggggtcctccgccccggccacaccttgaccctaagctgtacttcaaggtggatgacccagcgggaatgctcctggctgccttcaggcggtacccctcgggcgcccccgcaccacactgcgagatgagccgcttcatcccgttccccgcctcggcgacctgggccagacatctgacgccgcagcagagctgcccgcgggccctggacggggactggctgctggtcagcgtgtccagcacggtcttcagcctctccagcctgctgcgacctcagcccgagccccagcgggagcccgtcctcatcaccatggcaacagtggtgctgactgtcctcacccacagtcctgcccctcggatccaactgggaaaagatgcagtgatggacctgagctttgcctacatgcccccgactccggaagatgctctgtctccggccacaggtccccctccctttgggctggagtggcgacgccagcacaggggcaaaggtcacctgctgctggctgcgactcctgggctggttgaggaaatgccaccagcccaagaaaaggctgtggcatttgcttcttgggatgacaatgagccctggggcccgtggactgggaacgggaccttctggctgccagctgtgaaaccgtttcaggagggtgtctacctggctactgtgcacctgccctatctgcaaggacaggtctccctgcagctgactgtgcacaagtcccccaaagtgtctctgacaccagcaccccttgtgtgggctgccccaggagaggcacccccggagctgctctgcctcgtgtcccatttctaccctgcggaaggcctggaggtggagtgggagctcagaggtggtccagaaggcggttccagaaaggctgagggggggacgtggctctccaccgtccgccaccattctgatggctctgtcagccaggccgggcacctgcggctccccccagtcactgcccagcagcatggagtccgctatgcctgtcgggtccaccaccccagcctgcccgcatcgggtcgcagtgctgaagtcaccctggaagtggcaggcctctctgggccttcagtcgaggacagcataggcctgttcctgtccgctttcctcctcctgggactcatcaaggcactgggctggatggctgcctacgtgaccttccgtgaagactcaaaggtgacggtaacagctgccagcctgtctggagaccaggctggcctcaaactcacagagacccacctgcctctgcctcccaggtgctgggattaaaggc

SEQ ID NO: 4750 - DNA, 1383 bp, Cricetulus griseus
cggtgccggtggaacaggcggtgctggagacgttcttctctcacctgggtatcttctcttacgacaaggccaaggacaatgtggagaaggaacgggaggccaacaagagcgcgggggcagctggctgtcgctgctggcggccttggcgcacctggccgcggccgagaaggtctatcacagcctcacctacctggggcagaaactaggcggccagtcattcttcagccggaaggactccatccgcaccatctacacggccctgcataacgaactgaagaaagtggtgacaggccgaggcgccccgggtggaacggcccctcacatggaggagctcctcccccatctgtcagagcagctctgtttctttgtccaggctcggatggagatcgcagagttctacgagaagatgtacgccctcagtacgcagaagtttatcaacgcggaagaactggttggcattttggatactgtcctcaagaaatacagctccagatttcaccatcctatcctttagccctctggaaagcagtttccagctggaagtgggcgtgctgagccatctcctgagggcgcaggcccagatctcggagtggaagttcctcccttctctggtgactttgcacaacgctcacacgaagctgcagagctggggccagacctttgagaagcagagggagaccaagaaacacctgtttggagggcagtctcagaaggctgtccagcccccacacctgttcctttggctggtaaaactcaaaaacatgctcttggccaagttcagcttttacttccatgaggcactgagccggcagacgaccacttcggaaattctttggaaagatctccagtttcatcaggaagtacgatgctgccaatgtatccttaatttttgacaaccgaggttcagagagctttcagggtcatggctaccaccacccacattcctaccgagaggcccctaagggagtggaccagtacccagccgtggtgtctctgcccagtgacaggccagtcatgcactggcccaatgtcatcatgatcatgacagaccggacatctgacctgaacagtttggagaaagtggtccatttctatgatgacaaagtccagagtacctacttcctgacccgcccagaaccccacttcaccatcgttgtcatttttgagtcaaaaaatctgagagagactcccattttatttccttcctcaatgagctctcgcttgcccttaagaaccccaaagtgtttgcaagtctgaacctggatccaaaggttagacgaggagcttgtctgagggtttccaagactctctctctctctctctctctctctctctctctctctctctctccctatatatataaataaaaaaaaaaaaaaaaaa

SEQ ID NO: 4751 - DNA, 1383 bp, Cricetulus griseus
tggaatgcccccaaaatctgggaactgggacagcacagatgccctggggcaccaggacagatgggggctggtgctcagagaaaacagcgctaacaactgggacacggaaacagtcgtccaggtgcctcttccatgaagctgcccttaacaagttcctggatttgcaaagcctggcatggaacaatacttgttggccaagcagctagcaaaacccaaagagaaaatccccatcattgttggagattatggcccaatgtgggtttaccctacctctacttttgactgtgtggtagcagatccccggaaaggttccaaaatgtacggtctgaagagctacattgagtatcagctaacacctaccaacactaatcgatctgtaaaccacagatacaagcactttgactggttgtatgagcgtctcttagttaaatttgggtctgccattccgatcccttctcttccagacaagcaggtgacaggtcgctttgaggaggaatttatcaagatgcgcatggagcggctccaggcctggatgaccaggatgtgccggcacccggtggtgtcggagagtgaagttttccagcagttcctgaacttccgggacgagaaggaatggaaaactggaaagaggaaggctgagaaagatgagctggtgggtgttatgatattttccacaatggaacctgaggctcctgacttggacttgatagaaatagaacagaagtgtgatgccgtggggaagttcaccaaggccatggatgacggggtgaaggagctgcttacagtgggacaggagcactggaagcgatgcacggggcccttacccaaggagtatcagaagatcgggaaggccttgcagagtttagcaacagtgttcagctccagtggttaccaaggggaaacagatctgaacgatgcaataacagaagctgggaagacgtatgaagagattgccagcctcgtggcagagcagccaaagaaggacctccacttcctgatggagtgcaaccacgaatacaaaggctttctgggctgcttcccggacattattggtgctcacaagggagcaatagaaaaagtaaaagaaagtgataagctggttgcaactagtaaaatcaccccccaagacaaacagacgatggtgaagcgagtcggcaccatgtcttatgctttacaagctgagatgaaccacttccacagtaaccggatctatgattacaacagtgtcatccgcctctacctggagcagcaagtgcagttctatgaaacgatcgcagaaaagctgaggcaggccctcggccgcttccctgttatgtagaccaggacagaacacaacatggactccgaagtgcttcctctgacctgggccaatgcaattccatt

SEQ ID NO: 4752 - DNA, 1383 bp, Cricetulus griseus
ctccttctctccggcccgggtctcacgctggtcccacgcccgcgagcttcagcgacggaaagcctcgagggacatggcgactcccgcggcgccggccagcggcgtccgaaacggagctggcccggagtggggaggcttcgaagaaaacatccagggcgggggctcggccgtgattgacatggagaacatggatgacacgtcaggctccagcttcgaggacatgggggagctgcatcagcgcctgcgtgaggaagaagtggatgccgacgcagctgctgcagaagaggaggatggcgagtttctgggcatgaaaggctttaagggacagctgagccgacaggtggctgatcagatgtggcaggcagggaagagacaagcttccagagccttcagcttgtatgccaacatcgacatcctgagaccctactttgatgtggagcctgctcaggtccgaagcaggctcctggagtccatgatccctatcaagatggtcaacttcccccagaaagttgcaggtgagctctatggacctctcatgctggtcttcacactggtcgccatcctcctccatgggatgaagacttctgataccattatccgtgagggcaccctgatgggcacagccattggcacctgcttcggatactggctgggtgtctcgtccttcatttatttccttgcctacctgtgcaatgcccagatcaccatgctgcagatgctggcactgctgggctatggtctctttgggcactgtattgtcctgttcatcacctataacattcaccttcatgccctcttctacctcttctggctgctggtgggtgggctgtccaccctgcgtatggtggcagtgttggtgtcaaggactgtaggccccacccagcggctgctcctttgtggcacactggctgctctgcacatgctctttctgctctatctgcattttgcctaccacaaggtggtagaggggatcttggacaccctggagggccccaacgtcccacccatgcagagggtccctagagacattcctgctgtgctccctgctgccgggctccctgtcactgtggtcaatgccactgcaaaggcaatagcagcgaccctgcagtcacactgacctccctgaaatccttggccatccctgactgcccagctctggaggaagactaaaggacagtatactgaggacatgtgtctctttgatgaggtctgcagcaaccactgagcctttgctgcctaaacacctgcttggcaccggtcttggcttctgaaaggcacaaggccaaggagtcctggccaggactgcaagcctctgcagccaggtgcagaatgtgggtcagctcttctgaggccctcaccacctaccccttttctctcccttct

SEQ ID NO: 4753 - DNA, 1382 bp, Cricetulus griseus
cacaccctcatctttgatggaagtaccaacccagctcaccccaaacacattggcagcattgaccctaactgcagcgtgtctgatgtggtaaaagatgcctatgacatggccaagctcctgtgtgacaaatactacatggcttcacctgatctagagatccaggaagttaatgccaccaatgccaaccagcccattcacatggtctacgtcccctcccacctctaccacatgctctttgagctcttcaagaatgccatgcgggccacggtggagagccacgagtccagcctcaccctccctcctatcaagattatggtagccttgggtgaagaagatctgtccatcaaaatgagtgaccgaggtgggggtgtccccttgaggaagattgagaggctcttcagctacatgtactccacagcccccacaccccagcctggcactgggggtaccccactggctggctttgggtatggactccccatttcccgcctctacgccaagtacttccaaggagacttgcagctcttctctatggagggctttgggacagatgctgtcatatatctcaaggccctgtccacggactcagtggagcgtctgcctgtctacaacaagtctgcctggcgccactaccagaccatccaggaggccggtgactggtgtgtgcccagcacggagcccaagaacacatccacgtatcgggtcagctaggggccttctctccctggcacctgggaggatgctgccacctctgaatccagccaccacagggaccttccctatcccctggggtacagagggtgaagctgggtctccctaatggccaggtctgtctttgtagaaatctcagtgacccatctgtggtggtctctaagtgccaatctgtctctacagagaaacctagggagtttctgtggagcctggtctccatggtgatgcttgagggttggggatggctgtatctgatggggtaccccagagacacttctcctgcctgcatagtcctggccttccgagtggctgccctgcttgccttattcccacaccctgtacaggtatactgggctgtgtcctttgttgatgttaagaagggtggagtgcccccagcatgtcctcacatgtgcactcccctgccgagtgtacacccccccccactcctgcctgagctttagaccccaccccaccccacccccgtgctcacaacgtgtgcacaggtgactcatccctagaacattctatgtacatagccagttttgtaatttcaatgcctcacccttcccctcagcacacaggggttaaagccgtgtgcccctcccagtggctgggatggtgacagtgacatccacagtaaatagatgaaatgagaaaaaaaaaaaaaaaaa

SEQ ID NO: 4754 - DNA, 1381 bp, Cricetulus griseus
cctctcatcacattccacctgaatctgacccaaggcaatgctgtggtccgttacagctccaaggaagaagccgccaaggcccagaagtctctgctccagctggcaacccagcagtgggggcagccagcccaggctgggctcctcgggcagcacccatggcctggtgcgcagcgacactgcccactggagcaccccgtgtctgagtggcaaaggcagcagtgagctgctgtggggtggggtgccccagtactccagcagtctgtggggcccgcccagtgctgatgatgccagggtgattggcagccccacacctctcaacactctgctgcctggggacctgctcagtggcgagtccatgtaggggtcaccgtcattggggtggagagagctgagcatgccaggcccgactctgaggccccctggatggacaggctgccccttggagtacctctgtccagttctgaagatgacccttggcctcagcccttgtgaactgttgaagacagtgcgggctgcgtttggtcagtgtcacgtgctaacgccaggaaatgttgttttaaagttaaaaaaaaaaagcaaggactcttattgcatttaaagttacagtgtatatctctggagaaataatatgtctatctacctttagcagcttttcattgtggactaatgcaagaagattattaccagagtattgcaccatttcccatctggaatataaagttaaagagaaaacaaaactgttgttgaactgtggccatagatacttgtagagaatgggtgtcccgcattttctctccttcagactttaaaataaaaatttaaaaaaattttaaaatttaaaaggaataaaaaaaaaagacttccatacgtaaaaaaaaacaaaaacaagcaaacaaacagaaacctattttcagaatgcagatgtgttacttcagagctctgggatggggcgtgctgggacgtgctgttcccctgcagccatcatggactctgtcggttgtcttcacccttcctcaaggtgatgaggcagtgtggtctctgtcttgcacacaccggccagctctcaggaaagccagggctcccgggggcagctccacaccatttcatgtatttttaaacccaactcctagcactgaagatgttatttaaaaaaagaaaagaaaaaaaaaagaaagacaatgaaataacacaccctcaagtatgttttaaaaaatatatgaacattgtactccctgcctatgtggtcaggaaacttgtgcattacattttttaattagctttttaatggttttatcaagacaaaggaagaaagcaagtcccgcaggaccacagagaaacgctggttttccagaggaccgtgaactatgcacaactgggctca

SEQ ID NO: 4755 - DNA, 1381 bp, Cricetulus griseus
gtgttctatcctcagtcccatcaggaaccagtaaaacacagactttacccaaagcagtggttgtagccaatggcaacctggtgcccactggaactgaccctagcctactgcctgtgggctcagagatcctggtggcatcaagtctggacatgcaggccagagccaccttcccagacaaggagccaacaccacctcccgttacctcctcccacttgccctcccatttcatgaaaggcgccatcattcagctggctacaggagagctagaagcgggtagaggacctccaaacccaggatttgttgtgccttagtgtctgcacaaactgagtcagggcttcagtgagcatcattctctccttacctgcagactatgcacagttcctggggcgagagggagaggtggtatggcttgccctgttgagcctcctcaagcaggaataatagtaataaatgcacttttcacattaaaggtttctttagtagttctcctgttaagcctaggatcttcccctagtagactgcaaactcaacagtctgtgatcccaaagccattccactgcaaacgcctagcagtaaagatggccccagactaggttcctgtctgcagtgtgtgtggcagcagcccacgtgcctttacctaatgtcagacttgcaagcgtttagctgtctttatgttaggggggtcttaagtacttcagagagagagagcagataacagtggttttatgcccacctcaccccctgccagggacttggtgtgttgttgtaaactgtgagggttggtgagctgctggtattgctgaaggcagggtggacccctcgtttgcttcatatgtgcactcagtgaattggattggggaagagactgaccctactctggctaactttaagtattaaaatacggctatcctctacatacttcctagtcacacaggatccctgtagccaaaacagtatatgttccagctgcagagagcagactgctctcagcttgcacagcaccttaggggagggaagaatatatgaataggtaatagggtggagaaaggatgggaattttgtcatccaggtggctttagggtcctaaggagtagagaaggatggcactggggaggtctggatggatctgatttgtgtaggagttccctgtagataaattactgatcccccaaccactatccccagtatgtaatggctgaattaatatgtaatcaactgcattgtaactaaagccttagaactagtcaggtgctcctcccacccaataccatttcttaccctctaatcctacctgatctttaacaaagcattaataattctaaggataatctctatttgttgtgtcttttttgtaacttgttttaaataaattcaatttgta

SEQ ID NO: 4756 - DNA, 1380 bp, Cricetulus griseus
gcaggatggggggaagagaagggaattccaacctgtagaactttgggggtcctatggtcgggttctccccggcgactgtgcatggtgaaaggggcgggacctctgggggctcgtgggggcgttgggggttcgcagggtgaggaagggggtgtcaagtgagagagagctcgtgcaggacttccaaacttagaaccttgaggccctcggggctcaggtccagggaccgggcgctcgggccgccatgcgcgacaggacccatgagctgaggcagggggacaacagctcggacgacgaagatgaggctcgagtcgcgctggtggtgcacccaggtaccgcccggctgggcagcccagatgacgagttcttccagaaggtccaggcaattcggcaaactatggccaaactggagagtaaagtccgggagttggagaaacagcaggtcaccattctggccacgccccttcccgaggagagcatgaagcagggcctgcagaacctgcgcgaggagatcaaacagctggggagagaggtccgggcacagctaaaagccatagagcctcagaaggaagaagctgatgagaattataactcagtcaacacaagaatgaaaaaacccagcacggggtcctgtcccagcaatttgtcgagctcatcaacaagtgcaactcaatgcagtcggaataccgagagaagaatgtggagcgcattcggaggcagctgaagatcaccaacgccggaatggtgtctgatgaggagctggagcagatgctagacagtgggcagagtgaagtgttcgtgtccaacatactgaaggacacacaggtgacacgtcaggctctgaatgagatctcagcacgacacagtgagatccagcagctagagcgcagcatccgtgaactccatgagatcttcacttttctagctactgaggtggagatgcagggggagatgatcaaccgtattgagaagaacatcctgagctcagccgactatgtggagcgtgggcaagagcatgtcaagatagccctagagaaccagaagaaggctcggaagaaaaaagtcatgattgccatctgtgtttctatcactgtcctcatcttggctgtcatcattggcatcaccataaccgttggataatgccacatgttattggcactgggagaaccagagacccagcatttgtggaggcagggcaggcctccagctgaacccgccctcacactggcccttgtgcagaggggcatatggctcttctggggttggcagctgatcattcatggagtcctccccttcacgccacaatgcctaggagagagtttgcaatgtcttgtttgtctgggacacatggttttgtaacaaaaattaaaaaaaaaaaaaaaa

SEQ ID NO: 4757 - DNA, 1380 bp, Cricetulus griseus
ctgagaggaaagtgtggcgctatggcttcggtgttgtcctacgaaagcctggtacacgccgtggccggagccgtgggaagtgtgactgccatgaccgtgttctttcccttggatactgctagacttcgacttcaggttgatgaaaaaagaaagtcgaaaactacgcatgcagtgctcctggagattattaaggaagaaggcctcctggcaccataccgagggtggtttccagttatttcaagtctctgctgttccaattttgtctatttctacacttttaatagcctcaaaacagtatgggtcaaaggtcaacgttcttctacaggaaaagatctggtggttggatttgttgcaggagtggtgaatgtgttgctaacgactccactctgggtggtaaacaccagactgaagctgcaaggggcaaaatttcggaatgaagacattataccaactaactacaaaggcattattgatgcattccaccagattattcgagatgaaggaatcttggctctgtggaatggcacctttccctccttgctgttggtcttcaaccctgccatccaattcatgttctacgaaggcttaaaacggcagcttttaaagaagcggatgaagctctcttctctggatgtgttcatcattggtgcaatagccaaagcgattgccaccacagtcacctatcccatgcagacggtacagtcaattcttaggtttggacgtcatagactaaacccagaaaacagaacactggggagtcttcggaatgttctctaccttcttcaccagcgagtcaagcgctttggaataatgggactctacaaaggccttgaagccaagctgctccagacagtgctcacagctgccctcatgttccttgtatacgagaaactgacagctgctaccttcaccgtaatgggcctgaagagcacacacaagcactgaggtcctcccacaggacagtgtggagatgcccatgctgcacagagagacaaggcatcattcttcttttcctctggctccatccacaccacagacatttctgtcattgtctggaaaggcatcaaaggctaaatagggagtatagctgaaaataatatgatgactgtgctgtgggcttgactttatgtctgtctgactcttttcctcctgcttaacatgagttaagtgagctgtttattttgtggggaaatgaaaattattaatcctaaatgattttcttaaaatttgtaaatgttgattattcattaatgtttgacgtagttttctaaatacatatttattttgaattgtcttttattacaaaaaagaagccctggtgttgtatgtccattcatgcaagctccaactagacaagcctcaataaattgtcagcacaca

SEQ ID NO: 4758 - DNA, 1380 bp, Cricetulus griseus
gcggcggcggacatgttccagggcgcggacggccaggctggcgggtccggctccagagccatgaagcccccaggaggagaatcaagcaatctttttggaactccagaagaaggtattccttcaagcaagcctaataggatggcatctaatatttttggaccaactgaagaacctaaaaacatacccaagaggacaaatcctccaggaggcaaaggaagtggtatctttgatgaatcgactcctgtgcagactcgacaacgtctaaacccacctggtgggaagactagtgacatatttgggtccccagtcactgccactgcacccctggcacacccaaacaagcccaaggatcatgttttgctctgtgaaggtgaagactctaaatctgacctgaacgctacaacaaactccacacccaaaggagaacagagcgagaagggaagctcaaaagaagcagaccatgccaaaataccagagcctacacctacagttgacagtcatgagcccagactggggccacgacctcgttcccacaacaaggtcctgaacccaccaggaggcaaatccagcatctccttctattgagaggctcctgctctacctgtaatcagaccagacactcagagatagggtgttgaatgttagtgcttcttttaacccaaacaagtcggggtgggagagggtttgtcatgcgtatggggttggctgctcatgggccttgttgccattggaagagtggcagagagggtttcttcttccccttccggggggcatctgtgtaaagggctaagtggtgctacttttgtttctagtgcctacagagcttcatagcagatgccagaaatgtcctcattaaattttggaaagcgacctttttgaagtcacacttatattgacctagatgtttaagtgcctgcaggagccacctgccaaattctgcttcctacacctggttcattgaggggtctgaccatggctttgtcaaccaaagagtttttccccttcaggtgccctgtatcctgaagctaagaaacatgtactacatgtgtgtgattctgtaacaattgaaatgggttgtggtttagtcatgaggatgtcatttgaaattcagagcattttttccattttaagaaaatgtcataaatgtttgctttatttagcccagacactaatgtctttaacttataaggaaataacacaatgatagaaataaacctctgttgtaactgctttcttaagtagaaaatgatttgtgaattctaaattggattgtcaagaaggaatctgacttgatcactgcgcaggccctgaggttagcccactgaggaaagctgcagccccacttgctggcctgggtagctgggaggaactggggccctg

SEQ ID NO: 4759 - DNA, 1379 bp, Cricetulus griseus
tggcgggatggcgggcgccgcgagcgagtcgcgcttcgcggggctgtcgctgatgcagctccacgagctgctggaggacgacgcgcagctcggcgacatggtgcggggcatggaggagacgcagactgttcagcttaacaaagagatgacattggctagcaaccggagcctggcagaggaaaaccttttgtaccagccccaactggatgctcggaaagctcgtctgacccaaaaataccaggaactccaggttctctttgaggcctatcagataaagaagaccaaactagataaacagtcaaacagtgcttccttggagactctgttggcacttcttcaagcagaaggggccaagattgaggaagacactgagaacatggcagagaagtttctggacggagagcttcctctagatgccttcattgatgtctaccagagcaagcggaagctggcacacatgcgccgtgtgaaagtggagaagctccaggagctagtgctgaagggacagagactcccacaagccggggcaccagtgccacccagggtgcccgagccattaactgccagccccctatcctatccccctctggaggccactgggctcccttctgtcgtgcctcggcgcatcccccacccccacccccagtgcctgcaggacacatagccaccccgttcacagctgccatgggctcaggacaggcttctccatacccaggattacagtgcccgcctctgccccccagggtgggcctcccctctcagcaaggattctctgcacagttggtgtcaccatacccgccagccctgccccagagaccccctccacggctggctccgcaccagccaggcttcatcctccagtgagctacggaggctgttcttcctgcaagacactctctgcccgccgtgccaagctctgcagacggaggctttggagtccaggatctgggccaatggcttgggtgccctgggccagtgtgtccatctgattttagaactgtaggtccatggtgagtaatagagagcgagttttgtggaccaaggaagctctgttcgtgccaggccaccctcacctcacacctcaagcctcatgacggtttctgtgaaaaaaaaaatactcagtgtttttactacacttgtaattttcctgttttatatttgaaaagaatacttttttgacactctcaagaccattcagggaatcttttttaaaaacgcagatactgtttagagctggtaaaaaaatgcagatttattgagtgccgcttcctgtcaggcgagtagtgcatggtcgcatccatcagtgtccatgctgtgccttagcttcacttggtgccaggactcagacgcctgcagtgtgccagccatggctgccctat

SEQ ID NO: 4760 - DNA, 1377 bp, Cricetulus griseus
  modified_base (1297)..(1297): a, c, t, g, unknown or other
aaatttgaatgtctcagcaagttctgtagaaaatgagcctgcagttagttcagcaactcaagcaaaggaaaagttgggatgattctccttccaaaaccaagagttccttatcctcgtttctctcggttctcacagagagagcagagagcttatgtggatttgttggctaaatatgcaaagatccccttggcaccagctactcctgaggttccagctacaccaaacattactgatgattctagaagcttatgccagattctgatgaacaattacagaaggagaagcagctattctctggtgtggaaagtggtcctgaagagtgcaaaataaagatgatcagggacttgaatcatgtggtgataaggttcgaagtgccagtgcaaaatctttaacacaagataatgaagtacttaaaacatctgatggaatctctaaagaaagcaatgtaggcatactttgtaccaatgatgaaagcccaagtgttcaagggaatgtagacaatgccaacaaaacagctacctcatcagaaatagctgaaaactgagaaagggcagtgatacagatgaggactccagaggatagagacaagaccacgctccaaaaaacgcaagaagatcagaagacaatttccagtttacgtgctaccaaaagtagagtatcaaggttgttatggagttgaagctctgactaagaaagcgagctctgtcgcttctggactgaaagtttattgcattccaactgctcggtgtttattgttgaacttttaggggaaatgtgcccgaaaagtcagatagcaagaagagtgttcccccttgctctcctggagttcttacaaagtgccttggaaacctaccaacttcgggaagggcagtgacagcagaacttagtgtccttcctcatctctggtgcatggagaatctaaaatgctccatttacgtggctgtgaactgaataagaaaaatatttttatagtacgctttttctaacaatcacaggtaggaaaaccacttgcaatcttaggaactgtcaggtattaagttaataatttgactgtatttccagtctaatgagcctaagccaaagggttaaacattgccactgttagaaacagctgtgcacattgtttacagcccatttttgtcagtattagcaccactactgttgctgcttttgaaaacccgttgaaattctattgtggacaccagaagtaaaaacaaggaaaataaatccctatctctgaaaagtagcaaattaatatttttctgctaggcaaccacacatgtgttttacaaaaacnctagcattctgtggtgtgacaacttttggtactacaagctcaaaaaaaaaaaaaaaaaaaaaaaaaaaaaaaaaaaaaaa

SEQ ID NO: 4761 - DNA, 1377 bp, Cricetulus griseus
tgagccggcccgggagccggccgggcagagtgtggggcggcggcgcgatgggctccagctgtggaccgcgaaggctactggggccccacgacctccacattggactggtgtgaggagaactatgcgctgacccagttcgtcgctgagttttggaatacagtgagtaacctgattatgatcgtacctccaatttttggtgcaattcagagcattagagatagactggaaaaacggtacattgctgcttatttagcactcacggtggtaggaatgggatcctggtgtttccacatgactctgaaatatgaaatgcagctattggatgagctccccatgatttacagctgctgcatatttgtgtactgcatgtttgaatgtttcaagacaaagagctcaataaactaccatctgcttttaccctagttctattcagtttaatagtaaccatgatttacctaaaagtaaaagaacctatattccatcaggtcatgtatggaatgttggtctttacattagtacttcgttctatttatattgtcacatgggtttatccatggcttagaggactaggttatacatccttgactatctttttattgggttttttattgtggaatgtagataacatcttttgtgattcactgaggaacttccgaaagagagcaccccctatcctaggtgttgcaacacagtttcatgcatggtggcatattttaactggcctgggttcttatcttcacatccttttcagtttatatacaagaacactttacctgaaatacaggccaaaagtgaagtttctctttgggatgtggccagtgatcatgtttgaacctccgaggaaacactgatgaattattctaccaagaaaacaaaaagcacttactgtagttctggcaagatggtcaagaagtccccaaagacttgcatattcaaagacaccacgcccatcacaagagatgaatgaatcagcctgaatgaatcagccacatagagaatgagcaattggtctgttggctgcttagcttctggctttatcttatttgtcctcgacctaagatgcttacagaaaagcagatggcatatatttatattctggaatggtggagaagttgggcttttcttaacaggttaacagtttgtgctggtcattcatgggacattaatatttttttatttttttactaagtagttgtcatgttaattatacctttcttaatttttgattaaatattgaacaaagtcattaagactagtaaaatgccatgtccagatggctgactataagccagcatttagcaatgtcagctttgatttatattattttcttaaccaggttcctgtgtcctggaacaaaaattggaccagagacacatg

SEQ ID NO: 4762 - DNA, 1377 bp, Cricetulus griseus
cgagtgcgtggtcccggggttctcatcatggctcctggggtgccgctcccgccggagatccagctggcgcagcgcctggcgggcaatgagcaggtgacgcgggaccgcgcggtgcgcaagctgcggaagtacatcatggccaggacgcagcgggccgcaggtggttttactccggatgagctgctgaagatatggaaagggctgttttactgcatgtggatgcaggacaagcccctacagcaggaagatctaggaaggaccatttcccagctcatccatgcttttcagactacagagacacagcacctgttccatcgggcattctggcagaccatgatccgagagtgggtgggcatcgaccgactgcgcctggacaagttctatatgctcatgaggttggtgctgcgagagtcactgaaggtcgtgaaaacccacggatgggaagaaagacagattgagcagctgctggagctgctcaccacagagatactgaaccccgacagtcaggcccccaatggggtgaagagccacttccttgagatcttcctagaggagctgaccaaagtgggcgctgcagagctcacagcagaccagaatatgcagttcatcgaccccttctgccagatagcagcccgcactaaggactccctagttttgcataagatcactcggagcatctttgagacgattgtggagcaggctcccttggccattgaagacctcatgaatgaactggactcacagagtgaggagggggaagcagcgtcagatggtgatgaagtcctcagaggatgagcaggatctgcaagacacaccacccaggagactgcctgcaggctcccatagggctgaccctgaggcagacaaggagcagatgtgggatgatgaagaaaacactggccctgtcctccagttcgactatgaggcggtggctaacagactgttcaagctagccagtagacagagcaccccttctgagaacaggaagcgcctctacaaagtgatccagaagttgcgggacctggctgaaggcactttccctgatgatgatgtccctgaaaaagcctgcaagaagctgctggaagggaggcgggagcggaaaaagaaaaagaaatgtttgcccacattgcagccacagaataagaaagggggaagcgagacagaagcctcaagtgcagacccgagcccagggataaagaggaagaggagcaggaggaggaatgagaaggctggtcaaagagggcctcttgggaagcggaggaagcctggtgctagagcaaagggggctggtgtccagcagctggcagggaagaggaaacggccattgccgactgagaagtgaggtgcatggcccaggggaggagcaggaggagaacg

SEQ ID NO: 4763 - DNA, 1377 bp, Cricetulus griseus
tcccgggatgaaagacagcttcggggccggccagggcgctgcgcgcgcacccgcctccagctcggccggctgggcctctgccgtcgcggccaggtgacagctgggcccggccgccgcgtgccgccgcccctccccccggccctgcgggtgccgcctgcggggctcgatgccagtcggccacgtccggggcagtttttgagtccccggcccggatcgcgactgtccctccctgccccatcgctgctctcagccccaggatgcagaatgtgatcaacacggtgaagggaaaggctctggaagtggccgagtacctgacaccggtcctcaaggaatcaaaatttaaggagacaggtgtacttactccagaagagtttgtggcagctggagatcacttagtccaccactgtccgacatggcaatgggctacaggggaagaattgaaagtgaaggcatatctaccagcagggaaacaatttttggtaaccaaaaatgttccatgctacaaacggtgtaaacagatggagtattcagatgaattggaagccatcattgaagaagatgatggcgatgggggatgggtagatacataccacaacacaggtattacaggacttactgaagcagttaaggagattacactggaaagcaaggacagtataaaactccaagattgctcagccccgtgtgatgaggaagaagaggatgatgaaggggaagctgcagacatggaagaatatgaagagagtggattgttggaaacagatgaggctaccctagacacaagaaaaatagtggaagcttgtaaagttaaagtggatgctggaggtgaagatgttattttgcaaacgagaacttatgacctttacatcacttatgacaaatattaccagacaccacggctatggttgtttggctatgacgagcaacggcagcctttaacagttgagcacatgtatgaagacatcagtcaagatcatgtgaagaaaacagtgaccattgaaaatcatcctcatctcccaccacctcctatgtgttcagttcatccatgcaggcatgctgaagtgatgaagaaaattattgagacagttgcagaaggtgggggagagcttggcgttcatatgtatcttctaatttttttgaaatttgtacaagctgtcattccaacaatagaatatgactacacaagacacttcacaatgtagtgaagaggacatagagtgtatactaattactgcttctgatttttaaagaattaatacatagatgtgaccattgaccatatttaccaataagtataatttctctaataaagggacttatatgtttattcattaaataaaaactgttccactaccagcctttatttgtttaataaaa

SEQ ID NO: 4764 - DNA, 1376 bp, Cricetulus griseus
ccgggatggagcgaagggcgtttcggggccgcgccggccggggaggcagagggcgcgtttcttggtggccgggagcgagcggcgtcgaggtcgtggcggaaccggacggggacctgctcgggatgaaccacaagagcaagaagcgcatccgcgaggccaagcggagtgcgcggcccgagctcaaggactcgctcgactggacccggcacaactactacgagagcttcccgctgagcccggcggccgtgccggataacgtggagagggctgacgctctacagctgtcggtggaagaatttgtagagcggtacgaaaggccctacaagcccgtggttctgctcaacgcacaagagggctggtccgcgcaggagaaatggactctggagcgcctcaaaaggaaataccggaaccagaagttcaagtgcggtgaggataacgacggctactcggtgaagatgaagatgaagtactacatcgagtacatggagagcacccgtgatgacagccccctttacatctttgacagcagctacggcgaacaccccaaaaggaggaaacttttggaagactacaaggtgcccaagtttttcacggatgaccttttccagtacgcaggggagaagcgcaggcccccttacaggtggtttgtgatggggccaccacgttctggaaccgggattcatattgaccctctgggaacgagtgcctggaatgccttagttcagggccacaagcgttggtgtctgttccccacaagcactccccgagaactcatcaaggtgacccgagaagaagggggaaccagcaagatgaagccattacctggtttaatgttatttatccacggacacagcttccaacctggccacctgagttcaaacccctggagatattacagaaaccaggagagactgtctttgtgccagggggctggtggcatgttgttctcaatcttgacaccaccatcgccatcacccagaactttgccagcagcaccaacttccctgttgtgtggcacaagacggtaagagggaggccaaagctgtcaaggaagtggtacagggtcttgaagcaggagcaccctgatctggccgtgctggctgatgccgttgacctccaagagtctacaggcatcgcttctgacagctccagcgactcctccagctcttccagctccagctcctctgacacagactcagagtgtgagtctgggtctgaaggtgacggcacagcacaccgcaggaagaagcggaggacgtgcagcacggtgggaaatggggacactacctcacaggatgactgcgtgagcaaagaacgcagctcctccaggtgacccgctgtggcagctgtctgtgcaaggatgtgctcgcagccag

SEQ ID NO: 4765 - DNA, 1376 bp, Cricetulus griseus
  modified_base (1369)..(1369): a, c, t, g, unknown or other
gctgtggccactgcagagtgaaggtgctgctgctctggtcaccaaggagtgccagcgactggcggcccagggtgcccggcctgaggcccccaaacggaagtgggccaaggatggtggggatgcccctttacccagcaagcggccgtgggccaggcaagagaaccaggaagccaagggggaaggtggtgtgggctgtgacagcgttggcagcggcagtggcaacagcaacaacactaccagtagcagtggcgaggcaagtgctaggctgagggaggaggccccaccctctgcaccggagcgcctggccctggactatattgtgccttgcatgcggtactacggtatctgcgtcaaggacaacgttcttgggggcgaacactgggtggccgcgtgctggccgaggtggaggccctgaagcgggcgggcgcctgcgcgatgggcagctagtgagccagcgggcgatcccaccgcgcagcattcgtggggaccagattgcctgggtagaaggccacgagccaggctgcaggagcattggtgccctcatggcccatgtggacacggtaatccgccactgtgcgggccggctgggcagctacgtcatcaacgggcgcaccaaggccatggtggcgtgttacccaggcaatgggcttgggtacgtgaggcacgttgacaatccccacggcgacgggcgctgcatcacctgcatctattacctgaatgagaactgggacgtcaaggtgcatggcggcctgctgcagatcttccctgagggtcggccggtggtagccaacatcgagccactctttgaccgcttgctcattttctggtctgaccgacggaacccacatgaggtgaagccagcctatgccaccaggtacgccatcacggtctggtattttgatgccaaggagcgggcagcagccagagacaagtatcagctagcatcgggacagaaaggtgtccaggttcctgtatcacagccagctacacccacctagtggccagcccagagctgcgtggattagcagctccctgccttcgggggagccccgggcccgctcctccctgccaccgctgctgcttctggcttgcctccgtactgggtggtgtgtgtctggtccattgcttgttgagctgagaggaggcaggatttggggttgaggtgagtcatggcctcttgctggcagaggtccgcggggggggagcatactcaccccctacccactcctccagcctggaatgtgaagtgactccccaaccctttggctatggcactttatggactgggctgccactgattgggcagagtaaggtgccatgaggagcatgggtatggaggtcctgccagccaagaaataaaagtttaccncagagct

SEQ ID NO: 4766 - DNA, 1376 bp, Cricetulus griseus
cgcggccacgagctggtgccgctggagcaggagcgtgcgctccaggaggctgagcagcccaaagtcctgagcgcagtggaagaccgcatggatgaactgggtgccagcattgcgcagtcccgccgtactgtggccctcatcaagagcgcagctgccacagagagggagagggtgagccagatgttcgccgaggccacatccaccctgcagaatttccagactgaggtgctggggttcatcgaggagggagaggccactttgttaggacgctcccagggtgacctgcgtagacaagaggaacagcgtagccgcctgagccgggcgcgtcacaacctcagtcaggttccagaagctgactcagtcagctttctgcaggagctcctggcactacggctggccctggaggaggggtgcggccctggacctgggccccccagggagctcagcttcaccaagtcctcccaagtggtcagagcattgagagacatcctggtctcagcctgtgccagccagtgggagcagcttcgggggctgggcagtgacgaggatgagctgcagaagctcggctcagaagctgaggtggagtcccaggacccagacagcaccaaccttctggagagtgaagctccgagggactatttcctcaagtttgcctacatcgtggacttggacagtgacacagcggacaagttcttgcagctttttggaaccaaaggtgtcaagagggtattatgtcccatcaactacccggagtcacccacccggttcacacactgtgagcaggtgctaggggagggcgccctggaccggggcacctactactgggaggtggagatcattgaaggatgggtcagcgtgggtgtcatggccgagggcttctcgccgcaagagccctacgaccggggccggctgggccggaacgcgcactcgtgctgtctgcagtggaatgggcgtgggttctctgtctggttctgtgggctggaggccccactaccccacgccttttcgcctactgttggggtctgcctggagtacgctgaccatgccctggccttctacgcagttcgagacggaaagctgagccttcttcggaggctcaaagcctccaggccacgccgcagtggtgccctggcctcccccactgacccattccagagtcgcctggacagtcatttttcaggactcttcaaccacaggctcaagcctgccttcttcctggagagcgtagacgcccatctgcagattgggccgctcaagaaatcgtgcatatccgtactgaagaggagatgatgcagggctgcagtggcctcctcctgcagtggcctggcccgtatttcctgggagagagcaccagcctcagagacccccacacctcc

SEQ ID NO: 4767 - DNA, 1376 bp, Cricetulus griseus
ggatgcaggccctggtgctactcctctggacaggagccctgcttgggcatggcagcagccagaatgtcgccagcagctctgagggttccccagcccctgacagcacaggggagccagtggaggaggaggaggaccccttcttcaaggtcccggtaaacaagctggcagcagcagtctccaacttcggctatgacctgtaccgcctgagatccagtgccagcccaactgccaacgttctgctgtctccactcagtgtggccacagccctctctgctctttctctgggagctgaacaacgaacagagtccatcattcaccgggctctttactacgacttgatcagcaactcggacatccatagcacctacaaggaactccttgcctctgttactgccccagagaagagcctcaagagtgcttccagaattgtgtttgagagaaaacttcgagtaagatccagctttgttgcacctctggagaaatcatatgggaccaggcccagaatcctcactggcaaccctcggatagacctccaggaaattaacaactggatacaggcccagatgaaagggaaacttgctcggtctacaagggaaatgcccagtgccatcagcatcctcctcctcggtgtggcttacttcaaggggcagtgggtgacaaagtttgactcgagaaagacgagcctccaggacttccacttggatgaggacaggactgtgaaagtccccatgatgtcagaacccaaggccatcctacgatatggcttggactctgatctcaactgcaagattgctcagctgcccctgacaggaaaactgagcatcatcttcttcctgcccttgacggtaacccagaacttgaccatgatagaggagagcctcacttctgagtttgttcatgacatagatcgagagctgaagaccatccaggctgtgctgtctgtccccaagctgaagctgagctatgaaggggaagttaccaagtctctgcaggagatgaagctacagtccttgtttgagtcacccgacttcagcaagatcacaggcaaacctgtcaagctcacccaagtggaacacagggctgcttttgagtggaatgaggagggggtagaaaccagccccaacccaggcctccagcccgtccgcctcaccttcccattagactatcaccttaaccaacctttcatctttgtcctgagagacacagacaccggggcccttctcttcataggcaaaatcctggaccctaggggcacttgatgttctactcaatgtgctctaggagaaaacctagaggaatggctgattatacattccaggaaggctgccctatagcttcaatgtattctttgcaataaaagagcttttaccttaaaa

SEQ ID NO: 4768 - DNA, 1376 bp, Cricetulus griseus
gagaccaccttggccgaggtgctgcagcaggctggctatgtcactgccatgataggcaaatggcatcttgggcaccatggctcttatcaccccaattttcgtggctttgattactactttggaatcccgtatagccatgacatgggctgcacagacacacccggctacaactaccctccctgtccagcatgtccacagagcgatggcctatggaggaaccccgagagggactgttacacagatgtggcccttcctctctatgaaaacctcaacatcgtggagcagcctgtgaacctgagtggccttgcacggaagtatttagaaaaggcagtggcgttcattgagcaggcaagtaccagcggaagacccttcctgctctatatgggcctggcccacatgcatgtgcccttgtctgtgacaccgccattggaaaacccagggagccaaaggccctaccgtgcaagtctccaagagatggacagtctggttgggcagatcaaggacaaagttgaccacatggcaaaagaaaacacaactcctctggattacaggagacaacggcccatgggctcagaagtgtgagctggcaggcagcgtggcatcgggtcccagcactggcttactggcctggcagagttccagccaatgccactagcaccgccttattaagcatgctagacatcttccccacggcgatagccctggcaggagccagcttgcctccaaaccggaactttgatgggcttgatgtctctgaggtgctctttggcaggtcacaggtggggcacagggtactgttccatcccaacagtggagctgctggagagtatgggggcctgcagactgtccgcctggaccatcacaaggccttctacattactgggggagccaaagcttgtgatgggagcacgggtcctgagcaactccacgcttcccctctcattttcaacctggaagacgatgctgcagaagctgcgcccctacagagaggaagccccgagtaccaggcggtgctgccaaaggtcaccagggttcttgcagatgtccttcaagacattgctgatgacaacagctcccgagcggactactctcaggacccttcggtgactccctgctgtagcccctcccaaattgcctgccgttgccaaactgtgtgacaggtcatttttcccctgaggaagactatctagaaactgtagacaggtaggttcacttccaaacttcatgctggccatggatgtctactttgggaagggagttgcacaatgtggtttggaaggcatagtcttccctctccctgtgtagactgctcctctacatgcatgtttgagaagcatccagcgcccgtacagtggcaaggcatgattaagcactag

SEQ ID NO: 4769 - DNA, 1375 bp, Cricetulus griseus
  modified_base (1370)..(1370): a, c, t, g, unknown or other
tttttttaactttgaagttatatttggctctagagttggtgtagcagacgatcagactgaacaagttcttagtctctggaagactgattcttgcttttttttttatataaattgttagattttattaatttttctgtgcttgatgtgtaaattgtatcattaatccattgtggtttacttcactttggtttagcggtgttttaataaatggaggtgttaactgaatcactctccccacctccatttctttgcccaccccttccttcaccctgagctgtgatggtagtcttgttatcatttataccaaagttttgcagagtccctattgactttgtgatatgaacaaagttgtaaggcactagggaagaaaagacaaaaagttccttttaatctttttgccttttattttgcacattatgcaaaaggaagactattagaaacacttttttttaaagtgaatgaaagtatggtaagactttagtgcttcacgcacgttcttatactaatcaaagtcattcaccacctgcaatggttttaagactaagtagacaaaaattttggaatcttgagcatttcaaaaatgacttgattttttaagtcttaaattcagtattttaaacctgtgttcttgaggctgaaaactatgaaattatataatgtatgatacagggttatcagatgtctagtaattttaaaatttgctcttgtcattttggggtttttgtttggtttctgttgttgaatgtgtgtgtgtttttcttttttgttttgatgtgtgtgtgtgtgtgtgtgtgtgtgtgtgtgtgtgtgtgtgtgtgcgcgcgcgcgcacgtgtgtgtgatgctggcaatagatgactgcagtttcagatgccattactgtgcaggcttggataactaacattccatgatgtagcttgttctgatgagatgattgtagttacactttgctcattatccagtcacctgtggaatactgagttttctaatgtgccattatctatttttattctgcagttacgttaaaaatacagtacaatattttaaatagactaaattgttaaaacataaaaataaaaaaagtagtagatgtgtgtaagaaaactttgtaaaatagttgagtcctacccagtagcaacttctggcattaaagcaggattccattctgtaaatacctgtaatgtgtttataataagttgtgtagtctgttctgcatccatactacactattgtcaccactacttctgtacctagcattctgagtccttatatttgcgatgttacacaaactgtactattttcttttatgtacagtttgcatgactaaaccatcagagaataaattctatctttaaattaaaaaaaaaaaanaaaaa

SEQ ID NO: 4770 - DNA, 1374 bp, Cricetulus griseus
gagaaagaggcattattggaggcttgacagcaaaatgcctaacattgtttcaaaatgaatctggatcaaaatattataaggaaattccactttcagaaattctccgagtatcttcgccacaagatctctccagcatttcacaaggcagtaacccacgactgttttgaaatcatcactgatacggtggtttactttgttggggagaacaatgggagcagctctcataaccctgttcttgctgccactggagttggactcgatgtagcacaaaagctgggaaaaagcaaattcgccaggccctcatgcctgtaactcctcaagcaagtacttctccaggtcaaggaaaagaccacaaagatctggctaccagtatttctgtatctaactctcaggttcaggagaatgtggacatcagcagcgtttaccagatctttgcagacgaggtgcttggttctggccaatttggcattgtttatggagggaaacacagaaagactggaagggacgtggctattaaagtaattgataagatgagattccccacaaagcaggagagtcaactccggaatgaagtggctattttacagaatctgcaccaccctgggattgtaaatctggagtgcatgtttgaaaccccagaacgagtctttgtagtgatggagaaactccatggagatatgttggaaatgattctgtccagcgaaaaaagtcgacttccagaacgaattactaagttcatggtcacacagatacttgttgcattgaggaatctacattttaagaatattgtgcactgtgatttaaagcccgaaaatgtgctgcttgcatcagcagagccatttcctcaggtgaagttgtgtgactttgggttgcacgcatcattggtgagaagtcattccggcggtcagtggtgggaactccagcctacttagcccctgaagttctcaggagtaaaggctacaaccgttccctagacatgtggtcagtgggagtcatcgtctacgtgagcctcagcggcacatttcccttcaatgaagatgaagatataaatgaccaaatccaaaatgctgcatttatgtacccaccaaatccatggcgagaaatctccagtgaagcaattgatttgataaacaacttgcttcaagtgaagatgagaaagcgcttcagtgttgacaaatctcttagtcatccttggctacaggattatcagacttggcttgacctcagagaatttgaaactcgaattggagaacgttacattacacatgaaagtgatgacgctcgatgggaaatacacgcatacacacacaacctcgaatacccaaagcatttcattatggcccccaacccagatgatatggaagaagatcctta

SEQ ID NO: 4771 - DNA, 1374 bp, Cricetulus griseus
atggtgagttcccggtgtcgctgcgcagcggcgggagcacttccgcagcgggtctcgggccgccaagcaccgtcttcacccagcgccatggccgtggccgctgtcggccgcccgggagccgcacgctgcctgctgttgcgcctgctgtcattcctgctggtggccggccctgccctgtgctggaacgaccctgacagaatactgcttcgagatgtgaaagctctaacccttcaccatgaccgctacaccacctcccggagactggaccctattccccagttgaagtgtgttggaggcacagctggttgcgatgcctacactcccaaagtgatacagtgccagaacaaaggctgggatggctatgatgtacagtgggaatgtaagactgatttggatattgcataccaatttggaaaaacggtggtgagctgtgaaggctatgagtcctcagaagaccagtatgtcctcaggggttcctgcggcctggagtatcacttggattacacagaactaggcctgaagaaaatgaaggagtctgcaaaacaccagggcttctctgattattatcacaagttgtactcctcagattcctgtggcattattaccattggggtactacttgctgttgcctatgtggtttataaactgttcctcagtgatggtcaggcttctcttccaccatattctgagtaccctccatattcccagcgctatcagaggtctagctatgctgcaggagcgcctcagcctgggtttaactggctttgggagtgctttcacaggacaaggctgtgacaattcaggcccagggttctggactggcctgggtgctggaggactgttaggatatttgttcggcagcaatagggcggcgacccccttctcagactcatggtactacccatcttaccctccatcctaccctggcacctggaatagtcgtgcctactcaccactgggtggaggtgcagggagctattctgcatcctccagcttgaatgcagactcaagaaccagaacagcatcaggatatggtggcaccagaagacggtaaaatagaaagttggaggcaaacattggatgcaaagtttctgacttgttatcaccatctctttaacatctggataatgggaatatccaaaagttgtgtgatgctttgtccttgtatagcttttcatgtcctgttgtttgtggtcaagagttgatatgtgacaaaatacttacattttgtatgttagtgtaacgtgcagttcaaagtgatggctactgtgggatgctgaaattactctgcttgtttctaaagcctgtgatgccagagggagcattaagaatgtaggatccctctcccagagactgagcacaggcagcttgagc

SEQ ID NO: 4772 - DNA, 1374 bp, Cricetulus griseus
gcccagccgggccgctcggcttctagggaggctttcagcgctaggcgcccggcccagcttctttttcaaaatgtctactgtccacgaaatcctgtgcaagctcagcttggagggcgatcactccacacccccaagtgcctatgggtcagtcaaaccctacaccaactttgatgctgagagggacgctctgaacatcgagacggctgtcaagaccaaaggagtggatgaggtcaccattgtcaacattctgactaaccgcagcaatgcacagagacaggacattgccttcgcctatcagagaaggaccaaaaaggagcttccgtcagcgctgaagtcagccttatctggccacctggagtcggtgattttgggcctattgaagacacctgcccaatacgacgcttctgaactgaaggcctccatgaagggcctggggactgatgaagactccctcatcgagatcatctgctccagaaccaaccaggagctgcaggagattaacagagtgtacaaggaaatgtacaagaccgatctggagaaggatatcatttctgacacatctggtgacttccgaaagctgatggtcgcccttgcaaagggccgaagagcagaggatggttcggtcattgactacgaactgattgaccaggatgcccgggagctctatgatgctggggtgaaaaggaaaggaaccgacgttcccaagtggatcagcatcatgactgagcgcagtgtgtgccacctccagaaagtgtttgaaaggtacaagaactacagcccttatgacatgctggagagcatcaagaaggaggtcaaaggagacttggaaaatgccttcctgaacctggtccagtgcattcagaacaagcctctgtactttgctgaccggctgtatgactccatgaagggcaagggaactcgtgacaaggtcctgatcagaatcatggtctcccgcagtgaagtggacatgttgaagatcagatctgaattcaagaggaaatatggcaagtccctctactactacatccagcaagacaccaagggtgactatcagaaggcactactgtacctgtgcggtggagatgactgaagggctcagcatagtggatcacccagaagtggccctgcctgtgtgcccacctaatgtcctagagaatcagcttgccactaatggacccggagcgcctccctgtgaaatgacaatagagccgcagacccatcccctatcttagctgccctagcatagcctggctttccctttccctctcctttatgccaaagaaatgaacattccagggagttggctgtaccgtctgtgacatgagacacttcgcctcttatgtaatgtgtcgtgaataaaccatttttacttta

SEQ ID NO: 4773 - DNA, 1374 bp, Cricetulus griseus
  modified_base (294)..(294): a, c, t, g, unknown or other
  modified_base (1247)..(1247): a, c, t, g, unknown or other
ctggtctcaagctataccatggagaagcgaggattttacgaatctcttgccaaggtcaagccagggaacttcaaggtccagactgtctctccaagagaaaaccgagcttccaaaagtgactgaacaagctctgctcagacctcaaaagtaaaaatggccctcagggaaaaagatggtgagccagtggacttagatgatgccagcctgccagtcagtgatgtgtaaggtgggagcacgtgggctgtctgccccactcatccctcagtgtcctttcatgaggcttctagccaaagntgatagaggtgaatggttcagtgcgtattggcctctaccttttcatcattaataacctatatccaagtgcctgtgtcttctcatttagaattgtgctccaaagtcctacatgattggctttaactgtttaaaaaaattaatttcagtagcatagcttgatatgttaaataagatagcatttatgtcagagataccagaatgttggtgttctactacctgtgcaatatttctgtcttgaaaaacaaatttgagtatgcatttaattgtggggatatcctaaatagaagtacctctactaaagaacctgtagttctggtgttgagcgacagactggtttgagcaagtactgttttgtggcaaagtcttaagtgtttgcttttcccaggctgctgctctatggtatttccagtccctcacacttctgttttggagtcataggtattagtgttttgcctttttatgttctaagactacttgttggaggatgagaaatttgctgccgtggtgaaaaccacaggacaacaaggtttttaagcagttactacccttctgctgccgtgttcattatccaggctctttttccttttcataaacatacctaggaacccgagtatagacacttggcagtattgatgagcctggcgctgttttctttggtacagccacagtgtacgttcatttgaacatattttggtattggtaatttgatatatttcatggtggcaaaatattagctctattttgggactttttatagaattagccttattcaaaagcataggaatatgttcttgtgattgtcagcgtctccgaatatttatctccattcttttgtaagcttatgaaaattatttaattatttttaaaaacatactttcctgtaaatatgtcacacctgaagtatcaacagttagtttgaatactgtaatatttgctgcatcattttttgttgngtgtgtataatgtatctcctttcagaacaggaatgtgcctcgtgatgtttactgttacacctgctatctttgtatgtccaattggttgaacactgtaatgacttgagaataaactgctcagaattca

SEQ ID NO: 4774 - DNA, 1373 bp, Cricetulus griseus
tcaaccagcaggccatggaccaactgcattatgtgacagagctgactgatctaatcaaatcaaagtcatcacctgagcagagtggggtagatgactcagctaactttgtaggtttctttccaacctttgtgtgggctctgagagatttctcactggagctagaagctaatggaaaatctatcactgctgatgagtacctggaacattcgttgaccctgaaaaaaggatctgataagaaaagtgaaaactttaacaagcctcggctctgcatcaggaagttcttcccaaagagaaagtgctttgtctttgacaggcctgctcagaggaagtatctttaccaaactagagacaattagagaagaagagctaagtggtgaatttgtagaacaagttgcagaattcacttcatacatcttcacctattccaatgtcaagactctgtctggtggtatcatagtcaatgggccacgtttacagagcctggtgctgacctatgtcaatgccattagaagtggagaactaccctgcatggagaatgctgtcctgactttggcccagatagagaactcagctgcagtgcaaaaggccattgagcactatgaagaacagatgaaccagaaggttcacctgcccacagaaaccctccaggagctgctggacctgcacaggcccattgagagtgaggccattgaggtcttcattaagaattctttcaaggatgtagatcaaaagttccagaagaaattaggggaccagctggtagcgaagcgagatgcctttattaagaaaaacatggatgtgtcatcagctcgttgctcagatttgctggaggatatttttgggcctctggaagaagaagtcaaacaggggacattttctaaacctggtggttactacctctttcttcaaaagaaacaggagctggagaaaaagtataaccaggctcctggaaaggggctccaggcagaagagatgctgaaaaagtactttgagtccaaagatgacgtggctgaaactcttctaaagacagatcagtcactcacagaggcagcaagggagattgaagtggaacgtataaaggctgaagctgctgaagctaccaacagagacttagcagagaagcaaaagaagtatgagctgatgatggcagagaaggaaaagagttaccaggagcacgtgaaacagctcactgagaagatgcagcaggaacgggaacagctcatagcagaaaatgaaaaaattatatctctcaaacttaaggaacaggaacggcttctcaaggaaggatttcagaacgagagcagaaaacttcaccaagagatcgagagcataaaaaagagccagtcctctgggaaatgcaccatactctgaag

SEQ ID NO: 4775 - DNA, 1373 bp, Cricetulus griseus
  modified_base (245)..(245): a, c, t, g, unknown or other
tttcctctgcacagaaaacctaggctctacgtccctcgcatcccaccttggcagacggcagtgagagcgaaacagaagatggtgtactaggaactcaacagagtgaccgtgaggatgcaaaggaacagcccccacaaagagagtcctactcaactaccggtctgaccatcactgtggcagccaggagaccttagggtagcggtcacatggaaagagtctgggggccatccctctgtcctgtgtcngttttttacagcctcatatgactgtctttgccaaatgttcattgaaattccattgccacagcagaccggagtatgctaattggtaaatggggttctaacagtattacagaatattaattttcttatttagaaaatattgctgtgtctaagtataagaaccattttaaaattcaggactatgggaaattggattttctttacacaaaaccgttcttgtgcaatattttatcctcattgaagtactggggctagaacccaggaccttacacacggtgggcaaactctgtgctactgagccacacacctaagtctgacatctcaaagtcagtgcacacatttctttatgggaaatgaggccaaagagattgttttatacaacttctactcttgttcttgtttggatttttgttgttgttgttgttttggtttgtttttattttgtttggccaattggtagctactcggcatttgctgattgattgaaacatcatatcccagctaactggccatttatgttggaagaaaaagaagcctttcccagccctgagcataatgtagctcattcttttccagccagtgcctttgattgaaaatagtgtctgttgcttttgaagtgtgtcatccctggcatcataagaagtcatttggttcctcgtccaccattttcataatgcactataatattcaagtttttaaaaattaaggatatcaattatgttttggtaagcttttcatggctagcgtggttaccacacagtaccaagacatcggtggccaatatttgtagaatcagtaatttccttttaaagcaatgagtttttagcctgaaagtttattaattgagttaaaagtttataaattaatttaaaattaatttctttttaattctgaaattagttaaaatttttgggtagagggtagatgctatttaaaatccaacttttacatcacaccatgggtctgcacacctcttcacttcagagaagagatgacagtgacgcattggacatgcacagttataaatggatttcattgtactgtgggatttttattgtaacactgtatgataacctaaaatgtttacttgtgcctttgctttaaataattaaagtttctctttttacaaga

SEQ ID NO: 4776 - DNA, 1373 bp, Cricetulus griseus
  modified_base (1288)..(1288): a, c, t, g, unknown or other
  modified_base (1366)..(1366): a, c, t, g, unknown or other
gggagtatttatgtagccataataaagaaaaacgaaagaagctagaagacaaaaatgttgagtccacgtgtgaggacagtgaagaaaagttttgacttttcagtgatgtcttacaatatactctcacaagatctattggaggacaattcacacctctacagacactgccggcgttccagtgttacattggagcttccgttttcccaatattctgaaagaaatcaagcattttgatgcagatgtgctctgtctgcaggaagttcaagaagaccattatggaacagagatcaggccaagtctggaatcactgggttatcactgtgaatataagatgaagacaggaaggaaacccgacggctgtgccatttgcttcaaacactccaaattttcactcctgtcagtgaacccagtggagttctgccgccgtgacattccactgctggacagggacaacatcggactggtgttactcctgcagcccaggaccccacatgctgcctccccctccatctgtgtggctaacacacatctgctgtataacccacggcgaggagatattaagctcacacaattggcaatgctgcttgcagagatttccagtgtggcccataggaaagacggtagcttctgccccatcgtcatgtgtggtgactttaattctgttcctggttctccactctatagtttcataaaggaaggaaaactgaattatgaaggacttgcaattggaaaggtatctggccaggaacagtcttcacggggacagagaattttatctattccaatttggcccccaaacctaggcatctctcagaattgtgtatatgaggcacagcaggttcccagagtagaaaagacagacagcgatagccatctgacggaagcacagctggagaagacagaggtcctaatgtcagctgaaaacgtgtcttcacatctgcagcaccacttcagcttgtcatctgtctattctcattaccttcctgacactggacttccagaggtgaccacctgccattcccaaagcgccataactgtggattacattttctactctgcagagaaggagggtgcttccaggggtccaggagctgaagttgctttggttggggcttgaaacttctagctagactgtcgcttcttacagagcaagacctgtggactgtgaatggacttcccaatgaacacaactcctcagaccacctgcctctactggccaagttcaggcttcaactctgactctgttgctcacttacacaatttcctgtcttctcaaaggctgtaaagntattttcactgtttgcatgctgttcatttttgtgctgtgtggttcagaatttgctatatgcttgaaagagatgggaanaaacaaa

SEQ ID NO: 4777 - DNA, 1373 bp, Cricetulus griseus
ggcgcaaagattggcatcctccgcttctgctgggactccggcggggaagcgggtggtgaatcaggaagaactgaggcggttgatgagggagaagcagcgcctgagcaccaaccggaagaggatagaatccccgttcgccaagtacaaccgtctggggcagctgagctgcgcactttgtaacactccggtcaagagcgagctcctgtggcagacccatgttctgggaaagcagcaccgggaaagagtagccgagctgaaaggcaccaagggagcaacccagggcccttcggccggcgcagcgcctcagcccatcaagaggagagccacggatgtggagaaccaagacgccaagaaagccaaggcctccgtgggacctcaggtacagccctccacctcgatgaggaagaggaggaagaagagggaggtggagacgggagaagggacagcagcaagcatcttccagatgcacagggcaaagacaacgaacactcgcttgcctcttcgagagagaccactagcaatgtgctgccaaatgatccctttaatacaaatcctcccaaggcccccttagttcctcattcagggtcaattgagaaagcagaaatacacgaaaaagtggtggaaaggagggagaacaccgccgaagcattaccagaagggttcttcgacgaccctgaggtagacgcaaaggtccggaaggttgacgccccaaaagatcagatggacaaagagtgggacgagtttcaaaaggccatgaggcaagtcaacactatttccgaagctatagttgctgaagaggatgaggagggacgattggaccggcagattggagagattgatgagcagatagagtgttaccgtcgggtggaaaagctgcggaatcgccaggatgaaataaaaaacaaacttaaagaggttctgaccataaaagaattacagaaaaaggaagaagagaatgtggacagtgatgatgagggagaattgcaggatttactgtcgcaggattggcgggtgaaaggggctttgctgtaaggttttgaagatccaagctttcaatcagtctctgctgccccgtaaaaagtgttgtgtccccttgggtaccctgagttgttgagataaaataagccactgagaagtaatacttcggggaaggtacttcggtgctatttattagaaaatgtttgaggtaaaactgtttttgatatttttgaaattataaccgcaaatttgccaactttttcgtgttttacagttgattttcagttgtaaaatcttaaattgtaaatattttacatagctaaatatatatttagataagtcacttctttagaaacttatatgtgagttgccatatgggtgctggaattgaaccc

SEQ ID NO: 4778 - DNA, 1373 bp, Cricetulus griseus
gctgaagctgatgtagcatctctgaacagacgcatccagctggttgaggaggagttggatcgtgctcaggagcgtctggccacagctctgcagaagctggaggaggctgagaaggcagcagatgagagtgagagaggcatgaaagtcattgaaagccgagcccaaaaagatgaagaaaagatggaaattcaggagatccagctgaaagaggccaagcacattgctgaagatgctgaccgcaagtatgaagaggtggcccgtaagctggtcatcattgaaagtgacctggaacgtgcagaggagcgggctgagctctcagaaggcaaatgtgccgagcttgaagaagaattgaaaacggtgacgaacaacttgaagtcactggaggctcaggctgagaagtactcgcagaaggaagacaaatatgaggaggagatcaaggttctttctgacaagctgaaggaggctgagactcgggctgagtttgcagagagatcagtaactaaattggagaaaagcatcgatgacttagaagagaaagtggctcatgccaaagaagaaaaccttagtatgcaccagatgctggaccagaccttactggagctaaacaacatgtgaaaacctccttagctgcggccacattctttcatttccctctcgttgttttattttgtttttaaacacctgcttcccagaaactccttcgatgcatttttatatacttttaaccactgtcaccgaaacatctgcaaagaaccagctagggcagggagtggggaaagatacagaaaggcaagcccaagttggggtacttacttaaacgtgccatttcccaggttgacattgccacacttcatagcatttaggcatgcagtctgcttagccagggtaggaagcctcacaaaaacagaaagatttccagccagagtgccaaggtggagtcaccaagaagactgatgttggagacaaccaggtgcaggtgcaagttggtgctactttaaacaaaggaaccctgggggtctttgttcaatgttatacaattagatttctctccaacactaatttattttgttttgagttttacttccagacaagactatgggtttcttacgcctgtgttcattaaagtcaagggtctggaagccacactggtcttttaagagtcctgttccttcccaactgacacttgcagccccttccatctcagcagggagagcattcaatgtggattgcccctctttccagttctccatgtcagggtaaaagatctaggcactacatacataattggtaaaaaaggcattttcttaagaattataactatatgtaaacattgtataatgatatggaataaaatgcacattgtaggacatttt

SEQ ID NO: 4779 - DNA, 1373 bp, Cricetulus griseus
gtgacccggataatggcggccggcgcggccgtagccctggccctgtggctacttgtgccagcagtacgagtgggagaggcggggccgccgcccattcaggacggcgagtttacatttctgcttcccgctgggaggaagcagtgtttttatcagtccgcgccggccaacgctagtttggagaccgagtaccaggtgattggtggtgctggactggatgtggacttcaccttggagagccctcagggcgtgctgttggtcagtgagtctcgaaaggctgatggggtgcacacggtggagcctactgaggccggggactacaggctttgctttgacaactccttcagcaccatctcagagaaactagtgttctttgagctcatctttgacagtttccaagacgaggaggaggtagaaggttgggctgaagctgtggagccagaagagatgcttgatgtcaaaatggaagacatcaaggaatccatagagactatgaggacccggctggaacggagcatccagatgctgactctgctacgagcctttgaggcacgtgatcggaaccttcaagaagacaacctggagcgggtcaacttctggtcagctgccaatgtggctgtgttgctgttggtagccgtcctgcaggtctgcacactcaagcgcttcttccatgacaagcgccctgtacccacgtagccccagccacagaggatgatgtgtgacttgctggagacctcccagactcagaagctgcacagttgggtcttcagcagtggccccatgtgtctcctttcctgggtgagcagggagtgcaagtagattgcagaccctttggaaggggaggctcagcaacagtgcctgtttcttggaagtgttgggtgctgtagtgtggggctatatggctctcagatgccctgattttctcctggaattgtgccttagcttaagtcttccatcatcaggatggggtcaagcagtacaactgctccttgccctttcccgagctggacacatcccagcctcaatgtctctactttgctcctggggataagcctactttgatagggtctgggaaggagacacatctgcagagttcttgccaggacagccacttttatttgataggaagagccctggccccttgacccagaggggagccagctagcctcaaggaacaaagggacatctgtcctaggcactggagtcaataaattatggtcagaaaaattaatagtgcctggtgacttgggctcagggacatcaacttggggcagacctagcctcaagccaggggcagccaggaaggcgggagggcactcccacgaagctcagaagaaaggtcgggcaggagccgatggaggtggtcgcctgggcac

SEQ ID NO: 4780 - DNA, 1372 bp, Cricetulus griseus
cggaacgggcggaggctgccggtttcgtaaccgtcgctcctcctcggcgactcgcgggctgcggggcctgggtcgggtcgggccgcggcgcgcggggccgctcggaggagtggaggccgcctgggggcgggcgggccggccggaggcgcaggtacatgtgaagattttttggcacttggggtgtagcctctgctggtcacactgctctgatttctgcctgttctgtgttggcaaaggactcgcccaaatgagcaagctgtcgcagccagccactgctccaggagtgaacggaataagtgtcattcacactcaggcacatgccagtggcttacagcaggtccctcagctggtgcctggcccggggccccggggggaggaggcaaagctgcgcctccaagcaagcaaagcaaaagagttcgcccatggatcgaaatagtgacgagtatcgccagcgcagagagcggaacaatatggccgtgaaaaagagtcgattaaaaagcaagcagaaagctcaagatacacttcaaagagtgaaccagctcaaagaagagaatgaacggttggaagccaaaattaagttgctgacaaaggaattgagtgtactgaaagacttgtttctcgagcacgcacacaacctcgcagacaacgtgcagcctgtcagcactgaagctaccacgacacattctgacaacacagggcagtagttctccttccaggcgccatggacctgaactcgagaggtgtgaacacctgcaccgccagttcagtggctgagcttggtcttgttccatctgaggttattttctaggctcagtactgaacagtggattagccatgtaatttatctggtcttaatgataatgggtctttgaagcactaaaagaaacttagggtttatggttaaaataaattacctggaccttactattaacttaaaaaaattttagccgggcgttggtggcacatgcctttaatcccagcactcaggaggcagaggcaggcggatctcagtgagttcgtgaccagcctggtctataagagctagttccaggacagcctccaaagccacagagaaaccctatctcgaaaaaccaaaaatactaattcttttggtttttcctgtgttgagaataactgccaaggggggccatgatttttaaaggcagggtttgtgtgtgtgcaagtgtgaagaggcacgcttgggcctttgatccctactaaatgattactagaaaaatgtatcaacttcatgccgtctctcaaaagaatagtcaaagaaaacttgaaagtataaggtttcaatctttaatttatttcctaaatctgtattttctttttttgaggcatttcttttctagtttaatggggtgtt

SEQ ID NO: 4781 - DNA, 1372 bp, Cricetulus griseus
ctcttcttctatggataaacagtctaggttatggcacatttctagaagagaatgcctttgctgttttcaacatatagattttgttcactgccatcgggtagatgtattttctatgacacagagcatttgaaataccatacgcaaatacatgtacgatctactagagggcgcaacaaggttggaagaaaaattactggcattgaacctttacctggagaaaataagatactggtaacctcaaatgactccagaatcagactatatgatctcagagacctgtcactgtccatgaagtataagggttatgtcaatagcagcagccagatcaaagcaagtttcagccatgactttacttacctcgttagcggttcagaagataaatatgtttatatctggagtacttaccatgacctaagcaagtttacttcagtcaggagagatcgtaatgacttctgggaaggtattaaagcacataatgcagttgttacatcagccatctttgctcccaatccaagtttgattgttatgtcttggatatgccatctgagaaattaggaagggactagagaaaagtgaagaagctgaagtttgggtagcacatctactggtattgtgaagacagataacacagaagttctactgtctgccgacttcactggagcaatcaaagtgtttattaacaaaggaaactgtatcttaatttggaattatatttaaataagcatatcagtaagtttctatatgtatcagaaatgagaaaagtattatagtgtttcatgctaacatccgccgagcatagagttttatgttttgttatgtttatgttttgttatataattataaacatgcacaggtttctgcatgaaaaagatattaatatattaatcacatgtgcgtgccttttggttacatgcactaaatctaacaaagttaaattatttcagtggctcttttggcctcctactgggtgatagtcttgtttctagctctaaaaattttttttgcacaaaattttgtttttaaaaaacgtggtatcttttgactgaattattgtttcaaaaatgttatataggttttcaataggtcaataaccatgtgtaaatggttttttataaatttctcaatttggggacaagattttttttgtgatctaaattgtggatttattctttactttgtatgtgtatatatataaatttttttctttgccacactggagcacaatgtttctatgtaaagaattcttttctttatccatgagcaccaggctttgctcagttaaaaataagccacattaaggagtgagtcttctttttacaataataaattaaaagtatgaagaaaaataaaaaaaaaaaaaaaaaaaaaaaaa

SEQ ID NO: 4782 - DNA, 1372 bp, Cricetulus griseus
gcggcggcagcgggtcccgagcgctgcgcgccatggccggggcggggccccccaacggccctgccttccacggggccccactccctgcgcgacatgccgcacccgctggccggctccagcagcgaggaggccatgggaggcgacagcacgcccagcccggacctactgatggcccgcagcttcggtgacaagtttttaactactgtagtttgtaaataagtgatctgaggtgggggaaacttttaaagagaccaataagatgtctctctcatatctgtgtttttagcacttgaaaaccaacatatctagaaaaagccacagactgttaaaaacctaactgtagttcttaaaactgtcagtacccactaattgccttactcctcagctagtgtttaaaagagtttgcatagaaagttttacatgtggaagcagatggtctagaaacttaatataggccatcttcagtcccattaaagtcacaagccagaggtgagggtcacagaaggaaggtggccttttgggaggtgagactaaatattgctgttgccaaatggtatttgaaataatgtcaagaaacagggacggattggtgtaacagagtgatggctgtgtcagctgggccttcatccaggaacaaactagcacaaaccagcatctttaccagtcagcactgtccacctagccggtgctgagggttgggcttctccctcagagtctctgtatttctgtatgcctgtttccttcatgcctgagtcaggaatgtatggagaggcagcctgcatctgacagactcccatgaaacaaactgccagcaaactttctaactctcattttatctgttcaaagggagattataacaaatttttggacttttttttttttttagaaatttgtgtttaaacttccagagaaagaagcaggcttctgaggtatggtgtcccactgtgctagctctctctccatgctgccattaagccaaaacaaaagttgtgagcataagtgcttgagagaatgcgtgttgataagaaagtgatttctttacagatccaagtgtttgtctcatgaaactaccaaaaaacgaatgtctacctttttctttgttatggaaccagagattataaaaagaaaaaaaaaggaaaaaaaaaagttgtttttgttgtattttttgatgctggaagttcttgtccactttggtttttcgtatatctgtgtgtaagaaattctgtttgttgtttactctatggaattagtattacattttgaggtaaacgaagaatttgtattgcttgataaactattagcttgtaaattaaaaaattctttacctcagttaacttaaagtaatggaccaataaatctataaaagatgctt

SEQ ID NO: 4783 - DNA, 1372 bp, Cricetulus griseus
cttcggtgaaagtgtcctcaatgatgctgttgccatagtgctgtcctcctcaatagtggcataccaaccagctggagacaacagccatacctttgatgtcacagccatgtacaaatctattggaatcttccttgggatcttcagtggatcttttgcaatgggtgctgctacaggagtggtgacagctttagtgacaaagttcaccaagttgcgggagttccagttgctggagacaggtctgttcttcttgatgtcctggagtaccttccttttggccgaagcttggggtttcacaggtgtggttgcagtgttgttttgtggcatcacacaggcacattatacatacaataatttgtccacagagtctcagcatagaacgaagcagttgtttgagctgctcaatttcttagcggagaatttcatcttttcctacatggggctgacgctgttcaccttccagaaccatgtcttcaatccaacatttgtagtaggagcatttggtgcttattttcttgggaagagctgccaatatttaccccttgtctcttttacttaagtttgggtagaagaagtaagattggatcaaatttccaacacatgatgatgtttgctggccttcgtggtgcaatggcatttgccttggccattcgtgacactgccacttacgcacggcaaatgatgttcagcaccacacttctgattgtgttttttactgtgtgggtatttggtggtggcaccactgctatggttgtcatgcttgcatataagggttggtgttgactcacaccaagaacatttgggtgttcctgaaaatgaactccgatcttattctcaatgatggtgatatcagtttgacatatggggattctactgtgaacactgactctgcaacagccagtgccccaaggagatttatgggcaacaattctgaagatgccttggatcgggagcttacatttggggaccacgaactagtcattcgtggaacacgcctggttcttccgatggatgattctgaacctgcgttaaattcattagatgacacaagacacagtccagcctaggctttctaatactcacttagtggtttgtaaactttgcacatgtgattgtgaagaaatgtgtactacctacaagtcctagtgcatgtctccgaatgtgtaagctatataaatgctatttatatggcataggaagaatataagtaccctgtacaaggcaggttgtgagcaatctgttctctttaagttttgctggctgcactacatattggccggatctctttagaaagttcctttcacagtaatgttgtgtgttctgttagttttatgggatgagaggttcctttgttggaaaactttttgttgattgc

SEQ ID NO: 4784 - DNA, 1372 bp, Cricetulus griseus
  modified_base (182)..(182): a, c, t, g, unknown or other
  modified_base (494)..(494): a, c, t, g, unknown or other
taccattccatggccaatgaaaagaacttgaaggtctcttcccagacaaatttcttatctcgggcttggtggttccccatcttctatttttttgagaaaaacgtacaaggctcaattccttgctgcttctcctggccactgtcctggccccctggctgcttcaagtcatcatgcaaaaagtnttcccgggtccagaagatcggggaggataatgagaagtctacgtgagctgccaacctggcagcagcctttccaccaaaagagtccgtgctgtaaccaaaggcgcagcttcctatttattctcagagaactgactggtaaatgaagcggaccaaattttgtgcaaaagatgggagcaacgaatgaagtattacctttggtctttttttttgaagttctcacgggaaagagttattttaaagacattctaaggtcttcccaaagggaaagtgctcagaatccgatcaaagaaaaattgcaggtcatttttaccncctatatcacaatcattagtgtctagtccataactaccaggctttgtttacttcaaaacccaaagtcaactgtcctttatttatgttctagaagtcatcatttcattttaaattaaaagttcatgtcttgctccataaatattttaaacttttgttagtgttttggttttgtattataaaagtgattaaaaaattttaagctggtcttaacacactcacccctgtagtgtaaggaagtgtgagaaggattgtgttggagccatttctatgtctatgtgtaaagatttcttatattattgtttttaatgccagtgtgtcataataatttagcccctttgactcatttgacaaaatgcattttatgaagaagtgctcttgacttcgatattcatatattgaaactcatgtcagaggtacccaaagataagtttttatacagataggcgcctcataagtgctggtttattactcgttaatattactgtactgtgttcttaatgaatcatgaatggcaaaggtgggtcaccgtagaattattttaaactatcctttaaagaaagagaagaaactataagctaatctagttgccaagttggagttcattatttaatttacctcctatgcaatgattaatgctgcgaaatgaatggttaataagctacagtatgttcaaacaagaactttcttcatagggtttgagaggcagccagttgcattcttttggaaatttactatactgtttcgatgtgttaagtgccttgttgtaaagtaaaattttaagtctagaattcattattttcctgacctatatttttcattatgattatctacgtgtgctgttgtaatcattttattaaatgcttacattttaatacaaa

SEQ ID NO: 4785 - DNA, 1372 bp, Cricetulus griseus
gaggctccaggggtctccattctggaccaggacctggaatacctttctgaaggccttgaaggccgaagccagagccctgtggccctgctctttgatgccctcctgcgccccgacacagactttggaggcagcatggactctgtactctcctggaagcaacagaaggagcgtgctgtcccccaccttgtcctggggcggaacctccctgggggcgcctggcattctattgaaggttccatggtgaccttgagccaaggccagtggatgagtctcccagacctacaggttaaggactggctgcggaaaaagtgcagaggtctccgcaacagcagagccacagctggtgacatcgcccactactacagggactatgtgaccaagaagggtctacttcacaactttgtgtctaggtgctatagtcactgccgtggagcaggcaaagtctgagcatggtatccctgaggctcaagcacccagcccactcttccaagtgaaaggctacttaactgccaaggacaacagccgaccagcccttctcactgtgggctcgtaacgtggtcctggccacgggcacccttgacaaaccagcccggctaggcatcccaggagagactctgccccttcgtccaccatgagctgtcagccctggaggcagcccttcgggcaggcaccgtgaacccaaactcagacccggtgctggattgtgggcgctgggctgtctgcagccgatgctgtcctctttgctcgccactacaacatccaggtgatccatgccttccgccggtctgtccatgaccctggcctggtgttcaaccagctgcccaagatgctgtaccctgaataccacaaggtgcaccagatgatgcgtgatcaatccatcttgtcctcccaccccaacctttcctacctccccagggcaggtgctgacttggtcatagacccagatcagccactgagccccaagaggaatcccattgatgtggaccccttcacctatgagagcactcaccaggagggcctgtatgccctggggccactggctggggacaactttgtgaggtttgtccagggtggggccttggctgctgccagctccctgctgaggaaggagaccaggaaaccaccttaacgtctgtagatgccctgacaccaggcctgaagaggaggggcttatcatagcccggtgggacatgagtccatctaaagatttcccaatgggggggaccagtctccccagcaggagatgaagacttgagccttatggatggactgtctggcccagaggcatggggaacacaggctacccatcctcaggctagtcaaggctcaaagtgagagcagtagccataggccaggtgtgtgctggagtcac

SEQ ID NO: 4786 - DNA, 1371 bp, Cricetulus griseus
agtgagaaggtgacaatcagttatgcagaatatattgcttctcgacaacactgtttccagaatggcactcttcatgccccgcccctctacaatcattactcctgacacacggctacatgaccagtcccacccccctgtggccaccaatggctatgacatcattggagcagatgcctcctcttcctggtccagttacttctattactgcaccattttatgatgctagcttccgttgccaagtctgcctcctgctgactggagggtgtggggttacagtgaatgcaacagaacatgaggggcccaagccttatatcagcctttcctcatcctggggttctggatcagggctccctaataaccagtgggaatggctgtgtgggttcagaagaccgttgtctggtgatttcccacatgtgtgttggccacacacggaaaactggaattgatgacgatccatggaggcttcttccccaatcccccacggcccaccagaccaattaggtgtactcccctggcagtctgggcaacggagaccaacatgaaccacttataggttgttttaaattccttttttaaacttccagtttattgtgtaccaagagttgatcacaacctccatgcttcataagtgaacaccatgttagggttgactgtgggcaccatgagcccctgtgagtcctggataagagaactgcaacaagatcagaagtcctgttggatggctttgcattgtgcaataagctgtgaaggtttaatgcttacccgactctcagctggactttctggtactcttcctgcattgaatctcctggtgttgaacagagctctgcagcatagcctgctgaggaatggagtggagatgcccatacaggtcctgatgtcatcgtcataagcaggtgtgaaaagagagatctcttcctcaccacccggctacctcaaccctcttctggtagcagtgcctatgtagctgcatctaagttctcagaagcacagacttttctttctttttttttttttaaacttagggtgggttggttgtggcaggagtgatcaaagacctggaatggatgagagaggtgctgattacattggaatgcccaggatgcatgccccttactgccaggtttggttcctttccatacataaaggggtctcatggtttcttgctgctgagggtaatgaaggtgatgttatagacaagtgtgacaggtgctctcaggtgccatggattgatgtcagggtggtcagttctggactgagccacccacctccaatttgtacaacagtattgatacatagggctacactcattactgttcaggcgttctatgttaagagttgtgttttatttctaaagatttaaagacaaaa

SEQ ID NO: 4787 - DNA, 1371 bp, Cricetulus griseus
gctgggctgaaccccgagccgaggcaagagtcggttctgagttccctgtgggtgcgctgccgctgctgaggggaacatggcgctcgtgggcagccgagtggaactggacgcagatgaggacatctttgaggatgccttggagaccatctctatatctccctcggacatggcaacaagcagctttccctttgtaccatgtgacaccaaacgggcatccagacagcttggagcatctgctgtggggttcatcagccaaggtggatctcaagagtggtctggaagagtgtgcagaggcattgaattatttctaagtaacaaatttaaagatgccttggaattgcttcggccatgggccaaggagagcatgtaccacgccttgggatacagtaccattgtggtgttgcaggctatcatgacctttgagcaacaggacatccaaaatggcatttctgccatgaaggacgccttgcaaacctgccaaaaatacaggaagaaatgcacagttgtagagtctttctcaagtctcctttctcgggggtccctggagcaactgagtgaagaggaaatgcatgccgaaatctgttatgccgagtgtctcctacagaaagcagcactcacatttgtgcaggatgaaaatatgatcaacttcatcaaaggtggactcaaaattagaacaagttaccaaatatataagaaagtgaaagctactgaagtatgaccattatctggtgccattcactctgtttgagttggcattttgtataaagccaaggggaaattgacaaggccataaaggccctagaaactgcaagaaacaactacaaagattactccttggagtctagactacacttcagaattcaagcagcccttcatctctggaaaaagccatcttcagactgactggaatgtacaggatggaatcctcccaaacaacatggactcttgctatggagatcagtcctggccaaggtggaagcatgaattaactttttttatttaaatattattaatgtgttccatgactttgtatgctgattttgtgtcaatggtatcatctgtgatgtgtagtgaatgtagataaagatttaaatttcaacatgaagacaacagttcctgtttctatttttacactttagacagttttgaaaacagatgtcatattagaaattgtatttttaagtgcaaataaatcaatttgaaagtcagtgtttccttttccctcctttgtatcttatagaagactctgtgttattagatacatatttgagttgccagattgttttcagaattctatattttcatattgctataaccaggttacctacaatgtgcaattgatttgttatttaaataaatgacacttgatgg

SEQ ID NO: 4788 - DNA, 1371 bp, Cricetulus griseus
atggcagaaggagcatggcgtggagacagatgagaaagcgggccctggatgcagccatcatccttgggggaggaggacttctcttcacctcttacctgacagccacgggcgatgaccatttctatgctgaatatctgatgccggccctgcagaggctgctagacccagaatcagcccaccggctagctattcgcttcacgtccctggggctccttcctcgagctacatttcaggactctgacatgctggaagtgagagtcctgggccataaattccgaaatccggtagggattgctgcgggatttgacaagcacggggaagctgtagatggcctctacaaactgggctttgggtttgtcgaggtaggaagtgtgactccccagcctcaggaaggaaaccccagacccagagtgttccgcctcccggaggaccaagctgtcattaacaggtacggattcaacagccacgggctctcagtggtggaacacaggctacgggccagacagcagaagcagaacaagctcactgcagatgggctgcctctgggaataaacctggggaagaataagacttcggaggatgctgctgcagactatgtagagggtgttcgtgtcctgggccccttggctgactacctggtggtgaatgtgtccagtcccaacactgctggtctgaggagcctacagggaaaggctgagctgcgccgcctgctggccaaggtgctgcaggagagggacgctttgaagggagcgcagaagccagcagtgctggtgaagatcgcccccgacctcacggcccaggacaaggaggacattgccagtgtggcgagagagctgggcattgatggattaattgtcacaaacaccacagtgagtcgcccgactggcctccaaggtgctctgcgttctgagatgggaggactgagcgggaagccactccgagatctgtcgacccagaccatccgggagatgtacaccctcactcaaggcaggattcccattatcggggttggtggtgtgagcagtgggcaagatgcgctggagaagatccaggcaggggcctccctggtgcagctgtacacggccctcaccttcctggggccacccgtcgtggtcagggtcaagcgtgagctggaggcacttctaaaagagcggggttttaacacagtcacagaagccattggagcagatcatcggaggtgacggttcctgccagatgccccatccagaacgtgcccaccaactcaagcaagccttgtggctgcatcataagaggaagatctgtctcaagctatgtcccttgactgtgtgacctggctggactgcataagccagtcacggttatcactagacagtaaaggctttctctaat

SEQ ID NO: 4789 - DNA, 1371 bp, Cricetulus griseus
  modified_base (6)..(6): a, c, t, g, unknown or other
tttttnttttttattttttggtagtttggagttctccagtcggagtagtcgcttgttaagttgctgctgtctgtcccggcagaggaagatagagtgctgagcgtccggtcaccaatttgcacttcactagagccactggacccgaaaagtttgtgaatagaggctcctgagtttggggagacccaggcttgcagcgtagggggacggaggaggctggagggagctccccccatggagcccactcagcttgcagagaacctcatcccaaaccagcagtcccctgtgcctgaacttgaggatcctgaggaccccagagacgaatctccagacagctctgacactgtggtcctcagtctgttcccctgcaccccagaggccctgaaccctgaagcagatgccagtgcaccctcactacagggcagtttcttgaagcactcaacaaccctcacaaaccggcaacgtgggaatgaggtctcggctctgccagccaccctggattccctgtctgtccaccagcttgcagcccaaggggagctgagccaactgaaagaccatctgcggaagggtgacaacctgatcaacaaaccagatgagcgtggcttcactcccctcatctgggcctcagcctttggagaaatcgagacagttcgcttcctgctagactggggtgctgacccccacatcctggccaaggagagggaaagtgccctgtcacttgccagcatgggcggctacacggacattgtgaggttgttgctcgagcaggacgtggacatcaacacctatgactggaatgggggaacaccactactctacgccgtgcgagggaaccatgtaaagtgtgtggaggccttactggcccggggagctgacctcaccacagaggccgactctggctataccccaatggacctcgccgtggccctgggataccgcaaagtgcaacaggtgatggagacccatatcctgaaactgttccagagtactctggggcctgcagaccccgagtgaagacagcctgttgggaacccaggcactcagggaacaaaccagtctcccacaactggcttgaggcagctcctggacagtggtggcagagggccctccccaacaggaaccaataaatctgtgcctgcagctgcggtgacgtgaacacgctgggggaaaactcgagtgtcaccccactgggaggggccctggaagcagatttatttatttctgttctccccaagacagggtttctctgtgtagctttggagcatatcctggcactcgctctatagaccaggttagcctcaaactcacagagatccacctgcctctgcctcccaagtgctgggattaaaggcatgtgccaccactgcccggcct

SEQ ID NO: 4790 - DNA, 1371 bp, Cricetulus griseus
gcaggaggcctaccagcccatgaagcagctggtgaaggaaattggtcaggagatccagcagctgaacttggcaggctgctattggttgtcgggctctaccatcgagcatgtggcccgctgtcacaggcctggtgaaggtgaacctgtcaggctgccacctcacctccctgaggctgtctaaggtgctttcagccctgcaacatctgcgctcactggccatcgacgtgagccccggcttcgatgccagccagctgagcagtgagtgcaaggccacgctgagccgagtacaggagctcaagcagacgctgttcacaccatcctatggtgtggtgccctgctgtgccagcctgcagaagttgctgctctactttgagatcctggaccgcacacgtgagggtgctgtcctctccggccaactcatggtgggccagagcaacgtgccccattaccagggccagccttaacctcagtggctgtgcattgcctgtctgcagactcgttgctccgtaaggcagaggacgacattgacagcagcatcctggagacactggtagagtcctgctgtaatctgcaccacctcaatctctcagctgcccaccaccacagctctgatggcctgggccgccacctctgccagctcctggcccggctctgccacctgcgttccctctcgctgcctgtctgctctgtggctgactcagcacctaggcctgaccgcgcgcctgccccgccggccatgcatgcagtgccccgtggctttggcaagaaggtgcgcagttggggttcagacctgtccccaaccccttcctgggccagtccggccccccagcctgcctctgtgttctggtctctgctgaagaagctcccccaggcatgctgacaggctctggactagtgagcattggcctacagtgtcagcagctgcagtctctgtcgttggccaacctgggcatgatggggaaggtggtgtacatgcctgctcttgctgacatgctgaagcactgcaagcgctgaaggacctgaggctggagcagcccttgggccagtgttcatctctgcagcgcctgtggatgctgtgctggactttatggcccgttgcctgcaagttgtcgtgtgtcacatgttcactggagaatccctcatcacctgcaagaacctgcagcaggcactcctccggagtttccaggctgagaggcccgccttgaatgtcgtcatcttccccctgctccacgagggcctgacagatgtcatccgagatgtccccatggtgcacctggacgagatcaccttatttaaaagcagagtggctgaggagccaccgaacctgtggtggtgagagggctgcctggccccaagcccctccactcctgc

SEQ ID NO: 4791 - DNA, 1371 bp, Cricetulus griseus
gggctggcaggaccacccttggcaggcctactggtcgaccagagcaagatctacagcagggccttctactcctgcgcagcaggcatgtcggtggctgctgtgtgcctcgccttggtgagaccttgtaaaaagggcctgtgccagcatcctcattcaggtgaaaacagacagacagccatcacaggaaggctttacaggacataccagaagactttctggaaatggatcttgggaaatgtgagcacagggttcatatgaaaatggatccagtgtgacacattttcatgtcatagcttctatgttgcctgggatttttaaacaatttgaaaattactaaggtttaaattgacaaattatggcttctgagttttctcagtattgcatggaaagaaagcaattatttaagactaagcatttgattaatatgcaaaaacctaaaaacatataacaacttgaacttcaaagattgctacttctttttatggccagccatcaccacaagtatttcaatagaaatgttaaattgcattcatgtttcctattgtttttctataattcaagaaataagtgtttgtagtaactttttttaattttaaaccactatttattattaagttattctaggatgattagaatgatcaaaagaagggccggtgagatggctcagtgggtaaaggtgtttgctgccaagattcatgacctgagttcaattcttagaacccacatggtagaaagagaaccaacttctttgagtcatcctctgacctccacacacatgctataacatgtatgcacccacacacatatatacacaaaattacctcctttctgcagctctttaaattcttcagagagctttgattgtctcctaacattaatctcctgacagcccgagctgtaatgattctttggcgttgttaaaggcaaagtgtgctatttaaaggggcggggagataatggatgccaaatcgcctccgtttttaaattatcacctaagaatacttgaggatcttctttgaccagaattatatttcattgaattgttggaacatttccagtgggtttttgttgttgttgttgttgggggcagtgtgaggacgaggggggctgcctccttgcctgtttgactgtatctccccgactgggtggccggtgcttgctgctcagtatttcttcatctttactgttcaagacaactcagggggaacttagaacaagcctagtttggttacaggtacacacaagcttgaatctttctctgcacttaagatgaaagtggcgtagttcgtcacctccggctacctttttatacagcatcttattagccatagaaatgggacaatctgtagaactttggggagggtgagtgac

SEQ ID NO: 4792 - DNA, 1371 bp, Cricetulus griseus
aggagagggcccggagctgctgggccggagcggcggagccgccatgtccgacagcgagaagctcaacctggactccatcatcgggcgcctgctggaagtgcagggctcacggcctggaaaaaatgtgcaactaacagagaacgagatccgtggtttgtgcctcaaatcccgggagatattcctgagccagcctattcttctggagcttgaggcacctctcaagatctgtggtgacatccatggccagtactatgaccttctacggctgtttgaatatggtggcttccctccagagagcaactacctcttcttgggggactatgtggatcgtggcaagcagtctttggagaccatctgcctgctgctggcctataagatcaaataccctgagaatttctttctgcttcgtgggaaccacgagtgtgccagcatcaaccgcatctatggcttctatgatgaatgcaagagacgatacaatatcaaactgtggaagactttcactgactgcttcaactgcctgcccatcgcagccattgtagatgagaagatcttctgctgccatggaggcctgtctccagacttgcaatccatggagcagattaggcgtattatgcggcccacagatgtgcctgaccagggcctactgtgtgatctcctgtggtctgaccctgacaaggatgttcaaggctggggcgagaatgaccgtggcgtctcctttacctttggggctgaggtggtggccaagttcctacacaagcatgatttggacctcatctgcagggcgcatcaggttgtagaagatggctacgagttctttgccaagaggcagttggtgacactcttctcagctcccaactactgtggcgagtttgacaatgctggtgccatgatgagcgtggatgagactcttatgtgctccttccagatcctcaagcccgctgacaagaacaaggggaagtatgggcagttcagtggcctgaaccctgggggccgtcccatcaccccaccccgcaactctgccaaagccaagaagtagtctccatgtgctgcccttctgccccagatgatggattatttgtacagaaatcatgctgccatgggtcacactgcccctcaggcccacccatcatggggaacacacagcgttaagtgtctttttcctttcttttttaatgaatcaatagcagcgtctaatcctccagggctccctcccaccagcacctgtggtggcttcaagtggaatcctggggccaaggctgcagctcagggcaatggcagaccagattgtgggtctccagccttgcatggctggcagctggatcctggagcaacccatctggtctcttgaataaaggtcaaagctggattctc

SEQ ID NO: 4793 - DNA, 1371 bp, Cricetulus griseus
ggagagaccgggagctgcagctgcggtatcggcacacctggacgctggcctcggcagaaatcccaagagccatgttgtcagaagccctgctggtatccgctccagggaaagtcatcctccatggagaacatgctgtagtccatggcaaggtagccctggcagtggccttgaacttgagaacgtttctactgcttcgaccacagagcaacgggaaagtgagcctcaacttaccaaacattggtattaagcaggtgtgggatgtagccgggcttcagctgctcgacacaaactttcttgagcaaggtgatggtccggcacccaccccagagcaactggagaaactgaagaaggtggcaggcctacctgaggacggtgtcggcaccgagggcctggccgtgcttgcctttctatacctctacctggccatctgccggaagcagagggtacttccgagcctggacattgtggtttggtcagaactgccacctggggcaggcttgggctccagtgctgcctactcggtgtgtctggtggctgccctcctgactgcctgtgagaatatcaccaatcccctcaaggacagggatgccatcagcaggtggtctgaggaggacctggagtcgattaacaagtgggcctatgagggagagagagtgatccatgggaacccctctggagtagacaacgctgtcagcacctggggaggagccctgcgataccagcaagggaagatgtcatccttgaagaggctcccggccctgcaaatcctgctcactaacaccaaggtcccacggagtaccaaggccctcgtggctggcgtcagaagcaggctactcaagttccctgagattgtgaccccgctcctgacctcgattgacgccatatccctggagtgtgagcgtgtgctaggagagatggtggcagctccagccccggaacagtaccttgttctagaagagctgatagacatgaaccagcaccacctgaatgccctgggtgtgggccacacctccctggaccagctctgccggatcacagcggcacacggacttcatagcaagctgacaggcgcaggtggcggtggctgcggcatcaccctcctaaaaccaggtctagagcgagccaaagtggaggacgctaagcaggccctgaccggctgtgggtttgactgctgggagaccagcatcggagcgcctggggtctctatgcatttggctgcctccttagatgaccctgttcgacaagccctgggcctctgagatgatgtgacaatgagtcctgccaagaagcctctaaataaaaactaatagtacaaacaaaaaaaaaaaaaaaaaaaaaaaaaaaaaaaaaaaaaaaaaaaaaaaaaaaaaa

SEQ ID NO: 4794 - DNA, 1370 bp, Cricetulus griseus
gaagcggtccaggatcctgcgcatggcgctgactggaggctccactgcctctgaggaggcagatgaagacagcaggaacaagccgtttctgctgcgggcgctgcagatcgcgctggtcgtctctctctactgggtcacctccatctccatggtattcctcaacaagtacctgctggacagcccctccctgcagctggatacccctatcttcgtcactttctaccaatgcctggtgacctctctgctgtgcaagggcctcagcactctggccacctgctgccctggccaccgttgaccttccccaccctgaacctggaccttaagggtcggccccgcagcgtgctgccactgtcggtagtcttcattggcatgatccgtgccctccttgaactttgctcatctgtacagtgcccacttctggctcatgatgacgctgggtggcctcttcggcttttgccattggctatgtgacaggactgcagatcaaattcaccagtcccctgacccacaatgtatcaggcacagccaaggcctgtgcgcagacagtgctggccgtgctctactatgaagagactaagagcttcctgtggtgggacaagcaacctgatggtgctgggtggctcctcagcctatacctgggtcaggggctgggagatgcagaagacccaagaggaccccagctccaaagagggtgagaagagtgctattggggtgtgagcttcttcagggacctgggactgaacccaagtggggcctacacagcactgaaggcttcccatggagctagccagtgtggccctgagcaatactgtttacatcctccttggaatatgatctaagaggagccagggtctttcctggtaatgtcagaaagctgccaaatctcctgtctgccccatcttgttttgggaaaaccctaccaggaatggcacccctacctgcctcctcctagagcctgtctacctccatatcatctctggggttgggaccagctgcagccttaaggggctggattgatgaagtgatgtcttctacacaagggagatgggttgtgatcccactaccatgacctgtcaacctcaaagccttcaacatgaggactccaacgtaaatttggggacagaagcactcagaccataaccccagcaccacaccctcctaacctcagggtagctgtcattctcctagtctcctctcttgggcctttagaaccccccatttccttggggtaatgtctgatgtttttgtccctgtcataaaagatggagagactgtgtccagcctttgattcctacttcctacaatcccaggttctaatgaagtttgtggggcctgatgccctgagttgtatgtgatttaataataaaaaa

SEQ ID NO: 4795 - DNA, 1370 bp, Cricetulus griseus
gctgccgctgccagtgctgctgctgggcgcgtggaagcgagggcggctggcggtcgcggccccgcacgtggtcgtcgtggtgctgggcgacgtgggccgcagcccccgcatgcagtaccacgcgttgtcattggcccagagcggcttctcggtgacactgctggggttctacaactccaaacctcgagatgagctcttgcagaatgatagcattcagattgtgaagttgacagagctgccgagtctgggagctggaccccgagttctccagtatggagtcaaagttgtatttcaggcagtgtacttgctatggaagttggtgtgcacagaccctgcagcctacatcttcctccagaacccaccaggcctgcctgccattgctatatgctggtttgtgggctgcatctgtgggagcaaactggtcatcgactggcacaactatggctattccatcatgggcttggtacatggcccccggcatccgattgtgctgctggccaaatggtatgagaagttcttcgggcgcctctcccacctgaacctgtgtgtgaccaatgccatgcgggaagacctggcagagaactggcatatcagggctgtgactgtctacgacaagccagcatctttctttaaggagacgcccctggacttgcagcatgagctcttcatgaagctgagccgcacgtactcccctttccagagctgctcagagcccctggaccccagcgtggagaggtcagccttcactgagaaggactgtcagagcgggatggtgaggagtctgcatgggcggccggcactgcttgtgagcagcactagctggacagaggacgaagacttctccatcctgctgggagcattagaaaagtttgaacaactgacactcagtggagacagccttccttccctagtctgtgtgataacagggaaggggcctctcagggagcactaccgccacctcatcagccagaagcacctccagcatgtccagttctgcaccccatggctggaggccgaggactatccactgcttctagggtcagcggacctgggtgtctgtctacacatgtcctctagtggtctggacctgcccatgaaggtggtggacatgtttgggtgctgcttgcctgtgtgtgctgtgaacttcaagtgtttgcatgagctcgtaagacatggagagaatggcctggtcttcaaggacgcggaggagctggcagcacagctgcagatgcttttctcaaagtttcctgaccctgctggaaagctaaaccagttccggaaggaactccgggagtcggagcaactgcggtgggatgagagctggcaacggactgtgctccctttagtcactcacaaatgacctccaggcc

SEQ ID NO: 4796 - DNA, 1369 bp, Cricetulus griseus
attcagctgcagatggagcagcataacgagcgaaactccaagctgcgccaagagaatatggaactggcggagaggctcaagaagttgattgagcaatatgagcttcgtgaagagcatatcgacaaagtcttacaaacataaggacctgcagcagcagctagtggatgccaaactccagcaggcccaggagatgctgaaggaggcagaggagcggcaccagcgggagaaggagtttggtgtgtctgtgtgtgaaggagcctcttcaggcaccagttctcctgccctctggtagtgccaggtccaggccgatgttgcttctctgttctcagtagccttacattcacaggtgcctctagcctgcacaaatgattgacagacggtcacccaaaggattctttttggaggtgtttttgttgttttgttttgcctaagagttcgtattaaagatcgtcaaaggaaggaagaggggatacactagcaatggtcccaggtgcctggcctccagcgccccatttgggacaatcctgtcagggtcctttgccatgttggtgccaaggtgtcctgtttgggaagataaaaagattattaagagaaaggatactggccttgccacaaacttgcctatgggtttcagcctgggaggctaccactaattctcatctccatctccatgtagccattgctggatcatgtgttcaagaccagaaattacaaactaatgtcccttttcccgtgttgggcactaccacttcaagaacttgctaccctgtatagttagttactcagggtgcccagcagcagtgtaaatgttgaggcttctttgccatctccagctaggatctgttgtcctgtggagggtctcctaaggtttttctcttggaaatcatagtattcttccagaaccttggagctattagctccatcaatttctaggcacccagggcaatatctagatggtaatctcttcctatctcttctccactgaccaaatctgaagtcactacagctgctctgctttcctaagtcagcccaggagtctgggccagctgtagggaggtggcctgtctatgagtgaggtctaatgccttcctcacttgggtgagtccatgcatatgacctcattttaggaccaagatctgtgttggtttataggattgttagctttttctctagaggaccacagtgggtaaggcttagtgtccagggcccttggctacaccctcagtgatacttaggtccttgtccagttgagagcttcatgtatgttatgtccccagcactttgttttccatgagggttttggaccatgggcagcgctcaggcactctgtgagaatgttgtttctttaaagatggttatttaacccttc

SEQ ID NO: 4797 - DNA, 1369 bp, Cricetulus griseus
gtacttccgggatatcgagtccccagtgtgcgttttgggatcacggtctgattgttcctgatcctatgtagacagactaaaccctagctttccgcgctgagccatctgatcccaccacgaactggtcatgcatgggaagctgctgctgctggccagcctctatcttgtgcagggtctgccctatggactgcagtccggcttgctgcctattttactgcgggaccatggtctctccctgacgcgtgtgggtctgaccaagggattgtatgctccatggctgttaaaactggcatgggcgccactggtggacaggcggggctcccctcgggtctggttaacactcagcacagtgtccctgggcctggtgtgtggactgctggctgcgctgcctcccccgcacgctggtcagacagggctgcccaccatcatgatggcgctgctgctgctgctgaatctgggtgcagcagtgcaagacgtggctctggatacactcgctgtccaactcctggaaccaaaggagctgggacccgggaacaccgtacaggtggtggcgtacaagctgggatcagcactggctgggggtgggctgttggtcctcttccccaccctctcttggccattgctttttctgctcctagctgccacctactggctggctgctgccttagcctgggctgcaccagccttgggacagctgccttgccctcaggtctcagagcataaccccccacacacccctatcttctacaagatttgttggctgtgcctggaaccttctggacagcaggctttgtgctcacctacaagctgggtgagcagggtgcgagcagcctgttcccgcttcttctgctggaccatggtgcttctgcctcagacttgggtctatggagtggcttgggcgctgtaacctgctccattgctggctcctctttaggtggggctctactggccagacactggcagcctctttccctattgaggtcagtgctgcagcttcgccttgggggtttggcatgccagactgctctgctcttctacctcagtaccccaggggccagtctggatcctggtacaatcacgagagctgcagctttgctgagcctgtgtctgcagcaatttcttggcggtgtggtcaccactgccacattcactgtgatgatgcactgtagccagttggcacccagagccctgcaggccacgcattacagcctcttggccactctggaactgttgggcaagctgctaccaggtaccctggctggagtgctggctgatggcctgggcccacatctctgctttgctgccttccttatactctcaggtctgcccattctggatctcagcctggcacctagtaacctgacctgag

SEQ ID NO: 4798 - DNA, 1369 bp, Cricetulus griseus
gacctgaccaggactctgcaagccttgaaaggcctcatcctctgtccgtgtgcaggagtctgaggtctgcctcctatgcaccccagcacccccatcagctccctcttctccttcaccagccctgcagtgaagaggctgctgggctggaagcagggagatgaggaggagaagtgggcagaaaaggccgtggactctttggtgaagaagttaaagaagaagaaaggggccgatggatgagctagagagggcgctgagctgcccaggccagcctagcaagtgtgtcaccatcccctaggtccctggatggacgcctacaggtgtcccaccgcaaggggctgccccatgtcatctactgccgtgtgtggcgctggccagacctgcaatcccatcacgaactgaagcccctggagtgctgtgagttcccctttggctcaaagcagaaggaggtctgcatcaacccgtaccattaccgccgagtggagacaccagttctgcctccagtactggtaccaagacacagcgagtacaacccccagctcagcctcctggccaagttccgaagtgcctccctgcacagcgagcccctcatgccgcacaatgccacctaccctgactctttccagcagcccctctgccctgcaccaccttcctcaccaggccacgtgttcccgcagtctccaggccccaccagctatccacactccccagaaagtccttctgagtcagacagtccatttcaacactcagactttcggccagtttgctacgaggaaccccagcactggtgctccattgcctactatgaactaaacaaccgggttggagagactttccaggcgtcctctaggagtgtcctcatagatggcttcactgacccttccaataataggaataggttctgtcttgggcttctttcaaatgtaaatagaaactcaacaatagaaaacaccaggaggcacattggaaagggtgtgcatttgtactacgttgggggcaggtgtatgcggagtgcgtgagcgacagcagcatctttgttcagagccggaattgcaactatcaacatggctttcaccctgccactgtctgcaagatccccagcggctgcagcctcaaggtcttcaataaccagctcttcgcccagttgcttgcccagtcagtgcaccacggctttgaagttgtgtacgagctgacgaagatgtgcacgattcggatgagcttcgtgaagggttggggagccgagtatcatcgtcaggatgtcacaagcaccccctgctggattgagattcatcttcatggaccactgcagtggttggacaaggttctaactcagatgggctctccacataaccccatttcttcagtgtcttaa

SEQ ID NO: 4799 - DNA, 1369 bp, Cricetulus griseus
tatggtggtggtggcagcgtcgccgagcgcggccacggcggccccgaaagtactgcttctatcgggccagcccgccgcggacggccgggcgctgccactcatggttccaggctcgcgggcagcagggtccgaggcgaacggggcgccacaggctcgcaagcggcagcgcctcacgcacctgagcccggaggagaaggcgctgcggaggaaactgaaaaacagagtagcagcgcagactgcccgagatcgaaagaaagcccggatgagcgagctggaacagcaagtggtggatttggaagaagagaaccaaaaacttctgttagaaaatcagcttttgagagagaaaactcatggccttgtaattgagaaccaggagttaagaactcgcttgggaatggatgtgctgactactgaagaggctccagagacggagtccaagggaaatggagtaaggccggtggccgggtctgctgagtccgcagcactcagactacgtgcacctctgcagcaggtgcaggcccagttgtcacctccccagaacatcttcccatggattctgacactgttgactcttcagactccgagtctgatatccttttgggcattctggacaagttggaccctgtcatgtttttcaaatgtccatccccagagtctgccaatctggaggaactcccagaggtctacccaggacctagttccttaccagcctccctttctctgtcagtggggacctcatcagccaagctggaagccattaatgaactcattcgctttgaccatgtatacaccaagcctctagtcttagagatcccttctgagacagagagtcaaactaatgtggtagtgaaaattgaggaagcacctctcagctcttcagaggaggatcaccctgaattcattgtctcagtgaagaaagaacctttggaagaagacttcattccagagccgggcatctcaaacctgctttcatccagccactgtctgaaaccatcttcctgcctgctggatgcttatagtgactgtggatatgagggctccccttctcccttcagtgacatgtcttctccacttggtatagaccattcttgggaggacacttttgccaatgaactctttccccagctaattagtgtctaaagagctacccaacactgggccttttccttgaccattacactgcctagaggatagcagaggaacctgaaggagcttgtttatccttgtgtacagttcaagtgaaggatcaagaatctttgtaaaattatagaaatttactatgtaaatccttgagggaaccttcttgctagtgtaacttctggaaggtgctttctccatttatttaaaactacccatgcaattaaaaaaa

SEQ ID NO: 4800 - DNA, 1369 bp, Cricetulus griseus
acgcttccgtttctggttttcctccagtgtttgggtttttttcgccgccggccaagatgaaccgattcttcgggaaagcaaagcccaaggctccgccgccgtagcttgactgactgcattgggacggtggatagcagggcagaatccattgacaaaaaaatttcccggttggatgctgagctggtaaaatataaggaccaaatcaagaagatgagagagggccctgccaagaatatggtcaaacagaaagccctgagggttttaaagcaaaagcggatgtatgagcagcagcgagacaaccttgcccagcagtcctttaacatggagcaggctaattacaccattcagtcactgaaggacaccaagaccacggttgatgccatgaaattgggagtaaaggaaatgaagaaggcatacaaacaagtaaaagttgaccagattgaggatttacaagaccagctggaagatatgatggaagatgcaaatgaaatccaggaagcactgggtcgcagctacggcaccccagagttagatgaggatgacctggaagcagagttggatgcgttgggcgatgagcttctggctgatgaagatagttcttacttagacgaagcagcatctgcacctgcaattccagaaggtgttcccactgacacaaaaaacaaggatggagtgctggtggatgaatttggactcccacagattccagcttcctaaacttgcagcattccagcacacgacgtaaaaaaatataatgtgtattctgggactaggaaatatttcccaatttgccaaacagatttagatttctttcctttctttgaaggaaaagctaattacactgctcctgtattttaatttttccgttaagaaattcattgcttgggggaagctttcttttactaaagcttgatttttttttttccctcttagtaaagactaacagaaaagtctctttgactttttatgacttgttttcactcattaacaataatttgaaataaaaccaagcagatgagactctaaattttatgtagaagtacagtctcagtgtgacttgatacattgataaagtagagatattaatgagattgagactgtggatagtacgcttcaaaaccattgtctattgtggtgttataggtgggtttaagtggtggctttttttttgataggttttgctgtgtcatgtgagcaaatcattactctgtctaatgttggaatgaactgtcactactgtatcatgagttgctattttgaccccatggttccctcagtattatagcctgacttgtaatgaataatggatatttcttgatatttaatgtataggacatttatttatattcaataaatatttttcaaaagg

SEQ ID NO: 4801 - DNA, 1368 bp, Cricetulus griseus
gccggtgggcggaggccgagactccacagcagttctctgccggtcgcccggcagtgcacccgccatgcacctgccgcccgctgccgcagtcgggctgctactgctgctgctgccgcctcccgcggccgtggcctcccggaagccgacaatgtgccagaggtgccgggcgctggtggacaagttcaaccaggggatggccaacacggccaggaagaatttcggcggcggcaacacggcgtgggaggagaagagtctgtccaagtacgaattcagtgagattcggctcctggagattatggagggcctgtgtgacagcaacgactttgaatgcaaccaactcttggaacagcatgaggagcagctagaggcctggtggcagacactgaagaaggagtaccctaacctatttgagtggttctgtgtacacacactgaaagcatgctgtcttccaggcacctatgggccagactgtcaggaatgccagggtgggtctcagaggccttgtagcgggaatggccactgcgacggagatggcagcagacagggcgacgggtcctgccagtgtcacgtaggatacaaggggccgctgtgtatcgactgcatggatggctacttcagcttgctgaggaacgagacccacagcttctgcacagcctgtgatgagtcctgcaagacatgctcaggtccaaccaacaaaggctgtgtggagtgcgaagtgggctggacacgtgtggaggatgcctgtgtggatgttgacgagtgtgcagcagagaccccaccctgcagcaatgtacagtactgtgaaaatgtcaacggctcctacacatgtgaagagtgtgattctacctgtgtgggctgcacaggaaaaggcccagccaattgtaaagagtgtatctctggctacagcaagcagaaaggagagtgtgcagatatagatgaatgctcattagaaacaaaggtgtgtaagaaggaaaatgagaactgctacaatactccagggagctttgtctgcgtgtgtccggaaggtttcgaggagacagaagatgcttgtgtacagacagcagaaggcgaagtggcagaggaaagtcccacacagccaccctcccatgaggatttgtgacgggcatccaggttcagaagctggactctcacccttttaagttattgagaggacatcctatagaaaatgtggcccatggacatcaaccccatttctccaggaagttttggaggaagaagctgcctgctttgaaacagtagatactcacttggccctttaaaacgctgcatttcttggtggttcttaaacagattcgtatattttgatactgttctttataataaaattgatcattgaaggtcaccagg

SEQ ID NO: 4802 - DNA, 1368 bp, Cricetulus griseus
gaaatcttggccaccagcccagaggtgcttccggcccctgccagtccacctcgtcccttctcctgtcctgattgtggacgagccttccgtcgaagctcttgggctgagccaacaccgacgcacccacagtggagagaagccttaccgctgtcccgactgtggcaagtcattcagccacggtgccacactggcccaacatcgaggcatccacactggtgcgaggccctaccagtgtgctgcctgtggcaaggccttcggctggcggtccacgctactcaagcatcgcagcagccacagcggggagaagccacaccactgccctgtgtgcggcaaggcctttggtcatggctcattgctggcccaacacctgcgcacacacggtggccctcgtccccacaagtgcccggtatgtgccaagggctttgggcagggctctgcgctgcttaaacacctgcgcacccacactggtgagcgtccctacccgtgcccgcagtgcggcaaggctttcgggcagagctcagcattgctccagcatcagcgcacccacacggctgagcgtccctaccgctgtccccactgtggcaaggcctttgggcagagttccaacttgcagcaccacctccgtatccacactggtgagcgaccttatgcctgcccacactgctccaaggcctttgggcagagctcggcactcctgcagcacctccacgtccattctggcgagcgcccctaccgttgtcagctctgtggcaaggcctttggccaggcctccagcctcaccaagcataagcgggtgcatgagggagctgcagcgctgcagctgcagcagctgccgccgcagcagctgggctgggcctcgggtctggcttgagccccgtatctatgaggcggccagggcagatctctttcctaggtcctgaagctgtttctgtgctggaatctggcctggacctcagctctggtgccagctctgcccgaagtcctgacccaacttctgtgctgggttccctccgaaatcccatcctccaggcccactcaggatctattgccagtcctgatattgttctatcttctgaccctaagccaggccatgatgctgaccctgatgtggtacccagtcctaaccaagaatctgatcccagttctaaccccgatcttgtccccagtgctgaccccaaccgcaagtcccaaactgacccctgctctcccactcatgacagtcccagcccagcccttacaactggagagagtcccaagtgggtaaaggaggaaggggcattgctggggcctgatggagtaaagggggcactggcatccatggtggttgggaagtgtgttatattcatagtaaaatcctcctgcctcctg

SEQ ID NO: 4803 - DNA, 1368 bp, Cricetulus griseus
ggctggagcccgtcggtcctccggctgctccgggagcctcggggcgcggcgcgggcatggctcgcccggcgtgggggttgctgtggctgctgctgggcagcgcgggcgcgcagtacgagaagtacagcttccgaggcttccccccggaggacctgatgcctctggccacggcctacggccacgctctagagcagtacgagggcgagagctggcgcgagagcgcgcgctacctggaggcggcgctgcggctgcaccggctgctgcgcgacagcgaggccttctgccacgccaactgcagcggccccgccgccccgcagccccggcccgcgcccggcccggacggtgacggcgacggcgatggcgatggcgaggactgggcgcgcgagctgcggctcttcggtcacgtcctggagcgcgccgcctgcctgcggcgctgcaagcggacgctgcccgccttccaggtcccctacccgccgaggcagctgctgcgcgacttccagagccgcctgccctaccagtacctgcactacgcgcagttcaaggcgaaccggctggagaaggcggtggctgcggcctacactttcctccagaggaaccccaagcacgagctgaccgccaagtacctcagctactacagggggatgctggatgtcggagatgagtcccttacggacctagaggcccagccctacgaggctgtgttcctccgggctgtgaagctctacaacagcggggacttccgcggcagcacagaagacatggagcgggccttggcagagtacatgacagtcttcgctcggtgtctagctggctgtgagggggcccatgagcaggtagacttcaaggacttctacccagccatagcagatctctttgcagagtccctacagtgcaaggtggactgtgaagccaatctcatccccaacgtaggtggctactttgtggacaagtttgtggccaccatgtatcactacctgcagtttgcctactacaaattgaatgatgtgcgccaggctgcccgcagtgctgctagctacatgctctttgaccccaaggacagcgtcatgcagcagaacctggtgtattaccgcttccaccgggctcgctggggccttgaagaggaggacttccagccccgggaggaggccatgctctaccacaaccagacctccgagctccgggagttactggagttcacacacatgtaccttcagtcagatgatgagatggaactggaggagacagaatcacctcaggataccgggctaggagcaagaactatttattaaaacttaaaatggccaaataaaactaaaggaaagaaacttaagtaaaaaaaaaaaaaaaaaaaaaaaaaaaaaaaaaaaa

SEQ ID NO: 4804 - DNA, 1368 bp, Cricetulus griseus
gtgacccctagcatccttgcaacagaatcacaggaatcattgactttcaaagatgtagctgtggacttatccccggaggagtggggacagctgactcctgcataccgggatttgtatcgggaggtgatgcttgagaactacagaaacctggtgtcagtgggataccaactttccaagcctagtgtgatctcccagttggagaaaggagaaggaccatggatggcagagagtcaaggcccagaggaccccatgatcggtgtgaagaataaactacaaaccaaggagtcaactgcagagaatgacattccccctaagttcggtcatggcatcatggtggaaaggctcacagaggacgatgtcacttgttctacattgaagaaagcctccagctacagtgagcacacgagaaaggcaccagggaatccgtggaaaagagcacttttgactcacaaaagggaatgccaagaagcaaacaaatttggggaaaccttgaggttccaatgttatttagaacagaagcaccataaatacaacctgggtaagaggagaaacaaatataagttagattcaactgatgatccaatgagctgcctaggagccagaatgtatggatgtaatatatgtgaaaaaatgttcaaacaacccattcaccttacagagcacatgagaattcacaccggtgagaaacccttcagatgtcaggaatgtggaagggcctttagtcagagcgcatcgctaaatacacaccagagaatccacactggcgagaaaccctttgaatgtgaggagtgcggcaaagccttccggcatcgctcatcgctcaaccagcatcatagaattcacactggagagaaaccattcgtctgtgacaaatgtcagaaagccttcagccagaacatcagcttggtccaacatttgaggacacattctggagagaaaccgtttagctgcaacgagtgtgggaaaactttccggcagattagacaccttagtgagcacgtaagaattcacactggggagaagccctatgcctgcacttcgtgctgtaaaacgtttagtcacagagcatatctcacacatcaccagcggatccacaccggcgagaggccctacaaatgtaaggaatgtgggaaagcctttaggcagaggatacaccttagcaaccataaaactgttcatacgggagtgaaagcatatgagtgtaaccggtgtgggaaagcctaccggcacgattcatcctttaagaaacaccagagacatcacactggcgaaaaaccttatgaatgtaatgaatgtggaaagtccttcagctataactcgtccctgagcagacactataaaatacacaagaggaactcttctccagat

SEQ ID NO: 4805 - DNA, 1368 bp, Cricetulus griseus
ctgagcgtacctcttcctcacctgtgggccttagaaaatgtaggaaagcagactgaactggaaccaccgacagccgggtttgctggtcatgctgtggctggccacatcccatccatgtgtttggcttcctgggaagaatatgttggctcactttctccctcgcgagaaatgaagtcaacgcagatggttctcacgtgctactgtcctgcccctccactgttgacgctgggattgatttggcatcacaccctcctgtttgactgaagcacaggcccactggcctccctccaggtctttgaagaagagccaaagcaaggctatgtagaatgtgacactcacaggcctaagtcccagcaggccccatgtcaacaggaccggtaactctcaagtctgcctccccagcctcacctcctgcctgcagagtccagagctgaggaaaaggagcaagaaggatgaggctgcgccacaggcctgttgggcaccctccgtcactgccagtctcagagcttttgaccgttcaaatacatgttccctctcgtgaaccaagacaatgttcagggatgaagaaaagatgcggcctgggatccttctgaacaaaatggctatctgtacactttttaaacaaaactttccaaactttttagtgtcaaaatggtaaccaagtgtctcttgattcttcccactgtgtttgtcaagtgctgtgaccctattgtaggtatttctcctcctgcctcttttaagggagaagtgattgtaggggttgatttttgggggagcgggttatctgtcccgtcccgctacctcttgtctctctgcttgttgatattgtctgtgtgattcagagaactggggcagttacattgtgtccattgttgagaatattaaaatattaaaaagtagttatagaactgaaaaattaaagagctgtgtttttaaaaatgcaatcccataaataatcatgttaacaaaggaattcaagctatgggcagcctagctcctccccctccaggttggtgaggtggtagccaagccagcccttgggaaacactaccacacttgaggtaggtgattgcctgggaacaagatctgcacccctacttcagaagaggcatgttgcactttagtggggagcccagaatactgggcactggcttcctgtagcttgagtccctgtagatagcagtggtggcagtctgatggcttgtgtgaagcagctgcaactgctgtcctcaactgtgcacatgcgtgcagttactagcgtcgaattgccggcctgatggtgacattacaaagacattgtgctctgttcaactttgccttggtaattattgtaaacactttgttctaagttttttttttctttttatt

SEQ ID NO: 4806 - DNA, 1367 bp, Cricetulus griseus
agggattatagtaatgactggagccccagtgatacagtgcgacgcctccgccggggcaaggtctgctccctggaacgattccgctccttacaggacaagctgcagctcctggaggaggcagtaagcatgcatgatggaaacgtcatcactgcagttctgatcttcctgaagagaaccctgagcaaagagatccttttccgagagttggaagtacgccaggtcgccctgagacatttcattcatttccttaaagaaacaggggaccagaagctgcttttagacctcttcaggttcctagatagaacagaagagctggcgctaacccattatcgagaacatttaaacattcaggaccctgaaaagcgaaaagaaattcttaagacttgcattggtttgcctattttcagcagaagattctgcacacgtacaagaccattacacgctcctggaacgccagatcattattgaggcaaacgatcgacatctagagtctgcaggacagactgagatcttccgaaagcacccccgtaaagcttccattctcaacatgccactggtgacaacgctcttctacgcctgcttctatcactacaccgagtccgaggggaccttcagcagtcccatcaacctgaagaagactttcaagatcccagataagcagtatgtgctgacagccttggctgctcgtgccaagcttcgagcctggaatgacgtcgatgccctcttcaccacaaagaactggctgggttacaccaagaagagagcacccattggcttccatcgagttgtggaaattttgcacaaaaacagcgcccctgtccagatattgcaggactatgtcaatctggtggaagatgtggacacaaagactgaacttagccactaagctcaagtgccatgatgttgtcattgatacctgccgagacctgaaggaccgtcagcagttgcttgcatacaggagcaaagttgataaaggatctgtggaggaagagaagatcgatgccattctcaacagctcgcaaattcgatggaagaactaagtatcatttgctgccctgaaacctgcctcacttcttcctttctgcctatgaaaatagagagctctcttcttggaagagtcacagcattcaaccactcaagcctgtcattcacaggcagtgcctgctgctttggggacagaaacctgcatctgagcatgtgatcttcaggctgatttgtcccagggacattatccgaaggccagtatctaaggttttgcctcacaggaaagatgctctgcaccagaggctgtggaaaggtgggagcccatccagggtaagacgtcttagtcagagaagtgactgccccagaaggacatctggactaag

SEQ ID NO: 4807 - DNA, 1367 bp, Cricetulus griseus
ccaggcgccaagcaccacctggacgccgtcaccctttgggcctatgcgctgggggccacggtgctcatctccgcggctccgttcctggtgctcttcctcatcccggtggagtcgaactcgcccaggcaccgctctctgctccaggtcttgctcagttttgcctccgggggcctcctgggggatgccttcctgcaccttatcccgcacgctctggagccgcattctcaccacactccccagcagcacggacacggacacggacactcccacagcggccagggccccatcctctctgtggggctctgggtcctcagtgggattgtcgccttcctggtggtggagaagtttgtgaggcacgtgaaaggcggacacggacacagtcacggacacggggacggccacacacacggaagccatgctcatgggagacaggagtgtccttcaaaagaaaagcccagctcagaggaagaagaaaaggaaacgggggttttgcggaaaaggagagggggaaacgcagggtcgagggatgggccagcaaaacctcaggaccctgaagaagaaaaaccaggttcagacctgcgtgtgtctgggtacctgaacctggctgctgacctggcgcacaacttcacggacggcttggccattggtgcttcctttcgtgggggccgaggcctggggatcctgaccacaatgacagtcctgctgcatgaagtgcctcatgaggtcggggactttgccatcttggtccagtctggctgcagcaagaaacaggcgatgcgtctccagctcctgacggcagtaggggcactggcaggcacggcgtgtgcccttgtcactgaaggaggggcaatgggtagtgaggtggcaggtggcaggtcctggctgggtcctgccgttcactgccggtggttttatctacgtggcaacagtgtccgtgttgcctgagctgttgagagaggcgtccccattacagtcccttttggaggtgctggggctgctggggggagtggtcatgatggtactgatcgcccaccttgagtgagggtggggcagtctgtcctgccaccccaactcccagatagacagtggggagccctggcggcgggtgttactcgccagaagaaggagttttagccttggagaatgatgtcttgggatttgggtcctttaaggtatggcagtcacacagagcccgagaggtcagagggaccaaagtgttgggcactgctcaacagcattgttggttttggagaaataaatggggccacgggaaggactggggtgacgagtaccctttttatatcactgtttgaatgggtcgggaggaacggtgaccagaaataaagtacttggatcttcagacccca

SEQ ID NO: 4808 - DNA, 1367 bp, Cricetulus griseus
ctccaagaagtcatggctgggaaagcaccagagtatttggagccgctggcaactttgcaagaaaacatgcagattcgcacaaaggtggcaggaatctatagagagctctgcttagaatctgtgaagaacaaatatgaatgtgaaatccaggcttctcgccagcattgtgagagtgaaaagcttttgttatatgatacagtccagagtgagcttgaggagaagataagaaggcttgaggaggacaggcacagcatcgacattacctcagagctgtggaatgatgagcttcagtcaagaaaaagaggaaggatcctttcagccccgacaaaaagaagccagttgtcgtttcaggcccatatatagtttatatgctgcaggatcttgatattcttgaggactggacaacaattaggaaggcaatggctacactgggtccacaccgtgttaagaccgaaccacctgtgaaaactggaaaaacatctgcacagtgctagatctgaagagggaagactgtattatgatggtgaatggtatattcgtggacaaacaatatgtattgataaaaagatgaatgtcctacaagtgctgtaattacaacaattaaccatgatgaagtttggtttaagaggcctgatggaagcaaatctaagctttacatttcacagctacagaaaggaaaatactcaattaaacattcgtaatcacaatttaagtgttatccaaatctaccttattagtgttaccaagtgtaatgtgccatgggagccaagaaaatgtattcagcatcgtaatatcttcatccagtcaggagagaatgtgtcttttaggtagtagaaatttatacatatgtctgtgagtatgtatatatgatgtcatcagcttacttagaactggcggcccaactgtacaatcttgttttaccccaaattaaactgttgggtttgagaagtaaagggagcactttttatagactggatttccctctcttcttccttgatggtgacttctttttcccaatcatatttgaggttgacgaccagcattgtgtcacatgtgaccacactgctgcctgtgtttactagagcttttggagggcaggtgtccccacattgttttggataatgcccagtatcagtgtgagcagtaggtggcagtattgtggtgctttctgcacatctgaacttttgaagatttttagtaagcattttccagaggcaaaactagatccttattctaattttattgctagggtgaaatagatgtgggcacttcctttgaatctatatatatgatgtttgataaacatttttaatgagatttgttatttttaaatttagtatgtaaataaaaagaagtgtttgagtgtc

SEQ ID NO: 4809 - DNA, 1366 bp, Cricetulus griseus
atgactcctggcaagagaggctggctgatgttgtgactccactctggaggctgagctatgaagaacagctcaaggtgaaatttgaagctcagaagaaaattgtacaaacactagagtcttacctgcaagtgctccatggagtcagtggaacagtggccgcaccccattcagaggggttgcactgtcacctccatcctattatacccctctcctatcattgatggctaccgaataagtccaccttctctgtgaaccggggcccggatggcaatccaaagactgtgggctactacctaggaacttggagagatgggaatatcgtctgtgtaccttgtagccatctgaaaacatcccagagaaacacagtcaagtggctcagtactatgaagtattccttcgacagtcttcagtggagccctgtcttctgtttcatgaaggtggacactggcgtgagctcacagttcgaaccaatagccaaggacacacgatggctatcatcacgtttcatccccaggggttaagtcaggaggagctgtgtgctcagaaggtgaccttgaaggattttttcactcaaggccctggagcagtctgtgaattgacctcactctatttccaggaaagcaccatgacccgttgcagccatcagcaatccccctaccagctgctgtttggggaaccccacatctttgaagatcttctgggtttgaagatccgcatctcaccggatgccttcttccagattaatactgctggtgcagaattgctctatcagaccattggggagctaagtggagtgaactccaattccatcctccttgacatttgctgtggaacaggtgtgattggcctttctctggctcagtgtgcatcccaggtccttggtgtcgagctggtggagcaggcagtagatgatgccaggtggactgcagcctttaatggtgtcaccaactgtgagtttcatgctggtagagcagagaagattttgccacagctgttaaggtcgcagaaagatgagaagttaattgttgctgtggtgaatccggcccgtgctggactgcatcatcaagtggtgcaggccattcggaactgcggggccatccgcactctagtttttgtttcctgcaagccccatggtgaaagcatgcggaacttcattgagctgtgttgtcctccaaactctgctaagaagctcctcggtgaaccgtttgtcctgagacaagctgtccctgtggatttgtttccccacaccccacactgtgagctggtactcctcttcactcgataacgctaggagacagcaggctgctaaggttgaagtttcagaggggatcctgagggctttcctgactagtcaatctagttaata

SEQ ID NO: 4810 - DNA, 1366 bp, Cricetulus griseus
gagccggcgagcgagcagcgggcgcggcccccgatcccgccggccatgaagaagagcggctccggcaagcgggggcctcccgatggaaaccatcactctgcggcgcccgagaaggtcggctgggtccggaaattctgcgggaaagggattttcagggagatttggaaaaaccgctatgtggtgctgaaaggcgaccagctctacgtctccgagaaggaggtaaaagatgaagaaaaatatccaagaggtgtttgacctgagtgactatgaaaagtgtgaagaactccggaaatctaagagcagaagcaagaagaaccacagcaagttcaccctggcccgatgcaagcagccaggcaccacggcccccaacctgatcttcctggcggtgagtcctgaagaaaaggagtcctggatcaacgccctgagctctgccatcaccagggctaagaaccgtatcctggatgaggtcaccgttgaggaggacagcttccttgcccaccctactcgagacagagcaaaaatccaacactcccgccgccctccaactcggggacacctcatggctgtggcctcgacctctacctcagatgggatgctgacgttagacctcatccaagaggaagacccttcccctgaggaaccagcctcttgtgcagagaactttcgggtggatctggacaagtctgtggcccaactggctggcagtcgacgaagagctgactctgaccggatccagccctcacaccgggccagcagcctttctcggccttgggaaaaaccagacaagggagccacctacaccccccaagccccgaagaagttgacctctacagagaagggccgctgcgcctccctggaggagatcctgtctcagagggacactgccccagcctgcagcccccttcacctccaagctgaggaatccccagccccccttccctcccagccggtgcagctgtcccggatccaggacctggtagcaaggaaactggagaagactcaggagctgctggcagaggttcagggactgggagactgcaagcgaaaggccaaggaccccccacagtctccacccgattctgagtcagagcagctgctgctggagacagagaggctactgggagaggcttcgtccaactggagtcaggcaaagagggtcctgcaggaagtcagggaactgagagacctgtacagacagatggacctgcagacccccgactcccacttcagacagacctcccagcacagtcaataccggaagagcctactgtgaaggaggggggacaggtctggaatttagggggcacagactatctccaaatgttgacaaggataaagctttttttatttacctcaatcaaaaaaa

SEQ ID NO: 4811 - DNA, 1366 bp, Cricetulus griseus
ctgagcagcgcatgctcaatagcgtgtcttcggaggtgctggccctacagattgagctaaactgaaatggaaggtgtgaagactgactctcaaagaagaggtgaatgaactgcagtacaaacaagagcaactagaatgcttcaatacttccttaatgctacccaggtagaccggcttaaaaggaagaaaaagaagagcgagagaaggaagcagtggcgtattataacgccttagagaaagctcgaatagaaaatcaagaccttcaggtgcagttggaaaaacgcacttcagcaagcctcggatcccagcagtaaaggaaactcgatcgaagggtagctatggaatgccagctcaacttgatgaaagtcaaatatcagtcactgaagaagcaaaatgtgttcaccagagatcagatgaacaagatgaagttacaaatctccacattgctgaggatgaggggatctcaaactgattttgtagcagcaagaacggttgtttgccatgttggaacagaagaatggtgaaataaaacaccttttaggtgaaattaaaaatctggagaaatttaagtacttatatgaaagtacggaatctaagccttccacatcagccagcctttgtactctagaagacaacacctattatgcagatttacttcaactaaaactagataagttaaacaaagaaaacgaagacacaaaaggcgaactatccatacagagaatgaaggcattatttgagagccagcgggccctggatattgaacgtaaactgtttgcaaatgaaagacacctccagctttcagaagtgaaaatatcaaactgagagctaagctagatagaattaaagctgaagtatgaacctgaagagagaataggaagtaccagtactacaaaagcaggagaaacagctgctattgatgctactagggaagaagtttctagattgccacttcagacagaggagaaagaatcctgccttaatagtttaaatgttaatgctggacagtggcaacagccagcttcttcaaccattcatccagccagcctctctccttgcaagagcccacctctagatacacagcctaagaagaaatgtgtaaagcttgtggatagtccagtcagtgctgatgccttacgtgaacaaagtggaaacacccccagatctcccaggttaactgcagaatcaaggcttcaaacagaagtgaaggaaagcaaagaaactacaagcaaattggaaaaaggagcttgtaagaaatcacacccaatcatgtatgtgtcatcaaagtcaacaccggagacacagtgcccacagcagtagtgaggcaaataaattacataatgacttctaaaaaaaaaaaaaaaaa

SEQ ID NO: 4812 - DNA, 1366 bp, Cricetulus griseus
ggatctgtgtgtgtgtgtgtgtgtgtgtgtgtgtgtgtgtgtgagctcttcaagacaaatagttgatttttctgggttggttgttcatgtctgtgcaagatagacccagatgtggagaagtgtcagtagcaagggggaaggtcccgtaggcactaggcatcagggatgtgccttcggacacatgctcactgcttcattcgtcattatgttagtttgaggagagccttttcaagtgccccgatgtcattcttagtgccatgacaattttttttaaatatttataactgttaatgaatttgctatcataagtttgcaaggtaagggcttttcctttcttgtcagaattgccagtttgggggcatggagcataaaattcattcaccccaaagtgtgactaaacagaatccagcttcactgacttcaggccagcagtgctgttttctcaagcccagagtttgtcgtcttggctgcaaagtagctgtggcatcagagcatggaatcttcgagtgcctcgatgttacactgattcctgaacaattaatttattcagtgagttaaaaatgacattcactccccaccatggagagggtcctgaactaacccatgaaattgagtaagggaatcccaagtaaaaagatcatattaaggcaaattctttgttctgtgtgctgctgtgacttcagaaaaaaaaaaaaaattgactcaaaatttgccactgattcttttgtgtttcttttgaaatgtattatttaagcctattcctaaaactttgtaaaatgcatttggcaaagacaccaaagaaaccagctcataaaagattatgatcactaatgaactgcaaacctcatcttttgcaaacaagggtgtttctttgtaaatatttgtgtttataaatgtacagcagagtaagagtggttttttagattatttaattcccatatttctaaactatttactacagaataacccgtgctcattagtttggatgacttgattgttggttttttttttttttaattcattatcagtcatgcgtggaacaacgttttgctggagaagtcagcattctagcagtggcaggagtcactcttggagcatgagggagtctaccctcgtaagacacaagaaagtgtagcttaatgaccagagtggaccatacgaaagcacttctaacttccctaatgaatctacttgttagcccaggatgggattgggacaaggccgtttgtttgcccacaaatttagctttcatgtaactcccagtgtgttgtatcataatatattctgttctttctttgtaatgtaagttttgctttggggtcaatttgaaataaaaaaaaaaatcttaaatctggttaaaaaaaaa

SEQ ID NO: 4813 - DNA, 1366 bp, Cricetulus griseus
ggcagtcaggttcgtccatccccttttaacctctcaacttgcagctttttgtcctgaggtccgagcccccagctgttagagaggggtgaagcaagttttggggagtgaggcaggagcagatgtctttcccatcagggaggagagagcctctgggacaccctctccagcaggccctggccaacacccagctcaaataaagtcccaggggcccctcagggtaagtcaggaccaagaatgctatgggcagcccccacaggtggccccggctccactcaggcctcatcagtcctggcaggagcaagagcctcatactgcctagtcttccccaagtctacttgctttgcatgcagccctgaggaagggtttcctgattcccaaacccttgctctccctgagggacccagacccagccaccatcctctgcccagaaacaaggccaggactatctagattcaggacctcagccagcctactctgggctttcccccatctccaaacttacattcccttggccccctgcctgggtcttacctgggaacctggcatgaaagctcagggccagcctccctggggcagctgctttaaaagatgacagatatccattaacccaagattgtccagcccctcacggatcactgtcccctaggctcttcctgggcacaagattcatcttggaggagcaagaccatcgagccctgcccctcccagaatccccaagggtagaatttctcaggctgccagggcaggcacaggcctcaggaagaagggtggccctggtgtccccagagtcagtcctaggatgcaggctcagcctcaggttaatggaggatggtgtgctcccagggcctgcctcctgcacagggctccaaggagcccagttcccggacacgtactaagtgcctagggttgccagctgtggcctgctcctttggaaagcaactaacaagaggctgccaggcagaggccagaagagctgaggattggccaggatgggcacagttaaaagcaagtgtgtggaggcaggtgctgccctggccctggtcttaaactcttccaggggcagtgagtcagctggcttctactgccctctcccaaccagagaagcacagatccaggggtgttgcccctgagcccatctggccatgacgagctgcatcaatatgcagctgtaggcttctccccaccaccctgccacctctccactgtgatgtatgtcccttgtctgttcccacaggattgtgaagtgactggggttaactgggtgggtgcagctggaggaaggggccagtgcaactctcctcaggctttggccttgcaagtgaactcacatatctgctctgtatgtaataaatgtacttaacaacta

SEQ ID NO: 4814 - DNA, 1366 bp, Cricetulus griseus
gattggtccgccccaagggtaaaacttaaagtccatgttagctgcagtaaactgaagcaaagaatttctatgaccatgaagcttttaagtggggatccgcggctggtctgtgagcttgcgcttcgtcccctagtcttagttttctggagtattcttgggaccaaagcactggacaacggcttggcgcggactcctactatgggctggctgcactgggaacgtttcatgtgcaacctcgactgccaagaagagcctgatgcctgcatcagtgagcagctgttcatgcagatggcagaccttatggtctctgagggctggaaggacgcaggttatgaatacctctgcatagatgactgttggatggctcctgaaagggactcaaagggccgacttcaggcagatccccagcgctttcctagtggaatccagcacctagctaattatgtccacagcaaaggattgaagctaggaatttatgcagatgttgggaataaaacctgtgcaggtttccctgggagttttgggtactatgatattgatgcccagacatttgctgactggggtgtagatctgctaaaatttgatggttgtcactgtgacagtgtgacgtccttggcagatggttataagtacatgtccttggccttgaataggactggcagaagcattgtatactcctgtgagtggccgctttatatgagaccctttcataagcccaattatacagatatccaatattattgcaattactggagaaattatgatgatatttatgattcctgggaaagcataaagaatatcttggcctggacaacagataaccagaaggagattgttgaagtcgctggaccagggggttggaatgacccagatatgttagtgattggcaactttggcctgagttgggaccagcaggtaacacagatggccctctgggctatcatggcagctcctctactcatgtccaatgatctccgacaaatcagctcccaagccaaagctctccttcagaatgaagatgtaattgctgtcaaccaagaccccttgggcaagcaggggtactgttttagaaaggaaaacaaaatcgaagtttgggaacgaccactctcaaatttagcctgggctgtggctgtgagaaacctgcaggaaattggtggacctcgttcttacaccatccaggtggcttcccttggtcaaggaatagcctgcaatcctggttgcatcatcacacagctcctccctgagaaagtacagctaggcttctatgaatggaccgtaaccttaaaaactcgaataaatccctcaggcactgttctgcttcgagagttccaggacagccagggctattattagagaaaccctgtct

SEQ ID NO: 4815 - DNA, 1365 bp, Cricetulus griseus
agcaggagcctcgccttggcacccacaggcttctatgctggctcagtggccatcagtggggcgttggccaacagcccagctcctctggcctcggggatggaatcagctgttttcgacgaagtcctctggcaccagcagcctctttgccatcatggggtctcgcagcacaccaccacagcacccacctctgctgccgcagcctcgaaactccgggccctgcctctcctgcacaccaactctcagccagtccccgcctgagtgtgaccacccagggccttccactaggcacagccccttgacctccagcacccgtggggactgtgtacagagccatgggcaggacagtcgtaagcgcagcaaaaggaagcgtgcgtcagctggaactcccagcctcagcacaggtgtgtccccgaagcgccgggctctgccgactgtcgctggcctcttcacgcagtcctcggggtctcccctcaacctcaactccatggtcagcaacatcaatcagcccctggagatcacagccatctcgtcccctgagagctccctcaagagctcccccactccctaccaggaccatgatcagcccccagtgctcaggaaggagcggcccctgggcccgaccaatggggcccattactcaccactgacctcagatgaggagccaggctctgaagatgagcccagcagtgcccgattgagagaaaattgcaatgcagacctcggtttacacagcttcaatgatggtgcttccctctcccacaagggccctgaagtggccagcctgagcgcctctgtgagcttcccatcacagcggggcaaggacagtaccacagacgccaacccttcctcagcaggcggcagccagaggggtctgggtggcctgaagggcgagggcagtgcaggcaaggagcccggcgagacccttcccctgtgcgggcctgcagacaaggttgcgttgcctcatggcagcagggccagcaagggtcgtgaccgggagctggacttcaagggcggccacaacctcttcatctctgctgcagctgtgcctccaggtggcctcctgggtggccctggccttgtaactgtggcttcctctgcgggcagtgtgacacctgctgcccaggctccccggcccttcctgagtaccttcaaccctgggccccagttcactctgggccccatgtccctgcaggccaacctgggctctgtggctggctcctccgtgctgcagtccttgttcagcactgtgccagctgctgcaggcttggtgcatgtatcatccactgcgacccgactgaccaactcacacaccatgggcagcttctcctcggggtgcggcgactgtggaggtattaggacttctac

SEQ ID NO: 4816 - DNA, 1365 bp, Cricetulus griseus
agatctcaggcccatggcgacttgccctgtcctgcagaaggagacgctattccagacaggagactatgcttacagaatccctgctctgatctacctgtcaaagcagaagaccctgctggcctttgcggaaaagcgtctgaccaagacagatgagcatgcagatttgtttgtcctacgaagaggaagctacaatgcagacacccatcaggtccagtggcaagctgaggaggtggtgacccaagcctacctggagggccaccgctccatgagcccatgtcctttgtatgacaagcagacaaggacccttttccttttcttcatcgctgtccgtgggcaaatatcagaacaccaccagctccagactggggttaatgtcacacggctatgccacatcaccagtactgaccatgggaagacctggagcgctgtccaggaccttacagataccaccattggcagcacccatcaagattgggccacatttggcgtgggtcctgggcactgtctgcagctgcgaaacacagctgggagcctgctggtccctgcttatgcctatcggaaacaaccccctatccatacacctgccccctctgccttctgcttcctcagccatgaccatgggagcacatgggagctgggccactttgtgtcccagaactcgctggagtgccaggtggctgaggttggcactggcgctgagagggtggtctatctcaatgctaggagctgcctgggagccagggtccaggcacaaagtcctaacagtggcctggatttccaggacaaccaggtagtgagtaaacttgtagagcctcccaaaggctgccatggaagtgtgattgctttccccaaccccacctcaaaggcagatgccttagatgtgtggctgctctatacccaccctacagactcccggaagaggaccaacctgggtgtgtacctcaatcagaagccactggaccccaccacctggtcagctcccaccctgttggcaacaggcatctgtgcctactcggacttgcagaacatggggcacggccctgatggctccccgcaatttgggtgtctgtatgagtcaaataactatgaagagattgttttcctcatgttcaccctgaagcaagctttcccagcagtgtttggtgcccagtgatcttgctgcatgcggcccaaagtgcttcggttctatttccagcccagaaatcaaaggaacctggctttctccagcctcttgacagggaaggtggggacaatgtacacagaggctgtcattctgtgtgtcggctgtcactatgctagcttagcctgcctgtttccccactcctagttttttggatgagtcttaataaattatccaacccagcc

SEQ ID NO: 4817 - DNA, 1365 bp, Cricetulus griseus
ctcaaggatcagactgtatatattgttctagataaaagctgaatatctaagagatatggaagcaaatcttttgcccgggtttcttaggttgcaagaactgactgacagaaatgtgactgttatctttctcagtgagattatctgggaaaagtttcgtccaaatactggatgctttgaaccatttgtcttatatttccccgattatagcataggaaacctccaaaagatcctgtcccatgatcatcctccagagtattcagctgatttttatgctgcctacattaatattctccttggagttttctacactgtctgtcgagatctgaaagagctcagacatctggcagtgcttaattttcccaaatattgtgaacctgtagttaaaggagaagcaggtgaacgcgatactcgaaaactgtggagaaatattgagcctcacctgaagaaagcaatgcagaccgtttatctcagggagatatcaagttcccagtgggaaaagttacagaaagatgacacagacccaggacagctaaaaggtctctcctgacaggaggttcttccttaagcatcatgggaaaatcaagaaaaccaactttctaaagaaacatgagaagacaagcaatcacctccttgggccaaaaccattcccactggacagattattagccatattgtatagtattgtggacagcagagtggctccaacagcaaatatcttttcccagattacctccctagtgactctacaactgctaaccatagttggtcacgacgatcagcttgatggaccaaagtacaaatgcacagtttctctagatttcatcagagctattgcgcggactgtgaactttgacataataaaatacttgtatgatttcttgtgaaaacaagcttcaaagccatatggacactgtgacaatgactaagccaagctgtgttcatccaactacttagctggccagggaaagagttctttggctattggatttgtccaaacaggtttgctggccccagcatggaacttgatgaaaacactctgattggtctgggtagatgtgagcagaagactatttaccaggggccccggagtatttggaagcaacgtgttaattataaacagcagggtttgagcacaatctgttctgctcttaatgatgttatcttaacactgaaattgcctgaaacccatttacttaggactctgttctgctctctgaactatcccctgtgctgtggatgtgccagcagcccttgtttatatgcccagccttttcacttcctctccacaggagcctctgtagtttcttgccaaagcagatttcctaaggccactattttaaaagatcatcattgcaaaatatatgt

SEQ ID NO: 4818 - DNA, 1365 bp, Cricetulus griseus
gacgatgatgagttgatctttgttggagaaatatcaagttccaaaccagtccatttcaaatattttgaacagatgtagtcctggctcttcttcaaagggactaaggagtgactcattcagtccagcttttgctaatatattcaaacctacaagtcaacagtacagaaatccatcacctaatccagtgactgctttgcctaaatttcatactgaatccaggtcttcagaaagttctggttttcatgctgtttctaaacctagtttttcaaagacttcttcacaagatgatccaggtgcttcttctgtcttacagttagactcaaccattgatacaccatcctccagcatactgaaaaagagtacagaaggtatcgatcaaacttcattaggattaaaacatccttccacttccaaagacaacagtgttaatccaaaaaagccaaagaccaacgcaagtgtttctgaaacaactccttcctcttcatcatctcaagcacaagaaacagcgcaccaggaaagacaaattcagtttagctttgaagaacatgagatgtcagcagggaattcacacgtgtattgagtgccattccaaaataaaagattttccaagccacttttctgcagttataaattgtgatttttgcaagtataccactaaactgtaacaaagcctttacaaatcatatgagctctcataatgaccatccaaagtaaaacggtttttgtatttcataaagaagcattcaagacctcacaggggcaatcatcttgcttagaccatatggctaaacacttaaatcaacgtaaaactcatacttgccaagttgtaatagatttcccttttgttcttttctttgttgtttactatatagatcaggctgaccttggcctcacaaatttccatctgcctcggcatcccaagtgctggatttaaagacatatgtggtacttgttcagctcattagacattaatacatgctctgtctatcttgagactatcattaacgtcttagggatcaggaattcaaagacaaagaacaaaactccccttacagatcttaaaacaagttttttaagttacattgctactcacttagtagttatcctcttagccgttgatgcaattcctttagataaaaataatatatttaaaaatattgggaccaaaaaatgcacttgtttcttgcccacatatatatagagagatgtatattttttattttggtgtttgtttattttggttacattgaatatagtttttctgaacagttttgatgttacttatttttaataaaagttgtattgttaaaaaataaatggtataaaaacctaaaaaaaaaaaaaaaaaaaaaaaaaaaaaaaaaa

SEQ ID NO: 4819 - DNA, 1365 bp, Cricetulus griseus
ccatcctggctgccaagctttctacagaacaaactgcacagcttggtgctgagctcttcattgtccggcaacttcttcaaatagtgaagcagaaaactaatcaaaattcagtggacactacattgaaatttactttgagtgcactttggaacctcacagatgaatccccaacaacatgcaggcacttcattgaaaatcaagggttggaactcttcatgagagttctagagtctttcccaactgagtcatccattcaacaaaaagttctaggacttttgaacaatacagctgaagtacaagagctacactctgaattaatgtggaaggatttcatagaccatatcagcagtctcctgcacagtgtggaagtagaagtcagttactttgcagctgggattatcgcccacttaatatccagaggtgaacaggcatggaccttgagccgtagccagaggaattctcttcttgatgatttgcattcagctattttgaaatggccaactccagagtgtgagatggtagcatacagatcctttaatccatttttcccactacttggctgttttacaacaccgggagtccagctgtgggcagtttgggccatgcaacacgtctgcagcaagaatccttcaaggtactgcagcatgctgattgaagaaggaggtctgcagcatttgtacaacatcaaagagcatgagcagacagatccctacgtccagcaaattgctgtagccattctggacagtttagaaaaacacattgtgcgccatgggaggccccctccctgtaaaaaacagccccaggcccgactaaactgatagccatagatagttggataatgaacagcaggaatcattttttgtggttggaaaataagtaaattaataacaaaatatctgatttttcaggattcctctgtcaaattctagactgtgtatatgaaaagctatcttttgcttgaactctgatgagtttaatcttttttcaaggatcaggaaccatggggaagttgaatggtgtatttcaaacacaattctgtattgtctgggctgaaggttttctagttatggcctggtgaacaagaagagcattctgctcttatacttatatattcagatggaacatcacttacgtattaatgttgtatttaagccggctgatagtagctcatgcctttagtcccagcactcgggaggcagaggcaggcggatctctgtgagttcgaggccagcctggtctacagagcgagttccaggacagccagagctacagagaaaccctgtcttgaaaaaaaaaaagaaaagaaaataaaaagaaagaaaaaaaaagttcttgcactacacacacacacacacacacacacac

SEQ ID NO: 4820 - DNA, 1365 bp, Cricetulus griseus
ctcaacaacaatggcctggtgtgccgcctcaccgtctatgaagacctacagtgtacaaaggttctggagataaaggagtggtaccagaaccgagaggacacgctggagctgaaacacataaacaagatcacaggcctgcacgtggactacttcaggccaggccatccccaagctcttcgtgtgcactcttacaagtctatgctgcctgagatggatcgagtcatggagttctatgaaaagatccgtgtggatggcctgataaagcgggaggagacacccctgacaatgacagagtactatcaagggcgctcagacttcctctcctatcgccacatcaattttggacctagagtcaagaagctcacccagaacagtgcagagtccaacccgaggcccatggtgaaaatcacagagcggttcctccgaaatccagcgaagcctgcagatgaggacgtggcagagcgagtatttctgatcgtagaggagcgcattcagcttcgctaccactgccgcgacgactacatcacttcatccaagcgtgagttcctgcggcgcacagaggtggacagcaaaggcaacaagatcataatgacacccgacatgtgtatcagcttcgaggtggagccaatggagcacaccaagaaacttctctaccagtatgagaccatgattcacctgaagaatgaagaaaagctgtcccgacatcaagcctgggagtcagagctggaggtgctggagatcctgaagctgagggaagaggaggatgacgcacatatgctgaccatctccatctatgacaccaagcgcaatgagaagagcaaagagtatcgggaggccatggaacgtgtcttgcatgaggagcacatgcggcaggtggagtcccagctggactacctggcaccattcctggcacaactccctccaggcgagaagctaacacgctggcaggccgtgcgcctcaaggatgagtgcctcagcgacttcaagcagcgcctcatcgacaaggctaacctcatccaggcccgctttgagaaggagactcaggaattgcagaagaagcagcaatggtaccaggagaaccaggtaaccctgtcacccgaggatgaagacctgtacctgagctactgttctcaggccatgttccgaatccgcatcttggaacagcggctcaatcggcacaaagaactggctccactgaagtacctggcgctggaggaaaagctctacaaggacccacgcttggtagactttgtgaaagtctttgtttgatggcccctcatgagacagaccatggcaaaaactgccagagaatggagtccctcccttctccccaggcactgtgatcccacgccggcctcactgcca

SEQ ID NO: 4821 - DNA, 1364 bp, Cricetulus griseus
gagactggcccagagcactggaggcccagttctgtatgtctatggaccagtcccttagtgctcagggatgaaatggttgtgagaaggtgcaagaggaagcttcaatttaggtgaccctgtctccaagcattggagagcaaatccaggtgcccatgtatgctagtatacagcctcaggacaactgttgactgccatcaaccaaactatgcatgcctgggactctgatggctcagtgtcccgggcattgcctcttgcttcctcagttctgatgctcctgatgagctgcctgtggttattgggggctggccccagcctcacattggctccagagctgctgctggacccctggcaggtgcaccggctactgacccatgctctgggccacactgcactgccgggcctgctcttgagcctgctgctcctgcccactctgggctggtggcaggagtgccatctaggcactctacgcttcctgcacaactccgccctgcttgccctggctgctgggctgctggctgtgctactggcaggccttggggtgtccaatgcagctggaggctgtggatacatgcctgtccatctggccatgctggcagggcagagttactaccctggatggccccaggggacactgccaccatggctactcccatggctgctgctggccctgacccggctgctcagctctgagccgcccttcctgcagctcgtttgtggccttcttgctggactagcctatgctgctggggccttccggtggttggagctctcagagcggagattgcaggtgttacaggacagtgtcctttgcaggactctggcccggtgctggccactaaggctccttcccaccccaggcagtctggctgaactgcctgtcacttatcctgctggagtgagacctgccacccctgaatctccttaccttgcttccccaaatcctggtctcacagtgatggctctgcccaacttccaccaggcctggggcctgtgcatttcacatggatggactcagagaggggcttggactgggcggcatccagctttgctccaggaaccccgatgtgggcagccctggatgaacaaatgctacaggaagggatccaggcttcacttcgtgatacctccgttcagggtccccagaacttgatgtggttgcccaagtcctctgtgtcttctctgcggctgcagcagctggagcacatgggattccccactgagcaggctgcagtggccttggcagctacagggcgtgtggagggtgccgtatcactcctggttgaaggactggtggaaactgaagccctagtgaccgaggggaggagtggtcccgcccactgcaagggcactgggccctcatagtc

SEQ ID NO: 4822 - DNA, 1364 bp, Cricetulus griseus
tgggccctgtgacccggggtggtgtgctgggccccccgagagccccgcctcagccctcgaaccggagcctgcccggcctcccctcagtgccttagccccaccccatggttctcctgaccccccagtccctgagctgctcactgggagggggtcaggggaaacggggccggaggggaggagggggacttaggggcattaatggtgagaccaggccaggcagaggccgaaagcctggcagccgccgagagcctggccgactggccctcaagtgggggacgtcgtggtggcttcaatggacaaatggaacggtcccccgaacgaaagggacccaaccactggcagcataatggggagctagctgaagggggtgctgagcccaaggatccaccccttcctgggacccattctgaggaccttaaggtggccccggggacagtcagaaagtctcgtcgtggccggaggagaaaatacaaccctgcccggaacagcagtagctcccgccaggacgttaccttggaacccagccctacaaccagagcggctgtccctctgcctccccgggcccgccctggacgtcctgccaaaaataagaggaggaaactggccccatagcagccatacctggagctggatctgaccctgactggggaggagctgagtgctgagccttgggagtccctgccagccacgtgcacctgtggacagtgggtgggggcactactccccactcagagcacaaatgcaaccccttcccctacaaatcccatcctgagccattgcagggggtagggaagctcaccccctcccccccaaagccatgtcactgaagaggcctggggggggtggtatatggccctctccccatcaggcgctaaggggaacaccccttccccaggtcttttatttgtttaagttatttttgcacaaatgactcttttatatttaattcgacttcattgcctcccttcttaaagccagcaggctcagtttacaaacctttgagctactgttggctgctgcctccttcccagtgaaaggtacaaagcaataagcaccatgcatccttcccgcaccctctagcaaccctctagcctttggatctctcctcccatacacactacactgccccttctccccatcaaaacgctcagagacgtggtgatgatgatgcgactgacgattatgcaacgtggtccaaccggagcggccagcacgaccagctgtccaggggctgcctcctgccttttttgaaagacaagacccttgggagttttaattctgttttgtacttgccctgtgggcctccactgcttttctattgggagacactcttaatttaacagatgagaatattttgaaactct

SEQ ID NO: 4823 - DNA, 1364 bp, Cricetulus griseus
ggacgggcggggcggcgcgtgagagcggcgagtctggttgtgcgcacggccagagcggcggtgggactgggttcccaagctccccactctgggccatctgtccgtgtgccatcacctcagaccagcaggatggctgccaacaagggcaagagccagggctccctggcccttcacaaagttatcatggttggcagtggaggagtcggcaagtcagccctgacgcttcagttcatgtatgatgagtttgtagaagactatgaacccaccaaagctgacagttacagaaagaaggtggtccttgatggagaagaggtccagatagacattctggacacagccggccaggaggactacgcagccatccgagacaactacttccgaagtggagagggctttctgcttgtgttctccatcacagagcatgagtccttcactgccacagccgagttcagggaacagatcctgcgagtcaaggccgaggaagataaaatcccactgttggtcgtgggcaacaagtctgacctggaggagcggaggcaggtgcctgtggatgaggcccggggcaaagcggaggagtggggcgtgcagtatgtggagacatcagccaagacccgtgccaatgtggacaaggtgttctttgatctgatgagagaaatccgagcaaagaagatgtcggaaaacaaggacaagaatggcaggaagagcagcaagagcaagaagagcttcaaagagcgttgctgcttgctgtgagctgggcgatcagagcatcagagcgcagagttggccgagctgcagaacgtgaggccagaggtggcctccagtctggcttcgctctccacagccacactcactgtcactcctttaaatgggaccgatatctgtgcatcggtggctggcagaagaaaaacacctttgtgcagtagatctgttaactttggcaggagctttgagaatctgcccccccttcccaccctccctgaatcgtgacagccaccagctctagggacctgtgctggagatcccaaacaactgagttgggatgataagaaatggaagcagagctagaaaggtgagtttcacttgggccagggatgctgaaaagcctcctggcatctggagtgaaagtgggatgttgttctcttcttatttaaatgccagccaggtgctggctgtgggctttctctcctcagcactctatttagtgagggaactttctttgggggagatgcaggcctgtgctccatagtgggcttgctttttctggctaggtcttttacagaggttgtgggaactgagatctgatccctcgaaactgatcttgtgtcacttccaaagaatcatgggtcttttttgaataaaataaa

SEQ ID NO: 4824 - DNA, 1364 bp, Cricetulus griseus
cggatcgtgtccctggatcagccaacacaagactgatgagtgcactgactcaagtgaaggagcggtacagcatgcaggtccgcaatggcatctctcccaccaaccccaccaacgctttccatcacggagaatggtgaattcaaaacagcagctgctgatggcctttgtgaatacagactgtgggaggagacagaaggaagttgcccagctctcctgtccccagccttttaaccctctaggtttacagaatgttgcttcaaatagcagtatggcaaagaaactcttaaatgaagaaaggaaccttgtctttcagggcataaagcaaagaccaacagtgtcaatgctttccccactctatgtacatagggaacttagttctgggccatgtacagaaataccactgtaatataccaaaagggagttaataatagtagagtacctttttaattattactattttattattgtttttctcttgttgaaagcactgcagtttttagtggaggaaaaataggcgtcgagtgtgagtgagaaatgagcctgtcagttcagtaggtagagactctgtattggataggagcacatggagtgcaataggaccttgtcagaatgagttttttcagggattcatctgccagtttaaaagcctcccctcagtcccttacctaaattaggaaaacatgaaataccaagatccacacaaaacagtactttatactactgatcaaccaagatgttaacttattattattattattattattattatttctctgtgtagctttgcagcctgtcctggcactcgctctatagaccagggtggcctcgaactcacagagattcacctgcctctgcctcctgagtgctgggattaaaggcgtgggctaccagtgtgtgtgtgtgtgtgtgtgtgtgtgtgtgtgtgtgtgtgtgcctcattgtttcctaggaagtcttggaactgaaatcagactgaactgtttggttgccgtgacatttccacagctgtgttttaggggttcccatcctctatgtgtggcttttgaatataaatagcatggatatgtcatttccaaaccctcaaggaaattatcaatttctagttcactaaaaggttaaatgctaattatctcaatgactgccatcctgcagaaaagctgaaataagtagtaaaggttgaattttgactggtgcttagatatttctagctatattaggatcaactcaagcaaacagcagtgtatttatctgagtcacacctgtgaggaatttattttccaaatttgattttgtttttcatctccagggccttaataagagtgtgttaatacacatgactattttacaaagatagttcaaaataa

SEQ ID NO: 4825 - DNA, 1364 bp, Cricetulus griseus
taagcttgcagacgcttgccgctgggtggtctcggctccgaggcctggccctggggttgccagcggccttgcacgttctaccgcggggtttggcgtttatccccctcttggagaaagcaccgctgtgctgagcggcatcccgggacacagacaatggaggcgacgctggcagccacccggctgcccccgcacgacccgaggacgcccgcgctgtcggtggtggacatgcacaccggcggcgagcccttgcgcatcgtacacgccggctgtccggaggtggccgggcccacattgctggccaagcggcgctacatgcgtcaacacctcgactatgtgcggcggcggctggtgttcgagccccgcggccaccgggacatgtacggggcggtcctggtgcggagcgagctgcccgacgctcacctgggcgtcttgttcctgcacaacgaaggctacagctccatgtgcggccacgccgtgctggcgctaggccgcttcgcgctggacttcggactggtgcccgctcccccacaaggcgtccgggaggcccaggtcaacatccactgcccgtgcgggctggtggccgccttcgtggcgtgtgaaggtggccgtagttgcggtcctgtgcgcttccacagcgtcccggccttcgtcctggccgcagacctcacggtggatgttcctggacatggaaaggtggtgatggacattgcatatggtggggcattttatgcatttgttagtgcagaaaaattaggacttgatgtgtgttctgcaaagacgagggaccttgtggaggcagcaagcacagtgacagaagcagtgaaggctcagtttaaaatcagccatcccgagagtgaagaccttggttttctgtatggaacgattttaaacagatggaaaagatgcttacagcgaggagcccaccaccaacatctgcgtgtttgcagatgaacaggtcgacaggagccccaccggctcgggagtgacagcccggattgctctgcagtatcataagggccttctgcagctgaatcagaccagagccttcaaaagcagtgcaactggctccgtgttcacggggcgtgctgtgagggaagcaacatgtggggattttaaagctgtcatagtggaagttgcaggacaagcccattacacagggacagcaagcctgacagtggaagacgatgacccgttgagggatggctttcttctcaagtgacctttcccatatgttttaaggtttctttttaaagtaattaccaataagtgatgtttttctgtatcatattaaaaccagcatccagttatacatattggctaattttctacactttctaaaatgtttcagcttgagtagaatgaag

SEQ ID NO: 4826 - DNA, 1363 bp, Cricetulus griseus
aatatttctcaagtatttgatgaagtagatacagaccaatctggtgtcttgtctgatagagaaatccgaacactggctaccaggattcatgatctgcctttaagcttgcaggatttgacaggtttggaacacatgttaataaactgctcaaaaatgcttcctgctaatatcactcaactgaacaatatcccaccaactcaggaagcatactacgatcccaatctgccaccagtcaactaaaagtcttgtcaccaactgtaaaccagtaactgaacaaaatccataaagcgtataaagacaagaacaaatataggtttgaaataaatgggagaagaagaaatcgcttttaaaatgattcgtaccaatgtttctcatgtggttggccagttggatgacataagaaaaaaccccaggaagtttgtttgtctgaatgacaacattgaccacaatcataaagatgcccagacagtgaaggccgtgctcagggacttctatgaatccatgtttcccataccttcccagtttgagctgccaagagagtatcggaaccgttttcttcatatgcatgagctgcaggaatggagggcataccgagacaagttgaagttttggacccattgcgtactagcaacattgattatatttactatattctcattttttgctgaacagataattgcccttaagcggaagatatttccccggaggaggatacacaaggaagctagtccagatcgaatcagggtgtagaagaccttcatttgaaaatcacctacctcagcgtcttctgaacatctcacaccttaccatcacagggttgtcaccatgatgtgacacacagcctgcttggaagaagggacagcgtgcagacatgttcttctgcagcatgaagagcctactgccctggaattaatcagcacactgggaacctgtgctgacagctgtacagcttgtacttttaaaggatttgccgaaggacctgtcagcttttgatgaaccctcactgacaggctgccggtttcctaccaccatcactgcagcctaagaagccaggccagcctgggagcaaatgctgagggaccccaggctttgcattccaaaggccaccagcataattttcatttcctcttccttttctccattgctcattttttggctttgacctagcgattctcctgcctatgcttcctgagtgcgttttgaattctgacagatatcttttgatcgtgatttcaatagtattcttccccaaatggcacacatttttgtaaagagaacttgaaatgtaaatactgagtttgtgctgtaaattttgtgtatttcaaaaactgaagtctcataaaaaagatcacatttattgaaa

SEQ ID NO: 4827 - DNA, 1363 bp, Cricetulus griseus
ccgggatagaagctggcgtgcagagttttctcggtacctttcttccgctgcgtggcccaacactatgaaggaaacgccgctctccaactgcgaacgccgctttttgcttcgcgccattgaggaaaagaagcggctggatggcagacagacctatgattacaggaacatcaggatctcattcggaacagattatggatgctgtattgtagaacttgggaaaacaagagttcttggacaggtttcctgtgaacttgtttctccaaaactcaatagagcaacagaaggtattctgttttttaaccttgaactttctcagatggctgctccagcttttgaacccggcaggcagtccgatctcctggtgaagctgaatcgactcttggaaaggtgtctaagaaattcaaagtgtatagatactgaatctctctgtgttgttgctggtgaaaaggtttggcagatccgtgtagacctacatttattaaatcatgatggaaatattattgacgccgccagtattgctgcaatcgtagccttgtgtcacttccgaagaccggatgtctctgtccaaggagaggaagtaacactgtacactcctgaagagcgggaccctgtgccactgagcatccaccacatgcccatctgtatcagttttgctttcttccagcaaggaacatacttattggtggaccccaatgaacgagaagaacgagtaatggatggcttgctggtgattgccatgaataagcatcgagaaatttgtactattcagtctagtggtgggataatgctgctcaaagaccaggttttgagatgcagtaaaatagctggtgtgaaagtagcagaaattacagatctaatacagaaagctttggaaaatgaccagaaagttcggaaagaaggtggaaagtttggctttgcagagtctatagcaaatcaaaggatcacagcatttaaaatggagaaggcctctgttgatacctccaacatagaggagaaagcagaagaaattattgctgaagctgaacctcctccagaagttgtttctaaacctgtgctgtggactcctggaactgctcagattggagatggaatagaaaactcctggggtgaccttgaagattctgagaaggaagaggaggaaggtggcattgatgaagctgttattcttgatgatacaaagatggacactggaggagtttctgatattggaaatcaaggtgcccctatagtgctgtcagatagcgaagaagaagaaatgatcattttggaaccagacaagaacccaaagaaaataagagctcagaccaccaatgcaaaagaaaaggcaccaagtaaaagtcaagtgaaaaggaggaaaaaagaa

SEQ ID NO: 4828 - DNA, 1363 bp, Cricetulus griseus
cgattcctccacagaaacgcttcaggccgctgcggaagaggaggaagctaagacatttaaagacctgggcgtgacagatgtgttgtgcgaagcttgcgaccagttgggatgggcaaagcccaccaagatccagattgaagctattcctttggccttgcaaggccgtgatattattgggttggcagaaactggatctgggaaaacaggtgcctttgctttgcccattctgaatgcactgctggagaccccccagcgattgtttgccttggtcctcacccccactcgagagttggcctttcagatctctgaacaattcgaggcactggggtcctctattggagtgcagtgtgctgtgattgttggtggaattgattcaatgtcccaatcaatagccttggccaaaaaaccgcatatagtaatagccactcctggccgactgattgaccacttggaaaataccaaaggcttcaacttaagagctcttaagtacttggtcatggatgaagcagacaggatactgaacatggattttgagacagaggttgacaagatcctcaaagtgattccccgagatcggaaaacatttctcttttctgctaccatgaccaagaaggtgcaaaaacttcagcgtgcagctctcaagaaccctgtgaagtgtgccgtgtcctctaagtaccagactgttgagaagctgcagcagtattacctctttattccctctaaattcaaggacacctacctggtttatattctcaatgaattggctggcaactcctttatgatattctgcagcacctgtaacaatactcagagaacggctttgctactccgaaatctcggattcactgccattcccctccatggacagatgagtcagagcaaacgtcttggatcccttaacaagtttaaggccaaggctcgttccattcttctagctactgatgtcgccagcagaggtctggatataccccatgtggatgtagtggtcaattttgacattccaactcattctaaggattatatccatcgagtgggacgaactgcgagagccgggcgttctggaaaggccattactttcgtcacacagtatgatgtggagctcttccagcgcattgagcacttaattgggaagaaactgcccgtcttcccaacacaggatgaggaagttatgatgctcacagagcgtgtgagtgaagcccagagatttgcccgaatggagttaagggaacacggagaaaagaagaaacgcaagcgagaggatgcaggagacgatgatgataccgagggcgctatgggtgtgaggaacaaggtggctggagggaaaatgaagaagcggaaaggccgctaatggcgtcaggaagac

SEQ ID NO: 4829 - DNA, 1363 bp, Cricetulus griseus
gcctgcgactgcgcgcgatcgggaccgggcggcggcggcgggctgtggtgacgggcagcgggaccggggatggaagggagcgcggtgactgccttgagcgtgaggggcgagctcgccggcggagcgaccgagcaagaggaggcgcaggagcggcggcgcccgagcacccgagggggtccgagtccaggcagccagccaggcacgcgccacaaagggagcgcccccgccacccggcacgccgcctccctcccccaatgtcctcggccatcgaaaggaagagcctggacccgtctgaggaaccagtggatgaggtactgcagatacccccatccttgctgacatgtggtggctgccagcagaacataggggaccgctacttcctgaaagccatcgaccagtactggcatgaggattgcctcagctgtgacctctgtggatgccggctgggagaggtggggcggcgcctctactacaagctgggacggaagttgtgcaggagagactatctcaggctttttggtcaagatggtctctgtgcttcctgtgacaagcggatccgtgcctatgagatgacgatgcgagtgaaagacaaagtgtatcacctggagtgtttcaagtgtgctgcctgccagaagcatttctgtgtaggtgacagataccttctcatcaactccgacatagtgtgtgaacaagacatctatgagtggactaagatcaatgggatgatttagaccagagtccccagcaccttggggaggtgttcagtgaaaacactgtctcagtgggggtcttcattcttaggcactttgggaacctgagggtgggtgaggcatttcttaggagattgtgggctctccttgggcactaagacatagcatccacatgacataatgcaaaggccaagacttcagcgacaaaaggaccagcccttagagagaatttatggtcacagactatccatagtaactgacaagattagtggaggaagtatttggggaccagcatgcactgtgccatcatgataggatttcccagttcttttttcttggtcaccttcccaaggcctaaagtgttggggccagaggaaactgcatggaaatacatttcagttgggaatgaaatacacatctttcaatcaaacaaatatttaaagcaatcttgatgaatcactgtttttagacaccttcattttgaggtgaggcaccccccacacacagattgtttctatacaaatgtaaatcttaagaagtcaaagttgttcaactattttattatcttagattatatcaaagtatttgttgtgtgtcattagaaaaacaaacctcaatttggagacttaataaaaatgacaagctaaaatgca

SEQ ID NO: 4830 - DNA, 1363 bp, Cricetulus griseus
ccagcagtttataagcaggtttattggatacctacatgttccactcctttctgaaggctcggctcaatggcaggatggatgcctttagctcggatggacctcgacacccaagtctgaggaggacaaggatagacaggatgcttataagtccgaggagacctactgtggagaagatgacctccaggaagatgctgcctccaagctggcctactttgacaagatgaggagtgaaatgcccatggcagtcccaaagacaacctcagagactctaaaacacaagattaacccttcagcaggagagactgctccccaagctgttgatgtcttgctgtatacaccagggcgccttgaccctgcagagaaagttgaggatgcacaccccaagttgtggtgcgccctgaatgaaggcaaagtggtcgtgtttgatgcttcttcctggaccatccaccagcaccgctttaaagtgggtgcctctaaagtgaactgtatggtgatggcagagcacagccaggtatgggtgggctccgaggactctgtcatctacatcatcaatgtccacagcatgtcctgcaacaaacagctcacggatcaccgtgctgcggtcactggcttggtggtgcagaatggaaagaagcccagtgaggtctactcttgtagcctggatgggacggtcttggcatggaacgtcagcacgctgcgagtgaccagccggttccagctgccatatggtgatctcatgtccatcagcctgcacaatgactgcctgtggtgttgtacaggccacagcctcgtggtggtgacaatgcagggttttcatcgtcatgagctgaagcctccttgttggccttccagcttctgcctgagaaggagcagctgtgggtggcctgtgcggggtgcagtgatctgtatatctggagcctgaaggacctgggccagcctcctcggaagacccacttgcaggactgcactgaggttagctgcatgatccgtgtgaagagacagatctgggtgggtggccgggggctgtcgcagggaaaacccagagggaaaatctttgtgatggacgtggagaagatgacagtggaaaaggaactggtagcacactccgacactgtgaagacactgtgctctgctgaggaccgatatgtgctgagtggagcgggccacgaggagggcaaaattgccatctggaaagtcgagtgaaagctacatactacatcttattgctgataacctccactgtgaagttacctcgtattacctagaaacttccagaatccacagctgggaggtagcaccaaggctgccaacgttagctgtgtcacatgtgacttgtagtcctcacatctggcctctcctcttc

SEQ ID NO: 4831 - DNA, 1362 bp, Cricetulus griseus
cccctaccctacctagcccttctcacacaccaggccagttggtctacactgcaccgctccgtatcctgctaggcaagagccgggagcagaggctcgacccctcagcctccctggacttcctctgggcctgcatccatgttcctcggatctggcagggccgggaccagcgtactccacagaagcggcgggaggagctagtgcttcatgtccagggcccagagcttctcagcctggtggaactgatcctgtctgaggcagagaccaggagccaggatggggacagtgccgcacgcactctcatccagacccgactacccctgctgcttagctgctgaccgcggcaacaatgagagagagcagagtggctgatgccaacatggcctgtcggagactggctgtggccaaccccatcctgctactgaggcacttgcctatgattgcagccctcctgcacggccgcacacacctgaactttcaggagttccggcagcagaaccacctggccttcttcctgcatgtgctgggcatcttggagctgctgcagccgcgtgtcttccagagcgagcaccagggggcgctgtgggactgcctgcgctcttttatccgcctgctcctgaactaccgaaagtcctcccgccacctggccccttttatcagcaagtttgtgcagttcatccacaagtacgtggcctgcagtgcaccagcagccgtgaccttcctgcagaagcacgcggagccgctccatgacctgtcctttgacaacagtgacctggtgatgctgaagtctttactggcggggctcagcctgcccagccgggacgggagaactgaccaaggcctggatgaggaaggggaagatgagcgatcagccggctccctacccctggtcagtgtctccctctccactccactgactgtagctgacgtggctccacatatgaagaggctttcccggggccaggctgttgaggatgtgctcgagactctgagcgacatagatgagatgtcacggcggagacctgaggtcctgggcttcttctcgaccaacttgcagcggctgatgagctcagcagaggagtcttgccgcaacctggccttcagcctcgcgctgcgctccatccagaacaaccccagcatcgccgctgacttcctgcccaccttcatgtactgcctgggcagccgggactttgaggtggtacagacggccctcaggaacctgccagagtacaccctactctgtcaagagcatgcggctgtgctgctgcatcgagccttcctggtgggcatgtatggccagattgacaccagcgcccagatctcggaggccctgaagatcttgcacatggaggctgtcatgtgaac

SEQ ID NO: 4832 - DNA, 1362 bp, Cricetulus griseus
tccaagttgcccatcagtacaaagtccactgctgcaatgccttctactgtgctcaccaatatagcaccgtcaaaattacccatcaactcagcatatgctggcacaatgccatccaaagtgcctattagtgtggccaaagcacctgccaatgtactaccacccaataggagcaacaaccaagccaaggagaccctagagcctccagcaagcacagtcaccactagaagcagcttgcccagaccagatatcagttccaggagcttgcactctgggccagagatgggcaaaccaggtgcactgttgtcccaggtggacgagccattctcaggatgctctatggaccttgccatcagccctagcagctctttgggctccgaacccaatcatggtccagaggagaatgaatattcgtcctttaggatccaggtggatgaagaccccagtgctgaccttctggtgggaaaccctgggccactagctatcccggagtacccaagaagtcgaagagctttgtgtcagtcaaatatcctgggctaagtggctccggggcaactggtgcactcttggctgcattcctgggagtgatgctgtaccgtagtaggcacctggcccaatgaagattcagctgtgtgccacgcacttgcccagttctgccaagcatggtctctaggctcggactggtggaggttaagtcaggggaacttagagatggtgaggtccacctgaagatggggaggtatcacacttctgttgacagagcctctcatcctgcccaggtcttttgaaacacaagcacgggtgtattggcgagagctcccgtaacatcgtgtgccttccaccagcagcctggcctaaggcctcggtactagagcctgcagcagagtggctggtttctagggagctttgtttaagtcctgtctctctggtccccctccacagtcaggcaaccctaagggaaggtctggaggttccctgtggactctgagaaagccagaagcagctgccaggcctgagaaagacactaggagccctgctccagcctccttactccacctcttcaccgcctccctcctggtctccattctctttagtctcctacactggatgatggaatacctagtgggcagagctcaggctgggtttgaatttcagttctaagcttactctggctttagcagatgtttagcttctgtagtctttttcccagtgtagtgtggacagtgaaccctttcactgggcttttctgagactgaagaacatagatatttacgtagtgcctagcccagagggtgtgactaccaagtaattacactcctgcccagcctggttgaactaaggtgagcttgagaggcagagtacata

SEQ ID NO: 4833 - DNA, 1362 bp, Cricetulus griseus
  modified_base (344)..(344): a, c, t, g, unknown or other
taaaagtctctatgatctgtataccagaaccaccagtctttccagcaaattgatggagtttaacttaggtactgataaacagactttcttgtctaaacttatcaaatccattttcatttcctatttggagaactatattgaagtggagattggatatttgaaaagcagaagtgctatgatcctacagcgctattatgattcaaaaaaccaccaaaaagagatccattggcacaggaggtattcaagatttgaaagaaaggattagacaacgtaccaacttaccactggggccaagtattgatacgcatggggaaactttcctatctcaagaagtggtagttaancttttacaagaaaccaaacaagcctttgagagatgtcataggctttctgatccttctgatttaccaaggacttttcctgaggtacagcagcagtgctagtccagggaaaatattatgaactaaactaaaatgatgacctgttttaagtagacattaggaacagatcagaatatatctgctttctgggtaaaacttaaagtttactatttcttatttggtaaataggttttaagccaattaattagcaagaaattaatgaaactaccttgttttatatttaacttaaggtggaatactttaaaggaccatgtttgttattttaatactctcatgtttggcaacagtgcagtcagtcccttaaggccaatcttgaatgaaatgggatggctaaacatgcagtagtcttctattttaagaggaattgagaatttcaggtaataagtagtatatattccaaatttggaggcaagcttacagcaaaaaacctgcttttcagatctgaagattctttcattgtccattgtccatttctaggacccaggtaagctgtaatgttcacttcattcatagtattgttttctcttaatgtaggtttggcctaatttggggggaacttgtttttaaattatgagaacctcactctccaatagctgtcagcattactaagctgtctagtccagaactagctactgtacaagttactattgactggattttcattttctgtttagcccagtgttactaaggtaagcaagggcagtgagcatgactaacttttgtctttagaggctttctggatagctagcctcaggcaagggagagccagaacaggttctagatattagaaaagctctatgcttgtactgttgccactttaggaagtactggtgtgaattcagattatacctctgttacttaaagccaacagttttaaggcagtagttatactggccatttgaactctttgtacagtgtcaagttgtaaaaaaaaaaaaaaaaagaaaaagaaagaaaaaaa

SEQ ID NO: 4834 - DNA, 1362 bp, Cricetulus griseus
tccagccacgcccctcgcggacggtgcctggcctatgtgaggattattgcctagacatgtggcagatctgcagaggcctctttcgacacctgtcccctcgaccatgagctctgggccctggagagcaacagagctaagttatgccgctacctgtccctagatgacaccgattactgtttcccaagcctgttggtcaacgagaacctgaactcaaacctgggccgtgtagtggccgacgccaagggctgcctgcagctgtgtctggaggaggtggccaatggtcttcgaaaccctgttgctatggtacatgccggggatggaagccaccgcttctttgtggcagagcaggtggggctggtgtggacctacctgcctgacctctctcgcctggagaagcccttcctgaatgtgagccaagcagtgctcacctccccctgggaaggggatgagcgtggcttcctgggccttgccttccatccccacttcccccaccccagcaagctgtatgtctactactctgtgggggtcggctaccgagagtggatccggatcagcgagttcagagtctctgaggacgatgagaacaccgtggatcatggctcagagaggataatcctggagattgaagaaccagcctccaatcacaatgggggccagctgctctttgggtatgacggttacctgtacatctttaccggcgatggcgggatggccggagatccttttgggaagtttggaaatgcacaaaacaaggtcggcgctgctgggcaaggtgctgcgcattgacgtggaccgcaacgagcgcggcccgccctaccgtatcccgcccgacaacccattcgtggacgaccccggagcgcggcccgaggtctacgccctgggcgtgcgcaacatgtggcgctgctccttcgaccgcggagacccgatgtctggcactggccgtggccgcctgttctgcggggacgtgggccagaacaagtacgaggaggtggacctggtggagcggggccgcaactacggctggcgtgctcgcgagggcttcgagtgctacgaccgcaagctgtgcgccaacgcctccctcagatgacgtgctgccgattttcgcctaccctcacaagctgggcaaatcagtcactgggggctacgtgtaccggggctgcgagtaccccaacctcaatggcctctacatttttggcgacttcatgagtgggcgactgatgtccctccgagagaaccctgagacaggccagtggaagtacagtgaagtctgcatgggccgtggacagacatgtgctttcccaggcctcatcaacaactactatccatacatcatctcctttgcagaggacgaggctggtgagc

SEQ ID NO: 4835 - DNA, 1361 bp, Cricetulus griseus
cgcccaaagcttgttgggttcggcacgactcacgatgcgtggcgggcagcgtgcggcgggggccccagtgcgccagttcaccaactgccgcatcctgcgcggcggcacgctgctcagggaggatctatgggtgcgcgggggccgcatcctggacccagagaagctgttttttgaggagaggcgcatggctgatgagcagcaggactgcggaggctgcatcctggctcccggctttatcgatgtgcagatgaacggtggatttggtgttgacttctccaaggccacggaggacgtgggttctgggattgccctagtggcccggaggatcctgtcccacggtgtcacctccttctgtcccaccatggtcacttccccaccagagatttatcacaaggtccttcctcagatccctgtgaagagtggaggtccccatggggcaggggtccttggggtacacttggagggcccattcatcagccgggagaagcggggtgcacaccctgaggcctacctccgctcctttgaagacaatgcttttcacgatgtactggccacatatggggccctggacaatgtccgcattgtgacacttgcccctgagttaaaccggagccatgaagtgatccaggcattgacagcccaaggcatctgtgtgtctcgtagggcattcagtggctgaccttggagctgcagaagtagcagtgacaaaagtcggggaccaccgttcactccacccacctcttcaattgccatgttgcctttccaccaccgtgacccaggcatagtagggcttctcaccagtgaccggctgcctccaggccactgcatcttctatgggatgattgccgatggcatacacactaaccctgcagctctgcgcattgctcaccgggcccatccccgggggctggtactggtcactgatgctgtccctgctctgggcttgggcaatggccgccatacgctgggacagcaggaggtggaggtagatgggctaatagcctacgttgcaggcaccaagacactgtgtggcagcatagcccccatggatgtctgcatccggcatttcctgcaagccacaggctgtagtgtggagtcggctctggaagctgcatccctccaccctgcacagctgctagggttggagaagaccaaggggaacctggactttggtgctgatgcagactttgtggtactcgacgacaccctccatgtccaggccacttacatctctggtgaattggtgtggaaggcagaggaagctgggccgtgacttgaggatcttggctggagaggacacttggacaggccacacagtccagggagctggtctccagggagcaagctgggagtcctgtccc

SEQ ID NO: 4836 - DNA, 1361 bp, Cricetulus griseus
ggctgttcgagtgcatcgctcgccacccgagtttcccctgcgggctcccacgcacacccgccagctgttgccttctgcgaacatgtctaagtcactgaagaagctggtggaggagagcagggagaagaatcagccggaagtggacatgagtgacaggggcatctccaatatgttggatgtcaacggcttgttctccttggcccatatcacacagctggtgctcagtcacaacaagctaacaaccgtgcccccaaatgtagcagaactgaagaacttggaggtgcttaacttcttcaataaccagattgaggaactgcccacccagatcagcagccttcagaaactcaaacacctgaacctgggcatgaacaggttgaacacactgcctcgaggattcggctctctcccagctctggaggtcctggacttgacctacaacaacctgaatgaacattctctccccggaaacttcttctacctcaccaccctgcgtgcactctatctaagtgacaacgattttgaaatcctgcctccagatattgggaagctcacaaagttgcagatactcagcctcagggataacgacctgatctcactgcctaaggaaatcggcgagctcacccagctgaaggagctccacattcaggggaaccgcctgactgttctgcctccagagctaggcaacttggatttaacgggtcagaagcaggtcttcaaagcagagaacaacccctgggttaccccaattgccgatcagttccagcttggtgtgtcccatgtttttgaatatatccgctctgaaacctacaagtacctctacggcagacacatgcaggcgaacccagaacccccaaagaagaataacgacaaatcaaaaaagatcagccggaaacccctagcagccaagaacaaataagaagcagacacacactctgggctctggcctcctctctaactcttctggccttccttgctctgtctcaaataaatataatgtgtttgtgcctacttttaaagaaagattcttttccgtctttcctcccaatgctagagtgcaacctcacctttgcacttttgaaattcttgtgggaggtggtacatttttataaagtcttaaatccattcccatttgtttccttaaaattgccaaaggcaggaaacaaagctctcattctcctgcaaattccatggtaggcacaggtttcagttccttgaataaacgtcacaaggctgcttattatcaaaagaataattaaaatcatgtaaccacttaaatgtcacagttaacacttttaatgctttactcattatgtgccttataataacttccttcaccgccaagctattatgttcatttaact

SEQ ID NO: 4837 - DNA, 1360 bp, Cricetulus griseus
tacaggacaaagaggaataggacaaaaacaattggggagcaactcaatagagcatatgaagccttccgacaagcatgcatggatagagattcagcagtaaaagagctacagcaaaagaccgagacctatgaacaaagaatacgcgagcaacaagaacagctgtcacttcaacaaactcttattgacaagctaaaatcacagctacttcttgtggattcttgtcgagataacagttatggctatgtacctttgcttgaagacagtgaaagaaggaagaataatttgactcttgatgaaccacatgataaactgaaactaggaacactgagaaataagcagtcaaaggtgagaagacaagaagtgtcttctggaaaagaaccctcaaaggacctcagcctccctttacatcatgaaagggataatatagagaagactttctgggaccttaaggaagaatttcatacgatatgcctactagcaaaggcacagaaagaccacttaagcaaacttaatataccagatattgcaactgacacacagtgctctgtgcctatacagtgtactgataaaacagaaaaacaagaagcgctgtttaagccccaggctaaagatgatagaaacagaggtacgccgtgtattgaatctgttgttacaccaagaggactgggccgagatgaggaagacacctctttggaatcactttctaagttcaatgtcaagtttccacctatggacagtgactctgctttcttacatagtactccagagacaccgaacatccatactcctgccacatctgaggcagtgtgccaggacagatttaatatggaagtcagagacaacccaggaaactttggtaaaacagaagaaactttatttgaaattcggagaattgaccccataacttcagctatagagaaccttaaaataactgacaaaacaaaaccctcaaatcttagagctccgtgtttgccagctggagaccataatgtgttctatgtaaataaattcccacttcaggacccgcctgatgcacctcttccctcactggattccccaggaaaagctgtccgaggaccacagcagcccttttggaagccctttcttaaccaagacactgacttagtggtactaactggcacagactcggaatgccttaaagctcaagtgtgtgaattctgtcaagagcttttcccaccgtccaatacatccaggagggatttcctccggcatcttaattcacactatcatgagacttgagtcacatttgaaaacagacatattatgttctctgatgattctggatttgtaatgctggagaatgcttgcttgtaagctagatttaagatggtttataaag

SEQ ID NO: 4838 - DNA, 1360 bp, Cricetulus griseus
gacccttggagcgggagagaacagctaaagtagcccagcaacacaagaccagcattgctgagtaagaactagggttgtatttgatccaagcagagatgtgctgggctcagaagaggggaagtttgtggatagaacaatggaaacctacttagatgcacagaccacataatcaaaattagagaaagaagatgtagttagagatgctgtttcccaggtgagaatcagctcacccgtagatttacaagtagcaaagggagttcttaacagtaaggagtgctgttcccttgagtagttagtcacgttgatgtgtgtttagacccagactgagaccttgtatactaagagcaaggcagtatagctaagacgtctagattactttatgtgtagtatcgtggggagtggggctgagagtaaggggactgacattttaaatgagccaatcagagccttttgataaattgttacttgttgaattgggcatccaagcatctccctagagtggacatgggtatttatatggggcaagggttcagaatcaggacaatagcggcatgggcttagtttaaggacagaaagcatggggacttggtagacaatttcataggaagttccagggaagaagtgaacaccctttaagacaattcatggacacagtgctgcttcccaaatcattgagtacccttgtgtctctggcatcctgtcctggatccagtacccctccaggttcgggtccttgttttaaataagatgacaaagcacaatgtctgctgtttacaatcaagacaactacatggtccaaacatttctgctcccttctatcacttgtggttttaacttcagtttcctcctttcctttttaaaataagcacagtcagagctgctcctgagattgcaccaagggacagctgaatcaaggcgtttggcgtccttaactacatcttatctttttgatagcaaatccttttgagaaactgaatgactgatagggctcagcaattttgtactccagtgtctatgtaagatcaattttgtttgccattgagcctgcattgaaattccttcagccgcaaacactggcaacacctatggaaattgcacttctggggacagttcccagcattcttgttttcttgtcttcagtgggtaatgcttgccccttccagcagctccacttatgtgtgctgaggtcctaaagagccggtgcgttggggacagacttgaagcagacttgtgcatgttctttcttggcaacactgggctcatatttcttctttgttctcttttgatagggtcctgtttcctatgtatttaaaaaataaaaaaagttaatttaaggtaaaaaaaaaaaaaacaaaaaaaa

SEQ ID NO: 4839 - DNA, 1360 bp, Cricetulus griseus
  modified_base (1349)..(1349): a, c, t, g, unknown or other
gtgggggtgaggggggcctctctagctcgcggcctgtgtctatggtctggcccgtagcgtccagctgcccgggaccgatccccggtgtatggcgccgcaggaaccggctcccgggcccagataaagggccacctccgcagctcttggccgggcgagaggagatctccctgctccgagaatggctacctcccgctatgaaccggtggctgaaatcggtgttggtgcctatgggacggtatacaaggcccgagatccccacagtggccactttgtggccctcaagagtgtgcgagttcccaacggagggggagctggagggggccttcccatcagcactgtacgcgaggtggccttactgaggcggttggaggccttcgagcaccccaatgttgtacggctaatggatgtctgtgctacctcccgaactgatcgagacatcaaggtcactctcgtgtttgagcatatagatcaggatctgaggacatacctggataaagcacccccaccaggcttgccagttgagaccatcaaggacctgatgcgacagtttctaagcggcctggattttcttcatgcaaattgcattgttcaccgagacctgaaaccggagaacattctggtgactagtaatgggacagtcaagctggctgactttggcctggccagaatctacagctaccagatggccctcacacctgtggttgttacactctggtaccgtgctcctgaagttcttctgcagtctacatacgcaacacccgtggacatgtggagcgttggctgtatctttgcagagatgtttcgtcgaaagcctctcttctgtggaaactctgaagctgaccagttgggcaaaatctttgatctcattggattgcccccagaagatgactggcctcgagaggtatctcttccccgaggagccttttcccccagagggccgcggcctgtgcagtcggtggtaccggagatggaggaatctggagcacagctgctgctggagatgctgacttttaacccacataagcggatttctgccttccgagccctgcagcactcttacctgcacaaggaagagagtgacccagagtgagaagattagctgcctctcctctccttgggacacttgagcgacagcgagaacctcaacttgtgccttcctctggggctgtggagacacctccagttttttacagagaatattttaacccttaaatgacattcccccctccctatgaggcttgtcctcttgccctcccatctctctctctctctacactaaagggtgggtgtctctgtcttcttccctccctgatttatactgggatcttttttatacagcaaaaaaaaanaaaaaaaaaaa

SEQ ID NO: 4840 - DNA, 1360 bp, Cricetulus griseus
ggggccccccggttcccccctccccgggccggcgggggggcgtgcccccggggggctggcggagctgggccgcgggggccccggggccggcggtgccggggtcatcgggatgatgcggacgcagtgtctgctggggctgcgcacgttcgtggccttcgctgccaagctctggagcttctttatttaccttttgcggaggcagatccgcacggtaattcagtatcagactgttcgatatgatatccttcccttatctcctctgtcccggaatcgactagcccaggtgaagaagaagatcctggtgctggatctggatgagacacttattcattctcaccatgatggggtcctaaggcctacagtgaggcctggaacacctcccgatttcatcctcaaggtggtaatagacaaacatcctgtccggttttttgtacataagagaccccatgtggatttcttcttagaagtggtaagccagtggtatgagcttgtggtgtttacagcaagcatggaaatttatggctctgctgtggcagataaactggacaatagcagaagcattcttaagaggagatactatagacagcactgcactttggagttgggcagctacatcaaagacctctctgtggtccacagtgacctctccagcattgtgatcctggataactcccccggggcttataggagccacccagacaatgccatccctatcaaatcctggttcagtgaccccagtgacacagcccttctcaaccttctcccaatgctggatgccctcaggttcactgctgatgtccgttctgtgctgagccgaaaccttcaccaacataggctctggtgacagctgctccccctccacctgagttggggtgggggggaaagggagggagaactcttgggatgcgtctgttgccctgtccaatgtgaggactgcctgggcagggtctgcccctcccatccctctctgccctcggagctctgcactccactatggagtctggatggacacatggggccagactgtgaagcagcctcactcttcgtgttcacactccatggaaatgccacaccgggacaggtgaaggccttggagagctgaaactgtctggcggagaggcaggactggcctccgtgacagacgtgatcccagaggcttacaagaagccaagtcaactttgttgtgatttgattttttaaaaactcttgtacaaaaccgatctaattcttcactcctgctccaagggctgggctgtgggtgggagcctgggattttgggccactggatcttcctcaaacttgtccctcccttacttttcctcatttttttctccccccaaaccccttgatacctgtaatc

SEQ ID NO: 4841 - DNA, 1359 bp, Cricetulus griseus
gcctatgaggatcctcggttcaatagctgaagtcgacaattacaggctacaggacacagagtatcctttgtatgccaattaaaaccacagagaagaggttgttggtgtagcccaggccatcaacaagaaatcaggaaatggtgggacattcactgaaaggatgaaaggactttgctgcctatttggcattttgcggtattgtccttcacaatgctcagctctatgaaacgtcactgctggagaataaaagaaatcaggtattgcttgaccttgctagcttaattttcgaagagcagcagtcattagaagtaattctgaagaaaatagctgccactattatctccttcatgcaggtgcagaagtgcaccatattcatcgtggatgaagactgctctgactctttctctagtgtgttccacatggagtgtgaggaattgggaaaatcagctgatactttaacaagggagcatgatgcaaacaaaatcaattacatgtatgctcagtatgtcaagaacacaatggagccacttaatatccctgatgtcgctaaggacaaacgatttccctggacaaatgaaaacacaggacatgtaaacacacactgcattggaagtttgctttgcacacctataaaaaacggaagaagaacaaagtcataggagtttgccaacttgtcaataagatggaggagaatactggcaagattaagcctttcaatcaaaatgatgaacagttcctggaagcttttgttaatcttctgtggcttggggattccagtaacacacagatgtatgaagcggtggagagagccatggccaagcaaatggtgacattagaggtcctgtcctatcatgcgttgcctatcacaattggaggcatgcctttaacacagcacagtgcatgtttgctgctctgaaagcaggcaagattcagaacaagttgacggatctagagacacttgcattgctgattgctgctttaagccatgatttggatcatcgtggtgtgaacaactcatacatacagcgaagtgaacacccgctggcccagctgtattgccattccatcatggaacaccatcattttgatcagtgcttgatgattctaaatagcccaggcaaccagattctcagtggcctctccattgaagaatataagaccacactgaaaataatcaagcaagcaattttagctacagacctagcactgtacattaagagacgaggagaattttttgaacttataagaaaaaatcaattcagttttgaagatcctcttcaaaaggaactatttctagccatgctgatgactgcctgtgatctctctgcgattaccaagccctggcctgttcaacaacgg

SEQ ID NO: 4842 - DNA, 1359 bp, Cricetulus griseus
gggctctgcgcggctcccaagacccccgtagggttgctccccgcgtcccggaagctgcagcctcaaccatgtttttcacttgtggcccaaatgaggccatggtggtctccgggttctgcaggagccccccagtcatggtggccggaggccgagtttttgtcctgccctgcatccaacaaatccagaggatctctctcaacacactgaccctcaatgtcaagagtgaaaaggtttatacccgccatggggtccccatctcagtcacgggcattgcccaggtgaaaatccagggccagaacaaggagatgttggcagccgcctgccagatgttcctggggaagaccgaggcggagattgcccacattgccctggaaacactggagggccaccagagggccatcatggcccatatgactgtggaggagatctataaggacagacagaaattctcagagcaagttttcaaagtggcctcctcagacctggtcaacatgggtatcagtgtggttagctacaccttgaaggacattcatgatgaccaggactatttgcactctttggggaaggctcgcacagcgcaagtccaaaaagatgctcggattggggaagcagaggccaaaagagatgccgggatacgggaggccaaggccaagcaggagaaggtatctgcgcagtgtctaagtgaaatagagatggccaaggcacagagagactatgagctgaagaaggctacctatgacatcgaggtcaacactcgccgagcacaggcggacctggcctatcagctgcaggtggccaagaccaagcagcagatcgaggagcagcgggtgcaggtgcaggtggtggaacgcgcccagcaggtggcagtgcaggagcaggagatcgcccggcgcgagaaggagctggaggcccgcgtgcgcaagcctgccgaggctgagcgctacagactggagcgcctggcggaggcagaaaaggcccagctgatcatgcaggcagaggccgaggctgagtctgtgaggatgcgtggggaagccgaggccttcgccataggggcccgcgctcgtgctgaagctgagcaaatggctaagaaggcagaagccttccagatgtaccaggaggccgcccagctggacatgctgctagagaaactgccccaggtggcagaagagatcagcggtcccctgacctcagccaataagatcacactggtgtccagcggaagtggaaccatgggggccgccaaagtgactggggaagtactggacatcctaagccgcctgccagagagtgtggagagactcacgggcgtcagcatctcccaggtgaaccacaacaagcctttgaggacagcatgaaccc

SEQ ID NO: 4843 - DNA, 1359 bp, Cricetulus griseus
acgcagctagggaggccctggagataaccagcgagatagaacaggagatagggagcctgaacttggaagccaatgtgacagcagatggggccttggccatggaaaagggactggccactctaaagaggtgagaatgagagaggtggaaggggagctgggccaggaaggagctggagtttgacatggacaaggacacagtgcagctggtgattacagaagtccagcaagctaatgccagagctaagagtgccggagtgacgatccaagacacgctcaacacattggacagcatcctacatctaatagaccagcctggcagtgtggatgaagaggggctgatgcaattagaacaagagctttccaagccaagacccagatcaacagtaccaacaaatgttgacctcagagcagacataaactgaaacctggaatatacaatgtgctgccacgcatgtcaggacaagagagctagtcacactgaggccagtaaagtactcttgctccacccacttcaagtttgagtggactagatttcctccactgcccacacaatagcttacgccctctactttcaagctgagtgaaatgggcagcgatgggcacagaacctggaaatctggcccatttggagcaatggtgcctactgccaccctctcacctctgtgctctcggcctgagttaacatcctttctcctcatgatgccagaataacttagagactgcattgttatgaaagcatttctgaccagtcaagcaatcactgggaaagtatttcccttgagtttcaaagtgataaaaagaaaatgtgccttcggcattaaaggatgtggaattgtctaaaagatatattcatcttaacccagtcttcctttgcaaacactaaaactcatatacatctgtttattttatcttatgttctctctctccctaaaccaaggataatctatccttctaacatatatttattgagtccctactatgtgccaggggtgagtggaacagtaccgactatctaccctcatgaagctgactgactagtgagaaagagaaacatttaaaataataaatggaaactcctaagccttgttcatctcaagtgatattttattgcagtcaccaccctcaagtttggaaccttttctcagtagaacatgtgttgcaagacagccccatgggggtacttgagtcagggcaaagctgaaattgttttgagttgtatacacttttctgcattccagccaccgctccaccccttcccaccacagacgtattgcaacagacacttgcatcatggcaataccagtgggaattgctgaaggaaccagaggcactacacttcagtttggaagacttctgtac

SEQ ID NO: 4844 - DNA, 1359 bp, Cricetulus griseus
gagtgggagaggcccagacccaaaccatttctggggtgtgggattctctactgccaagcacccgcccttgggagaatgttattggctactatgctgatgcttccttaaggctgccagagagtcctcctctggccaccaagtatggctccatctgtcctcagttacataatgccacctggggcctgaccagctgccatgctgctggttccattcttgagggtgactgctgggtcacacactgaggtcttccaaacctttatcaccaagctctgatagtggtacaagtcctggccagagcagataccgcctctttgtgagaaggctaagcctggaggccacactgtcctgtgacctaaagccaaaacaccaaactgagatcccaagtgcctttggtggccaggaagccactgcccctgtttggtggcctttctggcaaaagatatagagagatggtttataaagtcaaattggtggaatggcttagccaagaactagaagtttcttcaccgagatgtctctcatggaggcctcctgctggactctgctggactctcactcacagccaaggcagcttttctggagtttctctggattcttcagagccaaagatgaaaatgccccacaagctgtaaggtcaaagggcacacccaccacagtgctccagcaagggcgtgttttttaggactccccccagtgcacacaacgtttcttgtaaatgtaataggtgagggatgcatgatctcagatttctgcctaaagggctttctttttagaaattgtttcctttattgcccttagaagatcacccctaggaagagtctgagacatcttgcctacattctttttcctagggatagccttatccatttcttacacacatttctttaccgggggagttgttatgctataattgctggtatttatgcaaagggactattactaaatatatctctctatgtgtattatgtttaagggaatgttgaaggtgggttactaaattgccaggccaaggaaaaaactgtgggataatataataaactcttaaattacaatttgatcaccatacacttgttcaaggctgtcttatgttcagaaggatagacagctatagccagaaaaagatagtcacattttgttaaaaagttgaattatgattgaagtgaaccatgcattcccttgtcttttactttttttttcttgtgacatttacgtctcatgtaatttgcattgcattggtgggttattctagtactgtatttggcttcctcattaatagattatttcatatactataattgtaaatattttgatacatatgtttataactctagggatataaaaacaaattctgattcccta

SEQ ID NO: 4845 - DNA, 1359 bp, Cricetulus griseus
cgagtaagtgattttgtgaaggagaattccccagagcactggctccagaatgactggcatacgaagcatatgaactaccacaagaagtatccagagaagctgtatttcgaaggcctggcagaacaggtcgaccctccggtgccaatccagtccccctatctgcccatctattttggaaatgtgtgtctccggttccttccagtatttgatatagtaatccacagattcttagagttgcttccagtgtccaaatcactggagacccttctggatcacctagggggcttatataaattccacgaccgaccagtgacttatctgtataatactttgcactattatgaaatgtgcctgagaaaccgtgaccatctcaaacgaaaacttgtcccctgaagcatgctatgaatgcacgggaggacaatccttgggttccagaggactcctactattgcaagctgattggccgactggtagacaccatggctggcaagtctcctgggcccttcccaaacctgtgactggagattcaatgagttccccaaccctcgctgcccatgccttgcatgtcacttgtgtggaactcatggccttggcagttccaggcaaagatgttgggaatgcccttctaaatgtcgtcctgaaaagtcagcccttggtgccaagagagaacattacagcatggatgaacgcaattggtttgatcatcactgccctcccggaaccgtactggattgtcctccatgaccgaattgtgagtgtcatcagcagtcctagcctgacatcagagactgagtgggttggctatccattccgactcttcgacttcaccgcttgtcatcagtcctactccgagatgagctgcagctataccttagcacttgcacacgctgtgtggcaccattctagcattgggcagctttcactcattccaaagtttctcactgaagtgcttcttcctgtggtgaaaactgagttccagttgctgtatgtgtatcatcttgtagggccgtttttacaaagattccaacaggagaggacccgctgcatgatcgagattggtgtggcattttatgacatgctgttgaatgtagaccagtgcagcacacacttaaatttcatggaccccatctgtgacttcctgtatcatatgaagtacatgtttactggtgacagtgtaaaagaacaagtggagaagattatctgtaatttaaagcctgccttaaagcttcgtcttcgattcatcacacatattagcaagatggagccagccgtgcctccccaagccctcaacagtggctctccagcacctcagtctactcaggtgccagcatctctaccagtaactcagtgaagccagag

SEQ ID NO: 4846 - DNA, 1358 bp, Cricetulus griseus
cgcggcggagcggcggtggtggcggctcaggaggctcggccgcggtcccgagggacagacggacggacgcaggggcggacggccgggagccatggagtgcggccccggggccggcggacgcgggcggcgggtgtcccactgcacggcatggagacctgtggctgcgaggctcccgagggttcgccttggaccacgatggggccaggccgcggcctcctaactggactgaggtgtgcggcccgcgagcctggccgcccgctgctggtgtctcaaagcactcccgcccctcccctggcccagcgcgggccccgtgcccgccatgaacggcctgtcggtgagcgagctctgctgcctcttctgctgcccgccctgcccgggccgcatcgctgccaagctcgccttcctgcctcctgagcccacctactcactggtacccgaaccagagcctgggcccggtggggccggcgcagccccctcgggtcccctgcggacctcagccgtcacccccgggcgctggaagatccacctgacagagcgtgctgacttccagtacggccagcgcgagctggacaccatcgaggttttcctgaccaagagcgcgcgcgccaaccgcattgcctgcatgtatgtgcgctgcgttcccggtgccaggtacacggttctcttctcgcacggcaacgcggtggatctgggccagatgtgcagcttctacgtgggcctgggcacgcgcatcggctgcaacatcttctcctatgactactcgggctacggcatcagctctggccggccctcggagaagaatctctatgctgacattgatgccgcctggcaggcccttcgcaccaggtacggcatcagccccgacagcatcatcctttatggccagagcattggcacagtgcccacggtggacctggcatcgcgctatgagtgtgctgcggtggtcctgcactcgcctctcacctcaggcatgcgggtggccttccctgacaccaagaagacctactgcttcgatgctttccctaacatcgagaaggtgtcgaagattacgtcaccggtgctcatcatccacggcacggaggacgaggtgatcgacttctcacatgggctggcactgtatgagcgctgcccgaaggccgtggagccactgtgggtggagggagccgggcacaacgacattgagctgtacagtcagtacctggagcgcctgcgccgcttcatctcccaggagctgcccagccaacgcacctagccaagccacagggacctcagcagtacagccctctgccgggactgcatgtgacccggcgcccaggaccctactcggcaccccatgggccatgagccatgtgcaggcg

SEQ ID NO: 4847 - DNA, 1358 bp, Cricetulus griseus
ggcattctccgaggaagccagccaaggagcaactacagccatgagatttgcagtgatttgcttttgcctctttggcattgcctcctctctcccggtgaaagtggctgattctggcagctccgagcagaagctgcattacagcaaacatacagatgctgtagccacatggctggaaaccgacccatctcagaagcaaaatctcctagccccacagaatgtcgtgtcctctgaagaaacagatgatcttaaacaagaaactctcccaagcaactccaatgaaagccatgaccacatggatgatgacgatgatgacaatgatgacggagaccatgcaaacagccaggattctgtggactctgatgaatctgacgattcccaccattctgatgagtctgatgagtccattactgttactacacaaacagaagtcttcactccagctgtccctacagtagagatccctaacggccgaggtgacagtttggcttatggactgcggtcaaagtctaggaagttccacatttctgatgaccaggatcctgatgctacagatgaggatcttagctcccacatgaagagcaaggagctggttgacaccctcaaggttattccggttgtccatcgtctgaacatgccctctgatcaggacagcactgggaagaccagccatgaatcaagtcagctggatgaaccaagtgtggaaacccacagccatgagcaatcccaggagcacaaacagaaagctagtcatgagagcactgagctgtctgatgtgattgatagcaaggaaagttccaaagcaagccaggaacatcagagccatgaagacaagctagttccagactctaagagtaaggaagacattaaccatctgaaaattcgtatttcccatgaaatagagagttcatcttctgaggtcaattaaaagagaggcaaaaccacagctccttactttgcttttagttaaaaaagaagaagaagaagattagtgagggctaagcaagaatattaactgctcatttcttagtttagtgggtgtatgtatgtggagaagaaaatagataatatttggggctattagcttagtttgttgctccatgaaaacacccttgtaacctaaaagcttcagtactttgcctctgttctttctgtagaagtacaaatggccactgcatcttaatgattgttattactttatgaataagatgtatgtagacacaagcaaaaatacttttacatggataaaagagaatctataacatgtatgtcactacaatcttttgtttttataattagtgtatattttgttgtgattatttttgttgttggtgtgaataaatcttgtatcttgaatgtaa

SEQ ID NO: 4848 - DNA, 1357 bp, Cricetulus griseus
ggcggagaggcgcccgcagcccgcccgggacgctttccagaagccgcgcgactatttcgctgaagtgagaaggccccaggacggcgctttctttaagggacctgcgtatcctgggtaccctttcctgatgattccggacctgagcagcccgtacctctccaatggacccctatctcctggtggagcgcgcacgtacctgcagatgaaatggcccctccttgatgtcccctccagtgctacagtcaaggatacaagatcaccatctccagcacacttgtgagccctgcagtgagtgcaaaatacccagtgaccgtgaaaaggaggaggagaagaagcctcatgtgaaaaagacctctgaatgccttcatgttgtatatgaaggagatgagggccaaggtggtggctgagtgcaccctgaaggaaagtgccgccattaaccaaaatcctgggaagaaaagtggcacaacttgtctagagaagaacaggccaaatactatgagcttgcccggaaagaacggcagcttcacgcacagctctacccaacctggtcagcccgggacaactatggtaagaagaagaagaggaagagggaaaaacagctgtcccagacacagtcacagcagcaaatccaagaggcagagggtattctggcctctaagagcaagaagccatgtattcagtacctgccccctgagaagccctgcgatagccctgcctcttcccatggcagcacgctggactcccctgcaactccctccgcagccttggcatcgccagctgcccctgcagccacccactccgagcaagcccagcccctgtccctcaccaccaaaccggaggcccgagcccagctggctctccattcagctgccttcctgtcagctaaggccacagcaagcaacgccagccagatgggcagccagcccccactcctatccaggcctttgcccctgggctccgtgccctctgccctgctgacctctcccccttccttcccagccaccctccatgcccatcaggccctccccgtgctacaggcccagcctctttccttggtcaccaagtctgcccactaagctgccccctgttctatgcaggcagtctcgggactccaagtagtaatggttcagacgagaggagggggggggaagggaaacattattggtcaatatttgaccactctggactgttctgtaaagtgactggtaacagcagtgctttacaagtgtagatataaccagtagctgatcttcaggacttttattaaaaaaaaaaaaaaaaaaaaaaagcttcacaagaaagcactgaaaagcagtgtgtggcgctctccccacgagctgtggtgggttacctgggc

SEQ ID NO: 4849 - DNA, 1357 bp, Cricetulus griseus
tgaacttggcgggcctgatgcaggcggcggggccatggcaggctgtctctcccgttccgtgcacccgcttcctagcccgctgcaagccgggcttccggccctcctcgagctctgtcgccgacctcatagcagactcccggagctcaggactggaggaagtggcgttgaccgagtgcttgtcgccgcctcctctgagctgcagcaactccaccctgtctctgttgtctccccttggccaccagagctttccttttggcgaagacgacagtgaaggggaggatgaagaggcagtggatgaagaagcccgtgagtcagaggccaaggtggcgagcctggaaggattggagttacaggggcagtccagctgtgaggttgagtcacaggataaacaagaacagaagcaggtgcaattacgggaaagcagcctgacaccatgggagatgtggtttgttggcaaagaaaagaagagcgtggccggctacagcagaaagttctagaggaattaaatcaacaaatagaaaaaagaaagaaatggaagaacgtgaaaaaagaaagataattgctgaagaaaagcacaaggaatgggttcagaagaaaatgaacaggaaaggaaagaacgggaacaaaaaattaataaagaaataggaagaaaaagaagaaagaacattttgcaagaaaaagccaaagcaaaatatcaagaatggttgaagaaaaaaaatgctgaagaatgtgagaaaaagaaaaaagagaaggaaaaagaaaagcaacggcaagcagaattacaagaaaaaaaggaaatagcagaaaaaagtttaaggaatggttggaaaatgcaaaaaataaacctcgtccaactgcaaagagctatggttatgccagtgggaagcttacaggtttttacagtggaaattcctacccagaaccaactttctataatccaattccatggaagccaattcatatgcctcctccaaaagaagctaggagtgggtcaggaaagaaaagtaaacgacctgcaacgagccagtcactcacatcatcgtccctggcagtgcataaagccaagagcagcctttgccttggaactctttgccaaatacagagatagagcatgtggacatagcagacctttcacctggagcttcttaagcttactcagaatgggttttcttaacacttcgcaatcagtaagccaacatttgatgtgacaattgacaggcaccacagttttaatttgtatatggaatccttaggctaaagatagtttttacattttgaatttttataagccgttatgattgatctaatgattgtgttttagtttttattaaaactatagtatcaataaatcaatagt

SEQ ID NO: 4850 - DNA, 1357 bp, Cricetulus griseus
  modified_base (473)..(473): a, c, t, g, unknown or other
gaaaaattattgtagtaaacttttaatatggcaaagcaaccttatgctctattttagccaaaagaaatataatctaaaatatatgcagcttggtggacttgagtaaatgcacaccctttcccaattatatgtacactgagaatgtgcattggtttgagggattaattattttgtttctaccacttaatgaatctcaacactttgagcaatgtacctcagtctaatcagactttttatgacctttataactacatttaaaacccttcaatcctgtttctgggtgtttgtgagcggattgctatcatgaagtaaaaaattattactctaggtactcactagctaaaaaacatagttcttgtttagcaaagcataaactattcctcaactcttcttcagctgttgcagtgtcctggcatccttaaaatactttgaaaatatggccttgatccatgaattaaatcagtatctaagtnaatgtgttgattgttttattgttaattttgtatcttgaagcaaatttgattttgtataattgaatgtgttgtgcatctgtattgagtgatttgatggcataaggttatgaaaataatgtcttgccccttacattactgttttgaaaggagaaagctatgtagaatgatatgttaaaggtgaaaatagcaatacaatagatttgaataccttgatgttttgtattactccatttatgtttacatcgtgtttagagattttttttcatttgctctcctctgctcacttcaacatgaaagccttgtggtggatattcctttgaaactttgatttatgtaattttttgtacaatgttttagaatgtgcaaatattgtattttttattagaatacagtatttgtagataaccatagctatttctcacattacttggtagtcccagtgtagttatgtcagtgtttactgaagggaacatcaaaatattaatggtatgttaaagaatgaaaactttcataaaggaaaattgcacctattttacctttttgagactaagccatgaaatcttgtaacatgtctcttaactatttataatgaaaattggcatttgggtatagtcagcacagcaatgttctatatccctaagattgcacaggtaggacatttcaaaggtgactcatgtcattctggagctcctactagagaaaactgtaaaagggtgaccttttaggaaggggctgagtcctccccctgaggttctctttttcttggtgctttattagcaactctggatatttttataaaactagtgacattataaactaattcagtcttgtttaatttaccttaggtgtaagaaatgtcatcgaaattcccaacgagcaggctg

SEQ ID NO: 4851 - DNA, 1357 bp, Cricetulus griseus
cagcaccaccacactgtcctgccaccccagatgcagcaccagctgcagtatggcagccatggccagcacctcccgccctccaccggcaccttgcccatgcacccctctagctgcagggtgattgatgagctcaacaagacacttgctatgaccatgcagaggctggaaagctctgagcagagagtcccctgttccacttcttaccacagctctggtttgcactcaagtgacggtgtcacaaaagcaggacccatgggccttccggaaataagacaagtgccaactgttgtgattgaatgtgatgacaataaagaaaatgtccttttgcagaagtcacttgctcagagttaggagtgtgcctcacctgctcctaagaggtcacctcttttggggatcagctatttcaaggccatgacaagtggttcctacccaggctcagcagcctccccagctgtaggatggcacttacgctctccttttgaaagccttgggtctttagggagccgtaaccacaccgtttccccactttgttaggataactgaagtgactcggaattgtttctaaaagtgacaattcaacagttaattaggggggaataaggcgagccagatggctgtagccatccctttctggaaaagctgcagttttcaagtgagttcatcttgagcctctcgattcccatctgagcaccgtggggttcaggttagcaagaaaggggaatgggaaatgtgtcaaactggcttttccaaagtcctgatcactttgtccccagatgctctgagagctccgtcaggtttttacaatgtgagcctttcttccagttagagaaaccaaacaacacaatggtccatgtgaggagatgttctgaatttctttttctcctgcttatgaacaatgtgtttgtacttttggaatgagcatcgtggtgtgttgctccgatgaatgggatcccgggctccccctgtgcacagccagtgagcaggggtcaccttccatgacttcttcctccatcagtctctaagcaggttgctttcttccagttgcttcctggtgtctgtacatagttcgtctttgtataggagtgagtgagtgtggtgatcttcgaccccgtgccctccagggttctaatttaatagatgacggctgtatgaggaagatgctgtacatagaataaattaaactggatctctgtggcctaggttttgtacatacagaaactgcatggtatttaaattattgtttctctctgatgatgtatgcagtttactttaaaaaaaaaacaaaaaaaaaaaagtttaaaaaaaaaaaaaacaaaaaaaaaaaaaaaaaaaaaaaaaaaaaaaaaaaaaaaaaaaa

SEQ ID NO: 4852 - DNA, 1357 bp, Cricetulus griseus
  modified_base (699)..(699): a, c, t, g, unknown or other
  modified_base (826)..(826): a, c, t, g, unknown or other
gccgtgggaaggtgccgctccccagtcaccaaacttcagtggtagtgaagactctggttctccaaagcatcagaacagcaccaaggacaggaaggtcatccctctcaaaatgtgctttgctgctagaaacctaagcatgccagatctggagaacagattgatagagctacattcccctgatagcaggaataccttgatcctacgctgcaaagatacggccacagcacactcctggttcgtagctatccacaccaacataatggctctcctcccacaggtattggctgaactcaatgccatgcttggtgcaaccagtacagcaggaggcagcaaggaagtcaagcatattgcctggctggcagaacaggcaaaactagatggtggaagacagcaatggaggcctgttctcatggctgtgaccgagaaggagcatctcttcagggttgaaacgtctaccgggtatttgtcgacctggaccagaatacttgtgggttgtcatgctgctgctgagctggtcaaggaagtctccctaggctgcaccttaagtaggccaagaggtaagattcactgtccactatgaacatgggttcactatctccagagacaatggaggctcgagcagcataattgtaccgctatccttttgaacggctgaagatgtctgctgatgatggcatcagaaatctctatctggattcnggtggtcctgagggagaactgactgtggacctgcattctgtccaaagccaattgtatttgtatgggactgcttgtatgagcagcaagagtcaagaaagagctttgactaagtcatgaaaagtattanacctcaaaaacatggaaaattaaaaaaaaatttagcttttattgagtttatatttggtaggagccagggacggtctaaggtttattttctaaagaaagatcttcattttaagctaagccatttcttattgcttaccaaatgtgcctttggtcagggtcattggagctttatgagtgactgtttagatgactagatctcactgccattctagggataccatagctttgaggagtcaccctggaggttggttccttcgtggcttctttcagtgggatctttgtgggtcgttagtttcatagcacagatgccatgtcaggtgcacagggcactgtgaggccagcaaagatctgggattggacttttatggccccaaagtagtaaggacaagttgccttcagctcatgctttaacattggcttccccgcacaccgagtgggtaggggataagacagaccacggcagtcacctgcttttgtttagtatggccaagtgtcgttatgactcagctttttttttttattttgtctgaac

SEQ ID NO: 4853 - DNA, 1356 bp, Cricetulus griseus
gctgctgcttttcttgctcctggaagcggccgaggggggaagcggcgagtcaacatggagctctcggcggtgggggagcgggtgttcgcggccgaagccctcctgaagaggcgcattcgcaaaggacgcatggaatacctcgtgaaatggaagggctggtcgcagaagtacagcacgtgggagcccgaagaaaatatcctggatgctcgcttgcttgcagcctttgaggaaagggaacgggagatggagctctatggccccaaaaagcgaggacccaagcccaaaacctttcttctcaaggcccaggccaaggcaaaggccaaaacgtatgaattcagaagtgattctgccagaggcatccggatcccttacccaggccgatcaccccaggatttggcatctacttccagggcccgagagggccttcggaacacaaggcctatccccaccggggagcagcaccagtgcctgcaggacagatccacctcgggaggtgccagtcgaatagatgacaagcccagctcaccggggggacagctccaagaagcggggacccaagccccggaaggagctcctggacccttcacagaggcccttgggagagcccagtgatggccttggagaatacctcaaaggcaggaagctggatgacacctcctctgggacaggaaaattcccagcaggccacagcgtgatccagcttgctcgaaggcaggactcagacctggtacaatatggtgtgaccagtcctagctcggcagaggcctcgggcaagttgtctgtggacacctttccagccagggtgatcaaacacagggctgctttcctggaggccaaaggccaaggtgccctggatcctggtggccccagggttcgacatagttcaggtaccccaggctcagtggggagcctgtatcgggacatggggactcaagggggaaggccctccctcatcgccaggatcccagtggccagaatcttgggtgacccagaggaagagtcttggagcccctccttgactaacctggagaaggtggttgtcacagatgtgacctcaaactttttgaccgtcaccattaaggagagtaacacggaccaaggcttctttaaggagaaaagatgaattcctgggggtgggagcccaggaccagaacaggggagagtgagctcaaacgtggcttagtgctttttattctgggtggctgttgccttctggctggtcctgtccttaactttacacccctttcccaagtccctttcattcctcctttctcagttctggttggaaattatctagagttctattttctattagatgtaaatatgttattaagaaaatatctaaatatatatatt

SEQ ID NO: 4854 - DNA, 1356 bp, Cricetulus griseus
gtgcaactgccggggcgtgcacagtctgagacccacggccacaagggaggctcgagcgcgggcggcccagccccctccacgatgtccaaggccgaggaggctaagaagctggcgagccacacggcggtggagaaccacgtgaagaataaccaagtgctgggaattggaagtggttctacaattgtccatgctgttcagcgaatagctgaaagagtgaagcaagagaatctggacctcatctgcatccccacatctttccaggccaggcagcttatcttgcagtatggcttaaccctcagcgacctggatcaacacccagagattgaccttgccattgatggtgctgatgaagtggatgccgagctcaatctcattaagggcggtggaggctgcctgacccaggagaagattgtggctggttatgccagtcgcttcattgtgatcgcggatttcaggaaagattcaaagaaccttggagatcggtggcacaaggggatccctattgaggtcatcccaatggcttatgtcccagtaagccgagctgtgacccagaagtttgggggcgaggtagaacttcgaatggctgtcaacaaggcagggcctgtggtgacagataatgggaattttatcctggactggaagtttgaccgggtgcacaagtggagtgaagtgaacacagctatcaaaatgactccaggtgtggtggacaccggcctgttcatcaacatggcagagagagtctactttgggatgcaggatggctcagtgaatgtgagggagaagcccttctgaccctgtgaggagcagggcgtacaccttgaatctcctccagtccaggcgcagcggacatgcctctccagcagcctttgccttaatgtaccttaatgtagctgtccacagtgccagagtggacagctggccacgggtgggtgggtgagggggtggtcaaatccagtcttatgaagtattgctatgtgtctttttaaaaagaaatttaaatatatatttttactattaaaatattcagtttttttataaaatagaacttgattttatgttttatatgaaacatttaccaaaaacaaaaaaaatgtataaataaaaacaggaggtcaggattgtctctgaatgctttgactcgacctgtcggttaagcttctgaggtttagatttgctgagaaataactgagatgtgaagcacttactttttgtttgttgaatgactttcttttgttttttgttttgttctctaataatacttgtatgatttggcatcagaagctgtcacttcttttgtgctgtttgaaggttgaaataaacattattgtgccattttaaaaaaaaaataaaaaaaaa

SEQ ID NO: 4855 - DNA, 1356 bp, Cricetulus griseus
tgtgctcacggcacgtgccgcagtgtgggcaccagctacaagtgcctctgtgatccaggttaccatggcctctactgcgaggaagaatacaatgagtgcctgtctgctccttgcctgaatgctgccacctgcagggacctcgtcaatggctatgagtgtgtgtgcctggcagaatacaaagggacacactgtgaactgtataaggacccctgtgctaacatgagctgtctgaatggcggtacctgcgacagtgaaggcctgaatggcacatgcatctgtgcaccagggtttacaggtgaagaatgtgacattgacatcaatgaatgtgacagtaacccttgtcatcatgctggaacctgcttggaccagcccaatggttatacctgccactgccctcatggctgggtgggggcaaactgtgagatccaccttctgccgcatcagccgcattgagtaccagggctcctcccggccagcctacgaggaattttacaactgccgcagcattgacagcgagttcagcaatgccatcgcgtccatccggcatgccaggtttgggaagaaatctcggcctgcaatgtacgatgtgactcccattgcctacgaggattacagccctgatgacaagcccttggtcaccctgattaaaacaaaagatttgtaatcttcatttttttggattatttttcaaaaaagatgagatactaagatcatttaaatatttttaagaaaattaaaaagcttaagaaatttaaaaatgttagctgctcacgagttttcagtagactaccgaggaactaagtttctgcagcttttagttggaaaaaaaagtattttaaaaaaaaaccagaatttgtgaaatccctagactatgttttaatgtaccttcagctctcaacactgtctgctttgacaaggatgggctcttttgacagtagaccctaacaagaaacccagatggacttctgtggttgtgacagagttaggtcttgcataggaagtaatttcttttgacgtgtgagtgccggctttccggagttagagttaggaaaataagtagtgtatgatgcgtaattcagtataaccgttacttaatacgatgtgatgtctgagatgtttgttttgtgaaaaagaaaactagttacatttattattcctaacccgaatgaaattagcctctgccttattctgtgcatgggtaagtaacttattttctgcactgttctgttgaactctgaggaaatgttgttctttcgagtttgttttagtcatttttgtatccatccttgaacttgaccttgtaaacacaaacaagggaagggtctagggaggcgaacactgatcagcttcaaccta

SEQ ID NO: 4856 - DNA, 1356 bp, Cricetulus griseus
tcgcgcagcgccgcgggcaaggcgggcaagtcggcgaggcgggcgcccacggcttcccgacacactcaggcggccagctccctcgcgtcgcccggcactgccccggccccctcggcctccggcggcgaggcggggagtgaggagcgacccagagggacagcagcactatgtcccacacggtcgcgggcgtcggcggcggggaccattcccaccaagtccgggtgaaagcctactaccgcgggatatattattattttattatttagtatacagaaaataattttatcttctaagtagaataactactttttgattccttcccccaaagtgtcatttttttgttatttttaattgcagtctgcagtgaaattcaagaacaatagtaaatgtacatgagtgactatataacacatgtattcatatagtagttctaactcctactaagtgttcatgtcttaggtaacaaatgaaatacataagagaatgcatttcaggggcagagttcttcagttctccgaaatatttttattaatattagtatttagcaacattttatttaaagacgtatcattttagcatcattttgctgtttattttaaatatttttatataaagaactttaagcatctaaataaactacagttgtcaaatcagtgaaatttaattttagggatgctatctagtgttgagcatataatgatttaaaacatgtagacatttaaaaattatcttttgggggatgctgcatttcattagaagtgtaagttttcccaagtttgtgtcatgtattttcctctttggggaactttgtatttcattttgagaaacgttttctttaagttattctttttgtgtgtgtgaccatctttcttgttggagggtgagtctgctttttgtggtgaaacagtttaagaaggggtaatcagtgaattatcatgcacatttgccaaacaaatttaaatgaataaattcaagttacatatcttccctacccgcacccccaactaaaaccttaattttcttgccaatactgtacaaatgatgaacagtttcctatgaggagcttttagccattattaatggtggtctttgtttttaaatctttttttgagtgattggcatttggtgtcttagaaatcatttattttgcataagcagagtggtcagatcgttttgtcacgtgcagctggactggatgtctagttccatgtgtcctcagtgccggtacatttagtttagaaatttgttttaatttttgtcgtgtagaatacttccttgttcactgtaatgtaatctgttatttgtataaattttttacatttaaaaatctttaaaataaaaatgtttaaataacta

SEQ ID NO: 4857 - DNA, 1355 bp, Cricetulus griseus
gctcgcgttcgtgggactgtgcggcgcgggacagggccggccacctgtgcgctccgtcagcctcgccgcggtggcccccaaagcaccccagccatgaagcccaacttctctctccggctgagggttttcaacctcaactgctgggacattccctacctgagcaagcatagggccgaccgcttgaagcgcttgggagactttcttaatttggaaagcttcgacctggctttactgcaggaggtgtggagtgagcaggacttccagtacctaaggcaaaaactatcgctcacctacccagatgcacactacttcagaagcggaatcatcggcagcggcctctgtgtgttctccagacatccaatccaggaaattatccagcatgtctacactctcaatggctacccctacatggtctatcatggagactggttctgtgggaaggctgtggggctgctggtgctccatctgaatggactggtgctcaatgcctacgtgacccatctacatgctgagtacagtcgacagaaggacatctaccgagcacaccgtgtggtccaagcttgggaactggcccagttcatccaccacacgtccaagagtgcagatgtggttctgttgtgtggggacctcaacatgcatcccaaagacctgggctgctgcctgctgaaagagtggacggggctccgggatgcctatgtggagactcaggactttaagggctctgaagatggctgtaccatggtacccaagaactgctatgtcagccagcaggacctgggtccatttccacttggcatccgcattgactatgtgctttacaaggcagtttctgggttctacatctactgtaagactctgaaaaccactacaggttgtgacccccacaatggcacccccctctctgatcatgaggccctcatggccactttgtatgtgaagcacagcccccctcaggaagacccctgtcctgcccctggaccagctgaacggtcagccctgaccagtgtgctaagggaggcgtggacagagctggggctaggcatagctcaagctcgctggtgggcttcgttcactggctatgtgattgtcttagggctgttcctcctggtgtcactatgtgtcctggctgcagaagaaggggccagggaagtggccatactgctctggacacccaatgtggggctggtgctgggggcaggtgcagtttacatcttccacatgcaggaggccaaaggcctgtgtcgggcccagactgaactccagcatgttctgagaagggaaaggaaacccagggcctagactcagagcctcacccagccccgctgctgacagcaggaggtgggcagagctgaaga

SEQ ID NO: 4858 - DNA, 1355 bp, Cricetulus griseus
gtgtgaccactggaagcctgctggggaccttttcacagcagccatgaacatgatcctgcccgacttcaagaggccagcctgctttggcacctacattgtttgctacttcagtggcatcagtagcgagaacgacgtccctgacctcttcaacatcacctccaggtacccactcatggacaaatttgaagaggtttacttccggatccaggacctggagatgtttgaacctggccggatgcaccatgtcaaagagctcaccgggggaaattacctgcagaaccctagtggtcggcagctcaaggaggctgtggttaggttccaggagtggcaaaccaagcaccctgattggtttgagcgggagaacctctgcttagcaggtgaccaagatctcccatccctggatgaagaagtgtttgaagacccactgttgccaccagggggaagaattgtcaaacaacagcccctgatgcaggagccttctgagggctgcctggtggtaaatgtctgtgtcagtgaggaagaaagtggagcagcaaagcttgatctgcagctgccgccacagagagaacgagtgcctcagaccctccaaaccatggtgctaccaacagaacaagtgcctgcagctcacgtggtggacgcctgtccctcttcccgatggcaaatggagcctgcctacccagctgaccctggcaggatgcaagagagcagctggagagcctgatgctctcggtgctgcagcagagtctgagtggacaggcccaggagagctgggcgaggcccgcggtggtcctcaaggacccctgcacgcccactgaggaggagcagcggcagtcagtgcagtcagaccagggctacatctccagaagctcccctcagccccctgactggctcacagaggaggaagagctagaagtgggcgaggcagctgagcctctgtctcctgaggccctgcagaacctgaggagcctccagcggcagctcttcttctgggagctggagaagaaccctggctgggacagcttggagccacagagaccagccacagaagagcaggctccctcctagggcctcccgatgctgtacctaaaggatgtgtgttgtgctggtgtgtgtatgtgtgtgtgtgtgtgtgtgtgtgtgtgtgtgcgtgtgtgtgtgtgtgtgtgtgtgtgtgtgtgtgtagtgcctgccttagaaatgtggctctctaagtctgacagagtggtgtataccccaagtcccagcacttgggcctgagacctgatgatctcctgaacccaggggttcgggccagtgtgggcaacatagcaagaactcaaaaaaaaataatgtggacattttgattctgataccta

SEQ ID NO: 4859 - DNA, 1355 bp, Cricetulus griseus
  modified_base (1069)..(1069): a, c, t, g, unknown or other
ccacctcagaacttctcaatgtctgtcacagtccctgtgacaagccctaatgctttgtcgtacactaacccagggagttcacttgtgtcaccatctttggcagccagctcaacattagcagattcaagcatgctatctccacccccagccacattacatagaaatgtgtcccctggagctccgcagagaccaccaagtactggcaatgcaagtgggatgttgagcactacagatctcgcagtgccaaatggagctggaaatagtccagtggggaatggatttgtaaactcaagggcctctccaaatttgattggaaatactggtgcaaatagtttaggcaaaattatgcctacaaagtctccccctccacccggtggtggcaatcttggaatgaatagtcggaaaccagatctacgagttgtcattcccccttcaagcaaaggcatgatgcccccacttcaacagcagcagcagcagccaccaccaccaccaccgcagcctccacagcccaaccccggcaggaaatggggcgctcccctgtggacagtctgagcagctctagcagctcctacgatggcagtgaccgggaggatccacggggtgacttccattctcccattgtgcttggccgacccccaaataccgaggacagagaaagcccttctgtaaaacgcatgaggatggacacatgggtgacctaaggcttcctggttcatatttgttctttgttactgcagtgaactgccctacatatccatacatatatacttccctttacatatatatgtatgtggtgtgagtgtgtgtatgtgtgggtgtgtgttgcatacacagaatcaggcacttactgcaaactccttgtaggtctgcagatgtgtgtccacatggcagacaaagcaccctgtaggcacagaccagtctggcacttccttggactacttgtttcgtaagataaacagtttttgcagagaaacgtgtacccatatataattcttccacattagcctgcagaaacctagggggccccctatttgttttatttaactgtgcggtgactgtagttacttcngaaaaaaaaaaaaaatagctttgtagaacagagcagtagaaaagcaggaaccaagaaagcaatactgtacataaaatgtcatttatattaataacccaacctggcatgggtctattgcaaaggggtgcatgggaaagggctgttgatattaaacaaacaaacaataaacaaaagccccacacataactgttttgcacgtgcaaaaaaatgtattgggtcaaagaagtgatctttagctaataaaaagagagaatagaaaacacgcatgaaatattcagaaatacta

SEQ ID NO: 4860 - DNA, 1355 bp, Cricetulus griseus
gtttgtgctctctgcgtagctgagaagtttttcacctactagtaccgggctggggtaagggaaacaggtgcccttcaaaaatagagtgcgaactgcagcctgcgtcctactgcagccccggaacaacgtcaggtgagaatgaccacattaactcaccgtacccgtcgaactgaagtcagtaagagctctgaaaagaaagtagaaagtgaggaagacactaatcaagaaaggagtccagataatgaagaccctggagactctaaggatatccgactcactcttatggaagaagtattgctcctgggactaaaagataaagagggctacacatctttctggaatgattgtatatcctctgggcttcgaggaggcatcctgatagagctggccatgcggggtcgaatctatctggaacctcccaccatgcgtaagagcgactcctagacagaaaggtcctgctaaagtcagacagcccaacaggtgatgttttgcaaccaaggacctagtagaactggaccctgaagtagaagggacaaagcacaatgccacagagatgatctgggctgtgctggcagccttcaacaaatcctaaagctagcaggcgggttcctcctttcccctgcaggctggtgactgtcagagaccccatcactgagttttgtctaatgagatattgtcatctattttttcctctttttttgaatcagactcataacttgggaaggacaacctcagggcctcttcatgggccatgaccattctaagcagactatttctcctcatacttccattccatacccgaatgaaaaggggttagcccatgcacattcaataagcatctcctgtttctactggggagaaacaagctgccagacagccaatagagatgacttgaactcataccaaatcctgctcatcaaaagtaaattgctctaactttatccactcccctgaacctacctagatccatggacactctccaattcatcattattgttttcatttcatatgtctcttagataagttgtaatttgagaagcaagtagagccttagcctggctctctagaagtacaaaagccagcccatgtgctatctagcggcttagcttgtcttcccattggaaaaattcggcatgaattgaaaccaggttttcctgtggaaagcttcgctcgattaggggaatagaagttgagttctttcttgcaactctcagtgtttatttttatatgtccataaaatgaggatgtcttcacttcaaatctgtgtaatgttcactgccaaacactcatttagtgtataattgctgtcacatttctgtacaataaagatcagtagttgtgcaaaaaaaaaaaaa

SEQ ID NO: 4861 - DNA, 1355 bp, Cricetulus griseus
ggtgtggcccggggtcgctggtcacgcgtcgggggtgcggcctgctcccggccgaggtggtccccgccgccgctgcagagtcgcctggagcttcgcgggcaactgggaagatgctgggcccaagtgtcctcacctgggtcctcttggccgcgggtgtcacctgcgcccaggcacagcaagtgccaccgtggacagaagattgcagaaaatcaacttatcctccttctggaccaacctatagaggagcagttccatggtacaccataaaccttgatttaccaccctacaaaagatggcatgaagtagtaactcagaaggcaccaatggtgaggattatagtgaattccctcaagaatttagtaaacgcatttgtgccaagtggaaaaataatgcaggtggtggaccaaaagttgcctggtctaattggcaagattcctggcccctttgaagaggaaatgaagggaattgcagatgttactgggatacctttaggagagattatttcattcaacattttctatgaattgtttaccatgtgtacatcaataataaccgaagataatgaaggtcatttactacatggaagaaacatggattttggaatatttcttgggtggaatataaataacaacacttgggttgttacagaagaattaaagtctttaacagtgaatttggacttccaaagaaacaacaagactgttttcaaggctacaagcttcgttggatatgtgggcatgttgacagggttcaaaccaggactgtttagtcttacactaaatgaacgtttcagtctaaatggcggttatttgggtatcctagaatggattttgggaaagaaagatgctgaatgggtcgggtttatcactagatcagttctggaaaatagtacaagttatgacgaagccaagaatacactaatcaagaccaagctaatggccccagcatattttatcctgggaggcaacaagtctggggaaggctgtgtgattacgagagaaagaagagagtctttggatgtatttgaactcgatcctaagcatgacagatggtatgtggtacaaaccaattatgaccggtggaaaaacaccttgttccttgatgaccgcagaacacctgccaagatgtgtctaaatcgcacgacacagaagaatctctcgtttgcaaccatatatgacgtcctatcaacaaagcctgtcctcaacaagctgactgtattcacaaccttgattgatgtcaccaaaggtcaatttgaaagttaccttcgggattgcccagacccttgcataggctggtgagcacacaacagtattttttttgaaaagaattaaaagtgttctctttttcctaattat

SEQ ID NO: 4862 - DNA, 1355 bp, Cricetulus griseus
  modified_base (221)..(221): a, c, t, g, unknown or other
gctctgccaggccagaggaacccaagttggatctgagaccagacaccacccagtgtggatgtggccctgctgcactcacatggagactctgtgggacctggaataggcccctatactcagccaaacttggctcccagtgaggccccagggcaactgggtgagaagcaggttccatcttcaacctcggatgatcgggtaaaagcgagttcagtgacctttcngagggagacttcctgagtgaagatgagaatgataagaagcaaaacccacagtcctcggatgagtcctttgagccttacccagaaaagaaggtctctggtaagaagagcgaaagcaaagaagccagggctgcacagctgtataccgcggggctgatggcatgaagaaacacattaaggagcatcatgaggaggtccgggagagaccctgcccacatcctggctgcaacaaggtattcatgatcgaccgatacctgcagcgacatgtgaagctcatccacacagaggtacgcaattacatctgtgacgaatgtgggcagaccttcaagcagcggaagcaccttcttgtccaccagatgcgtcactcgggagccaagccactgcagtgtgagatctgtgggttccagtgcaggcaacgagcatccctcaagtatcacatgaccaaacacaaagcagagactgagctggacttcgcctgtgaccagtgtggccgtcggtttgaaaaggcccacaacctcaacgtgcatatgtccatggtacatcctctgacccagacccaggacaaagtcctgcccttggaagcagagcccccacctgggcccctgagcctttctgggaccatggagggccaagctgtgaagcctgagcctacctgagaacttcaggtggagcactgggcatcttgagctgcttgaactcagcaggtgtgacgtgaggtttaaagacattaatgttcctcacttccccactggcatggtttgcttgcccgttgggcccattgctgcactccaccccacatacccagcagccatgtgtcggagggcacctctctcagggcgagggtgtgtacttcaacctgctgtggtaccagcagtttattttcctatggacactgagcaatttaaggctagaaacaaattatgaataataatttttttcctaactagagcaatcaagagatttgtaatctactttctagtgtaacaagaactccatgtaatgcttgcaataaattattcacaaaggtgccagctggtgcactgagatgggtacagtcagaacagatgaggctcctgggagagatcaaagctggggacagcctgccgcctctgcaggagggcgttgctcatctcaggg

SEQ ID NO: 4863 - DNA, 1355 bp, Cricetulus griseus
gcctgagatgtggtcatgccagccaggcttctccaaaccctggcctctttatcgagtgcatcattaaaggcataccaatgcaagagacttgctcggcttccactaaagccacttacggaatctgaaagtacagcatgccgaaagagcctgaaaatacagcaatgtttagactcattctttcctcaaataacagctgacagcttgaataatccaaagatcctggaaatgagccggataatatcaaatgaaagcagacccttttcattaaacgctgtccactgttgggatggaaaagcttgcctgccaaccatgcacccctttgggactcccaggaaagtggcccacaaaccaaatctcttatgtgctaagtggtttataaaaacagtaaaaaggcatcattctgtatccactgaaacacttgtcccaaaaccaagaccttccacagatcaagaggcccctgaaggcatccaggacccgccagccctccaggaccaaccttccagagctgtctgtgaatgaggacctgatgcagtgcacagcatttgcaactgcagatgagtatcacctgggaagtctgtctcaagagctggtctcctgtggatatgtggaagtgacaagcctgcctagagatgcagccaatgttttggtgatgggtgtggagaacactgcaaaagaggtgatcctggaatgatattcttgttcagggaaggagctactgtgttctggaacgtaagagacaaaactgtgaagcacgtgatgcaagttctggagagacacgaaacccagccctatgaagtggctctggtttactgggagaacgaagagctgaactacatgaaaatagagggacaatctaaactgcacagaggggaaatcaagttaaactcagagctggacttagatgacgctatactagaaaaatttgctttctccaatgctctctgcctctcagtgaaactggctatttgggaagcaacgctggacaaattcattgagtctattcagtcaattccagaggcattaaaagctgggaagaaagtcaagctgtctcataaagaagttatgcagaaaatgggtgagctctttgccctcaggcaccgtataaatttgagttcagatttcttgctgactcccgacttctactgggacagagcaaacctggaggagctttatgacaagacctgccaatttctcagcattgctcgaagagttaaggtcatgaatgaaaagcttcaacattgcatggaactaacagacctaatgcggaaccacctgaatgagaaccgggccctccgcctggagtggatgattgtgatcctcatcaccatcgaggtgatgtttgagctgggaagagt

SEQ ID NO: 4864 - DNA, 1355 bp, Cricetulus griseus
gaaaactccaagcctggtcgggtcttgagctccactctgcactgcagcccctgacgtgcgtgagcacttgcccatccagcttggacgctcttcaccgtcaccacagctgtcagaatggccaaccggggacctgcatacggcctgagccgagaggtgcaacagaagattgagaagcaatacgatggggacctggagcagatcctgatccaatggattaccacgcagtgccgcaagcctgtggaccggccccagcctgggcgtgagaacttccataactggctcaaagatggcacggtgctgtgtgagctcatcaattcactataccctgaggggcaggccccagttaagaagatccaggcctccacaatggccttcaagcagatggagcagatctctcagttcctgcaggctgctgagcgctatggcattaacaccactgacatcttccaaactgtggatctctgggaagcaaagaacatggcttgtgtgcagcggacactaatgaacctgggtgggctggcagtagccaggaatgatgggctcttctctggggatcccaactggtttcctaagaagtccaaggagaacccccggaacttctcagacaaccagttgcaagaaggcaagaatgtgattgggctacagatgggcaccaaccgtggagcatctcaggcaggcatgactggctatgggatgccacgccagatcctctgatcagacatcccccccatcctgcccctgccctccatgaatggttaatatatatgtatatatatgttttagcagtgacattccctgagagcccctggatctctaagctcccctctgccagggtggggtccaagctatcttgtcacctctggcagtgcccgatgattctctctctctctctctctttctctctctctctctctgggcttactaatacattccttcaacacagccatcaaaactggaccaactttcccctgggaccaaagccttcttcccccagcatgcttctcttttcctaagctctgtgcttttcagtccattccttggctagaagtcagagatgctgccctgtggccccgtgccgcactgaccctcctacaagtatgcctctcttacagctgtggctgtagggacttaatttatagggcgggacctgtggctgtcgctccagccacagctgggctgtacttagcacacatctgggcagctttccccagcagaggcccttttggcttcttattttccattcctctcactgtggctaaggggtggagacagaggtgggagagctgcccaccatggtctggggcttgaggaacatgagtttgctgattttcaataaagaatctcattcttttttg

SEQ ID NO: 4865 - DNA, 1354 bp, Cricetulus griseus
  modified_base (172)..(172): a, c, t, g, unknown or other
ctcttgttgaaaccggaaaatgtgaaggtgttaggaggtgaggtagatggtctttcagaagaatatgctcaggaaaaagtacttggaagattaattggtgaacttgatcctacagtttcagttgtaccaaataattctgatcacagtatgtccagagtttcaggggggttanatcctgctttaggaccttcagatgaagagctgttggcaagtctttatgaaagtgaagagcctgcagcaaataatgatgcatccacaggtggaagctgtttcagcacaggcagttccttaaatactacttccacaggtcagtctgaatttgagccaggatatagtatttcttcaaggcaaaaggagaaaccaaaccaatctgtgcatttcactgatggagagtttgatgacttttcactggaagaggccttgcttttagaagaaactgtccagaaagaacagatggaaacaaaagcattgcagccaccaactttgaagaaaaacacagataaacgtggagagatattttcacataaacctaatactcagaaccacactgctttgattcgtaaacaaggaaacagcaattgcaatgaaaaaaaattatctgagcaaataattcatgaagacaaaatttttggctgtccatctgctagagactctcataagacagtcctagcccatgactttacaaatgacagtaagactttgggagtagataatacaaaaaacaaaacatcaacagttcaggtgaacaatgcttaagtaataaaatgttaaagagaaaatcatttgagaataatactgatctttctgtttgcatggacttacattctccaccctttatctatttggctgttctaatggccagaaagccaaaggaagttaccactgtgaaagtcaaagcctttattgtcacattaactgggaatctctcaagctctggtggctgttggggtgtaactgcaaaggtttctgatggcaccgcatatctagatgtagattttatagatgagatacttaccagtatgatagggttttcagtaccagaaatgaaacagttaaaaaaggaccctcttaaatatcaaaacttcctaaaagggttacaaaaatgtcagcgagatctgatagatttgtgttgcctaatgactatttcatttaatccttcttcatgtaaagccatggtacttgaattacaagatgtcagtatggagcaccttgagaacctaaagaagcggctgaaaaaataatttgccaaaatagtattggagtacaccttaaaacgtgcaaaatatttgtaatcaaatttgtcatattcttattttggaattctataaaagaagaaaaagcttcagagcttaaa

SEQ ID NO: 4866 - DNA, 1354 bp, Cricetulus griseus
agtagaggacatgggcaagatggcgacgctggccggcgtgctgcggggaccctggcggcaggtgtctggacttgtgaagcggcgttttcaccgctcggcgcccgcggcactgcagttgacagttcgagaagctattaatcaaggtatggatgaagaactagaaagagatgaaaaggtatttctgcttggtgaagaagttgcccagtatgatggtgcatataaggttagcagaggcctatggaaaaaatacggtgacaagaggatcatagatactcccatatcagagatgggctttgctggaattgctgttggtgcagctatggctgggttgcggcctatctgtgaatttatgaccttcaacttctctatgcaagccattgaccaggttataaactcagctgctaagacttactacatgtctgctggcctccagcctgtgcccatagtattcagggggcccaatggtgcctcagcaggtgtagctgctcagcactcacaatgctttgctgcatggtatgggcactgcccaggtttaaaagtggtcagcccctggaattccgaggatgcaaaaggacttattaaatcggccattcgtgatgataatccagtggtgatgctagagaatgaactaatgtatggagttgcatttgaacttcctacagaagctcagtcaaaagattttctgattcctataggaaaagccaaaattgaaaggcaagggacacacatcactgtagttgcccattcaagaccagtgggccactgcctagaagctgcagcggtactgtctaaggagggaattgaatgtgaggtgataaatttgcgtactatcagaccaatggacattgaagccatagaagccagtgtcatgaagacaaatcaccttgtaactgtggaaggaggctggccacagtttggagtgggagctgagatttgtgccagaatcatggaaggccctgcattcaatttccttgatgctcctgctgttcgtgtcactggtgctgatgtccctatgccttatgcaaagatcctagaagacaactccatacctcaggtcaaagacatcatatttgcagtaaagaagacactgaatgtctaatttggactttgaatatcaagtcattgaaatttatttaaaatacttattgggacttcatctgatgtgtactgagaaactttcctagttataaagtcaatgctaaagcagcagcaggtgtctctgtactgataagaagcttaaatatgcttatgagtggaaaactccactccctgccctagatatgtttaaaaagtatattatctacatttgctttaagttgttttgataaggaataaaggggatttctacctatga

SEQ ID NO: 4867 - DNA, 1354 bp, Cricetulus griseus
ggagacggtgggacgactatgaggaggtggagctgacagagaacagcgtgaacctgggccctgaacgcgttgggccccactgctttgagcttctgagtgtgctgggcaaggggggctatggcaaggtgttccaggtgagaaaagtgcaaggcaccaacctgggcaaaatatatgcaatgaaagtcttaagaaaggctaagattgtacgcaatgccaaggacacagcacacacccgggctgagcggaacattctagaatctgtgaagcatcccttcattgtggaattggcctatgctttccagacatgtggcaaactctacctcatcctggagtgcctcagtggcggggagctcttcacacatcttgagcgagaaggcatcttcttggaagacacagcatgcttctatctggctgagatcacactggccctgggccatctccattcccaaggcatcatctaccgggatctcaagcctgagaacatcatgctcaacagccagggccacatcaaactgacagactttggactctgtaaagagtccatccatgagggagctgtcacccacaccttctgtggcaccattgaatacatggccccagagattttagtgcgcagtggccacaaccgggcagtggactggtggagcctgggagccctgatgtacgacatgctcactggatcgccgcccttcaccgcagaaaaccgaaagaaaactatggataaaatcatgaaagggaagctggtgctgcccccctacctcaccccggatgctcgggaccttgccaaaaagtttctgaagcggaatcccattcaacgaattgggggtggcccaggagacgctgctgaggtgcagaggcaccctttcttccggcacatcaactgggatgacctcttggcccgacgtgtggaccctcccttcaggccgagtctgcaatcagaagaggacgtgagccagtttgatactcgcttcacacggcagacgccagtagatagtccagacgacacagccctcagtgagagtgccaaccaagccttcctgggcttcacatacgtggcaccttctgtcctggacagcattaaggagggcttctctttccagcccaagctgcgttcccccaggcgccttaacagcagtccccgtacccccatcagccccctcaagttctctccttttgaggggttccggcccatccctggtccaccagagcccatggagccatctctacctccactcctgccaccaccatcatcaccaccacccacaagcactgcccctcttcccatccgtgccccctcagggaccaagaaatccaagaagggccgagggcgcccaaggcgctaagagaatagagg

SEQ ID NO: 4868 - DNA, 1354 bp, Cricetulus griseus
cgcgttaaatgaactggtaggtgggagacaccagtggaaaactgtctgtgtataagaatgatgacagccggccctggctcacctgctcctgccagggaatgttgacttgcgttggggttggagatgtgtgtaacaaaggaaagaacctggtggtggcagtcagcgcagagggctggcttcacttattcgacctgacatccaccaaagctctggatgcttctgggcaccatgagactcttggagaggaacagcgtcctgtcttcaagcagcacatcccagctaacaccaaggtcatgctgatcagcgacattgatggagacgggtgttacgagctggtggtaggatacacagaccgtgtggtacgggcattccgctgggaagagatggctgaggcgcctgaacacctgacagggcagctggtgtctctcaagaagtggatgctggaaggtcaggtagacagtctctctgtgaccccggggcctctgggtgtgcctgagctggttgtgtcgcagccaggatgtgcttatgcagttctactatgtacctggaacaaggacacgggctcccctcctgcctctgaggaggccacaggagacagtagggagaccccagctgcccgggacatagtgctgcaccagacatctggccggatccacaacaagaacgtttccactcacctaattggcaacatcaagcaaggccataaccctgaaactggtaactcgggcctctttgcactgtgcaccctagatgggactctgaagctgatgcaggaagcagataagctgttgtggtctgtacaggtggatcaccagctctttgccttggagaagctggatgtcacgggcaatgggcttgaggaggtggtagcatgtgcctgggatggacagacgtatatcattgatcacaaccgcaccgtggtcccgcttccaagtggatgaaaatatccgagccttctgtgcaggccagtatgcctgcaaagagggccgcaacagcccctgcctggtgtatgtcactttcaaccagaagatctatgtgtactgggatgttgtgctggagcgcatggcgtccactaacctgctgaagctgctggaggctgagcctgagtaccaacaagcctcctgcaggagctgcatgtagatcccgaggatctccctgcagtccgtgccctgcttcaccagacactctaccatccggaccagacaccacagtgtcgccccctccagcctcccacggacccccacctagctgggcttggccacctagcctgctgaaggatcctactcgaaccccccaccctccccccagagtgatccatgatcttggcaggatggggaatgtctattacagagga

SEQ ID NO: 4869 - DNA, 1354 bp, Cricetulus griseus
  modified_base (1324)..(1324): a, c, t, g, unknown or other
  modified_base (1331)..(1331): a, c, t, g, unknown or other
ctgtgagctagatcgtttgcttcaggaacttaatgccacccagtttaacatcacagatgagataatgtctcagttcccatctagtaagatggctgaaggggaagagaaggaggaccaaactgaagacaagaacacacccactgttcctcccagcacattccctgtgccctccaagccttcagccacctcagccactctcgagttggatagactgatggcatcactctctgactttcgtgtccagaaccaccttccagcctcagggccatctcagcccccagtggcgagctccacccaagaggggtgcccttctccaccaggacagacgagcaagggcagtctggacaccatgctggggctgctgcaatccgacctcagtcgccgtggtgttcccactcaggccaaaggcctctgtggctcctgcaataaacctattgctgggcaagtggtaacggctctgggcaaagcctggcaccctgagcacttcctttgcagcggatgttccacaaccctgggaggcagcagtttcttcgagaaggatggggctcccttttgccccgagtgctacttcgagcgcttctccccacgttgtggcttctgcaaccaacccatccgacataaaatggttactgccttgggcacccactggcacccagaacatttctgctgcgtcagctgtggggagccctttggagaagagggtttccacgagcgggagggccgcccctactgccggagggacttcctgcagctgttcgccccacgctgccagggctgccaaggccccattttggataactacatctccgcactcagcgcgctctggcacccagactgcttcgtctgcagggaatgtctcgcgcccttctccggaggcagcttttttgagcacgaggggcgcccgctgtgtgagaaccatttccatgcccagcgtggttcgctgtgtgccacgtgtggcctcccagtgactggccgctgtgtgtctgctctgggccgtcgcttccacccggatcacttcacctgcaccttctgcctgcgcccactcacaaaaggctccttccaggagcgtgccggcaagccttactgccagccttgcttcctgaagctcttcggctgacatcctggtgggatcaccatctccaaaacgaagtctccgaagacccatttgtgaaaaaggctgagtcctccagatccctagctctggagctacccagacatcccttgtccctacccccactcccatccctgttgtggcccagccactggagagacctacccctaaggtaccctaggtttgtcaagttcagaaagggacccaacactntaaaaanaaaaaaaaaaaaaaaaaaaaaaa

SEQ ID NO: 4870 - DNA, 1354 bp, Cricetulus griseus
tgcttcctgcaaaggcatccccagcatcagagagcccaaaggtaatggaggagaagaacaatgttggagagaaagctgaaccaatggccagtttgaatgctaatcctccaagcagtgacttagtagccctggcccctaccccatcagcaccacctcctactctagccttgatgtccagacagatgggtgactcaaaacccccacaggccattgtgaagccacagatcctcacacacatcattgaaggctttgttatccaggagggagcagagcctttcccggtgggatgttctcagttattgaaggaatctgagaagccactgcaggctggccttccgacagggctgaatgagagtcagtcaggtggcccactgggcggagacagcccctctgtagagttagataagaaagcaaatctcctaaagtgtgagtactgtgggaagtacgccccagaagagcagtttcgaggctctaagaggttttgctccatgacatgtgcaaagaggtacaatgtgagctgtagccaccagttccgcttgaagaggaaaaaatgaaagagtttcaggaagccagttatgcccgtgttcggaggcgtggagcccgtcgcagctcttctgacattgctcgtgccaagatccagggcaagcgccatcggggccaagaggactctagccgaggctcggataattccagttatgatgaagcactctccccaacatctcctgggccactgtcagtaagatctggacatggagaacgtgacctaggaaacaccatcacagctccacccacaccagaattacatggcatcaatcctgtgttcctgtccagtaatcccagccgatggagtgtagaggaggtctacgagttcattgcttctttgcaaggctgccaagagattgctgaagagtttcgttcccaggagattgatggacaggcccttttattacttaaagaagaacatcttatgagtgccatgaacataaaattaggtcctgccctcaagatctgtgccaagatcaatgtcctcaaggagacctaatgtggctgtctgcacagatcagcctaagtctcattgtagctgtagctcagttttctgttatcattttctacccttagtactgaatatttcttcctgcatccatggcagggtcaccagccagtgtagacacttggttggtatctgatttgctgcagggactaaaggtgtttgacacacgtgtggctgttgtcattatttctgcatctccgctcccttctgatttgttatcttcaacccttttttctgtcccaactctgctctttcctatagctttacaaaacaggagtgtgtggggctaaggtcaggattgta

SEQ ID NO: 4871 - DNA, 1354 bp, Cricetulus griseus
tctgcgcgctcgcaccccgtgccctgcaccggccatgcgcccggccttcgcggtgggcctggtgttcgcaggctgctgcagtaatgtgatcttcctagagctgctggcccggaagcacccaggatgtgggaacatcgtgacatttgcacagttcttatttatttgctgtggaaggcttccttttcgtaagctgacttgggaaggaagccacctgctatcccactaaggtactatgccatcatggtaaccatgttctttaccgtcagcgtgatgaacaactatgctctgaatctgaacatcgccatgcccctacatatgatattcagatccggctctctgattgccaacatgatcctaggaattatcattttgaagaaaagatacagtatgttcaagtatacctccattgccctggtgtctgcagggatatttatttgcactttcatgtcagcaaagcaggtgacttcccagtccagcttgaatgagaaggatggattccaggcatttgcacggtggttactgggcattggagcactgacctttgccctgctgatgtcagcaaggatgggcatattccaagagactctatacaaacagtttgggaaacattccaaggaggcattattttataatcacgcccttccacttcccgggtttcatcttcttggcttctgatatttatgatcatgttgttctgttcaataagtctgaactctatcaagttccagtcatcagtgtggctatgcccatcatgtggttctacctcctcatgaacgttgtgactcaatacgtgtgcatccgtggcgtgttcatcctcacaacagagtgcacctccctcaccgtcacgctggttgtgactctgcgcaagtttgtgagcctcatcttttctatcttgtacttccagaacccgttcactctgtggcactgtctgggcaccttgtttgtcttcattgggaccttaatgtacacagaggtgtggaaaaacctagggaccacaaaaagtcagctgcaaaaggctgacaagaaggactgaggtctgcctgggacagacagagcattgttacgtgatagaggcctctggcgcaggtatggtcatcatttcactttggctactgcgaaattaccacagtattgaacccaacagtccccagagcacctctgaagaatgggactcatctgctctttcctggccacccagacagcctttgtagactccgagtaggcatccctgagatagaataaacaccgcaagcaaggctaccaggcagacgattggctagcctctgcatttgctttcctatttgtgtgccagaacatcagagccacacttgtggaattccaggtcctcagagct

SEQ ID NO: 4872 - DNA, 1353 bp, Cricetulus griseus
gcacttccggtgccctttctgccgccgccggctccgcgggccccccatcctcgtgtgcagggcggaggtctgtaaactggagcggggacgaagctggcgggcagcacctcctgaccgccggtgccgccgccttccggaggatcagacatggcccagaacttgaaggacttagcgggacgcctgcccgccgggccccggggcatgggcacggcgttgaagctgctgctgggggccggggccgtggcctacggcgtccgcgagtccgtgttcaccgtggaaggtggtcacagagccatcttcttcaaccgcatcggcggcgtgcagcaggacacgatcctggccgaaggcctccactttaggatcccctggttccagtaccccatcatctatgacattcgggccagaccccgaaaaatctcctcccccacaggttccaaagacctgcagatggtgaacatttccctgagagtgctgtcccgacccaatgcccaggagctccccagcatgtaccagcgcctagggctggactatgaggagcgagtgctgccgtccattgtcaacgaggtgctcaagagtgtggtggccaagttcaatgcctcgcagctgattacccagcgggctcaggtgtccctgttgatccgaagagagctgacagagcgcgccaaggacttcagcctcatcctggacgatgtagctatcactgagctgagctttagccgagagtacacagcagctgtagaagccaaacaagtggcccagcaagaagcccagcgggcccagtttttggtggaaaaagcaaagcaggaacagcgacagaagatcgtgcaggctgaaggggaggctgaggctgccaagatgcttggagaagcactgagcaagaatcctggctatatcaagctccgaaagatccgggctgcccagaacatctctaagacgatcgccacgtcccagaaccgcatctatctcacagctgacaaccttgtgctgaatctacaagacgaaagctttactcggggaagtgacagcctcatcaagaagaagtgagttgtggccatcaagaactccaccagcagaggagcagtctcatctctcatccagccagctagggaggccacgcacaccccaccctgacccgagcatcatgcaatggagtcctctgtacttgccctcttggattaaggagactgaaatccaaccctttcagagggcttttccccctccctggattgacctgggaaatgggaggcacagtgtgatttcgcagtgatttcctacagtgttgtccctcccccagagtggggggagatttaaccaccatcccagaaattctcaataaaatttttattacttaaa

SEQ ID NO: 4873 - DNA, 1353 bp, Cricetulus griseus
atggcggaggagcggcaggactcgctgagagagttcgtggcggtgacgggcgctgaggaggaccgggcccgtttcttcctggagtcagccggctgggacctgcagattgcactagcaagcttttatgaggatggaggggatgaagacattgtgaccatttcacaggcaaccccaagttcagtgtctagaggcacagctcccagtgataatagggtgacgtccttcagagaccttattcatgaccaagatgaggaggaggaggaagaggagggacagaggagcaggttttatgctgggggctcagagagaagtggacagcagattgttggtcctccccggaagagaagtcccaacgagctggtggatgatctgtttaagggtgccaaagagcatggggctgtagctgtggagcgagtgaccaagagccctggagagaccagtaaaccgagaccatttgcaggagggggctaccgccttggagcagcaccagaggaagagtctgcctacgtggcaggagaaaggaggcgacattcgggccaagatgttcatgtagtgctgaagctctggagaactggattcagccttgacaatggtgaactcagaagctaccaagacccatccaatgcccagtttctggagtctatccgtagaggggaggtgcccgcagagcttcggaggttagctcacggtgggcaggtgaacttggatatggaggaccatcgggacgaggattttgtgaagcccaagggagctttcaaagccttcactggcgagggccagaaactgggcagcacggccccccaggtattgaacaccagctctccagcccagcaagcagaaaatgaagccaaagccagctcatccatcttaatcaacgaggcagaacctaccacgaacatccaaatccggcttgcagatggtgggaggctggtgcagaaattcaaccacagccacaggatcagcgacatccggctcttcattgtggatgcccggccagccatggcggctaccagctttgtccttatgactaccttccctaacaaagagctggctgacgagaaccagaccctgaaggaagccaaccttctcaacgctgtcatcgtgcagcggttaacataactactcagctgctgcctcacccccctatgtgtctcccatgactgcagccatgcccatggggatcaccctcctgctccctgtacacatccttccagtgccgcgtctcatccgtagctctgggttcttagacttcagttggacatttgttttctctttagttgtatttcctgggtttttgtggtgatcaatggactttaaagaaaaaaaaaaaaaaaacaaaaaaagttgaagaaa

SEQ ID NO: 4874 - DNA, 1353 bp, Cricetulus griseus
cgggatcaaaaaacttggactttcgccgaaagtgggacaaagatgaatacgagaaactcgcggagaagagactcacagaagagagagaaaagaaggatggaaaaccagtgcagcccgtcaagcgggagcttcttcggcatagggattacaaggtggacttggagtccaagcttgggaagacaattgtcattaccaagactaccccacagtctgaaatgggaggctattactgcaatgtctgtgactgtgtggtgaaggactccatcaacttcctggatcacattaatggaaagaaacatcagcgaaacctgggtatgtctatgcgcgtggaacgctccactctggatcaggtaaagaagcgttttgaggtcaacaagaagaagatggaagagaagcagaaagattatgattttgaggaaaggatgaaggaactcagagaagaggaggaaaaggctaaagcatacaagaaagagaaacagaaggagaagaaaaggagggcggaggaggacttgacatttgaggaggatgacgagatggcagctgtgatgggcttctctggctttggttccaccaagaagagttactgaggcattctctttggcctaactttggcctatactggacctaactttgagtgtgtgtcgaggtggggtggggtgtcatttcttttttggtactggagaaagtccttaagagtgttaatgggcagggctagagggtgggtttttgtggtttccctcttccttggggatgaagaggtgatgctgtggcaggttccgtcagcctcagtatattactggagccacagaacctctgcccatctgtgttcccaataaagaaagacctccctctttgaggctgctttcccaacttcccctgcatctttccctcttcatctatccagcctcttgtctgaacatcctccttttccctgtgttctgcttttgttttaatctttactcttgttcagcttgcaacagaagggttatctgggtctccagtatatgggtgctggcctacccttggtcagctcttcctcccaccccacccagcggctctctagccacctgtgcatgcctgtgacttctgcctgggtcaatgtgtgtgtgggtatgtgtgcatgatacgtcacaaagaggggcctgagctagaatctcagagcattgctgccctggggcctaatgttcttggtttccttggtgcatgtaacaggaaattaaatgggatgagtgtttggtgttgcttgtgtctggtgagtttttaaccttgtttcactgaggatttctgtttttgtcttcctcgggaacaggttcttggaagaacctgtttgatgacaaaaaagaatagaaaaca

SEQ ID NO: 4875 - DNA, 1353 bp, Cricetulus griseus
gccactgtagagcagcaggaacactggtttgaaaaggccttacgggacaagaaaggcttcataatcaagcagatgaaggaggatggtgcttgtctatggaaaaacaactgccatggtaaccacattgagatgcaggctatggcagagatgtacaaccgtcctgtggaggtgtatcaatacagcacagaacctatcaacacattccatggaattcaccaaaatgaagatgaacccatccgtgtcagctaccaccggaatatccactataattcagtggtgaatcctaacaaggccactattggtgtggggctgggcctgccatcatttaaaccagggtttgcagagcagtccctgatgaaaaatgctataaagacatcagaggaatcatggattgaacaacaaatgttggaagacaagaaacgagctacagactgggaggccacaaatgaggccatagaggagcaggtggctcgagaatcctacctacagtggctgagggatcaggagaaacaggcccgccaggtccggggacccagccagccccggaaagccagtgccacatgcagttcagccacagcagcagcctccagtggcctggaggaatggactagtcggtctccacggcaacgaagttcagcctcgtcacctgagcaccctgaactgcatgctgagctaggcattaagcccccttccccaggcactgtgttagctcttgccaaacctccttcaccctgtgcaccaggtacaagcagtcagttttcgccaggggctgatcgggccacctctcctcttgtgtccctctaccctgctctggagtgccgggccctcatccagcagatgtccccctctgcctttggtctgaatgattgggatgatgatgagatcctagcatcggtgctggcagtatcccaacaggaatacttagacagtatgaagaaaaacaaagtgcacagagatccacccccagacaaaagttgatggagacccagggactggacagcatccctcgacccccactcctgcccttgatgccacccaaccttctttggctttcttccctcttggcttccttcctttgtttcctattttccttcttttccacttccctctggctggcccacccttgcgctccatccatctcatccctgccaccatctgccagctgatgtgccctgttgccccctgcacagcaccgtctcagcattccacaggggactctggaaagggtgccgaaggtaggcgagaggcacacagagatggaccatctggcagccccagaagagagatactcagacaaaggaagtctactgtttagccttccttacagatcaattaaacttgttaacccctccc

SEQ ID NO: 4876 - DNA, 1353 bp, Cricetulus griseus
cgatgagtttagtgtgcggccagcggcagcttctgcgcctcctgcgaccccagcgttcgttccacagcgtcgcagggtccctgaaaccgctggccaccgagctcctcgtcgcagctcgcctgggtggtgggcggccacactacgctcttcttgctgcctcaagccctcgctgcatcagtacttctgcctcctcctctgcagaagcccaggtccaggcacctcctgttgttcctgctacccccacccctcctgtagtacctgaagtggcttccggaggaactgcagatgcaattcaatgtgctgcagaacagagcttcagtgaactgggacttgggtcttacaccccagtgggactcatccagaacctcttggaatttatgcatgttgacctgggcctgccttggtggggggccattgccacctgtacggtccttgcccgctgcctggttttccctctgattgtgaagggccagcgagaagcagtcaagatccacaaccacatgccagtgatacagaagttttccactcaaatcagagaggccaaattggcaggggatcaggctgagttttacagggcctccatagagatgacacgctatcagaaaaagcacgatatcaaacttttgcggccactcattctacctctcactcaggcccccgtcttcatctccttctttattgccttgagagagatggccaatctgcctgtgcccagcctacaaacaggtgggctctggtggttccaagatctcacaatatccgatcccatctacgtcttgccactggtagtcactgccacaatgtggggtgtccttgagctaggtgctgagacaggcgtgcagagctctgacctccagttcatgaggaatatcatcagagtgatgcccctaatggtcttgcccgtgaccatccacttcccctcggcagtgttcatgtactggctctcctccaatttgttctccctgtgccaagtggcctgcctccggattccagctgtgcgcacagtgcttaaaatcccccagcgtgtcatacatgaccctgacacattgcctcctcgggaaggcttcttgaagagcttcaaaacaggctggaagaaggctgaaattgcacatcagctccaggagcgtgaacagaggatgcagaaacacttggacctagctgccagaggtcccttacgacagacttttacccacaaccctctgctacagcacaatccaaatcaccctcccaacacccccaacagcagcagcaccagcagcaagcccaagtcaaagccttggcacgacacacttggctgatttctgctctgtgctcattctgacaagaactctgcatcttcacagattcctccac

SEQ ID NO: 4877 - DNA, 1352 bp, Cricetulus griseus
agctgcgcccacggccccagcaagcaccccgcctcacgggccctagtggtccacatccatggtggtggctttgtggcacagacctccaaatcccatgagcctacctcaagacctgggcccaggagctaggagtccccatcatctccatcgactactccctggcccctgaggcccctttccccgagcgctggaggagtgttttttcgcctactgctgggctgtcaagcactgtgccctgctcggttcaacaggagagaggatatgccttgcaggggacagtgcaggcgggaacctctgcatcaccgtgtcccttcgggcagcagcctatggagtgagggtgccagatggcatcatggcagcctacccagtcaccaccctgcagccctctgcctctccctctcgtcttctgagtctcatggacccacttctaccactgagtgtcctctctaagtgtgttagtgcctactcaggtacagagacagaggaccactctgactcagaccagaaggcactgggcatgatggggctggtgcagagggacacatccctgttcctcagagacctccgcctgggtgcctcctcgtggctcaactccttcctggagctaagcggacgcaagccccagaagacctcagtgtccacagcagacaccgtgcgctccacggagtccatgcgcaggagtgtgtctgaggcggccctggcccagccagagggcttgctaaacgcagacaccctgaagaccctgacgataaatgacttgagcaacacagagacgtcaggcaccccggagatgtcgctgtccatggagacgctgggcccctccacaccctctgaggtcaacttctttctgcggcctgagaaggaagaggctgacgccaaagacggggtgggctccgtggacagaggcccccgcgtgcgcgcggccttccccgacggtttccacccgagacgctcaagccagggagtcctccacatgccgctgtactcgtcacccatcgtcaagaaccccttcatgtctccgctgctggcccccgacagcatgctcaagaccctgccgcctgtgcacctcgtggcgtgcgctctggaccccatgctggacgactcggtcatgttcgcgcggagactgcgcgacctgggccagcccgtgacgctgaacgtggtggaggacctgccgcacggcttcctgagcctggcggcgctgtgccgcgagacccggcaggccgcggagttgtgcgtgcagcgcatccggctcgtcctcaccccgcccgccgcgccgctcgtctgagccagggcgggggcgcactaaagacctcttgctcccatctgcgcagcctccgtgatgagtgcgctcc

SEQ ID NO: 4878 - DNA, 1352 bp, Cricetulus griseus
cctgctccccgcccctgcgcttctccgcttcagcttctgctgtccttcccactcgctcacgcctccctgtgccggggtccccactcgccgccgcccgtgccccccgccacccccgcaggcccgaccaagccgcagcgcgggcgaccagtgcgcagcccggcgtcctcgcggagccggatcggcggctccgaccgaagccgacccgcccgccgccagccaggtgccatgctgctgctcctgctgggcttgctaagcccggtggcctgcggggcactgggccccgctggccctggctcctcagagctgcggtcagcattctcggcggctcgcaccaccccgctggagggcacgtcggaaatggcggtgaccttcgacaaggtgtatgtgaacatcgggggcgacttcgacgcggccacggggcggttccgctgccgcgtgcccggcgcctacttcttctccttcacggccggcaaggccccgcacaagagcctgtcggtgatgctggtgcgcaaccgtgacgaggtgcaggcgctggccttcgacgagcagcggcggccgggcgcgcggcgcgctgccagccagagcgccatgctgcagctcgactacggcgacacggtgtggctgcggctgcacggcgctccgcagtacgcgctgggcgcccccggcgccaccttcagcggctacctggtgtacgccgacgccgacgccgacgcgcctgcgcgcggagccgcggccccggagccgcgctcggccttctcggcggcgcgcacgcgcagcctggtgggctcggatgctggcccggggccacgccaccggccgctggccttcgacaccgagctggtcaacataggtggcgacttcgacgcggcggccggcgtgttccgctgccgcctgcccggcgcctatttcttttccttcacgctgggcaagctgccgcgcaagacgctgtcggtgaagctgatgaagaaccgggacgaggtgcaggccatgatttacgacgacggcgcctcgaggcgccgcgagatgcagagccagagcgtgatgctggcgctgcggcgcggtgacgccgtctggctgctcagccacgaccatgatggctatggcgcctacagcaaccacggcaagtacatcaccttctcaggcttcctggtgtaccccgacctggccgccgccggccctccggccctcaagccccccgagctctgagcctctgcttggaggaacccgggaaggccgtggggcgtgcatgccgagccgggaccacggcccgaatgccccaccggcctgagcataacagcctgcccaacgcgcctgaactctgtcaataaagtggacctgcctgtcagacctta

SEQ ID NO: 4879 - DNA, 1351 bp, Cricetulus griseus
actgacaggaaacatactgtcaccattctacaaacacagcttccaaaaatgatctttacaggacggttttgttgggattccctgctgttgacaggggcaatcgagaagatgtggcatacatccctctcgtggagttcagttgttcgcagtcacacttgctgagtttacccgaagaatggaggtctaactgtacaccccgttccagaataagggaggcaagccccttgtttccagaagactggtatcagtttgttttaaggcagttggaatgttttcactcaaaagagaaatcaggtgtactggaagaaattgccaaggataaagctctgaaagccttgtatgtccatacagtaatggcttgttatattggtttatttggatccagacaatgtgttgcctagtcctggtcagatagtaagagtctacaatggtggcttaccctgctctggcaccttggattggctctcagaaaaaccagaactgttccaactagttcggaaagcattcaggtatacactgaaactaatggttgataaagcaagtttgggtccaatagaagacttcaaagaactgaccagctgcctcagagaatatgagagtaactggtacattggtttggtgtctgaagaccagtggaagaaagcaattctagaagaaaagccatgcttgtttccctggggtatgagtctagtatgggcgtttacacgtcgagggtcctggtgcttcaggagctcctggtgcacatcggaaagctgaattcggaagctgttcgaggccagtgggccaatctctcatgggaactgctttatgccaccaacgatgatgaggagcggtacagtatccaagctcacccactccttttgaggaacctcactgtccaagccgctgaccctcccttgggatatccaattttctcttcaaaacctctctctatacatttgtgttagtccatttttacgtctaactccgagagcactagaggagacactagttaaaaaggaagagtctaagttttgtaatttctcgagactttcctcttgccccgaggctgcccaagagaagaactaaggtctgtgaggctgcttctctgtcagccaaatgactcaaacagcagctcctctgtgcctaacatgggcagaagtagttggccaatatttgtgctatatgatttatgatagtttttagtagctaaagacatctgtacaagattagattttttttttactgctttgttaaatgtctgaaaagtagtttgttcttttaaaaagtcaacaggtatatacttacatatttaaaagatattcatatcagtgtttttaaataatgatgaatccttttaatagttaacata

SEQ ID NO: 4880 - DNA, 1351 bp, Cricetulus griseus
cacaacacagggggttccctccctgacctcaccaacacccattttccctccccactcccgacgccgctggaccccgaggagcccgccttccccgctctcaccagctccagcagcactggcagcctggcccatcttggcgtcagcagcactggtcagggtatgaacactcccagctcttctccacagcaccggccagcagtcatcagccccctgtccctgagctcagagaccaggcggcagcagactcagcaggtgtcacccaccctgtccccattgtcacccatcactcaggccgtggccatggacgccctgtccctggaacaacagctgccctacgccttcttcacccaggctggcctcccagcacgcctcccccacacgccccagccaccgcagtctcctgcagagaactccggccagccgccaatggggattgacaccacctcggcaccggctctgcagtaccgcacgagcgcaggctcaccagccaaccagtctcccacctctccagtctccaatcaaggcttctcccctggaagttccccacaacacacgtccaccctgggcagcgtgtttggggacgcattctatgagcagcagatgacagccaggcaggccaatgcgctgtcccgccagctggaacagttcaacatgatggagaatgccatcagctccagcagcctgtacagcccaggctctacactcaactactccaggctgcctatcgatgggcctgagtgggagccgcagcagctcagctacacaggccacggcggaatccccaatatcatcctcacggtgacaggagagtcaccccccagcctactctaaagacgcagctcactggctggggtcagcgatgtcagctttgacccggaccaccagttcccactggatgaactgaagattgaccctctgaccctggacggacttcatatgttgaatgaccctgacatggtcctcgctgacccagccaccgaggacaccttccgaatggaccgcctgtgagtggccatgcctaccacccgccgctggtcagttcctaacggcaccgctccaaacctggggatggcaatgttccgtcctcctttgccaacggccaagcttgtggttctgagcttgcaatgctgcccagcaccccctgccagccgctaccccggttgttcacctcccatgatgcctggctcaaggccactgtgtaccaggctggctatctgtctgttcatctgtccacctggagccaggctgatcacagaggccatgagtgcctggccccgtggacttcccatgctcgctccctggcccctcactggggatgtgagaaccctcatcagaactgtgctgggagcag

SEQ ID NO: 4881 - DNA, 1350 bp, Cricetulus griseus
tctgcaccttcgaggaaggcagccagatggacaacatgctggtgcaggccaataaaaccctacaaatgcaacctgtgtgataagacgttctccacccccaacgaggtggtcaaacactcctgccagaaccagaactcagacgtgtttgccctggacgagggccgctccgtcctcctgggcagtggggactcggaagtaacggaatctgaccgtcctgtgttagcatccatcaaaaaggaacaggaaactgtattactagactgaatgttacttgtctttttaaaaactgtcatttttacacagaaccttctccctcccccattcgggacagtttctccatggcatgatacaaacgggcccactcctttccagtccccttccccagccccatccccgtaacggctttgtgcatataaacctggactctatttactttcattcaggggatattggatggataatggtcagtaggatttataaagaaataggttttgagaagttttagattattttaaaaaacctaacttggaaataattaagagtatataataaaacaactagaatataatttggtaagctaaaattatgactgtccctgggtaataagtcttccttctcaaagaaacaaagtcggaaaatacagcttcttagagataaagctgggctctgctatgcaaatctagaaggtgtggggaaacttgaaacccaagaaaatgtttttactatttgccctctaggtgtctgatttcagagtgtatccttttgagattatgtccagttaaggaaaatcactagttaagaaatcaacaaaatgcaaaagagtaataatgtgatggcaatcttcatttttggatcaaacctgacaggctgtgagtttgtgtgtgagcggacacatggatacttgctacaaacaggagaattgacgcacatgccttacccgatgctggcctctttccaagatgagcaggaagatgctggggtttggtttctgacaagcttgttttaaaatcagatctgaaagcacgcttctatagaatgtctttcaaacaccaattgattttaatatgtattctccaatttttgttaacacctgaattttccccactggcctaacagcattaaaagttgtccattaatcttcccttgggccaataagaaaatggtctcacaggatgcaacaggagccagaagtgagggctaaggggtgaggggtggggatagtgcatagctataccgtatgtgtatgttagaaactgaatatcccatcaccctcttatatgtatagctgagttctcagatttgtaagtttttatacatcctttcattgaataaacatttaattaaataggg

SEQ ID NO: 4882 - DNA, 1350 bp, Cricetulus griseus
ggaagaacgaccagggtgcgactggtcttccgagtccacatcccacagcccaatggccggacactgtctctccaggttgcctcaaaccccatcgagtgctcccagcggtcggcccaggagctgccccttgtggaaaagcaaagcacagacagctacccagtcattggcggcaagaagatggtgctgtctggccataattttctgcaagaactctaaggtcattttcgtggagaaggccccagatggccatcatgtctgggagatggaagcaaaaactgaccgagacctgtgcaagccaaattccctggtggtggagataccaccattccgcaaccagaggataaccagccctgtccaagtcagtttctacgtctgcaatgggaagaggaagagaagccagtaccagcaattcacgtaccttcctgccaatggtaacgctgtctttctaaccttaagctctgaaagtgaacgtcgaggagacttttactaaaaccacagaggctctgagaggatgttgtttcacaccacgtgatagcctgttcacaagaccaagtcgcccacccactcaaagtaaaggcgaagcctgggtgtgttttcctgtgactggtgcatgctggggtaatcacttgctagcctttttcaaatacaagcttgtagaaaggtgtgtcccaggcatccagggtttcctgtgtggtgtggccattctcctgtggcaggatgtgtgtgcagagaacagagtgggttgttaccctgagttctgttgtattttgagtaagctcagctatgtcaacaacctttttatattgttgcttcccccctaaaatctcaagatattcatatcatttaagaggggaattatatagtaaaggctgcccgtgaaagcagccatgttgctatcgtgtcagaggggtctgtggggcagtgtgcagtgaggcccagcgcacggtggctgagttcgtcactgcctcccacactgccatcccaccttgatgcagcttccaggcgtgccagctgctccacactttgtttgctctgcaccagtccgcctcccacagtccacgtagcctcttggctggatcctcccagcccgcccatcaacctcctgtgtgatgcaggtcttcctcagcccttctgggttcagccatatggtcctggcttctcttcaaccttttcatcctgctgccctggctcttgcctccaatcccaagatggctgtccaccaccagcatggagccgaggggctgaccatgtttccacatcactagactgtgagctccttcagagagaccttggccaccttagggttgaatgttttttaaataaataaacacacagatggacgaaacccca

SEQ ID NO: 4883 - DNA, 1350 bp, Cricetulus griseus
cgacgatttcgtctgacgcgactctaacctggcttgtcagtgcgtggcgggatcccgggagcgccactctacctccccttcactttcaagcgattagtatctaatgtttgtgtaagacagaagaaaaggatgtcattccgtaaagtaagcatcatcatctgggtcctggccattgttctcttcttactggttttgcaccataacttcctcagcttgagcagtttgctaaggaatgaagtttcagattcaggaattctggggcttcagcccatagactttgtcgcagatattcatcaacatccagtaaatgggagacaagaggagattcccgtggtcattgctgcctctgaagacaggctgggtgggacaattgcagccataaatagtattcatcataacactcgatccaatgtgattttttacattgttacgctcaacagtacagaagaccatctccgatcctggcttaacagtgtttccctgaaaagcatcaggtacaaaattgtaaattttgacactaaacttttggaagggaaagtaaaggaggatcctgaccagggggagtccatgaaaccattaacctttgcaaggttctacttgccaattctggttcccagtgcaaagaaggccatatacatggatgatgatgtaattgtacaaggtgatattcttgccttgtacaatacaccactgaagccaggacatgctgctgcattttcagaagattgtgattcaacctctactaaagtcattattcgtggagcagggaaccagtacaattatattggctatcttgactataaaaaggaaagaattcgtaagctttccatgaaagccagcacctgctccttcaatcctggagtttttgttgcaaacttgactgaatggaaaagacagaatgtaactaaccagctggaaaaatggatgaaacttaatgtagaagagggattgtacagtagaacactggctggcagcatcaccacaccgcctctgcttatcgtattttatcagcagcattccaccattgatcctatgtggaacgttcgccaccttggttccagtgctggaaaacggtattcaccccagtttgtaaaggctgccaagttacttcactggaatggtcacttcaagccttggggaagagctgcttcatatgctgatgtttgggaaaaatggtatattccagacccaacaggcaaatttagtttaatccgaagacatatggatacctcaaacataaagtgaactacaatttaagtaagctaaatgcagcactcaggaaatcctggaagacacaacatgtgggaagttaactgttaggcttgagtctctgtagcaacccacagaaaa

SEQ ID NO: 4884 - DNA, 1350 bp, Cricetulus griseus
gagattactccaaaatactagaagaaattacagaaaaaataaaagggagtgtcacatggaaagaagatcctggagaacaagttcaggaaatgccatcttcttccttatgccagctgcctgacccaaaggtgtccctgtacccaggaaatcttcccagtttgctctatgggccatcagtccaacatttgacttaggaagcatctcctgtaacctggtggtttccaacaattgccggagagtgaccgtgtctcattgtcaacagccctatcgttggagtcctgagagatttttaattagccaggtcttatgttcccaagctctctcttctggccagaagtactgggaagtggacactaggaactgcaaccactgggctgttggagtggcttcgtggggcatgaagcggaaccagatgctgggaaggactaaggattcttggtgcatagagtggaaagggcctggccagttctctgcttgggctacagagaagaaaactgaccttcacttaggccgccctgaggtcgtgggtgtgtggctggaccttgagctgggtgagcttgccttctactcatgctctgaacaggagaggcttctgtatgagtgtgaggtttctgtctcctttccactgcaccctgccttctggctgtatggcctaagtcctggaaactacctggaaataaagcaggtaaactcatgaagcttccccagggttagaatagtggcttcctaatctctctgtttaggggaaattaggagaattccacttaaggaaactggatatggtagtatgtgtctgtaacccaaagcacttgggaagttgagacaggaggataactgcaagtttgcggccagcctggcggtcagcaaagttaaggccagcttggactaaacggtatgactccacccacttttgaagttattcttttttgtgtgggacaatattaactaaatgggcttgagctctttgaaccttgggcatttcagagaaagagctggcctggaatgtctcccaaaggctacctctaaggcctcagaatagcctgcctcataagagggactttggaccattgtctttcacttaggcctcatctgggactgttggttcaatcatcctatggccagtgagtcacacttacatgactgacccccccctagttaaaagcctaatgccactgcatagctggataaacataccctaactagcatacactatatatgtcccatgtaccactgttgggaggtggagcactgtccaatgacagtgagagggagcctttctggatcctaccttgtgtgtctttaatattgttctttttatctatttagcctttcaatgtaataaattgaaat

SEQ ID NO: 4885 - DNA, 1350 bp, Cricetulus griseus
  modified_base (242)..(242): a, c, t, g, unknown or other
  modified_base (249)..(249): a, c, t, g, unknown or other
gaccaagaagtctctgccaggaggaagactgcagcacgagggcagcagctctggactgggctccagcccattcctttccgaggccaatgctgagaggatcgttcagaccttatgtacagtccggggggctgccctcaagatcggccagatgctcagcatccaggacaacagcttcatcacgcccccagctgcagcggatcttgagagacgtcccgccagagtcgccgacttcatcgccccgntggcagntgctgagtagttcgcaaggactggcaggacaaggtggcctctcttgaggaagtgccctttgctgctgcctccattgggcaggtacgaccaaggtgtgctaaaaaatgggactgaggtagctgtgaagatccagtacccaggtgttgcccagagcatccagagtgacgtgcagaacctgctgggcctgctcaagatgagtgtgggcctgccagaggggttgtttgctgagcagagcctgcagtccttgcagcaggagctggcatgggagtgtgactaccaaagagaggctgcttgtgcccagaccttcagaaagcacttggccaacgaccccttcttcagggtgccagccgtggtcccggagctgtgcacgagacgcgtgctgggcatggagctggctggggggatccctctagaccagtgccagggcctgagtcaggacatccgcaatcagatttgctttcagctcctgaggctgtgtctgcgagagctgtttgagttcagattcatgcagacggatcccaactgggccaacttcctgtacgacgcctccagccaccaggtgactctactggactttggtgcaagccgggcgtttggaacagagttcacagaccattacattgaggtggtgaaggctgctgctgacggagacagggatcgggtcctagaagaaatcccaggatctcaaattcctcacaggctttgaaccaaggcattctctgacgcccacgtggaggccgtgatgatcctgggggagccctttgctgcctcgggtccctacgacttcggggctggagagacggctcgccgaatacagggcctcattccggtgttgcttcggcaccggctgcgcccaccacccgaggagacctacgccctacaccgcaagctagccggggctttcttagcctgcgctcgcctccacgcccacatcgcctgccgggacctcttccaagacacctaccaccgttactgggccagtcgccaggcactgccactgccagcagcctcctgactttcagagggacctccctgctgacccccaccatgacagactccatccggggacgccagctccacagcggggcggtcctctgctcc

SEQ ID NO: 4886 - DNA, 1350 bp, Cricetulus griseus
  modified_base (1340)..(1340): a, c, t, g, unknown or other
  modified_base (1342)..(1342): a, c, t, g, unknown or other
ctggcactgcagagtttgcctcccaagaaacgccccacaccaggagtggtacggtatcggccccttgagttcctgaagacatgctacgggggcactttcctggtacatcagtccttcctctacaagcgggagaagactgtggggagcaaggtgtactggacctgccgggagcatgcggtccatggctgccgtagccgcgccatcacccagggccagcgcgtgacagtgatgcgcagccactgccactcccctgacatggaaggcctgcaggcccggcgacagcaggaaaagaccatcaagaagatacaggcgaggcgaattggtgctggggacttggaagattgtgatgacattgaggacacactgctccaaggggtggacagcctctctaccgcaggggaagagaacctgactctcagtaggtccaggtccaggtccaggtccagtccaggtccaggtccaggtccagaaaacgagcaaagaagcgcaaggaatcctttcaggaacccccagagcaggaggaccaggatgtggaccccagaggcccagagttcctgaggacccctctagggggcagcttcctggtgtatgagtccttcctctataggagggagaaagtagctggtgagaaggtgtactggacgtgccgggaccaggcacgaatgggctgccgcagccgagccatcactcagggccggcaggtgactgtgatgagaggccactgtcatccacctgacctagttaggactggagactctgaggcagcgggacgaaacgccccggccccactcagtgggatggccccagaggggccagagttcctgaagacccctctcgggggcagcttcctggtgtatgagtccttcctctataggcgggagaaagcaactggcaataaagtgtactggacttgccgagaccaggcacgtatgggctgtcgtagccgtgccatcacacagggccagcgggtgatggtgatgcgcaggcactgccacccacctgacatgggtagcctggaagccctgcggcagcgagagaacttccctaacctaaccaactgggaaggcccagagcctctgcagccactggagctcctgcggacaccccttggaggccggttcctggtgtacgagtccttcctgtacaggaaggagaaggctgctggtgagaaggtgtactggatgtgtcgggaccaggctcgtctgggctgtcgcagccgcgccatcacccagggccggcgggtcatggtgatgcggagccactgccacccacctgacctggatggcctggaggccctgcgggagcgccagtgcagccaagaagaaaaagaagaagaggananaagaagaa

SEQ ID NO: 4887 - DNA, 1349 bp, Cricetulus griseus
  modified_base (11)..(11): a, c, t, g, unknown or other
gctgcctatancaagaaggaatttgacagaaatataaccctacctggcattgtatcgtgggccgaaattttggcagctatgtcacacacgagacaaagcacttcatctattttacttgggtcaagttgcaatcctcctcttcaagtcaggctaggtggccgaggtgaagatgtcagtggcggcggcagcgatggcaagcaggcggagttgctgggactgttttgcactggggccagcatcaggaagtcctctccaatggctgtgctactgcatggactgtatactcgatttcatgtgtgtgtcgcaagtaaaacaaaaaccaaacttctttctagttgctctagtaccagggagaatattccactgaactgtgactttatggcttggggtaggggtgggtggggtacagtcgttaagagaccctgaaatgtgtttgtggtgtgggagtagggagcagacttgtcttaccgtccttgtcagggtctctaagtaagggctgtgtctttgtggattaccctcctttattcttccagccagacgtcatgttgggaggatgctgggataggattagcttgacttttctgtctgctccctgcttagccctcgttttttctcattcctcagttctcttagagcagccctgttgttggctggcaagggaatttctggtgactgtagttccttagttaggtcttagcaatcaaccaaatcagtgtccccttgattcttccttgtgtgtgtttgtgttcgtctgtgtgcgtgtgtggggtgggtctgggatagaagggagggaaggggcaggatatgtggaatctagggtatatggggaggtgggggcagttagttctaagtgggctttatgttacctattgtgggggtgaggacaggttggtgtcataccatccctctcccctcaaccatctagcttggacaccctgatttgccctatggctgtctgtttctgggaaagtttttggaaggtcacccaggacaagatggccatactgccatttgccctggagttggatctgggggaaggcaggagaatgccccttcctcccaagcccttagtgtgtattaagctttttttctttactgctggcaggggagggtgggaactggtggtgactgagttccctgttcaaacctttttcattgggtaaagattgaatggttttaggtttatttttcttacgaatgtccagatctgtgtttctccctgccctccaagactggccagttggaagtgtctagttttgttcatctctcatttctggtgcagggactgagaccctgccacatctatgctctgcatccacgcctcttttggacattaaaggtcattgatg

SEQ ID NO: 4888 - DNA, 1349 bp, Cricetulus griseus
cggtgtgcgcgactggcaccttggtgcgggaagatggaagaattgagtcaagccctagctggtagcttttctgtgtctcaagaactgaacagcacagctgccccacaccctcgcctatcccaatacaagtccaagtactgttccttggagcagagtgagcggcgccgacagttgctggaactacagaaatcaaagcgattggattatgtgaaccatgccagaagactagctgaagatgactggacagggatggagagtggggaggaagataagaaagaagaggaggaaatggacattgaccctggcaagaagctaccaaaacgctatgctaatcaattgatgctttctgagtggttaattgacgtcccttcagatttggggcaagaatggattgtggttgtgtgtcctgttgggaaacgagcccttatcgtagcctccaggggttcaaccagtgcctacaccaagagtggctactgtgtcaataggttttcatcccttctgccaggaggcaacaggagaaactcaacaacagccaaagactacaccattctggactgcatttacagtgaggtaaaccagacctactatgttttggatgtgatgtgctggcggggacaccctttttatgactgtcagaccgatttccgattctactggatgcactcaaagttaccagaagaagaaggactcggagagaaaaccaagattaatccttttaaatttgtgggactaaagaattacccgtgtactcctgagagcctgtgtaaggtgctgtctatggattttccttttgaggtagatggacttcttttctaccataaacagacacactatagtcctggaagtactcctttggtgggctggctgcgcccctacatggtgtcagatattctaggtgtagccgtgccagctggtccactgactaccaagccagaatatgctggtcaccagctccaacagattattgagcacaagaggagccaggaggacatgaaggataaattctcacacaaggcttctgagaatgggcactatgagctggagcacctgtctacccccaagctgaagagtcctccccacagccctgggaacctcatggacaactagaggacagcccacaaaagcctgaggaagaggacagtggtgatattttggagtgcactttccaaacccaccccactggaaacagcttaccaacccccatgggatgttggatcagacttggggtgtgggcccccaacggatggaggtagaatccagatagatttgattatctctttactgtggtatgtatatcccaggtctacaatgtaaatatatgcgattactaaaaaaaaaaaaaaaaaaaa

SEQ ID NO: 4889 - DNA, 1349 bp, Cricetulus griseus
  modified_base (244)..(244): a, c, t, g, unknown or other
  modified_base (282)..(282): a, c, t, g, unknown or other
accgcatacaaacacgacggagccacttctttcattgaccagagtattttttttcttcttttcggacgatccactgaagtctgatccttggagacatatggctggaaaatgaaacgacccgggagtatggctacatcgttatgctgtgtggtgtaataccagatgggcactgtgaacggcgcagagctgtgaatggacagtttgaaatggcaatttcccccatcgagcaggttccattgccctntcctgtctcttggcataacgcactagcttgtgcccttntctctgcagtatcaattaactcaacttggaggtggagtggccagagagaatgaagcgatcccgctaatcttgctagctgcggagcgacagagcctggactgcgcccgcggcatggagcgcacgagtgcccgcggggacccaggcccggcccggggagccggctactgagctcccgactccgccaggccgcggtctctttgcgccctctgcctttactgtcagtgtcgcccctctcaaagagtcatggaagacggcccgttgccagacctcagagacatcgagctgaagctggggcgtaaagtgcccgagagcttagcgcgctcgctgcgcggggaggagccggcgccccgagaaggggctgcggacccagcgggctggcggagctgcagcagcagcagtagctgcagcagcttcgcgccctctgtgtcctcctcctcttcatcctcccctgcctctggctctccacgacgcagccaccccagcgccctggagaggctggagaccaaactgcacgtcctcaggcaggagatggttaacctcagagccactgatgtgaggctcatgcgccagttactcctcatcaatgagagcatagagtccatcaagtggatgatagaggaaaaggccaccagcagtctcagtggcagcctgtgcagtctgctggagagtcaggatacctccttacatggcagctacaacagcctccatgatggcagtgatgggctggatggcatctctgtggggagctacctggacactctggcagatgatgtaccaggccatcagaccccttcggacttggaccagttcagtgacagctccatcatagaggactcacaggctctgcacaaacaccccaagttggattctgagtactactgctttggctaatgatccaagtttttgctatgggactggtgtgcaattaacttgtatgtatctttcttcttctgctgctatatttttggtgtgatttattttaataaggctaacctttttaaagaagtcttatttttaaactgtcttaatgatatttctgttgctcctaatgtttctcatctagactg

SEQ ID NO: 4890 - DNA, 1349 bp, Cricetulus griseus
ggtccccgccatgagctccactcagttcaacaagggcccgtcctacgggctctcggccgaggtcaggaaccggctcctgtccaaatacgacccccagaaggaagccgaactccgcagctggattgagggactcacaggcctctccattggccctgacttccagaagggtctgaaagatggcgtcatcctatgcacactcatgaacaagctgcagccgggctccgtccccaagatcaaccgctctctgcagaactggcaccagctagaaaacctctccaacttcatcaaggccatggtcagctatggcatgaaccccgtggacctgtttgaggccaatgacctatttgaaagcgggaacatgacacaggtgcaggtgtcactgcttgcgctggcaggaaaggccaagaccaaggggctgcagagtggtgtggacattggagtcaaatactcagagaaacaagaaaggaactttgatgatgccaccatgaaggccggccagtgcgtcattgggctgcagatgggcaccaacaaatgtgccagccaatctggcatgacggcttacggtaccagacggcatctctatgaccccaagaaccacatcctgcctcccatggaccactgcaccatcagcctccagatgggtaccaacaagtgtgccagccaggtgggcatgacagctccagggactcgaaggcacatctatgacaccaagctgggtaccgacaagtgtgacaactcttccatgtccctacagatgggctacacgcagggtgccaaccagagtggccaggtcttcgggctggggcggcagatatatgaccccaagtattgcccacagggtccagcagccgatggggcaccagtcagtggtgacggccatggcgagggccctgagtacctggcctactgccaggaggaggcaggttactgagcacccaagggtgctgctggctccccacataggcatccatgtgtgggtttggggttttcattgtgttgttttgtttcttgaaattgggcctcactttgtagccctctctgtcctggaactcactgcaatcagcctcctgcctcagcttcctgagggctgggcagacaaacctttgctagctatactccctcctcgcccatcatgccttgcttccttcccaggactgacccacgggtagggaacattggggtccttgatggggttagacagactgagggtttcctagcagactgtgggagtggctgtccccaaagagttgccggtttcttcatctcttcagtttgtgctttgtgaacccatggaaattgcagacagtttcaatgaaagaaaacctaatagtaaagaacaaaaaaaaaaa

SEQ ID NO: 4891 - DNA, 1348 bp, Cricetulus griseus
ggatctcgcgaggcgcgggccgcgcagccacggctccggacggccggacaaggtgacgagcggcgcgcagccccgggccgcgatgcggtgcccggccgagcacgaggaggacatgtaccgtgctgcagatgaaatagaaaaggagaaagaattgctaatacatgaaagagggatatcagaactcaggttaagtgtggctcctgaaatggatattatggactactgcaagaaagaatggaggggaaatactcagaaagccacatgtatgaaaaagggctatgaggaagtttctcagaaattcacatctataaggcgagtacgtggtgataattattgtgcactgagggccacgctgttccaggccatgagccaactggcggagctgcccctctggcttcgggacccagagctcatgctgttaccagaaaagctgataaacaagtatagctggatcaagcaatggaaacttggactgaagtttgatgggaagagtgaggacctggttgaaaaaattaaggagtcccttgccctactgaggaagaagtgggcaagcctggctgaaatgaaaactgctgaggcaaggcagatagcttgcgatgaactgttcaccaatgaagaggaggagtacagcctctatgaagctgtaaaatttctaatgttaaacagagccatcgaactctatgatgataaagagaaaggaaaggaagtcccatttttttctgtgctcttgtttgctcgagacacatcaaacgaccctggacagctactgaggaaccacctaaaccaggtgggacacactggtggccttgaacaggttgaaatgttccttcttgcctatgctgttcgccacaccatccaggtgtaccggttgtccaagtacaacactgaggagttcctcaccgtctatcctactgacgcccccaaggactggccagtggtgaccctcatagctgaggatgatcgacactataacatccctgtcagagtgtgtgaggagacaagtctgtgaggacacatgttgaaagccatgtgaggtggcgcaggtgcacatgcagcgcctcctcctggggcccttaggtctgcaggtctccaaggacaatctgggagaactttggggctgctggagccaagctggactgcgatgttctgaagactagctgttgataatgagaagtagccaagtcttcactcatgatctgttacacagtgtatttcactgggggcttcagcatgtatctgtggaaggtacaaactatgtctccataaggcagatgcttttgtgtcagaggacactgtttggaaaggaatatgtccaataacagttctgatggtaaactgactgttactt

SEQ ID NO: 4892 - DNA, 1348 bp, Cricetulus griseus
cttgatgcggttgaggcagcgcggaccagagcggagccggcccggcggcgggcgcgataggaggcggtgaggccgcgggcgcgggccggtgactgcggcgcccccacgatggacgccctggaagaagagagcttcgcgctgtccttctcctccgcctctgatgcagaatttgatgctgtggttgggtgtctagaggacattattatggatgatgagttccagctattgcagaggaacttcatggacaagtactaccaggagtttgaagacacagaggagaataaactcacatatacccccatttttaatgaatatatttccctggtagagaagtacattgaagagcagctgctggagcgtatcccaggcttcaacatggctgctttcacaacaacactgcagcaccataaggatgaggtggctggtgacatctttgacatgctgctcacattcacagattttctggctttcaaggagatgttcctgtactacagagcagaaaaggaaggccgaggactggacttaagcagcggcttggtggtgacttctctgtgcaagtcgtcttctacaccagcttcccagaacaatctgcggcactaggtcccaccttcagacatggtgtgatcactgtgaggtcaccagcccagctgactcagagaagtatgggctaatgatgacagatgcatcatgtcaagagaaagatgtcctctacccacaatcaaaaaggaactcccgatcttacattatttgtccttttcaacagcgaattctgctggtcttagttccactgttcctctaagactctaagcattattttcaagaaacctatttttatagatgaaaactcaggctaatctagtgagtatgatcttggaacgcccttgatcaaccacttaaaagatcaaagtattatatgctgtgtgcttttttagttgtgagaactgcgagtgtaaatctgctttccaatttagtgcccctcttcttgggtaccagtgcaaacagactgtatgctagaaacaggctgcagctctgtcacaacagcatactaagtgtgtttgtgcatgcttgtctgcactcctgtcatctttggtggactgtcaccaaccagaaagcatgtgtgtcacatctctagaaagaagaaaacagttcaattcttaatgtatacttttaactttaacttttatagtaaaactaagaatccacaccaactttccatgtgactattctgagtttacaggatgtaagctaagagctgtttttctgtagcaatgtgtctctttgtgcttttgtaaaatgagtaaaatttgaggtgtttggcaagaaaaaaaaaaaaaaaaaaaaaaaaaaa

SEQ ID NO: 4893 - DNA, 1348 bp, Cricetulus griseus
gaagcacacagcgacaaggccaaggagagcattcgagcaaagtgcgtgcagtacctagaccgagcagagaagctgaaagattatttacgaaaaaaaacaggcaacgcgtaccccttggcgaggtatactgctcctttgggcccccacggcacaggcaagtcctacctggccaaagccgtggcaacagaagccaacaactccaccttcttctctgtgtcctcctcggatctgatgtctaagtggttgggggagagtgagaagctagtcaagaacctgttttgagttggccaggcaacacaagccttccatcatcttcattgatgaggtggattccctctgtggggtcacggaatgaaaaatgagagcgaagctgcccgcaggatcaaaacagagttcttggtccagatgcagggagtagggaataacaatgatgggactcttgttcttggtgccacaaacatcccctgggtgttggattcagccattaggaggaggtttgaaaagcgaatttatatcccattaccagaggaagcggcccgggcccagatgtttcggttacatctgggaagcacacctcacaacctcacggatgctaacatccacgagctggcccggaagacagaaggctactcaggagctgacatcagcatcattgtgcgggactccctcatgcagcccgttagaaaagtacagtcagcaacacacttcaagaaggtttgtggtccttcacgcaccaacccgagtgttgtgattgatgatcttctgaccccatgttctccaggggacccaggggccatagagatgacttggatggatgtccctggtgataaactcttagagcctgtggtttgcatgtcggacatgcttcggtctttagccactacccggcccacagtgaatgcagaggacctcctgaaagtaaagaaattctctgaggactttggacaagagagttaaagcttcatgttgataatgaaattgggatttgactggagcaaattcatgggacttcctacaccagtggccaggcagggcctgaagtcctgaagtcactagaatctctctgctgcctggctctgcagagatgcttcaccatgtaggacacttggacactggttctgcatactcctggatgctcacagtccttgccctgatcctggagcttccagtcttcctttgcaggagctgatgacttctgtgagcacaaagctgtttccatcaggagagaagacaggcaggcaggtcttttattgctgccttcactgactgagaactgagcccagcctctgctggtcctgttcaggagatgtctaataaacacttttcctttcttgaaaaaaaaaaaaaa

SEQ ID NO: 4894 - DNA, 1348 bp, Cricetulus griseus
acagagcccctgatggggtccagcaccctctggaaggacctcagggtacttctgcctggaacagaggaagagctgaagctggagctcactgagaaggtggacaggagcgtgactatgctgctgaagcaagctgtggggctattctatgcaggacattggcaggagtgcctgcaggccagcgaggccatcctggactactcctgggagaagctcaacactgggccctggcaagatgtggacaaggaatggcgccgtgtatactcctttggctgcctcctgaaggccctgtgcctgtgtcagacaccacagaaggctactgcagtggccgaagcactacgagtgtgtgacatgggcttattaatgggggcagcgatccttggagacatccttctcaaagtcgtcacagtcctccagtcacacctactcccaggaaagcagcttgcctgtggccctcaccaggaccagcctgctcccaacgaaggcgaggtgtgactccaactccgctcccagtgtggtggtagagcgggcagtacccaggcttcactgtccaaccctgcagtacttcaggaagcactttctagttcctgggaggcctgtgatcttggaaggtgtggctgaccactggccatgcatgaagaagtggagtctgcagtacatccaggagattgctggctgccgcactgtccctgtggaagtgggttcaaggtacacagacgaagactggtcccaggccctcatgaccatcaatgagttcatccacaaatacatcctgagcgaggcaaaggacgttgggtaccttgctcagcaccagctattcgaccagatcccagagttgaagcaggacatcagcattcctgattactgttgcctgggtgacggggaagaggaagagatcactatcaatgcctggtttggtccccaaggaaccatctccccactgcatcatgacccccagcagaacttcctggtccaggtgttaggaaggaagtacatccggctgtattccccgcaagagtccgaggcagtgtatcctcatgagacgcaccttcttcataacaccagccaggttgatgttgagaaccctgacctggacaagtttcccaagtttgctgaggccccattcctgtcctgcatcttgtccccaggagagaccctctttatacctgctaagtattggcattacgtgcgcgccttggacctgagcttctcagtcagcttctggtggtcatagccagggccagagtgcaaaggacccaccaggcagacacctcacccagaggcagtgagcctgggggaaggcataggccctggatgctgctagattccaacagtcctgctcccccagcca

SEQ ID NO: 4895 - DNA, 1348 bp, Cricetulus griseus
gagttgcagatcgtcaggaaaacgcaggtcgcggggatcagcagagagaagggggtggtaaaggggggaaaaaagcaagggaaaaaagcccctgcgcattgatccgcgccgtattttgggtaaatacgatcacgtgggggctggggaaccaatgagctgccgggaaaaggctggaaaaataattacctgccttgattgttctgtgagcagataaaaagtacatatacagttcatacaataatcttatgtatgtaaaaccctgttacgatgtcggcgacggggcccatcagtaactattacgtggactcgctcatctctcacgacaatgaagacctcctagcgtccaggtttccggccaccggggctcaccctgccgccgccagacccagcggcttggtgccggactgtagcgattttccgtcctgtagcttcgcgcccaagccggccgtgttcagcacgtcgtgggcgcccgtgccctcgcagtcgtccgtggtctatcacccgtacggcccccagccccacctcggcgccgacacgcgctacatgcggacttggctcgagccgctgtccggcgccgtctccttccccagctttccggccgggggccgtcactatgccctcaagcccgacgcctaccccgggcgccgcgccgactgcggcccaggcgacggccgcagctacccggactacatgtacggctcgcccggggagctgcgcgaccgcgccccgcagacgctgccctcgcccgaggcggacgcgctggccggcagcaagcacaaagaggagaaggccgacctggaccctagcaaccccgtggccaactggatccacgcccgttccacaaggaagaagcgctgcccctacaccaagtaccagacgctggaactggagaaggagtttctcttcaatatgtatttaaccagggaccgacgatacgaggtggcccgtgttctcaatctcactgagcggcaggtcaaaatctggtttcagaatcggaggatgaagatgaaaaagatgaataaagagaaaaccgacaaggagcaatcctaagccctgccccagcctgctgcctcggcacagcccagggaaacacaaaaaccccacaaaaaatgccccaacccaggcgggagaaagcacgaaaagaaaaggaaagagcaagatagagaaaagcccatcgtcttaaaaagaaaaacaaggaaggggaaaatgcaaactcttgcgatgtgggagggttaagtgttgagaaattggtgtttagagttagttctatccagcaaggaggaggcaggagaaaccgcgttctcttctccccagcgcaactgaaataaatgacacacacaaatgtgaa

SEQ ID NO: 4896 - DNA, 1348 bp, Cricetulus griseus
aaacaggagaatactatatgcttcaggaacaagtcagtgaatatcttggtgtgacctccttcaagcggaaatacccagatttagagcgacgagatttatctcacaaggagaaactctacctgagagaattaaacgtcattacagaaacgcagtgcacactaggtttaacagcattgcgcagtgatgaagtgattgatttaatgataaaagaatacccagctaaacatgctgaatattctgttattctacaagaaaaggaacgtcagaggattacagatcattataaagagtattctcaaatgcaacaacagaatactcagaaagttgaagccagcaaagtacctgagtacattaagaaagctgccaagaaagcagccgaattcaacagcaacttaaaccgggaacgcatggaagagagaagagcatattttgacttgcagacacatgttatccaagtgcctcaaggaaagtacaaagtgttgccaacagaccgaacaaaggtcagttcttacccagtggctctcatccccggacagttccaggagtattataagaggtactcaccggatgagcttcggtacttgccattaaacacagccctgtatgagccgcccctggacccagagctcccggcactagatagtgacggtgattcagatgatggcgaagatagtcgaggggatgaaaagcggaaaaataaaggcacttcggacagctcctcaggcaatgtgtctgaaggagacagcccccctgacagccaggaggacacctttcagggaagacagaaatcaaaagacaaagtggccactacaagaaaagatggctccaaacgttctgtactgtccaagtcagttcctgggtacaagccaaaggtcattccaaatgctctatgtggaatttgtctgaagggtaaggaatccaacaagaaaggaaaggctgaatcacttatacactgctcccagtgtgataacagtggccacccttcttgcttggatatgaccatggagcttgtttctataattaagacctacccatggcagtgtatggaatgtaagacatgcattatatgtggacagccccaccatgaagaagaaatgatgttctgtgatgtgtgtgacagaggttatcatactttttgtgtgggccttggtgctattccatcaggtcgctggatttgtgactgttgtcagcgagctcccccaacacccaggaaagtgggcagaaggggaaaaaacagcaaagagggataaaataggtttttgacctgaccctcagtttgggatatctggtgccattttatttacactttcatttttatgccaataaagaaccctttttttgaaaataa

SEQ ID NO: 4897 - DNA, 1348 bp, Cricetulus griseus
atcccttcaagacagagaacccccaaaataaacatgatgttggcaaacctgtacaaaaaggctggtcaggaacgcccatcagtcaccagctataaggaggtcctgcggcagtgccccttggcccttgatgccattctaggtttgttgtctctttctgtaaaaggtgcagaggtggcatcaatgacgatgaatgtaatccagactgtgcccaacctggactggctgtctgtgtggattaaagcctatgcttttgtgcacactggagacaactcaagagcgatcaacaccatctgttcactagagaaaaaatccttactgcgagacaacgtggacctgctggggagcttggcagacctgtacttcagagcaggagacagtaagaactccgtcctcaagtttgagcaggcgcagatgttggatccttatctgataaaggaatggacgtttacggctacctcctggcacgagaagggcgactagaggatgtggagaaccttggctgccgccttttcaacatttctgatcagcatgcggagccctgggtggtctctgggtgccatagcttctatagcaagcgctactctcgggccctatacttgggcgccaaggccattcaactgaatagcaacagcgtccaagctttactactcaaaggagcagcacttaggaacatgggcagagtccaggaagctataatacattttcgggaggctataaggcttgcaccttgtcgcttagactgttatgaaggtctcatagagtgctacttagcttctagcagcattcgagaagcgatggtgatggccaacaatgtttacaaaactctaggtgcaagtgcacagactcttaccctgctagccaccgtgtgtctggaagaccctgtgacacaggagaaagccaaagctttgttagataaagctctggcccagaggccggactatgtcaaggccgtggtgaagaaagcggaactgctcagcagggaacagaaatatgaagacggaattgctctgttgaggaatgccctggccaatcagagcgactgtgtcctgcatcggatcctgggggacttcctggtagctgtgaacgaataccaggaagcaatggaccagtacagtatcgcactgagtttggaccccaatgaccagaagtctctagagggcatgcagaagatggagaaggaggagagtcccacagatgccacgcaggaggaagatgtggacgacatggaagggagtggggaagaaggggacctggagggcagcgacagtgaggcagcccagtgggctgaccaagagcagtggttcggcatgcagtgaaggcccagcagcagcctctgctgattcctaga

SEQ ID NO: 4898 - DNA, 1347 bp, Cricetulus griseus
gacaaacgcaaggcggatgaggaggatgagagagagtggggcgaagaggaggaagagcagccttccaaacgcagaagagtggagaacagtctggcctctggagtggacttcagccatgcaggaagaaacggaactctctgggaaatgtgtaacgatagatgttgcttctccttccaagcagaaggagaaggcagcctccctcaagctggacatgcccaaggtggcacatgacagcagtaaagatagtgtcacttgtttttgtcagcaacttgccctacagcatggatgagccagaggcgaagctcaggccactctttgaggccttgtggggaggtggtccagatcaggccggtcttcagcaaccgtggggacttccgaggctactgctatgtggagtttaaagaggagaagtcagcgcagcaggccttggagctggacaggaagaatgtggaaggaaggccgatgtttgtttccccttgtgtggataagagcaaaaaccccgatttcaaggtgttcagatatagcaccaccctggagaaacataaactcttcatctcaggcctgcccttctcctgcaccaaagaggagctcgaggacatctgtaaggctcatggcaccgtgaaggacctcaggctcgtcaccaacagggctggcaagccgaagggcctggcctatgtggaatatgaaaatgagtcccaggcatcacaggcagtaatgaagatggacggcatgaccatcaaagagaatgtcattaaagtggcaatcagcaacccccctcagcggaaagttccagagaagccggaagtgaggacagcaccgggtgcccccatggtgcccaggcagatgtatggcgcgcgcgggaagggaaggacccagcttgctcttcttcctcgggctctgcagcgccacagtgctgctcctcaggccgagaatggccctgccgtggggccggctgtcaccacctccatggccaccgaggctcctaagatgtccaatgctgattttgcgaagttgcttctgagaaagtgaagaaggctccgagagatgggaaatgccttacttactccttcatgctggcccggcatgccactgcggccctggagacaagggctgggcactcaacctgtctcccacagattgtcctctgatgtagacaggaagaaacgcctacattgagcatgacgtcgaggagtgttccctcatattgagggtggaggccgactgctttcaggccgtcccaaggtacttcagtgtcctaacaaggagccactcggcttttggggcccatttgtcctgatactttcaccacctctggccctttttctacgaacaccccacccccacccc

SEQ ID NO: 4899 - DNA, 1347 bp, Cricetulus griseus
agtgtttacaccggcggctctctgcggccgggttccttccgcgggacggggagaaagagagagcgcgaaagagagaggatgtctctctcagactggcatctggcagtgaagctggctgaccagccactcgcccccaagtcaattcttcagttgccagagacagaagtgggagaatattccctaggggcttatagcatttcgtttctaaagcagcttattgctggcaagctccaggaatctgttccagatccggagctgattgatctgatctattgtggccggaagctaaaagatgaccaaacccttgacttctatggtattcagcctgggtccacagtccacgttctccgtaaatcttggcctgagcctgatcagaaacctgaacctgtggacaaagtggctgccctgagggagttccgggtgctgcacactgcactgcacagcagctcctcctacagggaggcggtctttaagatgctcagcaataaagaatctctggatcagatcattgtggctaccccaggtctcagcagtgaccccattgctctaggggttctccaggacaaggacctcttctctgtctttgctgatcccagcatgctggatacgttggtgcctgctcacccagctctagtcaatgccatcattctggttctgcactcggtagcaggcagcaccccaatgccaggagctgactcctcttcccgaagcatgccctccagctcgtaccgagatatgccaggtggcttcctgtttgatgggctctcggatgatgaggacgactttcacccaagcacccggtctacgccctctagcagtacacctagctcccgcccggcctccctggggtacagtggagctgctgggccccgccctatcacccagagtgagctggccactgccctggccctggccagtactccagagagcagttctcacaccccaactcctggcactcagggccattcttcaggcacctcaccaatgtcctctggtgtcccgtcagggacacccatcaccaacgatctttttagccaagccctccagcatgccctgcaggcctctgggcagcccagccttcagagccagtggcagcctcagctgcagcagttgcgtgacatgggcatccaggatgatgagctgagcctccgtgcccttcaggcgactggaggggatatccaagcagctctggagctgatctttgctggaggagccccatgaacttcttgtacccaagtgcctagcaagttgcagaggcaattcctcaaaggaggcacttgtgaagtttcctccaactcctctccaacccccaatatatctgatgctctactacaaaaaaaaaaaaaa

SEQ ID NO: 4900 - DNA, 1347 bp, Cricetulus griseus
tggaccgtgcttcaaggagccccaaggaatctggacctctggctgtactgagctgcctgcctgagccacctcccccctatgagctctcctgcaccactggtggagaggtagccatgttgcctgagacctgtgaggaactcaagagggtcctcaatgaccaggatgtctctaacccctttactcaggtgctagaggagcgccagcggttgtggttgtctgagctgaagcgcctgtatgtggaacggctgcatgaggtggcccagaaagctgagcggagtgagcgtaacctccaactgcagctctttatggcccaacaggagcagcggcgcctgcgcaaggagctgcgggctcaccagggtctggccccagaacctcggacctctggttcccaagtggaggctgaccccaatgcccggtcggaggaggaagcccggtgggaggtgtgccagaagacagcggagattagtctgttgaaacagcagcttcgggaagcccaggcagagctggcacagaagcttgccgagatcttcagtctgaagacgcaacttcgagacgtcagggcacaagcccaggctcaggacactgagctggctcggctgcgggagacattgcgcagcctgcatgagcaggcaccgtcgggaggaagctccaggcagctgtgagacagatgacggaggcagtgaagccagagaaggggccgagcagttacgggcagagctgctgcaagagcggcttcgtggccaggagcaggcgctgcgcttcgagctggagcggcagacttggcaggaggaaaaggaaagggtgttgcgctaccagcgagaaatccaagggggctacatggacatgtatcgtcggaaccaggcactcgaacaggagctgcgggagctccgggggccccctacatcctggagtccccgcctggagtcctccaaaatctgacactaccaagtgtgctgacagcaggcacgctatgagaagataccctgagatggcaggctcctcccttgcgctggtctgaggcagaacctgtagaggccagttcagggatgggagacccacccagaggagggatccagcaggcaatgggctggatagggtgcctgctccagaagctatggcaaagtcttgctggcagagaaacagacccaggcagggcctagccctgctccctacagtgggtgtggcccagtaaagtaggttggagccatcgaagccccagcctcgggatgcagaagggcaggagcgagggcgggtggttggagacttggcctgaggtcttcctccgtggaaggagccaggggtgggaagacaggcctccagaaataaaagcactatttttatgaggag

SEQ ID NO: 4901 - DNA, 1347 bp, Cricetulus griseus
gaagctcctgcagggggacctgcctaatgaaaaagatggcgccaaggggaccgaggaaacatggtctggggaggagcggaccaccaaggcccccagtactccaccacctaaggtagctccgcctccacccgcactcaccccggactcccagacagtggacagcagctgcaagactcctgaagtctccttcctgccagaggaagccactgaggaccctggggtccgagtaggggcagaggaggaggaggaggaggaggaggaggagggaagaggaggaggagcaacagcctgctactaccacagccaccagcaccgccgcagccgccccaagcactgcccccagtgcgggctctacagctggagactctggcgccgaggatgggccagcttctagggtctcccagctgcccacgctacccccacccatgccctggaacctgcctgctggtgtggactgcactaccagtggtgtcctggccttgactgcactgctgttcaagatggaagaggccaacctggccagccgagcaaaggcccaggagctgatccaggccaccaaccagatcctcagccatcggaagccaccctccactctgggggtgaacccagctcctgtgcccacttccttgggcctgcccccaggcccttccagctacctgcttcctggcagcctccccataggaggctgtggctccacccctcctactcccactgggctggcccctgcatctgacaagagagagggcagcagcagttcagagggacgtggggacactgacaagtatctgaagaagctgcacacgcaggagcgggcggtggaggaggtgaagctggccatcaagccctactaccagaagaaagacatcaccaaggaggagtacaaggacatcctgaggaaggctgtccacaagatctgccacagcaaaagcggggagatcaaccctgtcaaggtgggcaacctggtgagggcctacgtccagcgctaccgctacttccgcaagcacgggcgcaagccgggggaccccccaggaccccctcgaccacccaaggagccagggcccccagacaagggtggcccaggcctgcccctgccccctctctgagacttcataccctgttcctgcgcctctgagactctggacatatttatggctccacttccccactaaacccccctcccctagtgggatgatggggtcgttgtgaggaagaggagagccccccacccagccctgcccctacccgttatcctggccccttagcctatcccaaggcctcagcccttctgtcatgccccctccaatttcattaaagatttcatgaaataataaaaaaataaaaaaaaaa

SEQ ID NO: 4902 - DNA, 1347 bp, Cricetulus griseus
cgcgcccgcgcctctcgcacccgaggcggtcccccagcgaccgacccccaccccgcggcgcaggccgggcccgaactctcctggcgcggcgtctacacccaggccgccaaccacctccgaagagccatgttccaggcagccggggccgcccaggccaccccctctcatgaagccaaaggcagcagtggcagcagcgcggtgcagcgctccaagtcctttagcttgcgggctcaggtgaaggagacctgtacagcctgccagaagactgtgtatcctatggagcggctggtggcagacaagctcattttccacaactcttgcttctgttgcaaacactgccacaccaaactcagcttgggcagttatgctgcactgcacggtgaattttactgcaaacctcactttcagcagctgtttaagagcaaaggcaactacgatgagggatttggccgtaaacagcacaaggagctctgggcccacaaggaggtggactcaggcaccaagacagcctgaggtccctctaacatctgttccctccctgcgctcggcgtccaaggaggttgatctgggcttgtgaggggagcggggtgggaagggacgaggctccctcagacaggtttcaggcatagggctctgctccaggattccttaacttttcccataggaggtggaggtttggggaccagaattggagttttcaccatactgcttccttcagaccatctcatctcaccccatggctccctgggaggcccacaagcccagcttccctatttaggtgccttttctccagcaaggagtcagcatgccctcctcagggtcccaagctcccacactgccacctgggccttgtgcaccccatgtctccccatctacctctgcccttagcctggttctgaccacagagactggaagagggaagagtgccatctgctgggcctcatatatgtcacctcaccggtggaggggaggtgctggggaagaggctgatataaatgatcccttttattggaagtaatgcactggcctggctttgcactgcaagccctcagtcgagatatagtcaaataactatggctgcagcttcttctgcacaatccacaattcagacacagacacagagctgggggagcgggaggaaaggagggtggcagcatgcacctgacccaggccctgcccttccacgaggggctggccaaggcaggtaaaccccatggaatgatgaacaaatggtggcacagcactttgcacagcaggccaagggctgctaggggaccgcacatcagaacctttgggcccgtcctagagccccacaacttctcatttggatttaataataagaaaaaa

SEQ ID NO: 4903 - DNA, 1347 bp, Cricetulus griseus
cagggaaaatatgagttcatgaatgatgtggtgtctcttcgggacctgtctagtgaggaagagatccaccactttaagaatgagagcttaggcatggcctttctgcacctctgccaccttgctctctgccgtggtgtccccctggaggagatggccagagagatcagctttaagaaatgcatccctcgttcattccgccagcacatccgccagcacaatgcgctcacgcgcctgcgtctccgcagagtcttccggcgattcttgcgggcctttcagcctggtcacctctcccagcaggttgtgatggttaagtacttggctacactggagcggctggctcctcgatttggctcagagcatataccagtgtgtcatctggaggtactggaccagccccaccctccttgagatctgctttgatgggaggcacccctgcaaggtcgtcgaccctctgagaaagaacgattctacacaaagcagcaccagctgcctcagccctcatgcccggagctggccacactcacccgccagtgcctgacctacgaaccagcacagcggccatcattccgcaccattttgcgggacctcactaggctgcagccacagaatctagtgggtatctcagctgtgaacacagactctacagcattagatcccactgttttccacaagcgttatttgaaaaagatccgggaattgggcgagggtcactttggcaaggtcagcctgtactgctatgatccaaccaatgatggcactggcgagatggtggctgtgaaagcccttaaggagggatgtggtccccagctccgctcaggctggcagcgggagatcgaaatcctacggaccctgtaccatgaacacattgaaggcagtgcctgaaggccacgagtactaccgcgtgcgcgaggacggggacagcccagtgttctggtatgctccggaatgcctgaaggagtgcaaattttactatgcatcagatgtctggtccttcggggtgaccttgtatgagctgttgacgtactgtgactctggtcagagtcccccgacgaaattcattgagctcatcggagtcacccagggccagatgactgtgttgaggctcacagagttgctggaacgtggagagaggctgccgaggcctgacagatgtccctgtgagatctatctcctcatgaagaactgctgggagtcagaggcctccttccggcccaccttccagaatcttgtgcccatcctcaagacagcccaggagaagtaccaaggccaggtgccatcagtgttcagtgtgtgctgacgttcaagggcaaataaatagttttgttcttgctgaaaaaaaaaaaaaaa

SEQ ID NO: 4904 - DNA, 1346 bp, Cricetulus griseus
cttcaaggttcaggctgtgaggcactggaactggttctttgtcaactgcagtgtgaaaatttgaaaacgtttgccccagaggacattgtggctgtttataggattctgcaggcatgtcctgaaaaagtggacaaacaccaggcatttctaaatgcagtcaacaactttaccctctcaatagttccctacctgagtcccaagtccgtgagccatgtgctcactgccttggtggctcttgaccagactcacgcccttccactggttataaaattgggcaagtccgttgtgagatacattcctcgttttactaacgaagagcttaggaaggtcttggaggcctttctgtattttggacacagtgacaggtttctcacggaggcgttagagcggcatgtagctgccctgtgcctctccctggaccccgatgtcatcagcactgtgatggagtactgcagtagaaagcggattctttctaagcccatcctcaatatggttgctgagacttttgtttgccagtcagaaaaattctcacctcgtcagattgctgaatcaatcgaaccgtttggaaaactgaattatttgccaccaaatgcccctgctttatttaggaagctggaaagtgtgctggtcgctcgtttccatcatttcccaccacagttgctactgaagctttcttcattcatgttcgctaattgaatgccacccggtcaactttatgtcaaaaatattcagccccttttttcttcaacggctgcaaggtcaaggtaaagagtcatatttggacaaagtgagcctggcacaagtcacccagcttttcatgacctcagtcctagagtgcccctttctataagggccccaagctccttcctcagtatcatgtgaagtcgttcctcacgccatgctgctccctggagacccctctggatctccatctttacaagtctgtggtgactggactgattgatcttctgggatcgagattgtattttgcatcaaaagtgttgacaccctattgttacaccatagatgttgaaattaaattagacgaagatggatttgtattgccattcacagtggaggaggatgtccataaaagggtggcgctgtgcatcgatgggccacagcggttttgcgctgacactaagcacctgctgggaaaagaggccattaaacaaagacacctgcgcttgctgggctaccaggttgttcaggttccctatcatgagctggagttgcttacatcaagacttgaattggtggagtatttacaaaggaaactattttctcaaagctctcctgtccattggtaataaaggaaaccggctacaggattcaagagtgaaaaa

SEQ ID NO: 4905 - DNA, 1346 bp, Cricetulus griseus
ggcgccgcggggatggcgggagccggagctggagcaggagctcgcggcggcgcaccggcgggagtggaggcccgcgctcgcgacccgccgcccgcgcaccgcgcgcacccccgccaccctcggcccgcggctcagccgtcggcgcgcaggatggacggcggcgcggggggtccgggctccggggacaacgccccgaccaccgaggcgctgttcgtggccctgggcgcgggcgtgacggctctgagccacccgctgctctacgtgaagctgctgatccaggtgggtcatgagccgatgccccccacccttgggaccaatgtgctggggaggaaggtcctctacctgccgagcttcttcacctatgccaagtacatcgttcaggttgatggaaagatagggctgttccggggcctgagcccccgcctgatgtccaacgccttgtccactgtgacccggggcagcatgaagaaggttttccctccggatgagatggagcaggtttccaataaggatgacatgaagacttcactgaagaaagttgtgaaagagacatcgtatgagatgatgatgcagtgtgtgtcccgcatgctggcccatcctttacacgtcatctcaatgcgctgcatggtgcagtttgtggggcgggaggccaagtacagtggcgtcctgagctccattgggaagattttcaaggaggaggggctgctgggattcttcgtcggcttaatccctcacctcctgggcgatgtggttttcttatggggctgtaacctgctggcccacttcatcaatgcctacctggtggatgacagcgtgagtgacaccccaggggggctgggaaacgaccagaatccaggttcccagttcagccaggccctggccatcaggagctataccaagtttgtgatggggatagcagtaagcatgctgacctaccccttcctgcttgttggagacctcatggctgtcaacaactgtgggctgcaggctggactccctccttactcccccgtgttcaagtcctggatccactgctggaagtacctgagtgtgcagggccagctcttccgtggctccagcctgcttttccgccgggtgtcatcggggtcgtgctttgccctggagtaacctaagtcgcctgaccaaacatttatggggtcctggcctgtccctggtgagggcccgtcatctcagatgcctgagggactctagcccagcctggcttcatgtccatatttgccatgtgtctgtccagatgtggggctggtggtggtggttcacctgggacctgggggagcctgggggagcagtgttggagggggaatccccttcctgcccagaggtac

SEQ ID NO: 4906 - DNA, 1346 bp, Cricetulus griseus
cctgcctgcagaacaacctggctccttcctttatgacccaggactgcaggtgctggtagtgatggctgcccagccccgccacgctgggctctatcgatgctacttggaggagcaggggacaaggctacctgcagaaagctaccgtgttactgtcgtggctggcccatcggtgaccctggaggcccgggctccccttgggaaaaccctgggggcttgtatggctagctgtggtggctctgggggccgtgtgcctggtgttgctgctgctggttttgtcacttcgacggcgacttcgggaacagctagaaaaaggtgccaaggcagctgagaggacattggtgtaccccttagaactgcccaaggaaacaaccagtcccccctttcgtcctggccctgaaacagatgagaaactctgggatcccgttggctactactattcagatgggtctctcaagattgtgcctggtcatgcccggtgccagcctgggggcggtcccccttctccgcctcctggcatacctggccagcccctgccttctccgactcggcttcacctagggggtggtcggaactcaaacgctaatggttatgtacgcttacaactgggaggggaggaccgagaaggatgctcagcgtgggcactgccacttggctcaccagggcatcagcctcacaggaggcacgccttcctctgtgaatttcagacacgtgggacggccagcagccaaaactttagcaaggcagaagtttcaagatgtgggtgtttgtgtatatatgtgttggtgcatttatgtatggatgtgtgtgtgtgtgtgtgtgtgtgtgttgtctctgtcaagtcttcccttggcctgggttcctcctggtgagtctttggagctatgaaggggaaggggtcatgccactctgcctctcctacccccacctgtcccgagcttgggacagtgatgtacatatggggatgggatggacagggtgttgtacccctttggggggagcgcaggactcaggggtgggcctagtcctgctcctagggctgtgaatgttttcagggtgggggtggagggaggagatggagcctcctgcttcagggggaaaggtgggcagggcctcccacttggcctctgggttcagtggtattttatacttgtgctctcccgacagggctgggaaaggttgttggggggggagggagaaggtggggcttgctgtggatactggcatatcctctcccagctctaggaaaagggctcctaacagtgtaacttattgtgttccccacatatttatttgttgtaaatatttgagtatttttatattgacaaataaaatggaagaaaatgaaa

SEQ ID NO: 4907 - DNA, 1346 bp, Cricetulus griseus
  modified_base (18)..(18): a, c, t, g, unknown or other
tggcctgaggatgctgcngtcctggaggacgctctttgcagataatcaaagttggggcttggtttgaccagagcagtgacagaaagcctgcatttcagaggcagtctcgtggctgtaaatgttcaatgtatttattttgtgagtaaggacctgtgattgtgaacagatggttatgtatctgagtgttgtggtaaagcacatcctgtttctcagcgtcgtcgtcctgttagctcttctgtttaaattctggcctctgtatcagatttgatttgacttgcagagcccttggccttccagtgttccacttactacggaggccatggcagcttccaacagcaacctgctgcctggctgatgcactgacagggagcagccctcacagtgactttctgtggttagcaagaggcctttgctcaggtcctgttctgttcctcttcccctctgagtgtaggtggctgggccctgtggtccatacacttctctaactgcctttgatgtctttaattcaccatgtgaacactgcactcatgagtttgtcattctgctagccggggtgaggttcctactagggcccagctgtgtgcaaactctttctgtatgacagacagggatttcttggcatcttcagcactgatggatgggacacagcacagggagccattgtcccctcccccatcactctgctgctccaaggccagtcattaataagcctaaggctcctggagcctgtgatggtcctgcagctctcagcacagtgagacactgtacacagtgcacccgcttggtgccctggaaggttccagtaaagtcaagaaaatgtacacagtaactaaccttgtacatgatggtttttttggaggcttaaggatgctggcaaggatgcagggaggcaaacttcccacctccctacatgggattgtaaaccttgggaactcgtttgttccctcatagtaacacatctcatttttaaattggagctaataggattttgtacccagaatttattatattgttaatacttttctgaaaatacacggtaacaactagtaagcaagagacacagcaggttgcaccatgtgctgggcgcaacttctccagtgggcctgggaggtttgtccattagcttccctgtggttaaatagagctgttggtatagagcggcttgccttgatctatctgttcagtgacttctgctcggcaccgcaagagaagatggacgtatttttataatataagcatactttttttgtacattgtgttcattcttgaataaagtgagctcactgttggcttgtagatattaaaaagaaagtattgattttgattcaataaatgttttactttta

SEQ ID NO: 4908 - DNA, 1346 bp, Cricetulus griseus
ctcccggatgtggagccgttggggcggcggcgtgggaggaagatggactcgctggagaagggggccgccacgtcggtgcccgccccgcgcggacggccgtcccggggccggcccccgaagctgcagcgcagccggggcgcggggcgcggcctggagaagccgccgcatctggcggcgctcgtgctggcccgcggcggcagcaaaggcatcccgctgaagaacatcaagcgcctggcgggggtgccgctcattggctgggtcctgcgcgccgccctggatgcgggggtcttccagagtgtgtgggtttcaacagaccacgatgaaattgagaatgtggccaaacagttcggtgcacaggttcatcgaagaagttctgaaacgtccaaagacagctctacctcactagacgccatcgtagaattccttaattatcacaatgaggttgacattgtggggaatatccaagccacatctccatgtttacatcccactgacctccagaaagttgcagaaatgattcgagaagaaggatatgactctgtcttctctgttgtgaggcgccatcagtttcgatggagtgaaattcagaaaggagttcgtgaagtgactgagcccctgaacttgaatccagctaaacggcctcgtcgacaagactgggatggagagttatatgaaaacggctcattttattttgctaaaagacatttgatagagatgggttacttacagggtggaaaaatggcttattatgaaatgcgagctgagcatagtgtggatatagacgtggacattgactggccaattgcagagcaaagagttttgagatttggctattttggaaaagagaaactgaaggagataaagcttttggtttgcaatattgatggatgtctcaccaatggccacatttatgtatcaggagaccaaaaagaaataatctcttacgatgtcaaagatgctattggcataagtttgttaaagaaaagtggtattgaggtgagactcatctcagaaagggcctgctccaaacagacactctccgccttaaagttggactgcaaaacggaagtcagcgtgtcagacaagctggccatcgtggatgagtggaggaaggagatggggctgtgctggaaagaggtggcctatctcggcaatgaagtatctgatgaagaatgcctgaagagagtgggccttagtgctgttcctgctgacgcctgctccggggcccagaaggctgtggggtacatttgcaaatgcagtggtggtcggggagccatccgggagttcgcagagcacattttcctcctgatagaaaaggttaataactcatgccaaaaatagaaaat

SEQ ID NO: 4909 - DNA, 1346 bp, Cricetulus griseus
cagccaacatggcgcccgtggagcacgttgtggctgacgccggggctttcttgagggacgcgccgctgcaggacatcggaaaaaacatctacactatccgggaggtggtcagagagattcgggacaaggccacgcgcaggcggctggcagtgctgccctacgagctgcggttcaaggagcccttcccggagtacgtgcggctggtgactgaattttccaagaaaactggagactaccccagcctgtctgccatagatatccaagtgctggctctgacttatcaattagaggcagaatttgttggagtgtctcacttaaaacaagaaccagaaaaggttaaagtgagctcttccactcagcaccccgaaactcctctgcacatttctggtttccatctgccctccaagcctaaaccctcacatgaaacagtggatcctggccacccagctgataggcctgagaacctggaattcagctccttcatgttctggaggaaccctctacctaacattgatcatgaactgcaggagttgctgattgacagaagggaagaggaggaagaagatgaatttgaagacagtgatgacgatgggggtgggtggataacccccagcaatatcaagcagatccagcaggagttggagcagtgtgacatcccgaaggatgtacgggttggctgtgtgaccacagacttcgctatgcagaatgttctacttcagatggggctgcacgtactggcagtgaacggcatgctgatccgagaggcccggaactatatcttacgctgtcatggctgcttcaagacaacgtcagacatgaaccgagtgttctgtgggcattgtgggaacaagaccctgaagaaggtatctgtgactgtcaatgacgatggcaccttgcacatgcatttctcccggaaccccaaggtgctgaaccctcgaggcctccggtactcgctgcccactcctaaagggggcaaatatgccatcaacccccatctgaccgaggatcagcgcttcccccagctgcgactctcccacaaggccaggcagaagaccaatgtatttgcccctgactacatagctggggtgtctccctttgcagagaatgacatctccagccgctcagccaccctgcaggtccgggacagcaccttgggagctgggcggagacgcttaaatcccaatgcttccagaaagaagtttgtaaagaaaaggtgacattgcaagccctgtaggcaaagcagattgcagctggctgctcaggagacctggagtaccaaccccagggtctccactgcagaccagttgcacagaagcagtgcccctggattctctggactgcctgag

SEQ ID NO: 4910 - DNA, 1345 bp, Cricetulus griseus
gccgtgtgtgaggcggcggggttcacggcgcggaggcggggcgggggcagcatggcagcctccctggggctccgaggagcagcctccggtctccggtattggagcggtcggccgcggccggccgccagccttgcagcggtgtgttctaggtccatggcttctaagactccagttgggttcattggactgggaaacatggggaatccaatggcaaaaaatcttatgaaacatggctatccactcattctctatgatgtgttccctgatgcatgcaaggagtttcaagaagctggtgaacaggtagcgtcttccccagcagacgtagctgaaaaggctgacaggattatcacaatgctgcccaccagtatgaattcagtagaagtttattctggagcaaatgggattctacaaaaagtgaagaaaggctcattattaatagattccagtactattgatccttcagtttcaaaacaattggcaaaagaagttgagaaaatgggagctgttttcatggatgctcctgtttctggtggtgtaggagctgctcagtctggaaaccttacatttatggtgggaggagttgaagatgaatttgctgctgcccaagagttgctggggtgcatgggctccaatgtgatatactgtggagctgttggcactgggcaggctgcaaagatctgcaacaacatgctgctggctataagtatgattggaaccgctgaagctatgaatcttggaatcaggtcagggcttgacccaaaattgttggctaaaatcctgaatatgagctcaggacgatgttggtccagtgacacttacaaccctgtacctggggtgatggatggagttccctcatctaataactaccaagggggatttggaacaacactcatggcgaaggatctgggattggctcaagactctgccaccagcaccaagagcccaattcttctaggaagcctggcccaccagatatacaggatgatgtgtgccaagggctactcaacgaaagacttctcgtctgtgttccagtatctgagggaggaggagaccttctgatttgccctctggacatggacacttgggaaccagactctgccctttgttacagtgtcttagtgtgcccctcctgttacagctttccacactcaacctacttgcttctgtatttctgcttcctgtatattcttactacatatttttgactccagaagaatgacatctttagactgtttcagagccaatgatgatatttcctttagacaattattacattattctaactatagtcatattattttgaatttaaataaatttctatgctgataacaaaaaaaaaaaaaaa

SEQ ID NO: 4911 - DNA, 1345 bp, Cricetulus griseus
gtctcctgcatgatccaatggtcctcttggcccgcctgcatctgctctgcctgctctgtgctgatgctgaggaagaggagaaaggccatgttcacagcccacggtggtacctacaggagctgctggctggactacagcagagggcagccctagatggtggtccccaggccttggccactctctgtttccaggcctcatacctcgttgccagctgcctggctgggcaacctacagtgcgcacatctttggtccatggactggcccaactataccgagctcggccttccctagctcctcattttgtagacctcttagatcaggtaagccccgagctgagagagcccctcagggtggtgctgcagcaagaggtggtagccaggccaggcaagaacgaatcgctttgctggcaccttcgaatgctggcaaaggttgcagagggagatgcccagagagccaccctcagctttctacaggctgcagccatacactgcactgactggggcctacagcaggccctactgcgggtatgccgcgctctgctgcggacaggtgggggagatggcctggcagacttgctgcaagtactggccagacagctagaggatgctgacgggcgggaccatgcccgactctactatatcctcttttcccatctgtcaagttccaagttgggcatggccctgggcccctcacttgctgtacctgcactggcctcgtcactaggccaaaggcacactcccggtgctgcatctgcaggtggaggcactggaggctccctgtctactctctggagctgcgcttccgtgtgggcaggacagctctatgggcctttggaggctgtccacatacccctgcttgtgtccagggcagcctgcccatcctctgtgcctgaccttgcagccccgacgcccagcccctgctcgcctacatgttgaggccctttataccacacctgctggcctcacatgccatgcacacctgcatcccttgtctgtgaagtttgctgacctcttcctgcctttcccccagctccccaagggctccgagctgtgtttctttgatgatctctggaactcctgcctgccaaagggtgtagaaagtcgtatgtggtgtccacttgggccacagggcctggaggccttggtgtcccaacacctagagccctttgttgtagtggctcagccccccaccacctacctcatagctgtccaactgccccctgactccatgctgctgctgcgactggagaaagctcaggtggatggtgtgcctgtggccctaaggactgacaactgggccgtgctgcccctggttggggactacctccgtagccttgcagcccact

SEQ ID NO: 4912 - DNA, 1345 bp, Cricetulus griseus
taaatttttgtaataattcaaacaattttaacatatataaaaagttctcataagaattagtataataatttccctgtgtcagagtgttcttagcttaacttttaagtcttttttaaggggaagaagtcctagcaacaaacaaatgttattcagttactacagccttaagtcctgttgaagttgaaaaccagtgctaaatcacagtcataggcattaacatgttcttgggaagaatatagcaggcaaatacaatttggtaaatattttcaatcaggaattctaggctctattgactgagtcacactgcataggaatttagatcctaacttttatagattattaaaagatcttgccaacaatgcacaaaatcgtcctcctaacaagttctgtgagacatgtcataagttacagtttgcacaaattcatctcattttgtattcctctgattttccatttcctcccaaacaataaatacatattttttgtaggcaataaaagtttaaactccatttgttaaaaagtagtaatctgttgataattgtgtagtcattttttaagaccccaaagttactttaaaggtgaatttatacttaataaattctgggtaatactgggtagcatgaattctgcactgaaaaattgaacagatacacccagtagctgtaaaattctgtcaaatataaaaatcatttctaaagtacattagttttcaaagaatagttattaattagattcagatttgtggtttagtttaatagtttgaagtgcctgtttgggatgtggtaggcattttagatgaatttgggaaaaataaagtgctctgcagaaatgccggttttagacccggccaccccaaccagctaagtgggctatgtgctgatttatctccaggtccccaattccactgtctatgtcttcatgttgagaacacttctgcatttttatttgagtgccaatttcttactagtgctatttctcaatgtaacatgtttacctggaatgtattttaactatttttgtatagtgtaaactgaaacatgcacattttgtacattgtgcttttctttctttccattttttttctttcttttttgtttctttattttttttcttctttttgtgggacatatgcagtgtgatccagctgttctccatcctttggttgtgctgacctagggaatgttggtcatatcaaacattaaatttaaaatgaccactcttttaattaaaattaacttttaaatgtttataggagtatgtgctgtggagtgatctgaaatttgtaatatttttgtcatgacctgtactgctcctaatcattgtaatgtaataaatagttatggtg

SEQ ID NO: 4913 - DNA, 1345 bp, Cricetulus griseus
cagtggttttgcctttcccgagcaaatcatctccgcatgggcccaggaggggattcagaatggcagggagatcttgcagagcctggacttcggtgtggatgagaaggtgaacctcttggagctgacctgggcccttgacaatgaactcctaacagttgatggtgtcatccagcaggcagccctggcctgctaccgcaggaactgaactaccacaaggacaagtggagcagctggtgcatgagcgggacaaggtgaggcaggacctggagaaagctgagaagaggaacctggactttgtgagagagatggacgactgccactctgccctggaacagctcacggaaaagaaaatcttcaactggaactagaaacttcagtgagcagaaatgaaacacagaggcaggaaattgaggttttaaagagagacaaggaacaggcctgctttgacctggaagagctcggcacacaggctcaaaggtacaaggaggaattgtcacagcttaactgcaggatccttcagctggaaggggacacttctgccctccacactcagaaggaggaaaatcgtgttgccatccagctgttgatgcagaagctggaggaggcagggtgccgggagcagcagcagggtgtccaaatccaaaaccttgaagttgaacttgagcgtgtaaatgaggaatgccagggcttacgactgtcacaggcagagctgacagaaaccctcaaagaaagtcaaggccagctgcacagtgtccagctgacactggagaatgcacagtgccagcataatcggattgtccagtgccttcaggagcagatgggtcagttggttcctggagctcacgtagctgagcttcagcacctgctcagccttgaggaggaggccgggagacgactaaatgcacagcaggaagaatataagcagcaactgaaggccaaggaggaccaggtggaggatgctgaggctcggttacgcaatgtggagtggctgctgcaggagaaggtggaggaacttcgagaacagttggagaagaacaccagatctgatttgctgctcaaggaactgtatgtggaaaatgcccacctcatgaaagctgttcaactcacagaagagaagcagcgaggtgctgagaggaaaaactgtatcttggaagaaaaagttcgagctctcaacaaactgatcagtaagatggcaccagcatcactttctgtgtagaagctgctgtttcctagagttcatgtgaaggaatgtgttttcagatactgctactctgatgccagaatttcctatggctcactagccactccctcgacatgtaatgactggttcctgttcaccctacaa

SEQ ID NO: 4914 - DNA, 1345 bp, Cricetulus griseus
ggagtcagacctgagagcgcagcccgtgctgctggcaggacagaggaagatgtctgcgctcaagcggatgatgcgtgtctccaatcgctccctgatcgccttcatcttcttcttctccctctccacgtcctgtctctacttcatctatgtagctccaggcatcgccaacacataccctctttatggtacaagctcgtggtatcatgcatcttcccattttcttcctgcacctgattccgatgctccagaaacagcggctggaatttgccttttatgtcatcgaacagactggcacacaaccgttcagtcgagcgatgctctttaatgtgggtttcaaagaggccatgaaagacggcgcctgggactgtgtgatcttccatgatgtggaccatctgcctgagaatgaccggaactattatggatgtggagagatgccgcgtcactttgcagcaaagctggacaagtacatgtacatacttccatataacgagttcttcggtggggtgagtggcctgacagtggagcagttcaggaagatcaacggctttcccaatgccttctggggttggggaggagaggatgatgacctttggaacagagttcactacgctgggtataatgtaacccggccagagggggacttgggaaagtacacatctattcctcatcaccatcggggggaagtacagtttttagggcggtataaactactaaggtattccaaggagcgtcagtacatcgatggattgaacaatttattatatacgcccaaaatactggttgataggttgtatacaaacatatctgtaaacctcatgccagagttagctccaattgaagactattaaaagaagtgtctcatggtggggcaggctacagcgctggatcgtgaacttggcttggagcacactcttcatggaggttagagagcgacatgtctctgtgtcccagtctgtgaaaagagccagcagtctttatgtttacagcgcgggactccataccatcacactcccccctctcctccctgctttggggcttcctccatggcaagcattgtacagacctgaacccatggcttgggattggaagtaaagagagctccctacgaagagaaggttttataccgaaatctataatttaattcaagagaatgcttttatttccgttcaaaatgtattttgtacatatgtgatgtaaattaaatgtgttcaaattgttgaaaaatgagatgtcacaatttttgcatgtaattggttatgccttcattggacttttatagacttttttatttgcatggggaaaaaaactatgtaaatctatgtcttgaaataaagattgagccttg

SEQ ID NO: 4915 - DNA, 1345 bp, Cricetulus griseus
  modified_base (59)..(59): a, c, t, g, unknown or other
  modified_base (64)..(64): a, c, t, g, unknown or other
ctgccaggcagaggcacccctcctgccctaaagagttcagtcctgaatgctatgcaggntcccngaaccaaacagaccatctggcagttggccacagaacctacaggtcctctggtacagagagtcactaaaagcatcatggtagtgaaatgcaaggccagccagggaaagtcgacagcttgggctatttgcacacgtccttcatgcagaagatcggctccagaagcttgccagagcgacgcttcttctgctcctgccagtctctgaagtcacacaagtccaacatccccaaggctgaggcagccccaaagtgcatccatttctttgcttgcctctgtgtcctttgccagtgacgaaacactggctcaggaattctcggacttcctaaatttgatgccagcggtcttaaagaggtaatggtgccccagttaggctgccactcagagtcatctgtctcggctttgtgaatctgctgcctctaagccacggaagaggaagaaggatgaaatgtctggtgctcaggtgaacagctcactgatgccacaagacacagtaaacagcattgtaaggaagagtgccctgaaaaagcctgtggtggcctcctcactaaaaaggcaggtctgtggtcagctgttagatgaggcacagccttgcaacagagaaatatccatagggaagtgcaaaaaagtcggctccccaactccaccacagcttttgctcgcaaagatgccttgccactgggaaccttttccaagtacacctggcatatcactaatattctgcaagttaaacaaatttttagacacccccaagagatgcccctggaaatcactcgtagctttatccagaaccgggatgggacttacgagctgtttaaatgccctaaagtggaagtagagagcatagcagaaacctacggtcgaatagagaagcagccagtgctgagacctttggagctgaaaaccttcctcaaagttggtaacacatcccctgatcaaaaggagccaacaccctttatcattgagtggatccctgacatccttccgcaatccaagattggtgagcttcgaatcaagtttgagtatggccaccaccggaatggacatgtggctgactaccaagacccgagaccacctctggaccagcctttggagctggcccctctgaccactatcactttcccttgaggcaaatcaagagttttttttgcggagtttgcacatccccacccctgaccactgtaaatctagtagcacttaattgggcccctgctaatgaactgcacttagctaagatgcagctgctgagaacccatccatgtggggtctgcagaagatactcttgt

SEQ ID NO: 4916 - DNA, 1345 bp, Cricetulus griseus
atgtcgagtatgaccagtgttcagaagcagagtatcccagtgctgctggaaggcagagatgcccctgtgcggtcccagacgggctcaggttaaaactcttgtcctattgcatcccctgtggtccagtctcttcaagcactcacatcaaaaatacagcgcagtgatggcccctatgcgttggtcctagtgcccaccagagagctggctctgcagagctttgacactgtccagaagctgctcaagccattcacttggattgttcctggagtgttgatgggtggagagaagaggaagtcggaaaaagctagactacgaaaggcataaatatccttatctcaactcctggcgtctggtggatcatataagatccacaaagaacattcactttaaccgaatacagtgctggtagtggatgaagcagacaggatcgcttcgccttgtgtgccttgctgccttcatcctgcagaagtgcaagtttgagaaggaccagaagatgattgtctttttctcaagttgtgagctggtagagttccactacagcatcttcgttcacaccctgtcttgccgctcaggggctcccacttcagagcagctaccatctgcttcctggccactgaaattccttcggctgcatggcaacatggagcaggaggaaaggacctctgtatttcatgagttctcacatttctggaacaaggagtcctgctctgcacggatgttgcagctcgaggcttagatctcccacacgtcacctggattgttcagtacagtgctccgtcttcacctgcagaatacattcaccggattggaagaactgcccggattggctgtcatgggagcagcttgctcattttggctccttcagaggcagaatatgtcaactcgttggcttctcacaaaatcaatgtttctgagattaagatggaagattattttggctgtcctgacaaaggatgattgctttaaaaggagacaaaggggagcccagaaatcccatgccactggctcccaggaaatccgagaacgagccacagtattgcagacagtatttgaagattacgtgcactccagtgagaggacagtctcctgggcaaagaaagctctgcagtccttcatccgagcctatgcaacctaccccagggagtttgaagcccattttccatgtcagatccctacaccttggccatgtggctaagagtttcgggctaagagatgctcctagaaacctcagtgtctccactgtgaagaagaaagcaagcttgaaaaggcctgaccctcggaggaagacccggaataagcaccactttgtgctcgctgaagtactgcactctgaatactcgagtgg

SEQ ID NO: 4917 - DNA, 1345 bp, Cricetulus griseus
  modified_base (1331)..(1331): a, c, t, g, unknown or other
cgcgcgccatgcgtctcttctgctggtggcaagtggtgctgtgggcgctgggccttccggcccgcggcctggaggttgcagaggagagtggccgtgtgtggcgggaggagcagcctgaccccgctctccaggttggggccctgtacttggacgaggaggaggctgtgcagggccatcctggacaggagagggcggtggagccggccgaggcctctctggggccgggcactcgtggagatcccgtgctggtgctgtcggtgattccgggggcagctgaggaccaacggagcgccgaggcccgagacggcacctgcagcacactgggagaggaagacccgagctgcagccaggagagcctcttcgcgctgcaccgtgtgggtggcttcccggagcgggaagaggagtactacgccgagcctggagcggcggaggccgagccggtcgccaccgaggatgccaacagcaccgacagtctcaagtcccccaaggtgaactgtgaggagaggaatgtgaccgggctggagaatttcaccctgaagattttaaacatgtcccaggaccttatggattttctaaacccaaatggtagtgactgtacgctggtcctcttctacaccccgtggtgccgattttctgctagcctggcccctcattttaactctctgcctcgggcatttccaactcttggctttttggcgttggatgcctctcagcacagcagtctttctacccgatttggcactgtagctgtccctaacattttgttatttcaaggagctaagccaatggcaaggttcaatcacactgatcgaacactggagactctgaagaccttcattttcaaccagacaggtatagaagccaggaaaaatgtggtggtgacaccagctgaccaaatgggccctctccccagcacactgataaagaccgtggattggctgctcgtattttccttattctttttaattagttttattatgtatgctaccatccggactgagagcattcggtggctgattccaggacaagagcaggagcatgcagagtagagacacagctaaaggggagaagaggagtcccagccgcacttaagcttcagggagacaacgcccgcaatgccgacttacaaggaagtcagattcaagaattgtgttcttggcgaactactgaggctaaagagatgacatataaatgtgttttcacggtgacagtttgcagatgcaaaagtattctctagagttgaccattcttgtttctaatgcttgaatacaatgaatttctcttctaatgtcattaagcaaggaaagtgctgaaacaaaaaaaaaaaaaanaaaaaaaaaaaaaa

SEQ ID NO: 4918 - DNA, 1345 bp, Cricetulus griseus
  modified_base (1317)..(1317): a, c, t, g, unknown or other
gagcgagcatggagaccgctgcggacgccgggacccgtcccgtgggcgcggggacgcttgcaggcgcggggaccccgccaggcttgcagaccgactgcgaggcgctgctcagccgcttccaagagctggacagcgtgcgcttcgaggacttcgcggagctctggcgcagcatgaagttcgctactatcttctgtggcaagatgaggaacttgaaaaagaacatgtttacaaaagaggctttagctctggcctggcgctattttttgcctccatacaccttccaaatcagagttggtgctttgtatctactatatgggttgtataacacgcagctgtgtcagccaaaacaaaagatcagagtcgccctgaaggactgggatgaagttaataaatttcagcaagacttgataaatgcacagcatttcgacgcagccttcattttcaggaatcttcgactggacagagccttccacttcacagcaatgcccaagctgctttcatgtagaatgaagaaaaaaattcagcaaactgaagtgacccaaaagtttaaggacccaagtgatcgtgtaatgaaacttatcacttctgatgtattagaggaaatgttgaatgttcatgatcattatcaaaatatgaagcgtgctatctcagctgataagtcgatgccagacaaagccctcagcctggtaaaggaggatttttttgacaacattaagaacatagttttggagcatcaacagtggcacaaagacaggaagaatccgaccctaaaaccaaaacttaaagagggagaagaagacagtgaaggcccttcacaggaaccagagagatgtgaaagagcggagtccttagcaaaaatcaaagcaaaagccttttcagctgttgcccaggcatccaagtccaggaggcatcgccaagccaaacttgactcttcggactctgattccgggtctggacaagggcaaggcaaagcagctaagaaaaaagaaccagagagacagcagcagaaccaagaggaaggaagagggcttccaggagcagaggtaacgttcagaatgaacggaaggaagagaagtctttatgcctgagtatgcccataattgccgaagaggaggaggaggactgacaacttcagcgaagcagagttcactgcacccaagaggaaaagaaagcgctgaccaggagcctggtggagttttatttcaattctgagctttcttacagaagaacaggtttggtttgttctgagcaggaggctggccagcgaggaccaacgtacgagaatgaggtcatttctgtgaaatgggagagcccganataggtcaagagttggaatacaagttta

SEQ ID NO: 4919 - DNA, 1344 bp, Cricetulus griseus
ggacctgggctcgggccgcgcgctgctgctgctgccaaccggggagggttttacttttagtgggatctgccgggtgacttgcatctatggccaggtggaaatatacggccatgtcatcaaacaagggcagcctgcccgagatgtttattctacctacacccacgcctacctgaccatcaacggggttgagtacccagagcctgagaaaagtgagaaggagatcaggagagagatccgggctctgctcaagcctcacatgagactggatgacagaaactgggcaatacagaatttccctcccctgggttccgtggtactgctggagcagcttcggacgtctgctgtagacttcatgagcttctacgcgtgtgcatcttatgtcttcttgcaggagaatactcctatgcggaccaatgctgagtatttacttttgaagaagattggcctcagaaggcagaggaagaagacactcacccgaggaggccacagaagatggcgtattacgggaagatgagttgtcacaacgactatgagaattacattgagatcgtaaaatacgtgttccgggattacaggagggagtccccactcatcatcaacacaatgggctgggtgaaagaggacggcctgctgctgctggtggacctgatccgactgttgtgccccaactatgtcgttcagttgtctggccggaataaaacaatgtccgctctgacctcagaatatgtagagctcacagatggcctatatacaaagagcaagatcaaaaggagacatcggggtttcgaaattcaagaatttggagatagtttggaatttactgatgaagaaaaagactcttgtccagttccagccttcactggacataagctaatagatgttcactcagaatttttatgtgataaaaatgaaaaaatagggccaaatacaacaaaatttttcgagacctggcagtgttgggctaccttagccagctgatgccgcctgtgccagggccgcttacccctttgcacagcctgactccctatcaggtccccttcaatgccgttgctctccggatcactcatgccgacgttgccccttcccacatactgtacgccgtgaacgccagctgggttggcctttgcaagatcgtggacgacatgaaagggtacactaggggtcccatcctgcttgcacagaaccctatatgtgactgtctgggctttggcatttgcagaggcattgacatggaccagcgtctgtaccacattctcacgcctttgcctccagaagagttgaaagctgtgaactgtctgctggttggtgccattcccattccacattgtatcttcaagaagcagc

SEQ ID NO: 4920 - DNA, 1344 bp, Cricetulus griseus
cctctcccccagacacatcatggtggagcccatagaaaaactgccagaggaagtgttggcactcatcttccgtgatctgcctctcagggaccgtgctgcagttgccagagtctgcaaggcctgggctgctgctgtcaccagcagtgctgtgtggcatgacactagcatcagttgtgactgtaagctggaagacctgttgccaccctatatgtccacctgcctgaaccacattcacaatctaaggactggaatatgaaccatcaaagacgcccagccgccgagcagccactgaactactaactgctctggccaaccaaacaccacgacttcgaggcctatgcttggaatgccacggagaaaagccgcttttccgatgctggccatgacattctgagcgctgtacatgctgtctgcggagcggctcaccaactgcaccatctcgacctgcgctgcttgccctacacactggacgacacgctggtgcttcaagctgcacgtgactgccccgagctccgcagtcttttcctggacaaccatgcactagtgaacagcgtgcagcccagctctgtgctcaagcttttggaggcctgcccacacctaagcgcccttggactgcacctggccagtctgtcgcctgccgcgctggaactgctgaccgcaccacatcgcaccccttttgcactcctggcactgcggtgcgcgtgccccgaagatgctcgtgcgcccctcctgcctgatgaagcctgggcaacattgagttcccgccaccctgggctggaggtggagctggagctagagcctgcacttccaaacgaggctgtaatgcgcgtcctgcaaccagcagtgcccgtggctgtgctgcgtctcaacctctcgggtgataccgtagggccagtgcgcttcgctgcgcgccactacgccgaaactttgcgcgccctcgaggtgcgcgcctccgcttccaccgagctgcacaccgctctagaggagctggcggcgcgctgcgcaggcttgagagaaatacactgcttctgcgtggtgagaccctcggtactggacgccttccgcgcgcactgcccgcgcctgcgcagctacacactcaaactaaagcgtgagcagcatccctggcggcccacgctggtgcggtgattgagcaatctcaccactccaagacccgaagccccctgaaagacctcagcaagttgcacaggcactcctcagcggctagccctgttcttggggagttcatagaccacagtgcttctcggggactggggcctctgagggcatccagaccagtcccgggctccatggattcacggggccttctccacctctgtgtctctg

SEQ ID NO: 4921 - DNA, 1344 bp, Cricetulus griseus
ctaaaactcgttctgaaatcccagaaaatgaacactatagagtttgtggaactggaaaagctgcagcctgatacattagtccatgcagtactcagagtagtggacatcactatattgacagaggcattatatagttatagaggacagaagcaaaggaaaattctgttaaactgtggaacaggttcaaggtcaacattatgtgcttgtattatggggtcctggagcagcctggtatactcagcttcaaaggaaaaaagattgtatttgggaatttaagtacctttttgtccaacgcaattgcatactagaaaacttagagctgcatacaacactgtggtcttcctgtgaatgcctgtttgatgatgatacaagagcaatttcgtttaaagcaaaatttcaaaaatataccctcctatgtcaagacatcagacttagcaactacacctaaaggataagtattcaggagtagttctgattaaagccaaggttgcagagctggtgtttactgtcacagcaactcagaagatagctctaaatgctcgaagttctctgaagcgcatcttctcttctcttcccaacattacatatgctggctgtgcacagtgtggcgcagaactgggaacagatgagaacaggatctacagacagtgtctgagctgtttgccatttactaggaagaaaacattctataggctggctttaatgactatcgttgatggaaaacatagtgtttgtgtccatgtagggtcaaagatgatggagcagattcttctcagcatctctccagactgcctcagcagagtgatagtaccttcctcagaagtcacctatggcatggtcgcagcagacttgctccactccttgttggcagtcagtgctgagccttgtgtgttgaagattcagagccgttttgagttggatgaaaacagctacccattgcaacaggatttctcccttctagatttctgtcctaactcatgtaagatgtggaacccgggactttctctgagttcagaggaggacacaggtggcattccaatgaaggagtaatgaaataatctgctttttaaagatttatttattttcttatatatttatgagttttgcctgtgtatgtctgtaccatgtatgtgtctggtgcccacagaggccaggagagtgttccaaatcccctgggactggagtaatatatggttgtgagttgccatatgggttttgagaaattgttcttaactgctgagccatccaaccctatgatctatgtcttaaaataaatgaaatgacaggggttttgcttagagtttttaaaataaatattttattagcataatataatagtactaa

SEQ ID NO: 4922 - DNA, 1344 bp, Cricetulus griseus
ggaccctcggaggtgggcggcgaggcatggcgacgcgggcccgcggcttcttgctgctccggggcggcctgggcctaggaccggcgagggcccctggagtggccgagcgcgcttggcggggcttcgggagcagcggcaggagacatgaagccattatcatctcaggaactgaaatggccaaacaaatccaaaaagaaatacagcaaggtgtgaaatcatggattgctcttgggaacaggaggccccacctcagtatcattttagtgggagacaacccagcaagccacacctatgtcaggaacaagataaaagctgcttcggctgtaggtatctgcagtgagctcattctaaagccagggaatgtttctcaggaggaacttttagacatcactgatcaattgaacatggacccaagagtcagtggtatactagttcagctaccccttccagaccatgttgatgaaagaacaatatgcaatggaattgccccagagaaaagatgtagatggatttcatatcatcaaaagaacaggaattgaaacatttgggaaaaatgtggttgtggcaggaagatccaagaacgtgggcatgccgatcgccatgctgctgcacacggatggagagcatgagcgcccaggaggtgatgcaacagtgacaatagcacacagatacacacccagagaacaactgaaggtccacactcagctggcagatattatcatagtggctgcaggtattcccagattgattacagctgatatggttagagaaggcgcagctgtcattgatgtgggtatcaactatgttcaagatcctacaactggaaagacgaaattagttggagatgtggactttgaagctgttaagaagaaagccagcttcatcactccagtcccaggaggcgtgggacccatgacggtggccatgcttctgaagaatacacttctggctgccaagagcatcatttactagatgacacagtggagtacacacaacaaatagtgctgcttatttatttgacaaccgccaaattctttctattttcctacaaagctatttatttctacattgtgtttatttttcatgagtggaatcattgtagaactgattatttacacaactttatggattccttgttagtagattttgagttttaagaaaaaaacaaagcaattacaatgataatttggataacaattcttattttatggatatttgtccgtaatgttaaaacaaatgaagaattcatatttaatgatatatatttttgacataacctaagtatcacatatagtatgttttcaaaaacttttgtcagccaaattggtgccatgtaaactgtaa

SEQ ID NO: 4923 - DNA, 1344 bp, Cricetulus griseus
ggcaatgtgggagcagtgccagctactgaagagtgcctcggtgtttgcccgctgccaccctctggtggatcccgagccttttgtggctctctgtgagaagactttgtgtacatgtactactgggccagagtgctcatgccccgccctccttgagtacgcccggacctgcgcccaggaagggatggtgctgtatggctggactgaccacagcgcctgtcacccagcatgccctgctggcatggagtataaggagtgtgtgtctccttgcaccagaacctgccagagcctgcctatcagtgaagtgtgtcagcagcaatgtgtggacggctgtggctgccctgagggagagctcctggatgaagaccgctgcgtacagagctccgaatgttcttgtgtgcatgctgggaagcggtaccctcctggcacctccctctctcaagactgcaacacttgcatctgcagaaacagcctgtggatctgcagcaatgaagaatgcccaggtgtgtcgattggaggcaactgatttttgtgctatgtcgtgcccagcatccctggtatataaccactgtgagcatggctgccctcggcactgtgatgggaacactactagctcctgtggtgatcacccctcagaaggctgttttttgtccccaacaccaagtcatgctggaaggcagctgtgttcccgaggaggcctgcactcagtgtattggggaggatggagtccgacatcagttcctagagacctgggtcccagaccatcagccctgtcagatctgtgtgtgcctcagcggaaggaaggccaactgcactgcgcagccatgtcccacagccagagctcccacgtgtggcccatgtgaagtggctcgcctcaaagagagtgcaaaccggtgctgcccagagtatgagtgtgagtgtgacctggccaactaggggagtacatctgggagaaaagggtcacaggctgcccacccttcgatgaacgcaggtgtctggctgaaggagggaaaatcgtgaaaattccgggcacctgttgtgacacttgtgaggagcctgattgcaaagacatcgttgccaagctgcagtatgtcaaagtgggagactgtaagtcccaagaggaagtggacattcattactgccagggcaagtgtgccagcaaagccgtgtactccattgacattgaggacgtgcagcaacattgctcctgctgcgggccctcgaggacggagcccatgcgtgtgcccttgcactgcaccaatggctctgtcgtataccacgaggtcatcaatgccatgcagtgcaggtgctctccccagaagtgcagcaagtgagggctgtgcagct

SEQ ID NO: 4924 - DNA, 1343 bp, Cricetulus griseus
acatttaaggagtttataccttacatggccagcaaatacaacttccagtatgagcttgttcagtacaaatggccgcggtggcttcattttccagcagacagagaagcagcggatcatctggggctacaaaatcctcttcctggacgtgcttttcccgctggtggttgacaagttcctgtttgtagatgctgatcagattgtacgaacagatctgaaagaattaagggatttcaatctggatggtgccccgtatggttacactcctttctgtgatagcagaagagaaatggatggctaccggttctggaagtcaggatactgggccagtcatttggctggacgcaaatatcatatcagtgcactatatgtcgtggatctgaagaaatttaggaaaatagctgctggtgacagactcaggggacagtaccaaggtctgagtcaggatccccaacagttctttcaaatcttgatcaagatttgcccaataacatgatccatcaggtgcccatcaaatccctccctcaggagtggctggtggtgtgagacgtggtgcgatgatgcttctaagaagcgggcaaagaccatcgacttgtgtaataatcccatgactaaagagcccaaactggaagctgctgtgcgaatcgtccccgagtggcaagactatgatcaggagatcaaattgatttagactactgcaccctagtgggtgctggatctttggggctaaggctctgttggatttgtacctcagaggaagacacatggctgatcttctgggactcccttcacaccagagggagaaatggtggcagcaattgaaagaaactgagtctttggtgcccacatccaagagcacacattgctgccctggctcagaagctggccagaaaagccaccatgtccttccttacctcagtttacctgcagccctcgctgcacggcagatgcccaccctgcacaggtcaggcccggcagatgcttcatccaaggtccatgcctcaaggtctatgccagcatgcttctcacatctcctgccccacggtctcttcccaagcattaggctcattgttgaattgagcccaaccgataatcatgtgtcttcagggttggctcagttgctaagaatcagtcttcaggagaactggggtggcttgggtgagggttggggaatgatgggcagaggagagtttgtggtgttcaaaggtagaagacaaaaaattggccattctcttaaacaagttttctagttatgaggacttctcacatgccagatcgcgttcaagcacattaaacattgtcgctcaggaagttactgaaatttccaaatgtctggaaggttctca

SEQ ID NO: 4925 - DNA, 1343 bp, Cricetulus griseus
  modified_base (1103)..(1103): a, c, t, g, unknown or other
  modified_base (1105)..(1105): a, c, t, g, unknown or other
  modified_base (1107)..(1107): a, c, t, g, unknown or other
ctttctttttttttataaaaccaaaaaagttttcctcacgacgtagtcttggagccagacttgaagaatgattcgtgaatccggaatggatgacagcgtcactaccacatatttttgaccatggatccttatgattcacaaggatcaacttctagacgaagaacctcaaatcttaaagattactttgtaggtgctacccctctgcagaaacgactggaatccatcaggagacagagttcattttttcccagtccacctcgaaggaaaattccccaaggtacagagttgcaggaagaaattgatcctcagaaggttggatttctcctccacaaacaatggaccgtatatagtttaactccctgtataaattctcttatactaatttcaaagaatattctagacttctaagtgcatttattgctgctgaaaagcaaaaaggacttgctgtgcaagtgggagaagactttaacatcaaagtgattttctctaatctagttggagtgagaggaacacaaagggaccctgaggcatttcttgtgcagattctttcaaaatctcagtcatccagagagcacagagaaggtagagtgttgtggactggttggttctgctgtgtctttggagagagtcttctggagactgtttcagaagacttcacctgtctacccctattccttgcaaatggagcagagtccaatacatctttaatcggaggctggtttcagaaaacctttgactgttgcttcagtcctttagcaatcagtgcgtttcatctttcctggatggctgctatgtggactgcatgcgaaatggaccattacatggctactactgaatttttttggtctgtgccctgtagccctcaaagcttggatatttcttatgcaattcatccagaggatgcaaaagctttatgggacagtgtccacaaaacacctggggaagttacccaagaggaagttgacttatttatggactgcctttattcacatttccataggcatttcagaattcacttatcagccacaagattggttcgtgtctcgacatctgtagcttcagcacacactgatgggaaaataaagtatatatatatatatatntntnttttttttttttttttttttctttttggtttttcgagacagggtttctctgtggctttggagactgtcctggaactagttcttgtagaccaggctggcctcgaactaattaactttttttttcttttacagattctgtgtcataaataccttattggtgtgttggcatatatgacagaactggcaattttaaaactgagtgaattctcgtatggactacaaatgatgcattataaa

SEQ ID NO: 4926 - DNA, 1343 bp, Cricetulus griseus
ttgcggaaagggagctatgacgaggttgatatgtcagacctctccccagaggagcaatggagggtcgagcatgcacgtatgcatgccaaacatcgtggccatgaagccatgcatgctgaaatggtcctcatcctcattgctaccttggtggtggctcagctgctcctggtacagtggaaacagaggcatccccgttcttacaatatggtgaccctctttcagatgtgggttgttcccctctatttcacagtgaagctgcattggtggaggttcttggtgatctggatcttcttctctgctgtcacagcatttgtcaccttccgagccacacggaaacctctagtacagacaacaccaaggttggtttataaatggttcctcctaatctataaaatcagctatgccactggcatcgttggctacatggctgtcatgtttaccctctttggtcttaacttattattcaagattaaaccagaagatgcaatggactttggcatttctcttctcttctatggcctctactatggagttcttgagcgggactttgcagaaatgtgtgcagactatatggcttctaccatagggttctacagtgagtcgggcatgcctaccaagcacctttcagatagcgtgtgtgctgtgtgtgggcagcagatctttgtggatgtcaacgaagagggcatcatcgagaacacatacaggctttcctgcaatcacgtattccatgagttctgtatccgaggctggtgcatcgtggggaagaagcagacgtgcccctactgcaaggagaaggtggacctgaagaggatgttcagcaacccctgggagaggcctcatgtcatgtatggacagctgctggactggcttcgatacttggtagcctggcagcctgtcatcattggcctggtacaaggcatcagctatatcctgggcctggaataatatggaaccatatcattggagaacccagcccacccgccatggacctcagggcactctccttgctgcccacaaagacttgggtgggaaagactcaaaggcatttgggccactcaggacttccccagctgtgtctgggttgggaaggggataatgatggagaactagccagtggggctgtcagcagtggggactttttaaaagaaaattattttgatgaatatatttaaattttttattgtggagtataggaattgtcccccacgcctgggccttatcctgtttgaacagggtagggcaaagccgttggtcccgaggggtcttttcacctctggctgagagcattggtgcgttttctgatgactgagtgcttcagcctaccctttcaccttcccttccct

SEQ ID NO: 4927 - DNA, 1342 bp, Cricetulus griseus
ccgccgccgcccggggtagcgcgagcctccgctccaccgccccgccgcccgccgccatggacctgttcggggacctgccggagcccgagcgcgcgccgcgcccgcctgccgggaaagaagcacaggaaggacccgtgctctttgaggacctgcccccggccagcagtactgattcaggatctgggggacctttactctttgatgatctcccacctgctggcagtggtgatccaggttctcttgccacatcagtttcccaggtggtgaagcatgaaggaaaaggaacaaagaggaaagctccacaggaagagaagaatggcggtgaagagcttgtggaaaagaaagtttgtaaagcctcatcagtgatctttggtctgaaaggctatgtagcagagcggaagggcgagagggaggaaatgcaggatgcccatgtcatcctgaatgacatcactgaggagtgtcggcctccatcatccctcattactcgggtttcatactttgctgtttttgatggacatggaggaattcgggcctcaaaatttgctgcacagaatttgcaccagaacttaatcaggaaatttcctaaaggagatgtaatcagtgtggagaaaactgtgaagagatgcctgctagatacttttaaacacaccgacgaagagttcctgaaacaggcctcaagccagaagcctgcctggaaagacgggtccactgccacgtgtgtcctggctgtggacaacatcctgtatatcgccaaccttggagatagtcgggcaatcctgtgtcgatacaatgaggaaagtcaaaaacatgcagccttaagcctcagcaaagagcacaacccaactcagtatgaagaacgcatgaggatacagaaggccggagggaatgtcagagatggacgtgtcttgggcgtactagaagtatcccgttccattggagatgggcagtataagcgctgtggggtcacatctgtgccggatatcagacgctgtcagctgacccccaatgacaggttcattttgctggcctgtgatgggctcttcaaggtctttaccccagaggaggctgtgaacttcatcttgtcctgccttgaggatgacaagatccagacccgagaagggaagcctgctgttgatgcccgctatgaagctgcctgcaacaggctggctaacaaggcagtgcagcgcggctccgcagacaacgtgacggtgatggtagtgaggataggacactgagggcctgcacatgcgctcttgacttggaggttcattttatttgtacacagtgtgtgttctcctgtgggacttatatggttgtaaataaaggtttcttttttttccta

SEQ ID NO: 4928 - DNA, 1342 bp, Cricetulus griseus
aaagcaaaggaataaacgcgagccaggcggctgagggtaaagaccaggcccccacatccttcagaatgacattggacgtggggcgggaggatgagctgcccgactgggctgcggccaaagagttttaccagaagtacgaccctaaggacgtcattggcagaggagtgagttctgtggtccgccgctgtgtccatcgagctactggtgatgagtttgcagtgaagatcatggaggtgaccgctgagcgtctgagtcctgagcagctggaggaggtgcgggaagccacacagcgagagatgcacatccttcgccaggtcgctggccacccccatatcatcactctcatcgattcctacgagtctcctagcttcatgttcctggtgtttgacctgatgcggaaaggagagctgtttgactatctcacggagaaggtggccctctcagaaaaggaaaccaggtccatcatgaggtctctgctagaagcagtgaactttctccatgccaacaacattgtacaccgagacctaaagccagagaatattctgctagacgacaatatgcaaatccgcctttcagattttgggttctcctgccatttggaaccaggcgaaaagcttcgagagttgtgtgggactccagggtatctagcaccagagatccttaagtgctccatggatgaaacccacccaggctacggcaaggaagtcgacctctgggcctgtggagtgatcttgttcacgcttctggctggctcaccaccattctggcacagacgccaaatcctgatgctacgcatgatcatggaaggccaataccagtttagctcaccagagtgggatgatcgttcaagcaccgtcaaagatctgatttcaaagctgctgcaggtggatcctgaggaacgcttaacagctgagcaagctctacagcaccccttctttgagcgctgtgaaggtagccaatcctggaacctcacacctcgacagaagttccgggtggcagtgtggacaatactggctgctggacgagtggcattaagcactcaccgtttacggccactaaccaagaattcactgttgagagacccctatgcactgcggccagttaggcgcctaattgataattgtgccttccggctctatgggcattgggtgaagaagggtgaacaacagaaccgggcagccctcttccagcaccagcctcctaggtctttccctattatggccaccgaagaagaaggggactccaacactatcacagaggatgaggctgcactggtgctagcctaggacttcttccctggcaagccagaaagcaagactctccaggaggagtattttttttt

SEQ ID NO: 4929 - DNA, 1342 bp, Cricetulus griseus
caagaggtatgactgatcttcagaatacaaagctccaggttcctgtaacacttgcctcacaaacccgtcctcctctattgtctggaaacacatgtcagaatatagtttcccaggtcatctatgagatagagaccaatgggacctctgggatccagaaagtctctgtcagctttagacagaccaacctgactgtcaagccaggtgtttccttacagcaagacttcatcattcacttcagggcttttggacagcgcatggatgcttttcctactggtcctagaagtgggaatcctggctacctcatcgggaagccacttttggtgctaactggtgatttccgtcactcgatgaccctgttgcagagcgagggtaatggaatgtgctctgttaagagacatgaaatacagtttggagtgaatacagtatctggctgcaagttgagacccaaagaggtgagctgcagccatttgcagaaggagatttaccaggctcttcatggacatcccaaaccggagcacgttgccatctttggcaatgctgacccagcccagagaggagggtggagcaggatcctcagcaaggactgcagtgtttcggctgttaactgcacttcctgctgttacataccagtttccctggagatccaggtgttgtgggcacatataggactccagtccaacccacaagctcacgtggcaggaacccggttcttgtaccaatgcaggtctgtacaggagcaccagaagggaacagaaatatctttgacaactcttgtgagctttgtggacatcactcagaagccagagccaccaagggatcaacctagaacggactggaaactaccatttgatttcttctttcctttcaaagtggcgtttagcagaggggccagcattcagaagggctcagcctctcctgcactcatcctgtgtgtcttcctacttggagttctcaactcacagactacgtgaagaaagaacaattagggctcacttttccctatgggaaattccaagacagcctgcttatcttggctaaagaggtcctcataggcacatgcgcctgatgtcacccagagtgaactcagaagggctggatcctgcactactgctgacaattcaagccaggaaactgctggctctatattttgtctggctcttttgccaaagtgtggccacaccccttgcccagacagacctgtgttaggaagtagttctttctactcattttccaaagtgagtggaataccatctcttctcaatagcaggtcgaccccaccagtcctttctgtccttcctcctctgtgtgtggtcaggaaaaacaaaaaaaaaaaaaaaaaaaa

SEQ ID NO: 4930 - DNA, 1342 bp, Cricetulus griseus
  modified_base (378)..(378): a, c, t, g, unknown or other
gtgagtggcggcggctgcggggacggaaacccgcgagacctgctgcctcggctgccggtgccaccaccaccacgcgctcacgacctcctccgcccccggagccctcgagactatggcgtgtccaaggccggcggcggcaaggtgaacgggagctacgggcactgttcagagaagagcctgctggacctggacctggccgagggtcccagcccctcctgtcaccagggtctgtttctccctgtagggaccccaccgccccggggtcatccccctgtctgcgagaggctgcttcatttccccctcctaacaggtcacccagacctcaggctacatatgtgaatggcagcctcccagcagctcaacacatcaagcaggaanccctgcctgactaccaggccatggccagtgcccacaccacccctgccccacccactagcagcaggtgcgtaagaagatgcacacgggtgctgatccagaggctgttctgtcggagtgtctggcactgcagcaactccatgcatccacacctttgcctgccagcagggggaagggcagccagaccctgagccaggagctactcccaggtgtatatcctggccccgtcaccccacaaaatgggcttgcttcgggcattctgtccccctcccatgatgtcccttccaggcaccacccgctggaggtcaccactggttcccaccaccacctgtcccctctgcccacagccgagagcaccagggatggcctggggtctggccttctctcacccatggtcagcccactgaaggggcttggtcccccaccactgccaccatcctcccagagtcagtctccagggggacagccattctccacgctccccagcaagccaacctacccacccttccagagtccaccacctctacccagcccccaaggctaccaaggcagtttccattccatccagaactgcttcccttatggtgactgctaccggaccactgagccagcagcctccagggatggactgatgggtgatgcccatggtttcaaccctgtaagacccaacacctattccagcctcagcgcatctttacctgccccaggctacgaggccctggtagaaaccgcatgtcctacagcactgcagccacagccatctgaagacctggtatccagcggtcccgaggactgtggcttcttccccaatggggcctttgaccactgcctaagtcacatcccctccatctacacagacacctgaaggagtgctgctgtacctgcctgcccagctcctgacactacttcacctgctggccatcagccctggagcttcccacaaggggcagccaggccacatcacagg

SEQ ID NO: 4931 - DNA, 1342 bp, Cricetulus griseus
gtgagccgcagccttgccgagcgagcggttgggtgttcgccatcttaggaggatgttctcgtccgtggcgcacctggcccgggcgaaccccttcaacgcgccgcacctgcagctggtgcacgatggcctctcgggtccccgcagccccccaggcccgccccagcgttcccgccacctggccgccgccgccgtggaagaatacagttgtgaatttggctccatgaagtattatgcactgtgtggctttggtggggtcttaagttgtgggctgacacacactgctgttgttcctctggatttagtaaaatgccgcatgcaggtggacccacagaagtacaagggtatatttaatggattctccgttacactgaaagaagatggtgttcgtggtttggctaaaggatgggccccaacttttattggctattccatgcaagggctctgcaagttcggcttttatgaagtcttcaaagccttatacagcaacatgcttggtgaggaaaacacctatctgtggcgcacatcactatatttagctgcttctgccagtgctgagttctttgctgacattgccctggctcctatggaagctactaaagttcgaattcaaacccagcctggctatgccaacacgttgagggaagctgttcccaaaatgtataaagaagaaggcttaaatgcgttctacaagggtgttgctcctctgtggatgagacagatcccatacaccatgatgaagttcgcctgctttgaacgtaccgttgaagcattgtacaaatttgtggttcctaaaccccgaagtgaatgtacaaaggcagagcagctggttgtgacatttgtggcaggttacatagctggagtcttctgtgcaattgtttctcaccctgctgattctgtggtctctgtactgaataaagagaagggtagcactgcttctcaggtcctgcagagacttggcttcagaggtgtgtggaagggcctctttgcccgaatcatcatgattggcactttgactgcactacagtggttcatctatgactccgtgaaggtctatttcaggctgcctcgccctcctccacctgagatgccagcgtctctgaagaagaagcttgggttagctgagtagctagtacgtcaaagtgacatggactgaatctgcttgttgatcagtgttgaagaaagtgcaaaggaacttttatatatttgacagtgtaggaaattgtctgttcctgatataattactgtagtacccttgcttaaagcaagagtttcaaacttactgctaaataaacccatccactcatgatgtctatgagtttgttattttaaaaactagtattga

SEQ ID NO: 4932 - DNA, 1341 bp, Cricetulus griseus
  modified_base (376)..(376): a, c, t, g, unknown or other
cacccggtggcccagagcacggtatggcatccgcggcaaagtgggccatgcccggggcctgcacgcatggcagatccactggccagctaggcagcggggcacccatgctgtggtgggcgtggccacggcccgtgcccctttgcactcagtgggttacaccgcactggtgggcagcgactccgagtcatggggctgggacttgggccgcagccgcctctaccacgatggcaagaaccgtcctggggtagcataccctgctttcctggggccagatgaggcctttgctctgccagattccttattggtcgtgctggacatggacagggcacgctcagcttcatcgtggatggccagtaccctgggcgtggccttccgnggcctcaagggcaagaactgtacccggtgtgagtgctgtgtaccaggaccagaaggccacccagtcaaccagagtgcagagaccacttcttcctcaagagaatgaataaaacacttggcaggagacggcatcctgttgttccccactgcagacacgcccaggaaaactggccagtggagacaaaatagcttctgaataatgaatgatggaagcaaatccttgatggtcccctcccctgcctgccactggccagggcaggggagattgtccttccattttaagacttagtaccactttgagagacaagtctccagggaccacagcagtgcgaagaacctgggctttcctctctgagcaggcttcctcatcccttccttccctcttccaccatggatagggtcctttgactgtccccacccctctattcagggacactagtctggtgatgacttgccccagggacagagtttattcttgggtatgatcgttttaggtagttttgaaagaggtgtgtggtgaagatggctttctcccaaaggtgctaaggaggcaggagttctcaggacaccaagtctgtgacaccctgagtgtccaggactctggtggccatcattcagggtgaagcctggttgtcacagagctttctttgagcaaattattttttcacttttaggagacttccacagtttgtttcgcgtttccaatatgtgtgtgacatgctgtttatttatcagctggggcccctggcgtggccttgggactggaaggggtgggtgtgacacacagtctctgcagggcctgagacccatcctctcacagagtgttgctgctgccaccagcaccaccattcagcatctttggtgagttccagatactccccactcagactcatgtgtaactggaaatcgtcacagtgtgggataccagagccagaaggcacagcctccactctaatgtgaatgtga

SEQ ID NO: 4933 - DNA, 1341 bp, Cricetulus griseus
  modified_base (1282)..(1282): a, c, t, g, unknown or other
ggagctggccccctcacccgctccagattgtggcctggctgctctacctcttcttcgcggtgattggctttggggtccttgttcccctcctgcctcacccctgggtgcctgctggctatgcttgcatgggtgccatctttgctggccaccttgtggtgcacctgactgctgtctccatcgatccagcagatgccaatgtgcgggacaagagctattctgggcccctgcctatcttcaaccgcagccagcatgcacatgtcattgaagacctgcactgcaacctgtgcgacgtagatgtgagtgcgcgatcgaaacactgcagcgcctgtaacaaatgtgtatgcggcttcgaccatcattgcaagtggctcaacaactgcgtgggcgagaggaactatcggctctttttacacagtgtggcatctgctttgttgggtgttctgctcctggtgctggtggccacttatgtcttcgtggagttctttgtcaaccccatgcggcttcgtaccaaccaacattttgaagtcttgaagaatcacacagatgtgtggtttgtgttcttgcctgctgcccctgtggagacccaggctcctgccatcctggccctggctgccctactcatccttctgggcctgctttctacagctctgcttggccacctgctctgcttccacatgtatttaatgtggcacaaacttaccacctatgagtacatcgtacagcaccgcccagcccaggaagcaaaggagacccacaaggagcttgagtcatgcccccggaagatgcggcccattaaggagatggagttttacatgaggaccttcagccatgtgcgtccagagccctctggccaggccaggccagcagcattaaatgtccatccttcccagtttcttgccacccaaggccaagtggaaccaccactgccctcctcctcagacacactggctctgcctccacggatccaaccccagaaaaagaggaagcggcgtgtatataaattgtccaggtctggggtcttgggccgggagcccccgctgcccaggatacaggggactgggacccctggccgccattccagctcttcgtcggattccatcagtgccagcccggtacatgtggctggctctgcaggcgcttactactcagcatcagccgagtccatggaagagattccagtggcccagacacgcctgggtagtgctgcgctgggcgccccagggaaaccagggggccgagagtctgggctggcgctacaggcacgttctccggccgtttttgngagcccgagcagcggcgagcccgggacacctggtggtggtgaagatggcctgccttagc

SEQ ID NO: 4934 - DNA, 1341 bp, Cricetulus griseus
tttgaggaccctcgagatgcccctcctccaacaagggcagaaacccgggaagaacgcatggagagaaagagacgggaaaagattgaacggcgacagcaggaagtggagacagagctgaaaatgtgggaccctcacaatgatcccaatgctcagggtgatgccttcaagactctgttcgtggctagagtgaactatgacacaacagaatctaagcttcggagagagtttgaagtgtatggacccatcaaaagaatccacatggtatacagtaagcgttctggaaaaccccgtggttatgccttcattgagtatgaacatgaacgagacatgcactccgcttacaagcacgcagatggcaagaagatagatggcaggagggtccttgtggatgtggagaggggccggactgtgaagggctggaggccccggcggctaggaggtggccttggtggtaccagaagaggtggggcagatgtgaacatcaggcattcgggccgagatgacacttctcgatatgatgagaggccgggcccctccccgcttccacacagggaccgggaccgggaccgcgagcgggagcgcagagaaagaagccgagagcgagacaaggagagagaacggagacgctcccgctctcgggaccggaggaggcgctcccggagtcgagacaaggacgagcgtcgccgttccagagagaggagcaaggacaaggaccgagaccgaaagcgacgaagcagtcgaagtcgggagagagcacgcagagaacgggagagaaaagaggagcttcgaggtgaggtggtggtggcggcggtggcggtggtggtggtggcggcgacatggctgaaccctctgaagctggtgatgcagctcctgatgatggccctcctggagagcttggccctgatggccctgatggcccagaggagaagggccgggatcgagaccgggagcgacgtaggagccaccggagtgagagggaacgtcgccgggatcgagaccgtgatcgggatcgagagcacaaacggggggaacgggtagtgagcggggcagggatggaggcccggggtgggggtggcagtggtcaggacaatgggctggaagggctaggtagtgatggccgcgacatgtacatggaggcagagggcggtgatgggtacatggccccagagaatgggtatctgatggaggcagcacctgaatgaagaggcctgtgtgttggacatgctcttactttgctgtctgccttcctagcctttccaccatggcttatcctctgaggatagaggtgttttgtttttgttctggtcccttggatttaaaaataaaattaatttcctgttg

SEQ ID NO: 4935 - DNA, 1341 bp, Cricetulus griseus
ggcgggtaggcgaggaatggactcctccttcactgaccctcggagtacctacgtgctgagtaacctcgcggaggtggtggagcgtgtgttcaccttcctgcccgccaaggcgctgctgcggggtagccggagtgtgccgcctatggagggagtgtgtgcgcagagtcctgcggacccaccgctgcgtgacctggatctccgcgggcgtggcggaggccggccacctggagggacattgcttgctccgcgtggtagcagaggcgcttgagaatgttcgcatcttaccacggacagttctttatatggcagattctgaaaccttcattagcctggaagagtgtcgcggccataaaagagcaaggaaaagaaccactatggagacggcagttgcccttgagaagctgttccccaagcagtgtcaagtccttgggattgtgaccccaggaattgtagtgactccaatgggatcaggtagcaatcgacctcaggaaatagaaattggagaatctggttttgctttattattccctcaaattgaaggaataaaaattcagccctttcattttattaaggaccccaagaattcaacactcgaacgacatcagcttgctgaagtgggtcttctggataaccctgagcttcgtgtggtccttgtctttggctataactgctgtaaggtgggagccagtaattatctgcagcgagtagtcagtactttcagcaatatgaatatcatcttagctggaggccaggtggacaacttgtcttcactgacttctgagaagaaccctctggatattgatgccacaggtgtggttggactgtcctttagcgggcaccgaatccagagtgctacagttctcctcaacgaggatgtgaatgatgacaagactgtagaggcagccatgcagcgcctcaaagcagccaacatccccgaacagaacaccatcggcttcatgttcgcgtgcgttggccggggcttccagtactacagagccaagagcaatgtggaggctgatgcattcagaaagttttttcccagtgtccccttatttggcttctttggaaatggggagattggttgtgaccggatagtcactgggaactttatactgaggcggtgtaatgaggtaaaggaagaggacctgttccatagctatacaaccatcatggtgctcattcacctggggacttctaaataagtcttgttgagagtggtgctcacaggatggaactttgggggtttgccttatttcagaaaaatggagacttgggatgtattttaaacaaaactagctccttgtgttttttagctttgagtcatgccctgagatcacgttt

SEQ ID NO: 4936 - DNA, 1340 bp, Cricetulus griseus
ttggcagtgtgctcctggacttcacagggggcagctttagcctcctccagatgttcctccagtcttacaataacgaccaatggacattgatcttcggtgacccaaccaagttcggacttggtgtcttcaccatcttctttgatgttgtcttcttcatccagcacttctggttgtacagaaagaaaccagggtatgaccagctgaactagaacccagagacccagtattaacagccagggcttgggccctggtaggaaaggttgtgtccagaaaaggccagagaagcaaccggtggacagagctggtactgtataccgacgagagaagcacggtcttcctcatgggccaaatgccttaaactcatcctgcctgccttcatcctggcccctcccaagccatagaggactctctctttctgggacagacacctgactctgctctgagactgaaagccagacttgaagtggtctctcccaacccaaagttgcagccccctgccgggagacacccaaccctcctcctgcgtcttgatatgccatctcttttctttaaggcttcaggcagcacacacaggtcccgacagccatcccagacagaactgggcaccaagtttgcagccgatggccttgccccaaaccaccagtgtttctgagacagcttgaaaggggctaacccttgcagctgtgagagccaagggtgctttccaccacttcgttcacagggaccaagcagccaggtgtgctgtggccaatggactcgaaggtgctgatgctggtggtggaggggagaggactaatgggatgaggttctggggtcctttctctggaggccacatttcgaagcagggtgagccttgagttttccaaattgctctttttgctttctacaagactaatattgaggggcccttgtatttctcattcttgtatattttttcttgtctggtttcattttggtggagcatatgtccttaattaaaaggtggcttgtttactatctgtacacttggatcactgactagatgcagaaggcagttatattggacctttggaaccaagtccctggggcttggaggaccttgcttacttatgtaaagaaatgcatagggttgtggaatacattgacataaggtggctgcatgttgacccacactggatcggagaagcctcctcgggttcaagatccctgtccaaccagagccaggtaggtttgtttcagtgtcttatctgccagtaccaaggttccatcagcatgttcaggctgtgggtgtgagctggagttggaaggttcagggtagggcatgaagcaggggtggtgaaggatcttactctgtagactga

SEQ ID NO: 4937 - DNA, 1340 bp, Cricetulus griseus
ggtggtggtatcagatttgagggccctttgctacagcaaggagttggaatgaggtttgagggtcccacagtcagtctgtagctggtctgagatttgaaggacataatcaactaggtgggaaccttaggtttgagggaccacatggtcaaccaggggttgggatcaggtttgaaggacctttagttcaacaaggaggtggaatgaggtttgagggtcctgtaccaggaggtggcctgagaattgaagggcctctgggtcaaggtggtcctagatttgaaggttgtcattctttaaggtttgatggacagccaggtcagccatcactcttgccaagatttgatggattacatggccagccaggtcctcgatttgaaagaactggtcagccaggtccacagagatttgatgggccacctggacagcaggttcaaccaaggtttgatggtgtacctcaaagatttgatgggccacaacaccagcaagcatcaagatttgatattgcccatataatgatccacctggcaatgtctttttaattgttccatctcaaggactacagttccagagacacgaacaaatatttgatacacctcaaggaccaatttaatggacctcatggccctggaaccagaatttcccaatccccttaacagagcttcaggacactattttgatgaaaagaatcttcagagttctcagtttggaaactttggcaatttacctactccaatgtcagtaggaaacattcaggcatctcaacaggttctgactggtgttgctcagccagtagcaatttggccaaggacaacaaatttttaccagttcatccacagaatcctggagcttttattcaaaatccttcaggaggtcttcctaaggcatatcctgataatcatctcaagtcaggtggatgtaaatgaattgtaacagactggatagatttgaagaatagctgatttggaagaacgtgcaaaaagccagttttttgaaaaggttcatgaagaggttgtcctcaaaactcaggaggctgctaaagaaaaggagttccaaagtgtacctgctggaccagctggagcagttgagagttgtgaaatctgtcaagaacaatttgaacagtactgggatgaagaggaggagggaatggcacttaaaaaatgctattagagtagacggaaagatttaccatccatcgtgttatgaagattatcaaaatacatcttcttttgattgtacaccatctccccagcaagacaccagttgaaaaccctttgaacattatgttgaacattgtcaaaaacgaattcgcaagaaccctgtgaaagtcccaaagttaaggaaga

SEQ ID NO: 4938 - DNA, 1340 bp, Cricetulus griseus
cgcggacggcgttggtgcgagaagaccttcagcgttgccttggtggagcgggccgggcccaccctcgggttgtagatatgtgtaacacaccaacttactgtgacctaggaaaggctgccaaggatgtctttaacaaagggtatgggtttggcatggtcaaaatagatctgagaaccaagtcttgtagtggagtggaattttctacttcaggtcatgcttatactgatacagggaaagcatcaggcaacctagagaccaagtataaggtctgtgactatggactcaccttcacccaaaagtggaatacagacaatactcttgggacagaagtctcttgggagaataagttggcggatgggttgaaactgactcttgataccatatttgtaccaaacacaggaaagaagagcgggaaattaaaggcctcatttagacgggattgttttagtctcggcagtaatgttgatatagatttttctggaccaaccatctatggctgggctgtgttggcctttgaaggttggcttgctggctatcagatgagttttgacacagccaaatccaaactatctcagaataattttgctcttggttacaaggctgaagacttccaactgcatactcatgtgaatgacggtactgaatttggaggctcaatctaccagaaagttaatgagaaggttgaaacatcagtaaacctggcatggacagctggcagcaacaacactcgttttggcatcgctgctaaatataagctggattgtagaacttcgctctctgccaaagtaaataatgccagtttaattggactgggttatacgcagaccctccgagcaggagtcaaattgaccctgtcagctttaatagatggaaagaacttcaatgcaggaggtcacaaggttggattgggatttgaactggaagcttaatgtggttttgagtagaacatcatttgcccctggaagtgaagagaaatgaacccactatgttttggccttaaaattctgtgaaatttcaaacgtgtgaactttttattcttccaaagaattgtaatccttcccacactgaagtctagagattacaaatccatcctaagagaggtccttgaaggcatgcctggagattgtcatgtttgtgccacatttcggttgagttctgcagtgttaatttaaatatgttcctcagtaacaacttagtgtcatgttaaggaaaatgatctgacaccctggtttgtacgtcacatcctgcatgtcccactccacttttccatgaccttttgttatatcagtctctgctgtagtgaaatctttggttttgcatcagagtgaaataaacccatc

SEQ ID NO: 4939 - DNA, 1340 bp, Cricetulus griseus
gctcgctccttgacaaccctgacgggggtgcgctggcagcggcctcagctccggcccccgcgggagcagcgccccttgggggaagacatttcttctcccgccaagttggcaaggcctgtttcccgagcctcctgggctgcgtgactgctgggcccagcgcctccgacagtcccactctcctcctgagggcacactgggaggatcatgggagaggcagaagggaagaaagaggaggctgactataagcgactgcagaccttcccctggtcaggcactcggacatgccagaggagatgcgagtggaaaccatggagctttgtgtcacagcctgtgagaaattctccaacaacaacgagagtgctgcaaagatgatcaaagagacaatggacaagaagtttggctcctcctggcatgtggtgatcggcgagggctttgggttcgaaatcacccatgaagtgaagaacctgctctacctgttctttggaggaaccctggcagtgtgtgtgtggaagtgctcctgacaccatctcgctgctcgctctcctgactctcctctggactggggagcagcaccaggcagaccctaggcagagcctgttcactgcaaggagaactcaagagtcttttcttttgtccttgtgtaccagtttcctgagccacacccagaatttaaatttagtgacatctccactcccaggctctccactgtctccctgagtcctgagctgtggacaggcctctctgtgtgcattgagggtaggatcatgtgccaggtgaagtgggtgaggtcatgggtatttttctccttggactggactggttccacctttcatcccaggagtcccaaagcccttctacccgagggactgctgggaagtatctcttgcccttttcattagtggctttgtggaagcagccctcatgagacacaggacacttatctccttgtcattgggggaagggggttccctctcctcttccccagcctaacccaggactgaacagaacaccatttcttactggaccagcagttcacagccctggctttggcgagagaatcacagtcttcctgtccccttctcccagcccgggccacacaaacctttcataccacctccatcaggtcagctgcatggctgagagcctgggccatggtgtagagcgagttctcaagatgttgctgaactctggtgagacacacaggccgggagtgctctcaccgtgaggcccgttagcagggaaacctggcctgccagggacttcatcagggaccgcatgctatttgtacttcttaccttgctggcttttctagaaactaaacttaaaaaataaaaaaaaaa

SEQ ID NO: 4940 - DNA, 1340 bp, Cricetulus griseus
acactacagccacccgccctgccagtcccaaccgtcacagcccttaggtccttggagatggccagcagctttgctggggctccacccctaccagccgcggtgatttgcagacctcccccagcactgggtgggaaccaattcaggatgataatctttctggtgcttctgacttccacagctacccgcagtgctgtccgcatccctgtgtccccagactgtggaaagcctcagcagctgaaccgaatcgtgggtggagaggacagcatggatgcccagtggccttggattgttagcatcctcaagaatggctcccaccactgtgcaggctcccttctcaccaaccgctgggtggtcactgctgcacactgcttcaagaacagtgtggataagccatctctgttctcaatattgttgggggcctggcagctgggaaacccaggtccaaggtcccagcaagtgggtattgcttgggtgctgccccaccccaggtattcttggaaggagggaacccgtgcagacattgccctggtgcgcctggaacactccattcagttctctgagaggatcctgcccatctgcctgcctgactcctctgtccggctccctcccaacactgactgctggattgcaggctgggggagtatccgtgatggagagcctctgccccagccgcagacccttcagaagctgaaggtgcccatcatcgactcagaactctgcaaacgcttgtactggcggggtgcggggcaggaagccatcactgaagacatgctgtgtgctggttacctggaaggggagcgggatgcctgtctgggcgactctgggggtcccttgatgtgccaggtggatgacgcctggctactgactggcattatcagctggggagagggctgcgcagaacgcaaccggcccggtgtctataccagcctcctagctcaccgctcctgggtgcagaggattgtgcaaggggtgcagctgcgcgggcacttgacggacagtggggacaccgggagctcctaaattgggatctggagatgaacagcctcttgctggtctctctgctgtaaatatgtcttctacctccggggggcgccagcggcctgcacggagagcaggaggagggaagtcccggcccgccaaggccccgcccctcaatcaaggatgctgttgtgtgtgtgtgtgtgtgtgtgtgtgtgtgtgtgtgtgtgtgtgtgtgtgtgtgtgtgtgtgtgtgtgtgtgtgtgtgtgtgatttttttttttacagttatttgtaaccatgtcacgtatttattccagtttcaataaattatttattctcaaaaaaaaaaaaaaaaaaaa

SEQ ID NO: 4941 - DNA, 1339 bp, Cricetulus griseus
caagccagccatgtggaaggctggtgggatgcaggcactaggacttcacctgacagatccgagtcagcgacttgttcagaactgtctttggactcttagaaacctttcagatgctgcaactaaacaggaagggatggaaggtctccttgggactctagtgcagcttctgggttcagatgatataaatgtggtcacctgtgcagctggaattctttctaacctcacttgcaataattacaagaacaagatgatggtgtgccaagtgggtggcatagaggctcttgtgcgcactgtccttcgtgctggtgacagggaggacattactgagcctgccatctgtgctcttcgtcatctgaccagccgacatcaggaagctgagatggcccagaatgccgttcgccttcactatggactacctgttgtggttaaactcctgcacccaccatcccactggcctctgataaaggcgactgttggattgattcgaaaccttgccctttgcccagcaaatcatgcaccgttgcgggagcagggcgctattccacgactagttcagttgcttgttcgagcccatcaggacacccagcggcgtacctccatgggtgggacacagcagcagtttgtggagggcgtccgcatggaggagatagtggaaggctgtaccggggccctggcatatcctcgctcgcgatgttctgctgtcttattccggatgtctgaggacaagccacaggattacaagaaacggctttcagtagagctgaccagttctctcttcaggacagagccaatggcttggaatgagactgctgatcttggcctggacattggtgcccagggagaagcccttggatatcgccaggacgatcccagctaccgttcctttcactctggtggatacggccaggatgccttggggatggaccctatgatggagcatgagatgggtggccaccaccctggtgctgattatccagttgatgggctgttttttgcagtaactgttagttttaagtcttgtagtgttatgttctagtgaacctgctacagcgattcctgatttctgagaactgagtaatggtgtagaacactaattcataatcacgctaatcgtaatctggagacgtgtaacattgtgtagccttttgtataaatagacagatagaaatggtccgattagtttcctttttaatatgcttaaaataagcaggtggatctatttcatgtttttgaacaaaaactttattggggatatgtgcggtagggtaaatcagtaagaggtgttatttgagccttgttttggacagtttaccagttgccttttatcccaaagttgttg

SEQ ID NO: 4942 - DNA, 1339 bp, Cricetulus griseus
  modified_base (1331)..(1331): a, c, t, g, unknown or other
aaagccagcttttacgcagcaatacaacagatagagaatctcaggaaggaactgaatgaagtcttgaccaagcgtgccctgcaggaggaggagcttcaacagttaacggagaagaaactcagtgacattcagtctcaccaagctgaacttgaacaggaggtcaagaattccctgaaaaccatccatcaactggaaagtgaattgaaaagacagaacaagatgcagagccagatcaaagccgagaaaattcacctggaggaagaaattgcagagctaaatactagccaggcccaggacaaagccaaacttcttgagatgcaagagtccatcaaggacttgagtgccattcgagcagatcttgctaataaactggctgaagaagagaaagccaagaaagctgtgctcaaggacctgtctgaattgatggccaaggcaaagtctaaaggaggaagaaatggctaccattatcacacagttaaagctaggaacgagacgttcaccagagggagctgaatgatcttacatcatcactgcaaagcgtagaaaacaagcaacgaacagaatatccaggagctgatgaagcaactttaaaaaagaaagaatgaagcaagagaatcacatcaggacactgaataccagtgtctgaaggagcaactggaggaaaaggagagacatataagtaatgaagaagaacacttaaggaggatggaagagaccaggctacagcttaaggaccagcttctttgtttggagacggagcaggaatccattcttggtgtaataggaaaggaaattgatacagcttgtaaaactttctccaaagactccatggagaaattgaaagtatttacttctggtcctgaaatacattatgacccacatcgatggttagctgaaagcaagaccaagctgcagtggctctgtgaggagctgaaaagagagagaaagcagagagaagaccgtgcggcagcagctggtgctctgcagacaggagctcagggacctgacggagcacaaggagtctgagctcctgtgtctgtttgagcacattgaacgacaggagcagcttctggaggagttccaccaggagaagagaggtctgctagaagagactcaaagaaaagacgaagaaatggagactctacaggaccgtgtaaatgcattagaaacgagtacccgagtggccctagaccatctggagtctgtgcctgagaaactgagcctgctcgaggatttcaaagacttcagagatccctccagtttatctgagaaactgatgccagatactccagatacagcaataaaggaatcctttgtaagaataaaaaaanaaaaaaaa

SEQ ID NO: 4943 - DNA, 1339 bp, Cricetulus griseus
ggtggctggcccagcacaggctgtaatccccgatggctcagcagccgctgcgactcttggcttgtggagacgtggacggaaagtttgatgttttattcaacagagttcgaacaatacagaagaaaagtgggaactttgatctgctgttgtgtgtaggaaatttcttcggctctactcaagatgctgagtgggaggagtataagactggcaaaaaagaaagctcctattcagacatatgtgcttggtgccaaacaacccggagacagtacagtatttccaggacactgatgggtgtgaattagctgagaacatcacttacctgggtcgaaaaaggtttctttaactggaagctcagggctgcagattgtctatctcagtggcacagagtccttgagtgaaccagtcccgagtcacagttttagcccaaggacgtgtcttccctgagaacaatgctgtgttcgcctccagttaaggtgttgatatcttcagcctccggatgtcaccgagaatccttaccgagagtctggaaaggcagcagctataggaaaacatgttcctgcccctcaggaagaaccagcctgtcaattcttcttcgatctgaatgaaaagcagggaaggaaacggtcatctacgggcagggatagcaagtctcctcaggccaagcagccacgcaggcctcctcagcctccaggaccttgttggttttgccttgccagccctgaagtggaaaagcatttggtggtcaacattggcacacattgctaccttgccctggctaaaggaggcttatctgatgaccatgtactcatcctgcctattggacactaccagtcagttgtggagctttcggcagaggtggtggaagaagtggagaagtataaggctactctgaaacgattctttaagagtcgggggaagcgctgtgtcctgtttgagagaaattataggagccatcatctccagcttcaggtcattcctgtgcccctcagctgctgtgttacggatgatattaaagatgccttcattacccaggcacaggagcaacagatagagctgttggaaattccagagcactcagacatcaagcagattgcacagccgggagcagcgtatttttatgttgaactcgacacaggagaaaaattattccacagaattaaaaagaattttcctttgcaatttggaagggaggtactggccagtgaagccattctcaacattcctgacaaggctgactggaggcagtgtcaaattagtaaggaagaggaggagaccctggctcgacgcttccggaaagactttgaaccttttgacttcactctggatgactagacaaagg

SEQ ID NO: 4944 - DNA, 1339 bp, Cricetulus griseus
gggcggcgcggcgcgggccggaaggacgccatcccggccctggccatggaggctcctgcgccgtccctaaccgaggaggacctcactgaagtgaagaaggacgctttagaaaatttacgtgtttacctgtgtgagaaaatcatagcagagagacattttgatcatctgcgtgcaaagaaaatactcagtagagaagacacagaagaaatttcttgccgaacttcaagtaggaaaagagctgggaagttgttagactacttacaggaaaaccccaagggactggacaccctggtggaatccattcgcagggagaaaacacagaacttcctgattcagaagataacggatgaagtgctaaagcttcggaatataaaactggagcatctcaaaggcctgcagtgtagcagctgtgagccctttgcagctggagccaccaacaacctctctaggtccaattcggaagagagtaatctctctgaaaaacagagagcgtccactgtcatgtaccacccggaaggagagtctagcaccgctccctttttctctactgagtcctctctgaatttgccagtcctagaagttggcagaactgaaaacggcagcttctcctcaggcacacttcctcgacctggggaccccggggcaccccctctgcccccagatctgcgattggaaggaggaacttatggaaactccagtgaaatgtttctccccttacgatcacgagctctttcacgccaatgacacctcacagccttagtttttttaatagtaatgaaaaaatgttgtaaatgatatcatcttttttataaaagccactgtaacagttcactcacatttgctaagtcttttaaatcacagtgcacacattctctgtaaataggatttgttagataaagaagcactctgggagtaactggatgtaaagcatggttttccatcatggtacatcctttttttaaattttagatgtttagtatttcgaactttttgtgtttgttataagactgattttctgagactatttctcaatttgagaaatcagctcctgagctgagaataatgtttcttcgcacatttatgttacaaatgttcagtctgaccatctttccaatgacctggcagtatgtttcagcagtttaatatttgtatcaagcagccactagctacaactatgtttttattatattacaaagtttgactgactttacacatttgaaaactgattgtcttcatttaaattataattttacatatttcctgacatccacctcctatgtatttctattatttaaaaattaagaaatgaaaagttgctattaacaataaaaatttttta

SEQ ID NO: 4945 - DNA, 1339 bp, Cricetulus griseus
ctttgcctagaagaaagcgcgagcacagaagctcagagaagttagggaggtcgagcagggaagggttggtagaaacctcgatcagatttccttccgctcgtcctggtcgcttggacccaggaggaacgtccctgcttgcgtctaggggcggacggtgaacgcgctgcgcacggccccgccagggctggtagtttgcagaccgtccctgccgaggcccgctcgcccggcagccctgcggctcccgcggtggcggcagcggcggcggccccaggctcgatccagcccaggtagccgcgcctcaggctctgggggcgctgtgaccccgctcctggctgctcctgggaccgacagcttatgatctgaagaaaactacttgctgtactactagataacatcttgcaacgcattggcaagctcgagtcgaaggtggacaatctcgtcaatggcacaggagcaaattctaccaactccaccacagctgtccccagcttggtatcgcttgtcaccacattaatgagatcaaaaggcagaaccagtcccttgtgtatggcaaagtggatagtttctggaagaataagaaaatctacttggatatcattcacacgtacatggaagttcatgccactgtttacggctccagcacaaagaacattcccagttacgtgaaaaatcatggcattctcagtgggcgtgacctgcagtttcttctccgggaaacaaagctgtttgttgggctgggattcccttatgagggtccagctcccctagaggccattgcaaatggatgtgctttcctgaaccccaagttcagccctcccaagagcagcaaaaatcagacttcttcattggcaagccgaccctgagagagctgacgtctcagcacccttatgcagaagtcttcatcggccggccacacgtctggaccgtggatcctgacaatcgagaggaagtagaggatgccgtgaaagccatcttaaaccagaagaaggggatctcctgctcttcagttgtgccggggcccaccccacacaccagaggatctgcccctgccgggacttcatcaagggccaagtggccctatgcaaagactgcctatagcatagctactctgaattcattccgatgggaaagaggtggctccactgggcagggccagggggccgaagtcattcagggactctgaccagagcccaaactctttggtccagggcttggatttggtactgctccagctgcagccagcatatcccaggagtttacaccaaaaaccacaagagaacagaggtaagaccaggggcctggcttctccctggtgcaacgaatgtcctctctgtcctgg

SEQ ID NO: 4946 - DNA, 1338 bp, Cricetulus griseus
  modified_base (612)..(612): a, c, t, g, unknown or other
  modified_base (639)..(639): a, c, t, g, unknown or other
  modified_base (647)..(647): a, c, t, g, unknown or other
cagcgctacgggctggcgttgcgggcggctggggcaggacaacatcaccgtgctgcatgtgaagctcaccgagacggcgatccgggcgctggagacttaccagagccataagaatttaattccttttcgaccttcaattcagttccaaggactccaagggcttgtcaaaattcccaaaaatgatcccctcagtgaagtccacaactttaacttctacctgtcaaacgtgggggaaagggataaccctcagggcagctttgactgcatccagcaaacactctccagctctggagcctcccagctcaattgcctgggatttatacaagataaaattacagtgtgtgcaacaaatgactcctatcagatgacacgggaaagaatgacccaggcagaggaggaatcccgtaatcgaagcaccaaagttatcaaacccgggggaccatatgtagggaaaagagtgcaaattcggaaagcgcctcaagccatctcagatgcagttcctgagaggaaaaggtcaacccccatgaaccctgcaaacacaattcgaaagacacatggtggcagcagtgtttctcagaggccatagtgctctctgaaattaaatccatctcngaatgctggcactagccgctcagagtntcccatgngttccagcaagattctgcctcatctcctcagaaacgacctttggactcagatttcatcgatcctctaatgacaaaaagctcgaatatctcacctgacaaacagagtcccaccaacactaaatggccatttgaatcccaccaatgagaaatctcctgcaggcctcctaccaccccctgcagctgcagccatccctacaccctcaccgctgccttcaacccaccttcctggaaactgccaagctgaggaactccagtccgaaacccagtgaaggagttaaagaaggttgcactgcctccatggagccttcttcaacaattgaactcccagattatttggtaaaatatattgctattgtctcctatgagcaacgccagaattacaaggatgacttcaatgctgagtatgatgagtacagagctttgcatgccaggatggagactgtagccaggagatttattaaactggatgcacaacgaaaacgcctttctccaggttcaaaagagtaccagaatgttcatgaagaagtcttacaagaatatcagaagatcaagcagtccagtcccaattaccatagaaagaaaaatacaagatgcgagtatcttcataacaagctggctcacattacatacatacatacatacatacatacagacatacatacatacatacatacatacatacatacataca

SEQ ID NO: 4947 - DNA, 1338 bp, Cricetulus griseus
gagaaggaggaattcctggcctggcagcatgatcttgaagtgaatgataaaagccccgcccacggctacttgtctggatccttcaacaactggagcaagcttccactcacaaggaagccaaaataactttgtcgccatcctggatctgcccgaaggagagcatcagtacaaattctttgtggatggtcagtggacgcacgatccttctgagccaatagtaaccagccagcttggcacagttaacaacatcattcaagtgaagaaaactgactttgaagtatttgatgctttaatggtggattcccaaaagtgctccgatgtgtctgagctgtccagctcccctccaggaccttaccatcaggagccttacatctctaaaccagaagagcggttcaaagccccacccatcctccctccacacctgctgcaggtcatcctgaacaaggacacgggcatttcttgtgatccagcgctgcttccagagcccaaccacgtcatgctgaaccacctgtatgcactctccatcaaggacggagtgatggtgcttagtgcaacccaccggtacaagaagaagtatgtcaccaccctcctctataagcccatctgagatgctaagagccagccgtggaccacagggacagcaggcagcactgggctctccacgtgcatgtagaccctacttcactctctgggacatcttacccctccctagtcctccttgaaggtttgtccaggcacagccctggggagcagggactgaagccacacaaaagtcttcatcgtctgcatccaaggttgatggcctgtccctgctgaagcctggccatggatgtaagcaatattcaatcttgcctgtccttccaaatcaaagcagtagattgtagaatctatgggaactcagatgtctgatttccagatgcagctttgcaattgttgcccgacactgtgtgcactaaggaccttttataactacagtggctggctctccagtcctacctaaggcaataagtcacccggatgagactgtagatcatgtgactacactcagcaataattgttctcaacacaaacttcaaaacccactgccgtattctccattaaactgaatgatcctgaggactggccatcatgggaggttgttcacgctttccttcaactgtaatggtgacagtgtttccatgacacctttgtcaaagcactcaccctcctttcagttccagcatgtgctatttagctggggacccatgtctctaatgagcaaaggatgtcacagtgattgctattgcttgttctagaagaacttgaacccctacagcagcctgctatattcccagcagg

SEQ ID NO: 4948 - DNA, 1338 bp, Cricetulus griseus
ggcttctctggctagctgtctcagctcctctggaggattcacacggatctttaaagtgcctcagctgaaaccatgaccagatgggctagagtgaccacctcaaataataagagacccttgtctgcaacatcatgggaggacatgaagaagggatctgcagagagcacagaccaaaaccttccaaagcatagacaacgtcaattcagtaggctgccccttaaaaatgatacccctcaagcaaaacagaaaaagaacaaaaagaaaaaagagtacttaaatgaagatgtgaatggattcatggaatacctaaaacagaactcgaagaggcttcacaatggagagttgatagcaacagacagccaggaattacgggaagaaattgcagtggccttaaagaaagacagccgacgggaagaaagacggttaaaaagacaagcagcaaagaaaaatgcaatggtatgcttccattgtagaagacctgggcacggagtcgccgattgcccggctgcactggaaagtcaggacatgggcactggcatttgttaccgatgcgggtccacggagcatgagatcacgaagtgcagagctagggtagaccccgctctgggtgaatttccttttgcaaaatgttttgtctgtggagaaatggggcacctgtctaggtcctgctctgaaaatcccaaaggagtctatgccgatggtggcggctgtacactctgtggctctgtggaacattttaagaaagattgtcctgaaaatcagaattcagatcggatggtcacagttggtcgctggacacagggaatgagtgcagactatgaagaagttctggatctgcccaaaacgcagaaaccgaaaactaaagtacccaaagttgttcatttttaataagagttgataatgttgttaattaacacctcactgttactttccatagtaggcctttacaggttagagctgggtgcctgtggaggcaagtctgtattatcgacaccactctggtcttggtggagttacattgcttgtagtctatcaaggaatgcagggtgattcattgcactctctagattctcgtgtgtgtgtgtgtgtgtgtgtgtgtgtgtgtgtgtgtgtgtgtgtgtgtgtggtctatcagtcatctctgtaaatctaaatgatgcatcaaaattgatcacctctaaacaaagcaagcagcttcaagtttgtgaataagtaaaattttgttattcttaattcagagtatcaatttattataatagaaatttgtttgtatgttgtcacaaaatctgtaatttttagcacagaataaaacgatatcagctgtttaaaaaaaaaaaa

SEQ ID NO: 4949 - DNA, 1338 bp, Cricetulus griseus
gaagaagataatttcaactctggaataaaggggctctttcccttagccacgcggcccacctcaagattggaatcacccatgtgacaggcagtggcatctcttgcataaagcgtttagaagtgtggggtcagccagccaagacctgctctcaggaggtgataaatagtgtcttgttgatagcatcagaaagcctgcctaaggacttgggtgtgcacactccagccttgcccatggagagtgactgtgaccctgggggtcaatctgagggccagcagggtccctgtatcttacaggagatgtctgagatggttaatgatgtgccagaggagttcctagatcctatcaccctggagatcatgccatgccccatgctgctgccctcaggcaaggtcattgaccagagcactctggagaagtgtaacctcagtgaagctacttggggccgagtgcccagtgaccctttcacagggttagcctttaccccacagtcccaccccctacctcatccttccctgaaggcccggattgaccatttcctactccagcactctgtttctggctgccacctgcttgggagagcacaaactacatcagcaatggccccttctatcattaccctgccctcaaggaaaaggaagccagagcaggctggacacagctcagactacaaccttggcgtcccatgagcagaagctgtcgcaaagtttggaaattgccttgacttccacccttggctccatgccttccttcactgcccggctctccaaggggcagctccaacagctgggcacaagagggagcagtgcttccaggaggccagacaccagccatgggcatcccaggactgtttgtggtccagagtgtgtgtcctgcaaaagagcattttcttcctactccacaaaggagcctgtgtaccagctgccctgtggccaccttctgtgccgaccctgcctgagtgagaagcaacgctctcagcccatgatgtgcacagcctgccagcagccagtcaccagccaggatgtgcttcgggtccatttttgagtgcccagcctcaaccaggaagccccgttttggaagagacctgcaggtggaggaagcaagaacaggatcccagtgcccctgttctctcctgggttttagcacctcatggtgtgttacggggactggtttaggacaccccactcctgcttaggcaacaacaggataataaagccataggctaggctagggaagacgtccctattctccctggtctaccttgccactcccccaaccagagccagccccagctgttcagaagcactcccctgatgccccctgttatctgcacacaatctt

SEQ ID NO: 4950 - DNA, 1337 bp, Cricetulus griseus
tccggtgtcatggcggcctcctgccctgaaggcgtgccggaggtccaggacgggaagagacggcagttcgggaaccggttcctgagcgatccggcgcgcgtcttccactacaatgcctgggacaatgtggagtggtcagaggagcaggccgcggcggcggagaggaaagtgcaggagaacagttcccagcgggtgagcccggagaagcaagttgattatgaagtgaacgcccacaaatactggaatgacttctacaaaattcatgaaaatggatttttcaaggacagacactggctttttactgaattccctgaactggcacctagccacaatcccatgacggatttacccctggagagtgaggatgggcctggcttgacaacagagccgcatgggcattcttgtgccagtcatggacatgacacgaaggtgcctcctgtggaagagactgtggctcagaagctcagtcacctagcaatttgtggtgatgaatttcctggatcctcagccacctaccgaatacttgaggttggttgtggtgtaggaaacacagtctttccagttttacaaactaacaataacccaaacctcttcgtttactgttgtgatttttctgccactgctattgaactggtcaagacaaattcagaatatgatccatctcgatgttttgcctttgttcatgatctgtgtgatgaagatcaaagttacccgatgcccaaggacagtcttgatgtcattgttcttatatttgttctttcagcaattgttccagacaagatgcagagagctatcaacaggctaagcagactcctgaaacccggaggggtaatgcttcttcgagactatggccgatatgacatggctcagcttcggtttaaaaaaggtcaatgtctctctggaaatttctatgtgagaggtgatggcaccagagtttacttcttcacccaagatgagctggatgcactcttcacagctgcgggtctggagaaggtgcagaacctggtggatcgccgcttgcaggtgaaccgaggcaaacagctgaccatgtaccgagtctggattcagtgcaaatacagcaagcctctcctgcccagtgccaacggggaggcgtccacgccccacacaacatgagggcatcatgtttcaggatttttgtaaggagacatctgcaaatagcagcatgttgatggtggacatcagtctgggaatccaaggaactcaaaccttaacctaggaacaattactttcggccgggcgttggtggcgcacacctttaatcccagcactcaggaggcagaggcaggcagatctgtgagttcgaggccagcctggtc

SEQ ID NO: 4951 - DNA, 1337 bp, Cricetulus griseus
gtaaatgatgttctctttgctgtcaacagtatgttgtctccaaaagcctgcgctgtgcagatgatgtggcttacatcaatggtggagacaaaggagaggaacagatactgcctggagctcacagaagcagggctcaggggtggtgggctatgcttttgaccaggtggaggatcatttacagaccccttaccacgagacagtctactccttgttggacacgctcagccccgcctaccgggaagcatttggaaatgcactgcttcagagactggaagctttgaaaagagatgggcaatcatgactcatgactcattttccttacagtggggctactgctggtgtagaatgctaacataagacttgacatccttgcatataatcactgtagaaagtgcatctgatttctccacacagcctctacatttcaatgcctaatcagcatttcattctcttattacagggcttcaatgctgccagcactcttttacataggaatcctagatttgcacagtgatatagaaatcagaatcacctgacttcagacctgaattcagcctgctaaatcaggggttactactagcttggactgactttaggaatggttattttgttcctggccttattggaaacaaactgacaactagtttcccctgcacaaaattttggaaatttactgttccacttaatctactcacattaccaaatggactggtgaaaatgaattgcttctatgttacttaactaggatgaaatgaaaggcagggacagaaatagttccctattcctcctttgcaacagccaaccaacctagagaggacagaccgttagcaaatgaatgtaacaatgacccatttccaagatatctaagcacatgagcaaatagaggaataggccccactgtatcctcagtgtgtatcatttcaaaggaaggagatcctggtttccttaggaaacaatattttggtcctgtgttgtattcttattctgtaacgtttgtttactaatgtacagtatatatatatatatatatgcatatatatattcagaaagtatttttgcttcaacgcttactttctataaagtagcgctttggtatccctgcagcaccccctctccccctgcagtgggacagtgctctgtctcattgccacatgtccagttgataggagtgcattgtaaggtttgaaaccaaaggacgaatgaagcattcagaaacttgatatttaaaaaagagatgctctgtattttatattttattacagtccctggtgtttataaacttaataaaacacttcatgctgctgcatgttttccagtgacgagcagaaaggacctgg

SEQ ID NO: 4952 - DNA, 1337 bp, Cricetulus griseus
  modified_base (30)..(30): a, c, t, g, unknown or other
cagtcctaaacgagcgagaggaccgaaccngggccaccctgcttcctgctgtcccccgagtccacctccctgcctcagacttgtcacctgctgtggcccctcgcaacccgacctgggaccttatgtcctcttggaacaagagcaaggcagccacacctaccgggccctgcactgccccacaggcacacagtacacctgcaaggtgtacccagcctgtgaggcccgggaggtgctggcaccctatgcacggctgcctacccatcagcacgtggcccatcccgcagacatcctgttgggctctcagttcctctacaccttcttctcgaagacccatggggacttgcacagcctggtgcgcagccgccgcggtattcccgagcccgaggctattgtgcttttccggcagatggctgctatggtggcacactgccaccaacatgggcttgtcttgcgtgacctcaagctgtgtcgctttgtcttcagcaaccgtgagaggacgaggctggtgctggagaacctggaggatgcttgtgtgataactggaccagacgactctctgtgggacaagcatgcatgccctgcctacgtgggaccagagatactcagctcccgaccatcctactctggcaaagcagctgatatctggagcctgggcgtggcactgttcactatgctggctggtcactacccgttccaggactctgagccggctttgctctttggcaagatccgtagagggacctttgccctgcctgaaggcctatcagccccagcccgatgcctgatccgatgtctccttcgaaaggaaccttcacagcgactagtggccccgggcatccttctgcatccctggttgaaggaggaccacagccttgtctcccctccacagactagccactgggagactgaccaggtggtcccagatggaccaggactggaggagactgaggaaggcgagttggggctgtatggttagggctaccctactggcccctcagctgcaagctgtgaattgagtacctatttccaagctttctcctgactctttggaccgagctaacccttaagtgcctttaaggaggaagaaacagccataccttgctggctgagttgccacagtgtcatatactcccaggccagcatccacgctgggcacatttcataccagagttggccttctggggctaggttctgttcacaggacagtcctcttcattggtgccccagatgccttgtatcttgcactttaaacaaagggagcatctctgtgccaaagaccaaaggcctcactcaccctgtgcctcaggaccacaagtcaggcaaagactggaattgtg

SEQ ID NO: 4953 - DNA, 1337 bp, Cricetulus griseus
cggctgcgcaggggtcgctcgtggtttccaggctgctggctcggctcggctcggcgtcgccatggagggcggatcgctgccgtcgttgggccagttcatcctgctgggaaccagctcgatgatcaccgccgtgctgtactccatctatcggcagaaggcccaggtcgcccaggagctcaagggagctaagaagatccatctgggtgaagatttaaagggcattcttttagaagcgacaggaaagtgtgtgccttacgctgtcattgaaggagctgtgcagtccgttaaggaaacactcaacagtcagtttgtggaaaactgtaagggggtgatccagcggtcgacgcttcaggagcacaagatggtgtggaaccgaacaacccacctttggaatgactattctaagatcattcaccagaggactaacactgtgccctttgaccttgtgccccacgaggatggtgtagctgtggctgtgcgggtgctgaagcccctggactcggtggatctgggcctagagaccgtgtatgagaagttccacccctctgtgcagtcgttcgccgatgtcatcggccactacatcagtggtgagcggcccagaggcatcctggagacagaggagatgctgaaggtgggggccaccatcaccggggttggcgagctggtcctggacaacaactctgtccgcctgcagcctcccaagcaaggcctgcaatactatttgagcagccaggacttcgacagcctgctgcacaggcaggagtccagtgtccggctctggaagattctggtcctggtgtttggctttgccacctgtaccaccctcttcttcatcctgcggaggcagtacctccagtggcaggagcgtcttcggcagcagcagctccaggaggagttccgtgaacacgaggcccacctactgagccaagccttgcctgaggacagggagagtctgaagagctcctgtgtggtgtgccttagcagcttcaagtcatgcgtcttcctggagtgtgggcatgtctgttcctgccgccagtgttacctcgccttgccagagcccaagaggtgtccagtttgtcgtcgggagatcaccaggatgattcccctgtatagcagctaggggtcttgtagtcacactgcaggtatccctccccttgtcagggcttatcctgaggccattggtggggtggctgtaccttaaggtatgatggaggggatactggcaagcctcacatctaatggctgggtgttgcttttcaacctggactctctctctctcactctctctctctcccctcctctctctcctcccctccctccctctccctctctctctc

SEQ ID NO: 4954 - DNA, 1336 bp, Cricetulus griseus
ggaatccaatgatgacaagaagccaacaactaaatttgaactagagcgagaaacagagcttcgatttgaggtggaagcatctcagtcagttcaactggaattgttggctggcatggcagagatctttggcacagagcttaccagaaacaagaaattcacctttgatgctggtgccaaggtggctgttttcacttggcatggctgttctctgcaactgagtggccggaccgaggtggcttatgtctctaaggacacccctatgttgctttacctcaacactcatacagccttggagcagatgcggaggcaggcagaaaaggaagaagagagaggcccccgagtgatggtagtgggtcctactgatgtgggcaagtccacagtgtgtcgactgctactcaactatgcagtgcgtttgggccgccgccctacctatgtggagctggatgtgggtcagggctctgtgtccatccctggtaccatgggagccctctatattgaacggccggcagatgtggaagaaggtttctccatccaggcccctcttgtatatcattttggctccaccactcctggcaccaacatcaagctttataataagattacatcacgtttagccgatgtgttcaaccaaaggtgtgaagtgaacagaagggcttctgtgagtggctgtgtcattaacacctgtggttgggtcaagagctctggttaccaggccctggtgcatgcagcttctgcctttgaagtggacgtggttgtggttctggatcaagaacgactgtacaacgaattgaaaagggacctgcctcattttgttcgaactgtgttgcttccaaaatcagggggcgtggtagaacgctccaaggacttccggcgggaatgtagggatgagcgtatccgtgagtatttctatggattccgaggctgtttctatccccatgccttcaatgtcaaattttctgatgtgaaaatctacaaagttggggcaccaaccatcccagactcctgtttacctctgggcatgtctcaggaagacaatcagctcaagttagtacctgtcacccctggcagagatatggtacaccatctcctgagtgtcagcactgctgagggaacagaggagaacctttctgagacaagtgtggctggattcattgtcgtgaccagtgtggatctggaacaccaggtgtttactgtactgtctccagcaccccgtccactgcctaagaactttcttctcatcatggatatccggttcatggatctcaagtaataattagcaaggagcctccctttctggatcatagacaactggccatcaccaaaagcagatgggatg

SEQ ID NO: 4955 - DNA, 1336 bp, Cricetulus griseus
acgcagaggcggagtagagtttgtcccccactcacgcacgtggtgcccgagtctctcttctcgtcgcttgctgtgaagatgtcgcacccatccccgacagccaggccctccaaccccaagaacccgcgggtcttctttgacgtggacatcggcggggagcgagttggcagaattgttttagaattgtttgcagatattgttcccaaaactgcagaaaattttcgtgcgttgtgtacaggagaaaaaggcactggacccacaactgggaaacctctccattttaaaggatgtccttttcaccgaattattaagaagtttatgattcagggtggagacttctcaaatcagaatgggacaggtggagaaagtatttatggtgaaaaatttgaagatgaaaattttcattataagcatgatcgggagggtttgctgagcatggcaaatgcaggtcccaatacaaatggttctcagttctttatcacaacagttccaactcctcatttggatggaaaacatgtggtatttggtcaagtaattaaaggactaggtgtagcaaggatgcttgaaaatgtcgaagtgaatggtgaaaaacctgccaaactgtgtgtcattgcagaatgtggagaattgaaagaaggggatgactggggaatattccccaaagacggctctggtgacagtcatccagatttccctgaggatgctgatatagatttaaaagatgtagataaaattttattaataactgaagacttaaaaaacattggaaatacttttttcaaatctcagaactgggagatggctattaaaaaatatgcaaaggttttaagatacgtggatagttcaaaggctgttattgagaaagcagatacatctagactgcaacctatagccttaagctgtgtactgaatattggtgcttgtaaattgaagatgtcaaattggcagggagcaattgacagttgtttggaggctcttgaaatggacccatcaaatactaaagcactataccgaaaagcacaaggatggcaaggattaaaagaatatgatcaagcactggctgatcttaagaaagcgcaggagatagccccaggagataaagctatccaggcagaattgcttaaagtgaaacaaatgataaaggcacagaaagataaagagaaggcggtatatgcaaaaatgtttgcttaaagagaattaaattctgcttaaattttacacattgattatataaaggataatgtaagttactgtctacatatgatatgtttcccttgattcattgtcatcattgtttacatagaagtactgacataggtttcttaataaagtgtta

SEQ ID NO: 4956 - DNA, 1336 bp, Cricetulus griseus
cgaagcaagctaaacggaggaacatggacgtggctctcgccccgctccgtgcctgggacgatttctttccgggctctgatcgcttcgcccggcctgacttcaaggacatttccaaatggaacaaccgtgtagtgagcaatctgctctattaccagaccaactacctggtggtggctgccatgatgatttcagtcgtggggtttctgagccccttcaacatgatccttggaggaatcattgtggtgctggtattcacagggttcgtgtgggcagcacacaataaagacatcctccgacggatgaagaagcagtaccccacagcttttgtgatggtggtcatgttggctagctacttcctcatatccatgtttgggggtgtcatggtcttcgtgtttggcatcacttttcctttgctgttgatgttcatccatgcatccctgagacttcgaaacctcaaaaacaagctggaaaataagatggagggaatagggttgaagaagacgccaatgggcattatcctggatgccttggaacagcaggaagagagcatcaccaaattggctgactacatcagcaaagccagggagtaaatcttctagcctggtgatggggccgcagcaggaacccagttgcactttccccttgttcagacccgttttctgtctgtggttttgaaatagaaggtgcacttcttaccacccaactacccacggcatcatgcatgcacaggcccacctgtcaagatcttcgctatgacccaagggaggcctcagaaaccgaggaaatacagacccaatctcctgttatatctgaagtttccagtatgtttttgaaaaagaatttcgggttggacagcaacagtaccaatgtaggggaacagtcattttggaatcgggaggcaacactgagtaagcgaaaagtcggttaaagtacaggatgccgtgtgtccgtctgtttctaaccctgtctgacatctgctccaaagtcctctatgactatgatgtgttggatatgttagtttagtggtattatctttgttgttttaaaatcagaggtgatttctatccctttggcgcctgtttgatgtgcattggaaactggatcagccagttgtttatattttgtttacgaatatgaacgtagctatttagaacaatgttttgttaaaattttgtaaaatttttaaaagggtagcgatatgctttcaccagaaggtatttcttgcgaattaaatgtcatcctcctggggtgagggtggggggtggggggtagttacaactctataacttctgttattcttgacttgctaaaaataaataaataaaataaaacttga

SEQ ID NO: 4957 - DNA, 1336 bp, Cricetulus griseus
cagcagcttctacagcagaagaccctgtaactgagactcctgcaccggtggcctctgcaccagccactccctggcccctctcatcttctgtcccatcctataaaacctaccagggtgactatggcttccgtctgggcttcctgcactcagggacggccaaatctgtcacgtgcacgtactccccttccctaaataagctattttgccagctggcaaaaacatgccctgtgcagctgtgggtcaactccacccctccacctggcacccgtgtccgtgccatggccatctacaagaagctacaatacatgacagaagttgtaagacgctgccctcaccacgagcgctcctccgaaggcgatagtttggctcctcctcagcatcttatccgagtggaaggaaatttgcatgccgagtacctggatgacaagcaaaaatttcggcacagtgtggtggtaccatatgagccacctgaggttggctctgactgtaccaccatccattacaactacatgtgcaatagttcctgcatggggggcatgaaccggcggcccatccttaccatcatcacactggaagaccccagtggtaacctgctgggacggaacagctttgaggttcgtatttgtgcctgtcctgggagagaccgtcgtaccgaggaaaaaaatttccagaaaaaaggagaaccttgcccagagctgcccccaaagagtgctaaacgagcattgcctaccaacacaagctcctctcccccgccaaagaaaaaaacacttgatggagaatatttcacccttaagatccgaggtcatgagcgcttcaagatgtttcaagagctgaatgaggccttggaattgaaggatgctcaggcttcaaaggggtcagaggacaatggtgctcactccagccgccatcctagagccttccagacttgatcaagaagaaaagtccaaactgctggctcctatcataccatctctcccctgtctgtcttcctacagcctacctgaagtccaagaagggccagtctgcctcccgtacttaaaaaaactatgatcaagagaagaggggcctgactcggactgacttcctgtcccttccgcaccatttattaccttgtggcctggactctgccccctctgtgagtgctggttcctggcccctattgggggatgggttggtagctgccaggtctctgctggcccagcgaaatcctatccagccacttgttggaccctggcacctaaaatgaaatttcaccccaccctacaccctgtaagattctatcttgggctctcatagggtccatatccaccaagacccattttctttccaccctgca

SEQ ID NO: 4958 - DNA, 1336 bp, Cricetulus griseus
ggaagatgggtcaaagtcagagtggtggccatggtcctgggggtggcaagaaggatgacaaggacaagaaaaagaaatatgagcctcctgtcccaactagagtggggaaaaagaagaagaaaacaaagggaccggatgctgccagcaaactgccactggtaacacctcacactcagtgccgcctcaagttactgaagttagagagaataaaagattatcttctcatggaggaagagttcattagaaatcaggagcagatgaaaccattggaagaaaagcaagaggaggaaagatcgaaagtggatgatctcagggggacccccatgtctgtaggaaccttggaagagatcattgatgataatcacgccattgtgtccacatctgtgggctcggaacactacgtcagcatcctgtcatttgtggacaaggatcttctggagccaggctgttcagtcctgctcaaccacaaggtgcatgccgtgataggtgtgctaatggatgacacagaccccctggtcaccgtgatgaaggtggaaaaggccccccaggagacctatgcagatattgggggactggacaaccaaatccaggaaattaaggaatctgtggagcttcctcttacccatcctgagtactatgaagagatggggataaagccccctaagggggtcattctctatggcccaccaggaacaggtaaaacattactggccaaagcagtagcaaaccaaacttcagccactttcttgagagtggttggctcagagcttattcagaagtacctgggggacggacccaaactcgttcgggagctcttccgagttgctgaagaacatgccccatccattgtgtttattgatgaaattgatgccattgggaccaaaagatatgattcaaactctggaggtgagagagaaattcagcgaacaatgttggaactgttgaaccaattggatggatttgattcaaggggagatgtaaaagttatcatggccacaaaccgaatagaaactttggatccagcacttatcagaccaggccgcattgacagaaagatcgagttccccctgcccgatgaaaagaccaagaagcggatcttccagattcacacaagcaggatgaccctggctgatgatgtaaccttagatgacttgatcatggcaaaggatgacctctctggggctgacatcaaggcaatctgtacagaagctggcttgatggccttgagggaacgcagaatgaaagttacaaatgaagacttcaaaaaatctaaagagaatgttctttataaaaaacaagaaggcacccctgaggggctgtatctctagtgacccac

SEQ ID NO: 4959 - DNA, 1336 bp, Cricetulus griseus
cggccaggccggagccagacggcgggcgggtcccgcgccatggggcgactggtggcactgagtttgctgggcatcgggctggcactgctgggcgagcggttcctggcgctcagaaatcgacttaaagcctccagagaagtagaatctgtagacctgccaaactgccacctgattaaaggaatcgaggcgggtgctgaggacattgatgttcttcccaatggtctggctttctttagtgtgggcctcaagtttccagggctccacagctttgcaccagataagcctggaggaatcctgatgatggatctcaaagaagaaaagcccagggcactggaattaagagtcagctggggcttcgatttggcttcatttaacccgcatggcattagcactttcatagatggtgatgacacagtttatctctttgttgtgaaccacccggaattcaagaatacagtggaaatttttaagtttgaagaagaagaaaattctttgttgcatctcaagacaattaagcatgagctccttccaagtgtgaatgacatcgtagctgttgggccagcccacttctatgccaccaatgaccactatttctcagatcctttcttaaagtatttggagacgtacttgaacctacgctgggcaaatgttgtttactacagtccagatgaagttaagctggtggcagagggattcgattcagccaatggaatcaatatttcacctgacaaaaagtatgtctacgttgctgacatactagctcatgaaatccatgttttggaaaaacagcctaatatgaatctaactcaattaaaggttctgcagttgggcacactggtggacaatttatctattgatccttcctcgggtgacatctgggttggctgtcaccctaatggccagaagctcttcgtgtatgacccgaaccatcctccatcatcagaggttctccggatccagaacattctatccgagaagccatcagtaactacagtgtatatcaacaacgggtctgtcctccagggaagttccgtggcgaccatctacgataggaaacttcttgtaggcactttataccagaaagccttgtactgtgaactctaagttgtatttttggcatgcaagtacaataagttgtagcaaaacaatcttttgatgaattgctaattctgagggaatttaaccgtcagcactgacctaggaatataccacatacatagctaattttatttcaaaggaaaggcctacaattctgatgtactttcagcatcaacagaaaattaactttattattgggtgtgtgtgtgtgtgtgtgtgtgtgtgtgtgtgtgtgtgt

SEQ ID NO: 4960 - DNA, 1335 bp, Cricetulus griseus
tgtgccttctgaagaccagtgtgtgattgatggaggaactccaggaaggcagctttaactactgctgttcccaacatcgtggatgctgttgctgaggaggcccgtgcctctctggctctcaccattgcccttgcctcccaatggcctctgctgccaggccaggggccagcactgctgcctgagccagctgcccctctccaggacttgccgtttcctgatggggtaacgtgacagacaccccggatcagaggctgcctgcctaccacggcccagggctaccagagttggtggagttcaagttcattttccctttggtcttgagtgctgggcccagctctgagcaaaggggactcttctccatccacccatgcagagagggtgtccccagcaacgaccccatagaggacagtgttctgcagccagagtcaccaacttgaagttctctttgttcagtttttttggttgtttgttacttttattttcacttccttgtaactactccactctgagagacaggactttggggctgtccattttactgggggaggggggttttgttatttttccttttcttttttagaactgggttttttttggaattatcaaccaccaggcagctttcctctcctcccaaattatttgcacaatatttgtgcggggtgtggggacaaggttttaagaaatcttttaatttttggacaagcacggggatctcactggacttggtgtggggggctgggggaccccctgtgcagcccttgctggctggtcccctccgggtccccggaggaggcatggcccgcatgaaccggccagcacctgtggaggtgagctaccgaaacatgcgtttcctcatcacacacaaccccagcaatgccaccctcagcactttcatcgaggacctgaagaagtatggggctaccaccgtggtgcgtgtgtgtgaagtgacctatgacaagacccctctggagaaggatggcatcactgttgtggactggccctttgatgacggggcgccccctcctggcaaggtggtggaggattggctgagcctgctgaaggccaaattctacaatgatccaggcagctgcgtggctgtgcactgtgtggcaggcttgggaagggctccagtgctcgtggcgcttgcccttatagagagcgggatgaagtatgaggatgccatccaattcatccgacagaaacgccgtggggccatcaacagcaagcagctcacctacctggagaagtaccggcctaagcagagactgcggttcaaagacccacacactcacaagaccagatgctgcgtcatgtagctcaggccttggccctgta

SEQ ID NO: 4961 - DNA, 1335 bp, Cricetulus griseus
aaaggagtggcctcatatcttttgccagggcagatatctccgtggctagttcaaaaacccaaagtcataataacagacaagcaagtggcaagtttaaaccctgaatccaagcaagaagttcctatgtgtatagatccagaatcgaagccagaagttcccgtgtgtactaattcggagtctgtgcaagaagttcccatgtgcacagaccctgaatccaaacaagaaattcccatgtgcacagaccctgagtccaaacaagttcccatgtgcacagtccctgagtccaattaatctagaagcattcatgtgtatgcacctgaaattaaacaggaagacaccatggatatagaacctgagataaaacaagtaaccatgcttccagactctgaaatcttaaaggttgccaggatgcatcatgtccactctgagagctacctagtatacaacattatgagcaatggagagatcgagtgcagcaacaccctggaggatgagctggaccaagccctgcccagccaagccttcatctaccgcccaatccggcagcgagtgtactcgcttctgcttggggactggaaagatggaaccagcaccggtccggtggtcaaggagtggtttgtgtatcctgggaactccctgaggcacccagaccttgttaggcctctgcagatgacccttcaagggggaacacctagtttggaagttttgtggctgagccaagacccagcagcgcaggcccggcgcctagactcattgctagcctgcttcaacctctcctcctcaaaagaagagctgcaggcaattgaaagcccattgagggcactgtgctgcctcctaatctacctctttgtccaggtggacactctttccctggaagatttgcatgcatttattgctcaggccttgtgcctccaaggaaaatcaacctcacagcttatgaacctacagctggattacattaactccagagctgtgcagttggggtccctccttgtccgtggcctcaccatgttggtactagtcaacagcgcatgtggcttcccctggacaacaagcgaattcatgccctggaatgtctttgatggcaagcttttccatcagaagtacttgcagtctgaaaaaggatatgctgtggaggttcttttggaacagaatagatcatggctcaccaagttccacaacctgaaggcagtggtctgtaaggcttgctccaaggagagccgacgcattgtaggcagaacacattggaactctcactacacaggtgggtaagggcacatactacaaataaataaaagacatcttcaaactacaaaaaaaaaaaaaaaaaaaaaa

SEQ ID NO: 4962 - DNA, 1334 bp, Cricetulus griseus
agaacattgagcggctgaaggtagacaatggcaggcagccaggagagctggcccgagagccgcaggacatgaagttgtgtgagcggcaccaggagaagttgcactactattgcgaagacgatggcaagctgctgtgtgtcatgtgccgcgagtcccgggaacacaggccccacactgcggtcctggtggagaaggctgccctgccacacagagaaaaaatcctgaaccacctgaacaccttaaggagagacagagaaaaaattcagggctttcaggccaagggagaagctgatattacagctgcactgacgaagctgcaggagcagagacagtacattgtggcagaatttaagcagggccaccagtttctaaagaagcgtgagcagcacctgctcgaccagctggccaccctggagcagctcctcaccgagggcagggagaagttcaagacccggggcgtcagtgaggaggaggaagaggaggaggaggaggaggttctggaaagctgcatggtgggagtggccaaagactctatgaagaggaaaggggacctctccctgaggccagaggatggcgtgtgggcccttcggctctcctcctcaggcatctgggccaacaccagtcccgaggcccagctcttcccagtgctgcggccccggagggtgggcatcgccctggattatgaagggggcactgtgacatttaccaatgcagagtcacaggaactcatctataccttcacggccactttcacccggcgcctggtgcccttcctgtggctcaagtggccaggaacacgcctactgctgagaccctgagttccagaaccggcctgggccacactacagaatcttcagttctctgagattccaggactctgagatgaagaagggttgcctggatcccatacccatggaaacttcctttctttgggatcccaagaccgtgtgaagaaatgttcttggccaaagcaccaggggaggaaagaagagggacattacatccaattgccacccatctccccactgccgtggccacgccctctctcagcactgtcccttcatctctatttcttgttgtagcttctcaagtttccatggctgtgtgagtttgtgttctggagtgctggtggaatcatctcctggtgtggttagcaaagctcatggcctccaaacctagagctgaggagtgggatgccccagggccatctgtgtctccaaaagcatctaggtactgtgattcaggcagcagctttagtcaataaattacctctgcagattagtccttgtgaggggagtttttttaaacaatcccaacatcttgctcttgatcag

SEQ ID NO: 4963 - DNA, 1334 bp, Cricetulus griseus
gggaagagcagtattgctgtcaataactgtatccagcagctggcccagactcgcaaccagagccagccccatgatggtgcttggggtgagggccagaacatgttgatgatccttaagaaagatgctatgagcctggtgaatcccctggaccacagtctgatccattgtcaacctctggttcacatccgtgtctggggtgtgggcagctccaagggccgtgacagggactttgcctttgttgcgggtgacaaagacagctgtatgctcaagtgccatgtgtttcgctgtgatgtacctgcaaaggccattgcaagtgccctacaggggctctgtgcacagatcttgtctgagaggacaggagtcagtggagaagctgcttgctgttccccagatcctatttcccctgaagacttcccgaggcaagtggagttgctggatgcagtgagacaggctgctcagaagtatgaggcactgtacatgggaatccgccatgggtatggatgtgctgaatgaggccattggtaccctcactgcccggggggaccagaaaacctgggtccctgctatgctcagtgtgtctgactctctgatgactgcacatcccattcaggcagaggctagtgcagaggaagagccactgtggcagtgccctgtgtgccttgtaacctttattggtgttggccgtgatccacatacctttggcctcatcgctgaccttggttgtcagaccttccagtgtgcagccttctggtgccagcctcatgctggtggactctctgaagctgtgcaagctgcctgtatggttcagtaccagaagtgtctggtggcctcagcagctcggggtaagacctggggtgcccaggcccgtgcccgacttcggctcaagcggaccagctccatggactcccctggtggccctctgcctcccccgctactcaaaggagggattgggggtgctggagcagctcctcgaaagaggggtgtcttctcatttcttgatgccttcaggctaaaaccttctcttctccatatgtcctaaattgatcttagaggctggggaaggaggctctatactccttcagtccccagggctctgtagcctctcaccatcctgcctgtccctgatccttgcataccctgtatttattacggagtttgttgtttatatggatgactgagaggccctgcactataacttaggcccctagcacccttttccttgggttcttttgttccttgcccctgtccaatcctggacaattggctctacctcagcaactttatagcagaatcagtacaaataaaaatccctcagtgacctcaaaaaaaaaaaa

SEQ ID NO: 4964 - DNA, 1333 bp, Cricetulus griseus
gaaggaccttctcggccacttcggctgtgtcaatgccattgaattctccaacaatggaggccagtggctggtctcaggaggagatgaccgccgagttctgctatggcatatggaacaagctatccattccagggtcaagcccatacagctgaagggagagcaccattccaacattttctgcctggctttcaatagtgggaacaccagagtcttctctggaggaaatgatgagcaagttatcctccatgatgttgaaagcagtgagaccctggatgtgtttgctcatgaagatgcagtatatggtttgtcggtgagcccggtgaatgacaacatttttgccagctcttcagatgatggccgggttctcatttgggacatccgggagtctccccatggagagcccttctgcctggcaaattatccatcagccttccacagtgtcatgtttaaccccgtggagcccaggttattggtccggtgtcaatccatcaggcagaactggcaggcctggcaccttccctcaggcttggagttgtcagaagctgtggggtccatgtcaactttgcagattagtgggcatctgttaggaggcagggagtgacgagagacaattctctggttttgtctcctggctccgagaagacatttctgttctgttgaagtaggtaacaatggagagaagaaaatatcaaatttccagtgtatagtggtgatggtagttcctgagttgtcattgaagggttgtgcaagacaggaagacgaacagtggaacgttggatgcagaggtgctagacagctgaagcctggctggaactggcctagggaggacttagctgaaggcaactgtggcctcactgatgaagcgttcctttcagaggaggacctgtcctgctgggatggagccaagagaagaccacctgtggaagctgaagaatggaggatgatgttcagtgctgggagccagggttcttataaaaggaaggtggttgataagagccaggaggatatctcatcttgctgagctttttggaagggagatgagcttagtatctgatgtggctgaggtatgaaagcacagtttgggaaggagaggaaggcgcctaagtagagtggggatgcatacagtcagcggctggactcttcctggggagtgggacagcagttctgtaaccaccttagaattactttagatttgtaattaaaatggttctatgatttatcttttgactattcacagataattgtaaattctggttttataagcccaagtcattttacatttgcttttccaaaatgattaaattggaatttttaatcctttatatacaaaaaa

SEQ ID NO: 4965 - DNA, 1332 bp, Cricetulus griseus
cagggccaaagggagaagttggtgcacctggagttcccggggcaagggtgatgccggtgcccctggagaacgtggaccacctggaactgcaggggcccctggtcttagaggaggagctggaccccctggccctgagggaggaaagggccctgctggccccctggtcctcctggtacttctggttctcctggtctacaagggatgcctggagagagaggaggtcctgggagtcctggtccaaagggtgaaaagggtgaaccagggggtgccggtgctgacggagctccaggaaaggatgggccaaggggtcctactggtcctattggtcccctggcccagctggtcagcctggagataagggtgaaggtggtgcccctggacttccgggtatagctggacctcgaggtggccctggtgagagaggtgaacatgggcctccaggacctgctggcttcccgggtgctcctggacagaatggtgaaccaggcgctaaaggagaaagaggtgccctggagagaaaggagaaggaggagagattatgtcttcactcaagtactgttaatggacaaatagaaagacctcattagtcctgatggttctcgtaaaaaccctagctcgcaactgcagagacctgaaattctgccatcctgatctcaagagcggagaatattgggttgatcctaaccaaggttgcaagatggatgctatcaaagtattctgtaacatggaaaccggggagacatgcataaatgctagtcctatgactgtgccacggaagaactggtggacagatgcctctgctgaaaagaaacatgtttggtttggagaatctatgaatggtggatttcagttcagttatggcaatcctgatcttcctgaagatgtccttgatgtacagctggcttacctcagactcctctccagccgggcttcccagaacattacataccactgcaagaacagcattgcctacatggatcaggccagtggcaatgtaaagaagtctctaaagctgatgggatcaaatgaaggggaattcaaggctgaaggaaacagcaaattcacttacacagttctggaggatggctgtgctaaacacactggggagtggagcaaaacagtcttcgaataccgaacgcgcaaggccctgagactgcccatcatagatatcgcaccctatgacatcggtggtcccgatcaagaatttggtgtggacattggccctgtttgctttttataagccaactctatctgaaaccccagcaaaacaaaatcgcatccatgtgttcttcttgttataatcttgtcaaccagtgcaagtgaccaactaaa

SEQ ID NO: 4966 - DNA, 1332 bp, Cricetulus griseus
agctcggactaccgcatcctgggcgcggacctgcgtgagctccctcgactaggcgaggccctggactgcgcgggcctggacgccacctcacccacgctgctcctggccgaagccgtgctgacctacctggagcccgcccggtgccgcggccctcatcgcctgggccgcccagcgttttcccgacgcccttttcgtaatctatgaacagatgaagccgcgagacgcctttgggcaaatcatgttgcagcgactttgggcggctgcactctcccctgcacggcctggtagtcttctttcccgacgtggaggcccaggtgcagcgcttccttcaagctggctggactgcctgcagcgccctggacctgaacgagttctatcgccgctggctccccgcagaggagcgtcagcgggtcgagaccctcgagccctttgatgagtttgaggagtggcatctgaagtgtgcccactatttcatcctggcagcatctatggggactggaggccagtgggatggacgcctttatcacaccatgacaaggctttcagatactcaggttctggttctcggagggagactgtccccagtaagtccagcttccagggctctccagcttgatttatacagaagtgaggataattgccctgagattcagaatgtaacagtaacaaaggctgccttggaagaaggtcccatgtcacgttggcggcattcaacaacagaagtatactatcagaatcaaagatacttacttgtgtatggtggccgaagtgtggtagaacctgtactaagtgactgtcatttccttcacgtagagacaatggcttgggtcagaatcccagtagaaggggcagccccggagggtcggcattcccatagtgcctgcagttggcaaggaggagcacttatcgctggaggtctgggggcttctgaggaaccattgagctctgtattctttctcagaccaaagccctctggattcctctgggaatcagtagatatccagcctcccataaccccaaggtactctcacaccgctcatgtatttaatggaaagctgcttctggttggaggggtctggattcattcctcctcagttcctggagtgactgttatcaatttgacaacagggttgagctctgagtatcagcttgacacaacatcggtgccatggccattaatgttgcacaaccacagcagtgtcctccttcctgaagagcagcagatcctgcttactggaggtggagggaactgcttttccttggtacttattcaaccccacacagtggcattagatctttcttccttaagtacagggcaataagactggactt

SEQ ID NO: 4967 - DNA, 1332 bp, Cricetulus griseus
  modified_base (431)..(431): a, c, t, g, unknown or other
tggaacagtcacacagccttcctctgcccacgctatccagcaccagtcccacaaaaggaaacacaagaaatgtcaagaagctggaagacaggaagacagacccactgagcctggaaggatatgtgagctcgtcgttgccaaagccccctgagaagggcaaagtcagccagagcctgtttaaaaacagagaggtttctaggtgtgcagaggaaagggccagagccgaagtctgtctccactggtttcccgcagactccagtccagggtcagccgtgctgagcaactcctccagctgcagcgagggctaccccactcccttctccgagctccagggatagtggccaggcctctgtggcaggcactcgaggccaccgtgcagtagaccagcatgcaaatctcttaagtttcttttttttttttatttttaattnttgtttttgcttgggcttgcttagtgtgggaggggatggtgctccaagacatctggaaacaggaggaccctatccaccatgggcttcagaggacactggggccttggcaccaggactgcactgcatgtgcagaatccaggagacaacagtccaccaccaaagctactttaaaaactccagagtggacagaggaggggctatgggtcaggagaccctgtgcagaaaggtgggagggggcgtctcctccaccagaagcagtcagaaatcaccgagagtctcacatccgcataggttttgtttccacgagaaatgtaaagtataatttaaaatattaaccttcttttctacaattaaaaaaggagactctccgtcgttttttaaaagaatatcattaaattaggatattttttatttatttttaaagaaaatgtaaaaatccatgctgtcagccatccccagcaacacaggcaccggctgtctgtccacgtcagggcaggccccacctccccctcccctagcggcagaactgccgcgagaactgttgttccctgcctttttgtgtgtgtctgagaaacaaattctgttctttggaaacgttctgtgcctagtagggcaatatttttatatgtatgtatgtatgtatatatgttcacgtgtgtacatatggtctgggtgtaaaggatgtatttatgctctcacgctgctgaatatttgtcacttttacggtccctccctgtctcctcaccctgctgccatgggaggccaccgaggctcgctcaccactgtatgtccaggtaaaatgccctcctacccggccctatggcttgcagagccattactggccacaccttcagagaatggtaataaaataaaaactgacaaaaattaacaaaaaaaaaaa

SEQ ID NO: 4968 - DNA, 1332 bp, Cricetulus griseus
tcaacccatccatcttctgcatccgtatttccaactacaaacctgcactgtcctttgctaatccagaagtgcccaacgaagactattttgacagactgatgcaagcatcaggtggttttacgttgagtgctgaatcagatgttccttccgcagccatatcagatactccacagcccactaaatacaagtatggagaccctctgcagactgcaggcacaccttccggttcatttcttcgactgccttcacctctctcgtcatctctgtgcacagatgagaaccctgcagccttcctggtgagccaggccttccaatgcagccgaagggtggacatagaagagtgtgaaggaatgggagccccatggctcactacagcagccctgccattctgagggtacctaattcaacaacacaggtctccatcaaggttcagtctgtcatgtatcggtctctcaatcacacgctgaccgggttagaaagtcgtggcatattgcggccatctctggtcagcattgggcaggatagactctgcagcaacgttgttctcgaggtgaaatacagcctgctgtacacagccaccggccagatacaagaagccagcctttcccttgtactggggacattcagcagcacagtgactctcctgcagcagaagtttgagatacactttattcagcatggcaccaagcctgttccttgcagtggcaaccctggttacagggtgggactcccgctggccgctggctttcagcctcagaagggatctgggattattcagacaacgaacagacaaggccaatttactattcttcgtagcacaggcgagcaggactgccttgccagcaagggactccgggacccagtgttgtttggctacaatgtgcaatctggctgtcaactcagactgacaggcaccatcccctgtgggctcctggcacagaagattcagggccttctgagaggccaggccttccctgactatgtggctgcatttgggaattcccaggcccaggatgtgcaggactgggtgcctgtgcgttatgtcactcattcctccaacatgaagggcccttgccaactccctgtggctttgggtatagaagtgaaatggactaagtatggatctctgctgaacccccaagccaggatagtgaatgtcactgcccagatcttctccattccagagcccctcccagggcctgagaggacgattgtcatttccactacagtgacatttgtggacgtgtcagcccctgcagaggcaggcttccgagctccacccaccatcaacgccaggctgcccttcagctttttcttcccatttgtgtgatg

SEQ ID NO: 4969 - DNA, 1332 bp, Cricetulus griseus
  modified_base (1323)..(1323): a, c, t, g, unknown or other
ggaagtgctagggatcgccagttggttttacgtcccctccatgccccccgcggcccgaagcccccgagctggggccggatcatgagcctgctaggcggcctggcttccgagccgcgcaccccgctgtcccacaaggccaggatgaaaaagctcccgaagaagagccagaacgagaagtaccggttgaagtacctgcggctgcgtaaagcggccaaggccacggtgtttgaaaatgctgctatttgtgatgaaattgctcgtcttgaggaaaaatttcttaaagcaaaagaagaaagaagatatttgctgaagaagctcctccagcttcaggctctgactgaaggggaaccacaggctcctgctccttcccacagctccagtttgcccctggcttatggtgtggccggccctgtgggaactatccagggagctggacccagcactggggctgaggaaccctttgggaagaaatccaagaaggagaaaaagagaagggcaaagagaacaacaaactggaagttctgaagaaaacatccaagaaaaagaaaatggagggaggtgctcgcaagctggttcggtccattgccctggatccctcaggacggcctgtgttccccatcggactagggggtctaacagtatatagcctgggggagatcatcaccaaccgacctggcttccatgatgagagtgccatctaccctgtgggctactgcagtactcgagtgtttgccagtatgaagtgcccagaccagaagtgtctgtatacctgtcaggtcaaagatggtggtgtgcagcctcagtttgaaattgttcctgaagatgacccccagaataccatcgtcagctcttctgccgatgcctgttatgaagaactggtcaggaccatcagtaatgcaacggggaaactgatgcctaacctactctcatgtggtgctgagttctttgggttttctcatccagtcatccacaacctgattcagagttgtccagaagcccaaaactgtgtcaatcatcagtgggtgaagtctgatgcatgcaaacccaggaaggggcagctctcccaggaactgacagagaacgatgcagctatgagccttgaagcctttgagacacagacctttgatgatgaccatgaggactccattctgccagggtccctggacctacctgagcttcaacatgaagcctttgtatcatcttaccagccagagttcctgacacacgaacccttggtggacactgacctacaggacctaaagtctccatcacagtgtagcccaatgcagtcttcagactgaagagggcagtttctaaaaaaanaaaaaaaaa

SEQ ID NO: 4970 - DNA, 1332 bp, Cricetulus griseus
gaccgagaaggctggctgctgaaactaggaggtggcagggtgaagacctggaagaggcgctggttcattctgacaactgcctttactactttgagtacaccacggataaagagccccgtgggatcatccccttagaaaatctgagtatccgagaggtggaagactccaaaaagccgaactgctttgagctttatatccctgacaacaaagaccaggtgattaaggcctgtaagacagaggctgatgggcgagtggtggaaggaaaccacactgtgtaccgcatctctgccccacccctgaggagaaggaggagtggatcaagtgcatcaaagctgccatcagcagagaccccttctacgagatgcttgcagcgcggaaaaagaaggtctcctccacaaagagacactgagggcgtgccagggcacagccagcccatgaagctgtggccctttctccagcctcccctggaggggtgctgaggagatgacctgtgtgggcaagaggggcaaaagccaggctgctggcgagggcccagcagacacagggaggcctccagggccccagcagggcagcaggcaggcagtgtgggcagctcccgcccagtgcctatgggatggggtgaaggtggacagctccatgcctggccctcggcacccaggcccactgcgctttaaagtggaaagtccacgttttcctaataaccaaaactgtgaggaggtcaccccatggtgccaggtggccgactgtttcatagctggtctttctttctcctccccaagaactccactcctcgttctagaggaaggagtaggttttacctgatccccttggggcttcagccttttctgcctcaaaagtatccccaactggactgttctggtgcactctgtggtagcctccaggagcagggccttgctcagcagggtgcagtgcagtcaagccagggtgaggtgaggtggcctttgtgtccccttgccctctatggcatggcatgccacagcacacgtgtgggttggccctggcctcctaactcggtgtgaagggagccatgaagcgcagcttctcctgccgttctctcagggactctcaagggcagctcctgctccttggccagggccactgtgccagtccaggcagagcaggtggcaggtggtgtcttggcacactcctccatgtggccaaggcctgggtggcagaatggtgcctccagggcaggtggaggagccatgggcctcccactgggctgcgtgagctcagctcctcccatctcagaaggaggtcagcacctctggaaatagctttgcagagaagggtgagtggggggcagaactc

SEQ ID NO: 4971 - DNA, 1331 bp, Cricetulus griseus
tgctcaggaacacagggaggtccacagagaaccctctctgcgttagctcactggtctgcgatcttcagtgacacaccgtatcttccactcttgactttcccatttgtgaagttattccagaacaatccgctcatctgttttgtaagttgttgctactctcataatcaattggtgtcaacattggtttgagtacttccctaacccacccatcaatattcttgccgcgatagaaaacatcttggcatttcatgacaaggaactgctacagcactttatagatcgggatgtgacttcccagctgtatgcctggcctctccttgaaactgtgttctcagaagtgctgaccagagaggagtggctccgattgtttgataatgtcttcgcttttgttgccttgacaaaagggcaataccccatctttaatcagtacccaaagtttattgtggactatcagacgcaggaacgggaaaggatcaggaaggacgaattggaattcttgagagagaggcagacagttgaaaatatgcaagctgaagtggatgaacagagagctgaggatgaggcttggtaccagaaacaagagctgctccgtagagctgaggagaccagaagagagatgcttctgcaggaggaagagaaaatggcccagcagagacacaggctagccgccgtgaagagagagctgaaggtgcaggaaatgcgcttacaggatgctgccaggaggcgctttctcaagcttcagcaagatcaacgtgaaatggagctgcgcagactggaggacgagattgagagaaagatacaaatgagagatacaagaaattgctgccacagccgaaaaacctggaaataagacatctggagcttgaatcacaaaaacgactttatgagaaggatcttactggaaatcaggactctgttgcaaaggaaatccgaaaagatgctgatgcccataggcagaaagtagcccttgaagaacacatgttccggaacctgctggaaaccagccagatggagggcaggaggacgcagagggtaagtgaggacaatttggcaaaagctgagcaagcctgcctgaatgctgactggaagcttcaagctttacataaacagaaaaatgacgacctgcagcgcagcgaaagctaccaagaagtcgccactctcctccggaagaacaggaagaaagaaatgcaagtcttaaatgcgatggtggaggagcaggctaagaagtggaaggaagcagaagaaagggagtctcatttgcagtcagaaaagagagcctctgcctgtgcagacgcctaacagaaagtgctttttaaagctaggagacgagt

SEQ ID NO: 4972 - DNA, 1331 bp, Cricetulus griseus
cacgtggggaatgggagaagatgctgtagaggacgaggctgaagagaaccccattgcgttagagttcaacaggaccggaggcattttatataaaggatccaaagaaggcctctccgaaggcttctttgacagggaaggagaagagttggaatatgaatttgatgagcagggacacagcacctggctctgcagggtgagattacctgtagatgactcaactgggaaacagctggtagctgaggccattcactcaggaaagaaaaagaagcgatgattcagtgctcgctggaagcttgtcggatccttgatacattgggattgctacggcaggaagccgtatcacggaaaaggaaagccaagaactgggaagacgaagatttttatgatagtgacgatgatacattcctgtcccggaagaaacttcatctgaggactttgaactaaggaaagaacagcagaggctgaaagggttaataaaacttgtaaagccagcggaaatcccagaactaaaaaagactgaacttcagactacaaatgctgaaaacaaagctaagaaacttgcattacctctctttggtgccatgaaaggaggaagcaaattcaaattaaaaactggaactgtagggaagttgccacccaagcgtccagaactccctccaactttaatgaaaatgaaggatgaacctgaagtagaagaggaggaggaagaggaaagaggaggaggagaaatcgaaggaggagcatgaagagcaaatggaggatgggagcagtaggctgccagagacagagacagagctggaaacagcagtgcaggacttgagtgctcccacagatcccgagtgctctcaggggacaaaaagccacagcaccagggaatgaatgtgaaaaaaacagagatgagttgaagaaaaagaaagcgtctggtccaggcaaatttccacccattctttcttccaaataccctgaagatgatccagactactgtgtatgggttccacctgaaggtcaaagtggagatggcagaacccatcttaatgacaagtatggctattgattggttcagagtcccaaaggaagaccttgcggaccacaggatgtttgggatgacaaatcaagtgatggccagggaagttcagatgaccatttgtgaaatctggtgactggcttcttctatattcctggcttcctaaaattatctgcccagtggattctcctgaattttggtgtttatatttaagtgtttttgtatatatgtaaaaaggaaccatatacactgaaaattagtaaaataaaagacatgatcctactaataaaataaaaaaaaaaaaaaa

SEQ ID NO: 4973 - DNA, 1331 bp, Cricetulus griseus
cttaacgttttgacctgtagaggtcctcactttccgtcatggcgctgaaggtggcgatagcagctggcggtgctgcaaagacagtgttcaagccagctctcctctgccgtccttgggtggttctaggtgccaatgagaccccctggaggagcatttcctcacaacaaacaattcctccatctgctaagtatggtgggcggcatacagtgactatgatcccaggggatggcattggtccggagctcatgttgcatgttaaatcagtattcaggcatgcttgtgtgccagtggattttgaagaggtgcatgtgagctccaacgctgatgaggaggatatccgaaatgccatcatggccatccgccggaaccgtgtagccctgaagggcaacatcgaaacaaatcataacctgccaccatcccacaaatcccgaaacaacatccttcgtaccagcctagacctctatgccaatgttatccactgtaagagcctgccaggagtggtgacccggcacaagaacatagacatcctcattgtgcgggaaaacacagagggagagtacagcagcctggagcatgagagcgtagcaggagtggtggagagcttgaagattatcaccaaggccaagtccctacgcattgctgaatatgctttcaagctggcccaggagagtgggcgtaagaaagtaacggctgtgcacaaggccaacatcatgaaactgggtgatgggctcttcctccagtgctgcagggaagtagcagcacgctacccgcagatcacctttgacagcatgattgtggacaacacaacaatgcagctggtatccaggcctcagcagtttgatgtcatggtgatgcctaatctctatggtaacattgtcaacaatgtctgcgcagggctagttggaggcccaggccttgtggctggggccaactatggccatgtgtatgcagtatttgagacagctacaaggaacacaggcaaaagtattgccaataagaacattgctaaccccactgccacactgctagcaagttgcatgatgctagaccacctcaagctccactcctatgccacctccatccgcaaagctgtcttagcatccatggacaatgaaaatatgcatactccagacattggaggccaaggtaccacatcccaagccatccaggacatcattcgtcacatccgcatcattaatggccgggctgtggaagcttaattatccttgcagttatctcaacctgtccataggaccccccttctcattctagcactcctgctagcttggtggacatgctccagaataaagccacttctgccccagaaaaaa

SEQ ID NO: 4974 - DNA, 1330 bp, Cricetulus griseus
aggagagaaaccatacaagtgtactgaatgtggtaaagctttcaaccactcctccaccctgaagatccaccagagggctcacagtggggagaagccttacaaatgcagcgagtgtgggagggctttctgtcggagcacacaccttcatgaacatcagcaaatccactcgggccacagaccctaccagtgtccagagtgtgtcaggagttttagccgcccctcacatttgatccgacatcagctgagtcacaccacagacaagcccttcggctgtgctaagtgcaagaacaccttcagccataaagaacaactagtgcagcaccataaagttcacaccattgagtccctgtatgagtgtaagcagtgtggagagcacttcatttgcagctcgactctacattgccacatgagcgtccacaccagagaagatataagccagaaggtctcaggtcagaacccatcagacatccaagttggtataaagccagatgaatgcactgagcctgacacatccaagcgtaatagctctgtcagtaagcatcagccttccggaagtgagcagccctttaaatgtaacagttgcaacaaggacctttagtcaggatgcccagcttttcaaacatcagttaattcacactggagagaaaccctttaagtgtaatgaatgtgacagagcctttaagcagagtaactaccttattcagcaccagagaattcatactgtgaagcagcactttgagtgtagtgagtgtgggaaaacatttcgtcagagctcatgcctctctaagcatcagaagattcacacaggggagaagccctttaaatgtggtgactgtgggaaagccttcatcttgggtgcccagctcacccgacaccagagaattcacactggggaaaagccttatgtttgtcaggaatgtggcaaagccttcagccagagctcctgccttacccttcaccggagagttcacaccggtgagaagccatacaaatgtagcagatgtggaaaagccttttcccagagagcaaaccagaagaaacacgagaggattcacagtggagagaagccttatacctgtgacgtgtgtggtagagccttcggcttaagcgctcacctcagtcagcaccagagggttcacacgcaggagaaaccacattgtcaagattgtcacagagcctttcacagctgctctgctcttagcaaacatcagcaacttcactcttgtagtaaccagtagcactgcccagagccacttagtgacagcagagtcccgtacatgtgaagacattcataggaagtcagtcattgaaaccaacactttgcaaacct

SEQ ID NO: 4975 - DNA, 1330 bp, Cricetulus griseus
tcgaggagccctaagcccagcaaatcttcccgctccccgcggggtcgccgctctcgctcgcgctcttgttctcggttctgtgatcggaatggcctgagccattcgctgagtagcttcagtcaaagctctcgaaaccaatcttaccgctcccgctcgcgatcgcgttctcgagagcggccctctacgcagcggagtgccccttttgcttctgcatcctcgtccgcctattatggcggctactcgcgcccctatggcggcgacaagccatggccaagcctgctggacaaggagaagggaggagagtctgcggcagaagagattaagtgaaagagagagaattggagaattgggagctcctgaagtttggggactttctccgaagaatcctgaaccagactctgatgaacatacaccagtagaggatgaagagaccaaagaaaagcactacttcagcatcgagttcagaagatgacaagaagaaagaaaaggaaataaatacaagaaaagaagtctaagaagaacagaaaagagtccagtgattcaagctctaaagagtcccaagaagaatttctagagaatccttggaaggatcgatcaaaggcagaagaaccatctgatcttattggcccagaggctcccaaaaacaattacttcccaagatgataagcctttgaactatcgccgaatggaggctgtgcgtctgcggaaagagaaccagatctacagtgcagatgagaagagagcccttgcatcctttaaccaggaagaaaagacggaagagagagaacaagattctggccagctttcgagagatggtgtacagaaagaccaaagggaaggatgacaagtgaggaactttctgacattacaagtggatatttttaacatcaaaaaaggaagttgtggtttctagacataaaaaaggttattagttttgtttggtgtttgggttatttttgatgtgtggtttcacatagttcaggttggcctcaggctttgtagacaaagatgattctgaacgactttggttgactgcctctactttccaaatgttgtagattgcagacatgtgccaccaggcccagccaaaaattcagagtttgccagtgaggctcaccctaaagtagaatcagtgtattagtaggagaacccttcagactggttggcatgagctacagaactgttgccattttgttacctacctagcacactcataaaaatgtgtatcaagcttggaggtaggcacagagaaggaccaaacagctaagggccagtgggtgaactttagcaatgtcaaaattcaactctgtgcttgccagactccaaaatc

SEQ ID NO: 4976 - DNA, 1330 bp, Cricetulus griseus
ccacccctgtgtttgggcaggtggcagctagcagcacagccactgccacaccacaggccagcagctcaggatttggcagccctacgtttggtgcttcagctccagcagtctttggacagacagcatttgggcaggccccagcctttgggcaagcaacaagcagccctgcaagtggcttctctttcagccagcctgggttcagctccgggcctgtttttggccagtctgtttcctcttgccccccacattccaccagtgcgaacgtcttcggagccgcctcgagtgccagcagccctggttccttctcatttggacaggcttccaccaacacaggagggacactgtttggccaaaacaaccctcctgcttttggtcaaagccctggctttgggcagggaggctctgtgtttggtagcacctcggctactacctctacagcagcaccttcagggtttagcttttgtcaagcctccggttttgggtctagtaatactggttctgtgtttggtcaagcatccagtactggtggatcagtctttggccagcagtcatccacttccagtggtagcgtgtttgggtctggaaactctacaagagggggcggtttcttcagtggccttggaggaaaacccagccaggatgctgccaacaaaaacccattcagctcagccagtgggggctttggatctacagccaccccaaataccactaatctatttggaaacagtggcgctaagacatttggagggtttggcagctcatccttcggggaacagaagcctgctggcactttcagctctggcggtggaagcgtggcatcccaaggttttggattttctactccaaataaaacaggtggcttcggtgctgctccagtgtttggcagccctcctacttttgggggatcccctgggtttggaggggtgccagcattcggttcagccccagcctttacaagccctctgggctcgacgggaggcaaagtgttcggagagggtactgcggctgccagcgcaggaggattcgggtttgggagcagcagcaacactgcgtcctttggtaccctcgccagtcagaacgcgccgacctttgggtccttgtcccagcagacatcaggctttgggacccagaacagtggattctctgggtttggatccggcacaggagcattcgcctttggaccatcaaactcgtctgcccaaggctttggtggctggagaagctgagccagtgtccaaattccttcaggctcctgtgacccactgtgcacatccctccacggctgtcctggaacttgctctgtagaccaggctggcccggaactcacaga

SEQ ID NO: 4977 - DNA, 1330 bp, Cricetulus griseus
tcggccggcggagcgcccaccccaccgtggctcccggagcgcggggcggcgccaccctccggccgcagcgcggcactgcacggccgcctgcgactttcgatgttccacactcccgggccggagcctcggcggcggcttttttttcccgcccccccgtccagtgataggcaaaggtcggatgatgagagtcccagcaccagcagtggcagttcagatgctgaccagcgagaccctgcagctccagagccagaggaacaggaagagagaaaaccttctgccacccagcagaagaaaaacaccaaactttctagcaaaacgactgctaagttatccactagtgctaaaagaattcagaaggagctagctgaaataacccttgatcctcctcccaactgcagtgctggccctaaaggagataacatttatgaatggaggtcaactatacttggtccaccaggttctgtatatgaaggtggtgttttttttcttggatatcacattttcttcagattatccatttaaaccaccaaaggttacctttcgaaccagaatctatcactgcaacatcaacagtcagggagtcatctgcctggatattctaaaagacaactggagtcctgctttgactatttcaaaggttttgctctcaatttgttcccttttgacagactgcaaccctgcggatcctctggttggaagcatagcaactcagtatttgaccaacagagcagaacatgacaggatagccagacagtggaccaagagatacgcaacataattctcatgatttgtatgcagtgtgaagaagcagaaggcctcttcccactgtgctgcggatctttatagcctttacaatacggacttctgtgtatatgttatactgattctactctctgcctttatcctttggagactgggagattcccccaaaaggtaaatgctatcaagagtagaactttgtagctgtagaatagttatgtttaaaatgcctacttgcaagtcttgcttctttgggatatcaaaatgtattttgtgatgtactaaggatactggtcctgaagtctaccaaatattatagtgcattttagcctaattcattatctgtatgaagttataaaagtagctgtagatgactaggaattatgtcatttgtattaagcccagatctttttctgagtatgtggttcatgctgttgtgaaaatgttttacctttgtcagtttgtaatgagaggatttccttttaccctttgtagctcagagagcactgatgtatcatctcaaacacaataaacaagctcctgaaggcaaaaaaaaaaaaaaaaaaaaaaa

SEQ ID NO: 4978 - DNA, 1330 bp, Cricetulus griseus
agtatattttgtgggcaattcccagaaattaatggctatgagttcctttttgatcaactcaaactatgtcgaccccaagttccctccgtgcgaggagtattcacagagcgattacctacccagcgaccactcgcctgggtactacgccggcggccagaggcgagaaagcggcttccagcccgaggcggccttccggggcgccgtgcgccgtgcaccgtgcagcgctacgcggcctgcccgagaccccgggcccccgccacctccgccgcccccgccgcccccgccaccgcagaaccccctgcatcccagtccgtcccactccgcgtgcaaagagcccgtcgtctacccctggatgcgcaaagttcacgtgagcacggtaaaccccaattactccggcggggagcccaagcgctctcggaccgcctacactcgccagcaagtcctggaactggagaaggagtttcactacaatcgctacctgacgcggcgccggagggtggagatcgcccacgcgctctgcctgtctgagcgccagatcaagatctggttccagaatcgacgcatgaagtggaaaaaagaccacaagttgcccaataccaagatccgctcgggtggcaccgcgggcacagccggaggaccccctggccggcctaatggaggccccccctcactctagtgctccccaaagcaggagctcgaacctgggggggcggggggccgcgagcaccgaaggggaattcggggtatgggagggtccccaggcttgagcccagaaaaacctatctaccctacccccactttatctataaggaataaacgcagagaagggggtagggaagccttattatagaaacgacaatagggagccgggtgaagccctccggagactgccagatagcacagtgttttggccacggtaacaaacacacacacacaacttctctccctgtaggtgcccaccgttgggggggggggggcagtcttcacaacgtgggtttcggaatctgaacccaacaaatataaatttaaaaagagagagaaatttagacacccaggagggccttctggtagaaggtccagccaggcctgccagggtgggaggcagttgagttctaggagctgggaatgtcttctggccaatccacagttctacagcagaggccttctcttagattacatatgaatgtgaaattaggaaatgaaattctgtggccctcctactctggaaggacaatgttgcagagccttctcccgttggtatcgctgttgcatcgtttattattattattattattattattattattattattattattattattatttt

SEQ ID NO: 4979 - DNA, 1329 bp, Cricetulus griseus
gttccggggctggaggtgtggccggcggtgtggcccgctccgcgctcgctcgccctgctgcgctgcacccgggcgcccgacgctggctgtgcgtggcctctgctcccaccagccgccccagcgtaacggtgtgcggtgaagtcgctcgccaccgacctcagtgggcagggcctggccaccgctcaaacagactcctttgactgtagtcaccccggggttcctccgctgcccgggtgtgactaccagcagcatggcaaccagccgcctgttccccagtgacaacctccccacgtataaactagtagtggtgggagatggaaggtgtgggcaagagcgccctcaccatccagtttttccagaagatctttgtgcctgactatgaccccaccattgaagactcgtacctgaagcatacggagattgacaatcagtgggccattttggatgttctagacacagccgggcaggaggagttcagtgccatgcgggaacagtacatgcgcactggagacggcttcctcatcgtgtactccgtcactgacaaggccagcttcgagaccagacaagccatgaacagtttctcccgccctcatccccagtgtctgagctctggtgtcttttgttagatttttaaattatttgagtaatgattgttttattaaagaggtctgttcccactgcccggtgaagcccgaggctttggcagacctctccgctagtgtctggaacaatgctcttgtctttttaaccgtagagttcctagcagtgccaaactccagccaggatgattttctcccactactctgacacctccttttaggctccttttctctccttagccagcccctctcccccagaatggggctatgccatggctacttccttcccaagcactttgccacacaggagacatctggatgtttctcttaggagtgtcccacctctccacggctcttgctgtgagagtacctgactgaattagtgtagcttgtcttgcctgccaggagatgtgacccaccaaccctggcagctctaaccccaacgcccctcagacctgctacactaagtccagggccacagaggggtcccttcctttagcagcccacctgggtggagactccacattggctggggtttccctagaatgccagatacttgaaacactgagccctttgagtgacagtattagccggtggccattgtcaagaaacgagagtgatgcctagacgtcttgatgatgcttgagccttttatgttactttttatcgagtctttgtgtatctctacttattaataaagaaacaaagaagaaaaaaaaaaaaaaaaaaa

SEQ ID NO: 4980 - DNA, 1328 bp, Cricetulus griseus
tgtttgaactcaaacatatgagagatgttcagttcaaccatcttactcgcttcatcggagcctgcatagaccctcccaacatttgcattgtcactgagtattgtcctcgtgggagcttacaagacattctagaaaatgacagcatcaatttggactggatgtttcgctattcactcattaatgatcttgtgaagggtatggcctttctccacaacagcattattgcatctcatggaagtctcaagtcctccaactgtgtggtggatagtcggtttgtgctcaaaataacagattatggtctggctagcttccgatcaactgctgaacctgatgacagccatgcccctctatgccaagaagctgtggactgccccagaactgcttagtgggaactccttgccaaccacaggcatgcagaaggcagatgtgtacagctttgccatcatcctacaggaaatagcactccgcagtggtcctttctacttggaaggcttggatctcagtcccaaagagattgtccagaaggttcgaaaatggtcagcggccatattttcggccaagcattgaccggacacaactgaatgaagagttagttttgctgatggagagatgttgggccaggacccagcagaacgtccagacccaaattctaccccattctgtggcagagcagttaaaacggggagagactgtccaggcagaggcctttgacagtgtcaccatctacttcagtgacatcgtgggcttcacagcactgtcagctgagagcacccctatgcaggtggtgacacttcttaatgacctttatacctgctttgatgccataatcgacaactttgatgtctacaaggtggaaaccattggggatgcctatatggtggtatctggccttccaggccgaaatggtcaacgccatgcaccagaaattgctcgcatggccctagcattactagatgctgtttcttcctttcgcatccgacatcgaccccatgaccagctgaggttacggataggcgtccacactgggccagtctgtgctggggttgttggtctgaagatgccccggtactgtctttttggagacacagtgaacactgcttctagaatggagtctaatggtcaagctctaaagatccatgtctcctcgaccaccaaggatgccctggatgagttaggatgcttccagctagagctccgtggggacgtggagatgaagggaaaaggaaaatgcgaacttattggctcttaggagagcgaaaaggacctcccggactcctgtaaaccccaagccagacaatctcctgctgctggtactaggatgggcaatg

SEQ ID NO: 4981 - DNA, 1327 bp, Cricetulus griseus
aaaaccggcatattaatgttaaacatggggggccctgaaaccctttggagaagttcaagacttccttcaaagactcttcttggaccgagacctcatgacacttcccattcaaaataagctggcaccattcattgccaaacgccgaacccccaaaattcaagaacagtatcgcaggattggaggtggatccccatcaagatgtggacttccaagcaaggagaaggcatggtgaagttgctggatgagctgtcccctgacacagcacctcacaaatactatattggattccggtacgtccatcctttgacagaagaagcaattgaagagatggagagggatggcctagaaagggccattgctttcacacagtatccacagtatagctgctccactactggcagcagcttaaatgccatttacagatactataacgagatgggacggaagcccaccatgaagtggagcacaattgacaggtggcccacacatcccctcctcatccagtgctttgcagatcacattctgaaagaactggaccattttccgagggagaagagaagcgaggtggtcattctgttttccgcccactccctgccaatgtccgttgtcaacagaggagatccctatccccaggaagtaggtgctactgtccacaaagtcatggaagagctaggttaccccaacccctaccgactggtttggcagtccaaggttggcccagtaccgtggttgggtcctcaaacagatgaggctatcaaagggctttgtgagagggggaggaagaatatccttttggttccaatagcatttaccagtgatcacattgagaccctgtatgaactggatattgaatactcccaagtgttagctgagaagtgtggagctgaaaacatcagaagagcggagtctcttaatggaaatccattgttctctaaggccttggctgatttggtatactcacacatccagtcaaacaagctgtgctccacgcagttgactctgagctgtccgctctgtgtaaatcctgtctgcagggagactaaatccttcttcaccagccagcagctgtgaccctgcctgaggacccgtgggattcacagatgcacaacctccagacacctccaatggggacatatcccatcagagtcacttcatttccctcctaacatatccctgcctggatatgtaatgaaaagttgttctaaaaaatgtaagaattgtgtcagaacagaacctgatactctgaattcgaatttaaatggattttaaagtctttgggatcctccaaggatttgtaataatcactttctctgaaactttgttcttc

SEQ ID NO: 4982 - DNA, 1327 bp, Cricetulus griseus
tggttggcgggactgctggcccagctgaaatggttcctcctcctccacctccgccccagttgcttctggtagccctggtggggctcctgagtctttgcgaggtggtggttgagccggcggcggaggaggcaggaacccgttgtcccgagggcctctggcctctgcctccacaggtgttaccaagagtgacatacacgcaggagagacgagggcagcttgatggcgttgccttcctttaccatccatgtgcccacccctggctgaagctccagcttgctctcttggcccatatgtgtgtggccaagcccacactcattcctgactccagtctcacttgggaccggcccctggtgctgacagcatgggggactgcactggagatggcatggatagagccagcttgggctgctcactggttgaagaggcggcggcgccggcagcagagaaagagtgtgtggattctctctgacaccctttctgggcccactcccatgatgccggcccccagcagagggaagctgtgtgggagacggtgtgtacaggctccgactctggcctttgctctgcgaagctggcggcctcctggtgtagaggtgacatctagaggtcagtgttgtcaggagaagagggctccgagctgcccttggtctccagtctactccctcaggcctgagggtttccttggcctcttcacagagcccgaaggcccagcagcccattttgggaacctcatctgtggcccctgactccttgatgactgggggacctggaggcaatgataggtccaggacagaggctcagatgcccagtgggcaagacaatccagagggttgtgcctgcctgggccaggcttccccagctcctcgagcagcagcgcctccccgggtggcccgaggcccaactccacgcacagaagaggccgcttgggctgccatggccttgaccttcctgctggtcttgctcaccctggccacgctctgcacgcgattgcaccggaacttccgcaggagtgagagcatctactgggggcccacaggagacagccaagacacggtggcagctgtgctgaaacggagactgcccttgccctcgcgccggatcaagcggtctcgcagacggcccctgctcccgcccacaccggatagcggccctgaatcggagagctcggactgagcggctccgcccctctgtgactgctgccacgtgggccgtgcgccggcgccccctggcggcagacggagaggccctggaggcttcttttggtttgcgtatccttttagcctccccgatgcaaattcctgtttctaattaaattattttagtagaa

SEQ ID NO: 4983 - DNA, 1327 bp, Cricetulus griseus
gaagatggcggcggccgtggcttcgttcgccacgctggcgacagaacctggagaggacgccttccggaagcttttccgcttctaccggcagagccggcgggggacggcagacctgggagcggtcatcgacttctcgacggcgcatgaggcccgaggctcgaggcccggcgtgcccaaggtggtcagatttcatctgaatgtgtcctcagtgactgagcatgatgcctgtagggcaggacttcagcctgtgagcaagtggcaggcctatggacttgaaggctaccctggatttattttcatcccaaacccattcctcccaggatgccagtggcactggataaaacagtgtcttaagttgtactcccagaaacctatgtatgtaacctggacaaacacatgactaaagaagagacccataatctagtgggaacagagacaaagagttacctaaggtctaaagaagtagaataaacggagaccccgaagtttattagagaaactgcgctgggtcaccctgggataccattataactgggacagtaagaaatactcagcagatcattatacacctttcccttctgacctggctttcctctcagagcaagtcgctgctgcctgtggatttcaggatttccgagcagaagcaggtatcctgaattactaccgcctagactccacactggggatccatgtggacagatctgaactagatcactccaaacccttgctgtccttcagctttggacagtctgccatctttctcctgggtggcctccagagagatgaggcccctacagccatgtttatgcacagtggtgacatcatggtgatgtcaggtttcagccgcctgttaaatcacgcagtccctcgagtccttccacatcctgatggggaatgcctaccccacctgcctggagacacctctcccagctgtcccccctagcaattcacttgttgagccctgttctgaggaagactggcaggtgtgtgctacctatttgaaaactgcccgagttaatatgactgtcagacaggtactggccacagaccaggacttccctgcagaaccatggaggagacaaaaagagacattactacagatggtttgtgccatctggatgaccagaatagcccagtaaaacgggtgaggctaaatcctgatacctaagacttaaaggttagattcttactctggcaggcttgtgttgccagagagagagagtgtgtgtgtgtgtgtgtgtgtgtgtgtgtgtgtgtgtgtgtgtgtgtgtgtgtatacatacataaattaatctatattaaattaaaaaaaaaaaaaaaaaaaaaa

SEQ ID NO: 4984 - DNA, 1326 bp, Cricetulus griseus
catctcctttggcaacatgggactgaaccataagaataccaccttttaaaaacttcgtttaatggaaatgttgccttttacttttgtgttataacggattttcaacaagtttggtattgatattgcaagttgaactagaagtctggttttaagatgttctagagatatatgccaaaagtttcagctcttattttgacttggtgtaaaaagtgtgatggtttgaaatgaccaactccttaaagtgtatttgagtcagtttacagaaactctactggtaatttcccagtagctttgtgtattactcttcacagcaaatccttcatatacttttgttttttgagagaatgattagaagttctgaaagccgcttctactttctattcctagtcctctaaatattattatcttgtgcattctatcaagttctcgtgttttgcttaaggtgataataaaattagattgcatcatgtagccacagtgtgagtatgggggagatataaataagcttaagtttttttttttgaactgagttctgtaatctaaaaattaaccttcagtattggagaaagacaatgccacattgagagttaacatccattttccttttgttaggcatcaaccctaggagaaaatggcatgctatttagtagttacttccctttactagatgatttctggctcttctggaatttcagagtaagtaaacttgattctgagaaggttgtcttagcccttctggctactagatcctcaagtcattaatgttcctacatgtggaatgcccacgtcatctccccaaggggaaaaccccagatgaggtccagttaacaacataccttcctgtatttccttgctttcttgtttcacgcctctgtgaacttcatttctaggtaactgggccttttcattctttagtctgaaatccagaccctgagtctctgtcattaagctatttgcccaatttaagaagtgaactgtatcattctcttaattggacttacagttttaggaattcacaatttattaattagttcactctgaggtcttggtagtaagtatgacagttattcagagatttgatccttgatgcaaaactaggttttcatcaaccttctcattaaagtttctcatttttatctcgtatttgaaaaattgcctcatcctacactgtaagtactttatagtctataatttctaccttgaaactgaccaaatactgagttcatgtcctatacaattctcacaaatacagccaacagccaaccacaaagataattcttctttaataaagggtagatgtcctgtctcccagtttatctcaagggg

SEQ ID NO: 4985 - DNA, 1326 bp, Cricetulus griseus
agcccaggcctgcaccgggtgctttaacatgggtgcctccagctcctccgctctggctcgcctcggcctccccgggcagccgcggtccacctggctcggcgtcgccgcgctgggactggccgcggtggccctggggaccgtggcctggcgtcgcgtgcgtccccggcggcgcaggcggctgcagcaggtggggacggtgtcgaaggtctggatctacccgatcaagtcctgcaagggggtgtcggtgtgcgagaccgagtgcaccgacatggggctgcgctgcggcaaagtgcgcgacaggttttggatggtggttaaggaagatggacacatggtcactgcccgccaggagcctcgccttgtgctggtttccatcaccatggagaacaactatctgacgctcgaagctccaggcatggatcagatggttttgcctatcaagctgccttcgtcgaataagatccacgactgcaggctatttggtctcgacatcagaggcagagattgtggcgatgaggttgctcaatggttcaccagctacctgaagacacagccctacaggttggttcagtttgataccagcatgaaaggaaggacaacaaagaaactttacccttctgaaagttaccttcagaattatgaggtagcctacccagactgcagtcctatccacttgatttctgaagcctccttagctgatctcaacaccaggctgaagaagaaggtgaagatggaatacttcaggccaaacatcatggtgtcaggctgcgaggcttttgaggaggatacttgggatgaactcctaattggtgatgtagagatgaagaaggtgttgagctgccccaggtgcattttgaccacagtggacccagacactggaatcatagacaggaaggagccgctggaaaccttgaagagctaccgcctgtgtgacccctctgtgaagagtttgtaccagacgtcccccctttttgggatgtatttctcagtggaaagagttggaagcctgagagttggtgaccccgtgtatcggatggtggattaacaggcccagtggctgacatgcttccaggtcctaggagatatttttgcgagtccttactgccagccatgactgtcttcctggaaacgagcctccgtttttccttcagagcttcctgcgccctgacgttaatttgagaaaggaccagaggtggtttgggaatgtgagggcatatacattttagataatgatgtttttaaaaataaatgaaattgtgtatgcaattattctgaatggccctcccactgtcactgttttctgattactgcctttaatattgctga

SEQ ID NO: 4986 - DNA, 1326 bp, Cricetulus griseus
  modified_base (1181)..(1181): a, c, t, g, unknown or other
cattaaaaagatggttgaaaaggaaatacctggaatttacgtcctgtcgctagagattggaaagaacatgatggaggatgtggaaaacagtttcttcttgaatgtcaattctcaagtaatgatggtgtgtcagattctggaaaaggatcctaagttgcagcaggggtacaacgctattggcttctcccagggaggccagtttctgagggcagtggcccagagatgcccatcacctcgaatgatcaacctgatctcagttgggggacagcatcaaggagtctttggcctccctcgatgcccaggagagagctcacatgtctgtgacttcatcaggaaaatgattaatgctggtgcttactccaaagttgttcaactacgcctggtgcaggcacagtactggcatgaccccatcaaggaagatgtgtaccgaaaccacagcatcttcctggcagatataaatcaagagaggtgtgtcaatgagacctacaagaagaacctgatggccctcaacaagtttgtgatggtgaaattccttaacgattccattgtggatcctgtagactctgagtggtttggattttacagaagtggccaagctaaggaaaccattcccctccaggagagcactctatacacagaggaccgcctggggctaaagcaaatggacaaagcaggaaagctagtatttctggctaaggaaggggaccatcttcaactgtctaaagaatggtttaatgcctacatcataccttttcttaaatgaagcccttgcactttgcagcagagctcaggaaaccccagctcttccaaaaaaacacatcaacagctctccatgcccaaccctcaactctaatctagcttgcaagcagttctccactcctgttatctaacatgccctacttggaaagatctaagatctgaatcttatcctttgctgcctcctatcaccatatggtgttgaattcaaatttaattagctaataaccatggagattgttttacgaccttgtgatatggtcaagcttcctcttgagaaaggaatctgctgttgcagttcaatgattgtgcccagaggagacaagaaaatgaagcagggagacaggcactaagggcaaaaccccacaaatttggagcaaataaaagcccaggtgccagcagggttgcttaagaagaaatgcacngttttttctttcttttttttttgtagacaagatctcactcactttgtagccctagctggctggaactcactatgtagagcagactggcttgaactcaaagtttggtattaactttattctattttctgtataactttaagtacat

SEQ ID NO: 4987 - DNA, 1326 bp, Cricetulus griseus
ttccgctttccggccccgcgacagcacccgagatgactgccactctccgcccctaccttagtgccgtgcgggccacactgcaggctgccctctgtctggagaacttctcctcccaggtcgtggaacgacacaacaagccagaggtggaagtcaggagtagcaaagaactcctattgcaacctgttactatcagcaggaatgagaaggaaaaggttctgattgagggctccatcaattctgtccgggtcagcattgctgtgaaacaggctgatgagattgagaagattttatgccataagttcatgcgcttcatgatgatgcgagcagagaacttctttattcttcgaaggaaacctgtggaggggtatgacatcagctttcttatcaccaacttccacacggagcagatgtacaaacacaaattggtggactttgtaatccacttcatggaggagattgacaaggagatcagtgagatgaagctatctgtcaatgcccgggcccgcattgtggctgaggagttcctcaagaatttttaaaccatctggctggatctcatggccttcccccttggccttccctgtgtctctgcgtgtctgcgaaggtgtcctggagtcactccccggagcagcggtgcagcagcagcagcagcagcaggaagctgggttgggtgggcattggatgcgggagtcgggtgtggtgtgcttgctagctgtgcaaaaaaggcagcagtggacctgccccaaggccacacgtgtctggtcaggctaccttctgatgtttggtcccctgggctgggacagacatttttttaagcgtcttgaaacctaaactctgtgcttgtagaagactgtaacctttttggtttttgttttttgtttttaaaacaaaaaaacaacctgcacctccagtggctgtgactggccccagtgattgtaccttattggtcgcggtggtctgggcgggcctggagccagaaggcgactatttttcctatgccaccccaggtggggagagagggaagtttcagactccagtttctcttccttgctgtcttactcaaagcctccttggcccagtagaggtggtaaggactctctactagcctcctgagttctgcctgaagatggctaccacactggttgggaacaagggctgaatccatgattgccaggctgacctaggagctggggtccaaaagccaggcaacttctggctgcagggccaccaggagtcatcctccccccaacaccttcccagctgagaggccccaaggcttgcctgtctgggtaccgtgcctgtgctggaggtgcagaggtgagtcct

SEQ ID NO: 4988 - DNA, 1326 bp, Cricetulus griseus
gggagaaagggaagggagagtggcctctgctttggttgctcgtcgtcattacaggttcatccatggaattggacgatctggtgatatttctgctgtgcaaccaaaagctgcaggctctagcctcttgaacaaaattaccaattctttggtgcttgatgtcataaagctggccggtgttcattctgtggccaattgctttgtagttcctatggcaaccggtatgagtctaactttgtgtttttaacattacgacacaaaagaccaaaggccaagtatatcatatggccacggatagaccagaagtcctgctttaagtccatggtcactgcaggctttgaacctgtggtgatagaaatgttttggaaggcgatgagctgcgcactgacctgaatgcagtggaggctaaagtccaggaactcgagcctgatcatattctgtgcattcattctactacatcctgttttgctccacgggtgcctgatagattagaagaactggctgtgatttgtgctaagtatgacattccgcatgtagtcaacaacgcttatggattacagtcttccaagtgcatgcatctcattcagcaggggtctcgggttggtagaatcgacgttttcgttcagagcttggacaaaaattttatggttccagtaggtggtgctataattgctggctttaatgattccttcattcaggaaatcagcaagatgtatccaggaagagcttcagcttcaccatccttagatgtccttatcaccttgttgtcacttggctgcaatggctacaagaagctgttaaaggaaagaaaggaaatgtttgtatatttgtccactgaactgaagaagttggcagaggcccacaatgaaagactgctacagacatctcacaaccctatatctttagctatgacacttgggacactagatggacaacatgacaaagctgtcactcagcttggctcaatgctttttaccagacaagtttctggagccagggctgtgcctcttgggtctgtgcaaactgtgagtggctacactttccaaggcttcatgtcccacacagataattacccttgtgcttacctcaatgcggcagcagccattgggatgaagacacaggatgttgacttgttcataaagagacttgagaagtgcttaaacacagtaagaaaagaacaaaataaagcaagtgtatctggagttgacgattatgacagaactggagatgtggacattgaggaaatggctttgaaactagataatgtgcttggtgacaaggaccaatgaccttcttcatgataaaggtttctttttgctacagttcata

SEQ ID NO: 4989 - DNA, 1326 bp, Cricetulus griseus
catactcgagtcacagactggcctgcctgctatgtgtcctgagctctctctacttagattctctgcagaaacttgctgggttaagagggccagggtgacacaagtgagaccaaatatcattttgccaatgagtctgaggctgtggtctgcggatccagtcgtgatgtttttatatgtttaattaaactagatgctaatggtgttaacaataataatacaacgttaggaggccctggtggggaagtcagtaggaacccagagagggtggggaacaattttccaggggctactggatttgagccccacttctgtgcgcagcacaatctccgcccttcccgacagcccccaaagacgtagcaactctttctctcacggtgctaaaggtctcagaaagtgcagcacgtccagtgggtaggtacttgttgcatgcaaaaagctatagtgtctctggtccttgcccccagctgttgtgttggggtttttgctttgttcagccaaccacttacactaattgaatgtattagaaacttactgaaggggctgcagatgttttcctcagatgaggcatgtggcaggacccccccaccccaccccaaatggtagcgcgcaccagcacaccctttctaaaaggcctgggagctttgcccagggtccttcctcgattggtctccacagaagagttgatccagtggcaggttgcactttggtatcttgttctctacacctctgtggacaattgagttacataagccgtgtatgtgcacgtgtgacacttacatgcacaccgactctctacacacagacccctgtttcctggcaaccccctcccaaaccctgactttgtgtacatagctgtaaacacggatttttatgggttttggttttctttcttccaaggaaccttcaatgtcccctcagtagttcaatgccctccctgctctgtaatggtggatagcaatcctgtgtttccatttttgctgtgggtgactgtgccgtttcttaccttgctttttcttgctgtcccatggttgatttcatgttagcagcagtagagctgcacccaatgcccactccaccacatccctgtttcatttcccactcactgtagccccttttcaccccaccacaaaagttaccacagaaggtttcctttgtaaaaaatatttattttgaagctctattttaatagtatttattttagaaagtctactattgtaagagttcttctgtttgtgaagaaaaaacaagttaaaaactgaatgtactgatctagaagatatctataaatatatattgttaaatataaaaaaaaaaaaaaaaaaaaaa

SEQ ID NO: 4990 - DNA, 1326 bp, Cricetulus griseus
agagtttccgccatttttgaaaagtgggaccgttcttgccggagtggtgttggccgtttgcgatggcagcgtttgctgtggatccccaggcgcccacgctgggatctgaaccaatgatgctgggttcaccgacatctccaaagacaggtgttaatgcccagttcttacctggatttttaatgggggatttacctgctcccgtgactccacaacctcgatcaattagtggcccttcagtaggagtaatggaaatgagatcacctttgctttcaggggggtcaccaccacagccagttgtacctgctcataaagataaaagtggcgctccacctgttagaagtatatatgatgacatttccagtccaggactcggatcaacacctttgacttcaagaagacagacaaacatctcagtgatgcagagtcctcttgttggagttacaactccagtgactggacaaagcatgtttagtccagcaaatattggtcagccacgaaagacgactctatctcctgcccagttggatcctttttatactcaaggagattctctgacttcagaagatcatctcgatgacacttgggtgactgtatttgggtttccacaagcatctgcttcttatatattattacagtttgcacaatatgggaatatcttaaagcatgtgatgtctaacacaggcaactggatgcatattcgttaccagtctaaattgcaagcccggaaagccttaagcaaagatgggagaatatttggagagtccatcatgattggtgtcaagccatgtatagataaaagtgtcatggaaaacagtgacagaggagccttgtcatctccatctctagcctttacaccaatcaagaccttaggcactccaacacagcctggaagcactcctagggtttctaccatgaggcctcttgctacagcatacaaggcctccactagtgactaccaggttatttctgatagacaaacaccaaaaaaaagacgaaagtcttgtgtctagagcgatggagtacatgttcggctggtagcacagtaagagccagactgagccagtcagtggaggactgccggcttccttgggttagttatataaccatttaaggcagtattggatagctgttatagaggtgtcttttacaaccttttgtttaggaaacagcccatttgtagcttgcactttaaaagatggctgagatacacctgaagaaaagattgttcagacagcatcttgtgctctctggtacagtgcatgcttagcaccgtgttctcagcattggctgcaaagtaaattacatgattgagtttgaagtgagtct

SEQ ID NO: 4991 - DNA, 1326 bp, Cricetulus griseus
cagacagtccaggatggccggcagtttctgaagtatgtggatcccaggctgggagtcccgttgccagagagggactacgggggcaactgcctcatctatgatgctgacaacaagactgaccccttccacaacatctgggacaagctggatggctttgttcctgcacacttcattggctggtatctgaagaccctcatgatccgcgactggtggatgtgcatgatcatcagtgtgatgttcgagttcctggagtacagcctggagcaccagctgcccaacttcagcgagtgctggtgggatcattggatcatggacgtactcatctgcaacgggctgggcatctactgtggcatgaagaccctcgagtggctgtccctgaagacatataagtggcagggcctctggaacattccaacctacaagggcaagatgaagaggattgcttttcagttcacgccctacagctgggtacgctttgagtggaagccagcctccagcctgcaccgctggctggccgtgtgtggcatcatcttggtgttcctgctggcagagctgaacacattctacctgaagtttgtgctgtggatgccccctgaacactacctggtcctcctgcgcctggtcttcttcgtgaacgtgggtggtgtggccatgcgtgagatctatgacttcatggatgaactgaagccccacaggaagctgggccagcaggcctggctggtggcggccatcacagtcacagagctgctcatcgtggtgaagtatgacccgcacacactcaccttgtcactgcccttctacatctcccagtgctggactcttggctccatcctggtgcttacgtggactgtctggcgcttcttcctgcgggacatcaccatgaggtacaaggagacccggcgacagaagcagcagagtcaccagggcagagccatcaacaatggggatgggcacccagggccggatgatgacctgctagggactgggactgcagaggaagaggggagcaccaatgacagtgtacctgctgaaaaggagggggcctcagccgcctcatgatcctctccctctttactggccttatgcctgccatagggctgtcccatttctcccgtccttatgctccctgcttcagaggaggtggggggcccattcccaactccaccaggggcacctgagtgtacatgtttgtgtgcaggtaggtgtgtgcacatattggctcctgacacgtctccagggctgtgagctcctcagtgagcctggagcttgctctagagcaagggtcctcttgagcaaactagaacaaataaagtgatgatgaaggtg

SEQ ID NO: 4992 - DNA, 1326 bp, Cricetulus griseus
tgtctcattcctaagtcagcacatggaacgaatccagcaagtgcctacatggcaggcatggagatccagcctgtggaggtggacagatacgggaacattgatgccgctcacctcaaggccatggtggataaacacaaggagaaacctggccgccatcatgatcacgtatccatctaccaatggtgtgtttgaagagaacatcagcgatgtgtgtgcccttattcaccaacacggaggccaggtctacctggacggggcaaatatgaatgcccaggtgggcatctgccgtcctggagactttgggtctgatgtctctcacctaaatcttcacaagaccttctgcattccccatggaggtggcggccctggcatggggcctattggagtgaagaagcatctggctccttttctgcccagtcatcccattgtttccataaaaccgaatgaggacacctggccggtggggactgtgccgccccatggggctccagttccatcttgcccatttcatgggcttatattaagatgatgggaaacaaagggtctcaaagaggccacagaaattgctattttaaatgccaactacatggccaagcgattagaaaaacactacagagtcctttttaggggtgcaagagggtacgtggctcatgaatttattttggacacaagacccttcaaaaagtctgccaatattgaggctgtggatgttgccaagaggctccaggattacggatttcatgcccctaccatgtcctggcctgtggcagggactctcatgattgagcccactgagtcagaagacaaggcagagctggacagattctgtgatgctatgatcagcatccggcaagaaatcgctgatatagaggagggccgcattgaccctagggtcaaccccctgaagatgtctccacactccttgacctgtgtcacatcctcccgctgggatagaccatattctagagaggtagcagcatttccactgccctttgtgaagccagagaacaaattctggccaaccattgctcggatcgatgacatctatggagatcagcacctggtttgcacctgcccacccatgggggcctacgagtctccattttcggaacagaaaagggcctcctcttagtccttcctctctaagttcaaaggactagtttgatgcttctttctgaagcatttgacaaacaaggatatttcttctcttgcgcttggctcaagcaggaggtttatatgttgtatatttccataatctttcaaggtaatgtaaacacaattagcatggtgagtggtaaaacttagtttgggtaaaaagaaaaaaaa

SEQ ID NO: 4993 - DNA, 1326 bp, Cricetulus griseus
ggaaggtgctgctggaggcccggacagcactcccacatgggacgggcaatgaggtagcagctctgcagcccccagtggtgcagcttcacgagggcagcccatacacccggcgggagcactcctattccacggctcggccctggcgggcagatgacatcctggtccaacccaccacggctgccagacacacagccttaccccggagttccacaccaccacagctcctatgcgtacctgccgccagctcaccccacaggctcacctgctcacactcaccacgatttccagccagtgctccacctggtggcactgaacagcccactgtcaggtggcatgcgtggcatccgtggggcggacttccagtgcttccagcaggcccgagccgtggggctggctggcaccttccgtgccttcttgtcctctaggctgcaggacctctacagtattgtgcgtcgtgctgaccgtggggctgtgcccattgtcaacctgaaggatgaggtgctgtctgccagctgggatgctctgttttcaggctcccagggtcaactgcagcctggggcccgcatcttttctttcgacggcagagatgtcctaagacacccagcctggcctcagaagaacatatggcatggctcagaccccagcgggcgcaggttgatggagagctactgtgagacatggcggacggaagcgtacgggggctacaggtcaggcctcctccctgctgtcaggcaggctgctggaacagaaggctgcgagctgccagaacacctacatcgtcctgtgcattgagaatagtttcatgacctctttctccaagtagggcctctgccagctagaatggtgggcagaggtggtacaaaggacggacacagtgcagggagcatctggccagcgcccggggcctggctgggatacgatcctgtatagttcacatttcatgtaatcctcaagaaataaaaggaagccaaagagttatattttttaaaacatttaaaatagacttcctgcccttcctctcccacttgaactggccagtctgtgtcacagatcttccaacacgcttggtggagctctatggtgaagtcaggccatagctgggtctcaggaggaggctgccctaggttgttgcctaagacctgcagactttctctagcctggcatctttctgtgcacagatccttcaaaaggcagtcatgtgtgagtgctgcggacagaccctgggacagaacagggcagctaggactctcctttcaccacccagtgactgtcagtagtacaggcaggcacttgctcaccaggtggtaactgggaccacccatgcct

SEQ ID NO: 4994 - DNA, 1325 bp, Cricetulus griseus
  modified_base (487)..(487): a, c, t, g, unknown or other
  modified_base (525)..(525): a, c, t, g, unknown or other
tgccgtgcagaaagattaagactcagcaccgtttgattcaaacaagttcatgcttattagtctgttggaaaagtagaatcccagcacacacaggatactatggctgaacacggggctcatatcacaactgcttcggtggtggacgaccagccatctatctttgaggtggtagcacaggacagtttaatgacagcagtgagacccgctcttcagcatgtggtcaaggttcttgcagaatcaaatcctgcacactatggcttcttctggaggtggtttgatgaaatcttcactctgctagactttctgctccagcagcattatctttctagaaccagtgcctcattttctgaacatttttatggcttaaagcggattgtagcagggagctcacagcagcctcagagaccagccagtgctggtcttcccaaggagcacctctggaaatcgaagcgttggtgagaagataaagttagctctgagaaagctntggaggcatcgcctttatccctctccaccggctttctntgggtgtcttcttcctgcagttccttgattggtggtactcttctgagaaccaggaaaccatcaaatcactgactgctctgcctaccccaccgccacctgtacacctagactacaactctgattctcccctgctacccaaaatgaagacagtgtgccctctgtgtcgtaaaactcgggtgaatgatacagttcttgccacctctggctatgtgttttgttaccgctgtgtgtttaattatgtgaggagtcatcaagcctgtcccatcacaggctatccgacagaagtccagcatctgattaaactctactctccagagaactgaaagaaattagcctattatcacacagctcaagttctgtactgtaaggccacaagactgctgtggtatggcaaacattgatacttccctaattcacaactacagtaattttcagtaactatggattcctttaaaagtatatagccactcgatagggtttgttaatggggatgagtctggaaatttcaatgtgaatgaaagctagcaagcaatgatgagatgtaggaaaatacttatctaatgtttaccaaatgcttatctaatgaacatttaatgaggagcaaaagctttctacttgctcttatgagttttctcaattgacagtttgctcaattgacatgaatcacccagggtattatgaaagtttctatgaaacatttaagtaaattttaacaatacatgattctgggaaagaactgttcatgctggcacgattatgtggaaactcaaaagattactccaggggtttaaaataaattt

SEQ ID NO: 4995 - DNA, 1325 bp, Cricetulus griseus
ccatttctatgctctccctgctggccataatgggagatacagacagcaaaacagacagctcgttcctgatggactctcaacgctgcatgaggcaccatttatgttgattctatcagtcacccattgtacaagtgtagctcaaagatggtgctcctggccagatgtgaggggcactgcagtcaggcatcgcgttctgagcccttggtgtccttcagcactgtcctcaagcaacctttccgttcctcctgtcactgctgtcgacctcagacctccaagctgaaggctttgcgtctgcgctgttcagggggcatgcgactcaccgccacttaccggtacatcctctcctgtcactgcgaggaatgcagctcctgaggcttgctgttgagtggctttctgactgacacaaccacaggagaagttcaaccagacagagaaagactggcaagaaaagagttaaggcagataaagatggagcgagtcccacaggattgtgcatattctcgtcctaaagactcaatgtgctttcaaaagagagcgactctgggaacttggtttccattcccatctccttccgctgaaagaatttcttttggttacttttcagattcaggcatttcccctgttggctccgaatgtggtttgggtttctgacaactctgcattagtgggaaaatgtggggccctgtacaagagtgtgtcaggctgtccctatttggtgcatattagggaaaaatgtgcccaattcttcagttgttgtttcaccctgttgttttggtctaagatttgcctttaaaggttaccagtttcaagttccggttgctggtttcaagttctggacatcaagtctatggatatgtttagtgaggtttactcacagctagcagatactaaaataattaacacacgggttcttttatgtgactgtggaactcctgcagctatagttattcataaatgacatgggggctatcaaggtggcataaagaatttataatctgaaggcctttcacacacacacacacacacggatactgcattgactctggagaaggcataaattactagtggcatggagaatgcaccatactcgtaactgagaattagtcaagcaagtaggaatctatttgtgggtgtgcaatagcttcagccatgccttgacattctctaacattcacctgtctgtgtgaggcttgttgccatagtggtggccctgcttacattctgaaaatttcgttccaatatatttttggtcattgaagctcaaattttgaattttccccatgttttgaaaataaaaatagagtaccttcgaaaaaaaaaaaaaa

SEQ ID NO: 4996 - DNA, 1325 bp, Cricetulus griseus
  modified_base (557)..(557): a, c, t, g, unknown or other
aggaagaaaccaccgggctttctccttcccaaagcacataagattgatagagaattcaaagttcagaaagccttgttctccattggattccctgtccccaagcctctactgtactgcagcgatgctgccgtcatcggaacggaattctacgtgatggagcatgtgcagggtcgcatcttccgtgatttttcaattcctggagttagcccagcagaacgtgcagctatatatgtggctgcaatagaaacgttgcgtggctgcattcactgaatgtaaagttactgcagctagatggatacggtactggagccgggtatgacaaagacaggtatccagcagcacgtcttacctgcagaaaaggaagtagcagaatactatgctgcaggtggacactcagtggagaagtggggacaccccctagtgattgaaacactaaaaggacttggccaaagcagagggcctgtggaacttgttcttgccagctgtgagcggtctcagccagctggactatgccctgattgccgaagagaccggaaagtgtttttttgtctccagangtttttaactgccaagcaccagacacaggcaacatggaggtgctgcacctgtacggcagcgagcaacagaagaagcagtggctggagcctctccttcgtgggcgatatcacctctgcattctgtatgacagagcccaatgtctcatcaagtgatgccacaaacattgaatgtagcatcgagcgagatggagatggctacatagttaatggcaagaagtggtggagcagcggagctgggaaccccaagtgtaaaattgcaattgttttgggaagaacggagatccattttaatcattgtgcgcgttcctgctgccaatttaatactgggtgaaggcaggggatttgaaatttcccaaggccgccttggaccgtggaagaatccaccactgcatgagatccgtgggtctggcagagcgcatcctgcaggctcatgtgtgaacgggcagtgcagagggaagccttcaagaagaagctgtatgaacacgaggttgtggctcactggatcgctaaaagccgcatagccatcgaggagatccgcttgctgaccctgaaagcagcacacagcatagatactgtgggcagtgctgcagccaggaaggagattgcaatgatcaaagtggctgccccaaaagctgtctgcaaaatagctgaccgggccatccaggtgcatggaggggcaggcgtttcccaggattaccctctggctaacatgtatgccataatacgaaacctgcgcttagcagatggacctgacgaagtacacctctc

SEQ ID NO: 4997 - DNA, 1325 bp, Cricetulus griseus
tggctttatataggctgctcggccgcctggccggcctctatctgcggcgtgtgacggcaagatgtctcaccggaaattctctgccccgaggcatgggtcattgggcttcttgcctcggaagcgcagcagccggcatcgtgggaaggtgaagagcttccccaaggacgatccttccaagcctgttcatctcacagcctttctaggctacaaggctggcatgacccacatcgtccgggaagttgacaggccaggatccaaggtgaacaagaaagaagttgtggaggctgtaaccattgtggaaacaccacccatggtagttgtgggcattgtgggatatgttgaaaccccacgaggtctccgcaccttcaagacagtatttgctgagcacatcagtgacgagtgtaagaggcgtttctacaagaactggcacaaatctaagaagaaggccttcaccaaatactgtaagaaatggcaggatgacatgggcaagaaacagctggagaaggacttcaacagcatgaagaagtactgccaagtcatccgcataattgctcacactcagatgcggctgcttcctttgcgccagaagaaggcacatttgatggagatccaggtgaacgggggcaccgtggctgagaagctagactgggcccgagagaggttggagcagcaggttcctgtgaaccaggtgtttggacaggatgagatgattgatgtcatcggggtgacaaaaggcaaaggctacaaaggggtgactagtcgttggcatacaaagaaactgccccgcaagacccatcgagggctgcgcaaagttgcctgtattggagcctggcaccctgcccgtgtggctttctctgtggctcgagctgggcagaaaggctaccatcaccgaacggagattaacaaaaagatttacaagattggtcaaggctacctcatcaaggatggtaagctgattaagaacaatgcatccactgactatgacctgtctgacaagagcatcaacccactgggtggctttgtccattatggtgaggtgaccaatgactttgtcatgctcaaaggctgtgtggtgggaaccaagaagcgagtgctcactctccgcaagtccttgctggtacagaccaaacgacgggctctagagaagattgacctgaaattcattgacaccacctccaagtttggtcatggtcgtttccagaccatggaggagaagaaagcattcatgggaccactcaagaaagaccgcattgccaaagaagaaggtgcttaagaccagaatcaccttgtgcagctggtggggtctcaaataaaatatttttact

SEQ ID NO: 4998 - DNA, 1324 bp, Cricetulus griseus
ccttcccagccactgagtagcaagatgccccaggtctcccaagaagcaaaggggactcagacaggagggatagagcagcctcgtctctcagctgtccctgcgagccggccgcctgagccccatgttcaggttcagaaggcgccagtggaaacaggccagccagcccacccctcccctgtgtcagtctccacgaagacagacctcccaaaccctcttccctctcaggctgccccaaagcagccgttgtttgtccctgtggcctcgggtgcaagcaccccacctggactggctctgcctcacactgaagcccagtcagcccccaaacaagattcttctctacacctgacgtcacagaggcctgtggatatggttcagcttctgaagaaatacccgatcgtgtggcagggcctgctggccctgaagaacgacacagccgccgtgcagctccacttcgtctctggcaacaatgtcctggcccaccggtccctgcctctctctgaaggtggtccccccctgaggatcgcccagaggatgcggctagaggcctcacagctggaaggagttgcccggaggatgacagtggaaacagattactgtctgctgctggctctgccctgtgggcgtgaccaggaggatgtggtgagccagacagagtccctcaaggctgccttcatcacttacctgcaggccaagcaggcagcagggatcatcaacgttcccaaccctggctccaatcagcccgcctacgtgctgcagatcttcccgccctgtgagttctccgagagtcacctctcccgcctggcccctgacctccttgccagcatctccaatatctccccgcacctcatgattgtcattgcctctgtctgaggctccaccaccttcaactcatcggatgtacagtttacagttgagtaaagcgaagaggattctttcttggtcggatgtgcagaacttgggatgtgtatatataaatatataatatatataaatatatataatactgacttaaatcaaatttccctgacatacattttttttaatctgtgccaaaaatgtgttttcaaagaaaatcttattttcatactcagactttgtaccgtcacccatttgtataagtgcgcttcgttacagcacgggtcctgctcctgcaacatggaagtgtcacacagcacctgtacaaaagacctggccaactccctcttcctgtgacttggacctctccccgacttcctaacacttattaatttatgaaactgtttttctcagcgcagttttgttgtgtgtccattggattacaaactttattaaaaaatacaaaaca

SEQ ID NO: 4999 - DNA, 1324 bp, Cricetulus griseus
agcaagcacgcggcgccatgaccaccaagggtcccgaggccgagcacccctccgtgacgctcttccgccagtacctgcgcatccgcaccgtgcagcccaatcctgactatggggctgccattgccttccttgaggagagagcccaccagctgggcctgagctgtcagaaagtagaggtggtgcctggctatgtgatcactgtgctgacctggccaggcaccaaccctacactcccctccatcttgctaaactcccatacggacgtggtgcctgtctttaaggaacattggcatcatgacccctttgaagccttcaaggattctgagggctacatctatgccaggggtgcccaggacatgaagagtgtcagtatccaatacctggaggctgtgaggagactgaagagtgagggccaccgcttccctagaaccatccacctgacctttgtgcctgacgaggagatcggaggtcacaaagggatggaactgtttgtgaagcggcctgagttccaggctctgcaggcaggctttgccctggatgagggcctggccaaccccaccgatgccttcactgtcttctatagtgaacggagtccttggtggatacgggttaccagcactgggaagccgggccatgcctcacgcttcattgaggatacggcagcagagaagttgcataaggttataagctccatcttggcattccgggagaaggaaaaacagaggctgcaggcgaaccctcacctaaaggaaggggccgtgacttctgtgaatctgactaagctcgaaggcggtgtggcctataatgtggtgcctgctgccatgagtgccagctttgacttccgagtggcaccagatgtggacatgaaggccttcgagaagcagctgcagagctggtgccaggaagcaggcgagggggtcacctttgagtttgctcagaaatttacggagccccgaataacacccactgatgactcaaatccctggtgggcagctttcagcggggcctgcaaggaaatgaaccttactctggagccagagatcttccctgctgccactgacagccgttatatccgagcggtggggatcccagctctgggcttctcgcccatgaaccacacacccgtgctgctacatgaccacaacgaacgactgcatgaggctgtttttctccgtggggttgacatatacacacgtctcatctctgcacttgctagcgtgcccgccatgcctggtgaaaagtgaaccctgtgccttccaacctcttcttctttcagcccaaccactgccaaggatcggttgcccctgcttggtaataaagccag

SEQ ID NO: 5000 - DNA, 1324 bp, Cricetulus griseus
tttgaccttttcccaggctatgtgcaagaccttgccactcagatctgcaaacagcgaagtccagatgctgagcgagtggacagcaccaccttactgggtaatgcatgtcaggactgtgcaaagaggaagttggaagaaaatggaattgaagttacaaaaaagtcagacagtcagatactgatgatgctggagggtcttgaagattttaaaacttgaaacttgaaaaacagccttctgtaaccacagtgccatgcccaagcgatgaggaatgtacagaggactccatatggatctctcaatagagaactgttacataccccaaaaagagccatgtgtgggtgcgtggccttcgtggttgaatgacagaactccactatgtgcttagctgctcgggaggtgacatagacacacttcaggtatactctgtaaggactaatggactgctacctcagggaccaaactgcaaagtgggaggtgggatgtacctggcattgttcccttttcctgtttgacatgttttcttatgtcagcgtgttattttcctaataaagggaggagagtgaagactgtccaagcaacagtagttgccaaagagaaaataagacgtaaacatttatattttatacctttagacacttaagtaatttctcttccaaagcaatggtggactgcctggtgggaagcgttaagtctgagtctgaagacttctttcagtcttcagtgctgtctagatctactctgtgacttaaaaagttagaacataaaagcaaagcacaagaccaagctttaaacttttaagtcttaagttctaagctttccaagtcttatttctctaggataaggcccatcttttctgttctcctctcttcccatggttcatattaagatttacatggagtgggataggcaatagtttgaaagggcttgccacattttaactacattcaaggtttacttctgggaaacacccatgctcagagaactgcacatgcccagagttcctctgatggagactatggcaaaggttcacgttatgcagagtgatctgaaaggaagatttcttagaaacaggtcctgcatggctcatttgaggctactaatctttgatatgatgccaaactctgcctgtgacattgcatggatggcactgtatctcccaagaagacagggataattaagaataggaaacacaggttgagacagggaatgagggagaagccagaaatggggctgaagatccccctcccttttttaagtgtggaaactaaatcttttatgtcactggttataaataaaatttttgaagtcaaaaaaaaaaaaaaaa

SEQ ID NO: 5001 - DNA, 1324 bp, Cricetulus griseus
aacctttcctggcgagcacagcgctctctcccagagtccgctccgctgtagaggtgacctgactcctggagacatcctttgcaggtgcagaagtcggcctcgcagttctcaataatgtcggaaccaatcagagtccttgtgactggagcagctggccaaattgcatattcactgttgtacagtattggaaatggatctgtgtttggtaaagaccagcccatcattcttgtgctcctggatatcacccccatgatgggtgttctggacggtgttctgatggaactgcaagattgtgctcttccccttctgaaagatgtcattgcaacagacaaagaagaggttgccttcaaagacctggatgtggctgtccttgtgggctccatgccaagaagggaaggcatggagaggaaagacctactgaaagcaaatgtcagaatcttcaaagcccagggtgctgccttggagaaatatgccaagaaatcagttaaggtcattgttgtggggaacccagccaacacaaactgcctgaccgcctccaagtcagccccatcgatccccaaggagaacttcagttgcctgactcgcttggaccacaacagagcaaaatctcagattgctcttaaactcggtgtaactgctgaggatgtaaagaatgtcattatctggggaaatcactcatcaactcagtatccagatgtcaatcatgctaaagtgaaattgcaaggaaaggaagttggtgtgtatgaagccctcaaagatgacagctggctcaagggagagttcatctcgactgtgcaacagcgtggtgctgctgtcatcaaggctcggaaactgtccagtgcaatgtctgcagcgaaagccatctctgaccacatcagagacatctggtttggaaccccagagggagagttcgtgtcaatgggtgtcatctctgatggcaactcgtatggtattcctgatgatcttctctactcgttccctgtcgtgatcaaggataagtcctggaagtttgttgaaggcctccctattaatgacttctcacgtgagaaaatggaccttactgcaaaggaactggcagaagaaaaagaaactgcttttgaatttctctcctctgcgtgactagacaatcatgttaatgtcagtaaatatcccaaagctgaggaatccaaatgtcgtctttgagcctagtcccaacagtcataatggtatactcaaattgtgaacagcatcatattttaaatattatgtgcatcgtggtagagatttgtgaaagtctatcatgctattagtgttgatctaaataaaaatatattcaagtggaaaa

SEQ ID NO: 5002 - DNA, 1323 bp, Cricetulus griseus
ggtgctactgccgcttctagtagtttccaggcgctgccgggcggctgggaccgagcggtcctgaggctgtggctgcggctgcttgggagctggtagcggcgcgaagtgtgagctgatggccaagtggggtgagggagacccacgctggatcgtggaggagcgggcggacgccaccaacgtcaacaactggcactggacagaaagggatgcctcaaattggtccacagaaaagctgaaaactctattcctggcagttcgagtagaaaatgaggagggcaaatgtgaggtgacggaagtgaacaagcttgatggagaggcgtccattaacaaccggaaaggcaaactgatcttcttttatgagtggaccatcaaattaaactggacaggtacctctaagtcaggagtgcaatacaaaggacatgtggaaatccccaatttgtctgatgaaaacagtgtggatgaagtggagattagtgtgagccttgccaaagatgagcctgacacaaatctcgtggccttaatgaaggaagaaggggtgaaacttctaagagaagcagtggggatttacatcagcaccctcaagacagagttcactcagggcatgatcttgcccacagtgaatggagagtcggtagaaccagtaagtcaaccagcaccgaaaactgaggtgtgcaaggcgaagtctgctccttcaaaaagccaggccaaacctgttggtgtcaaaatccccacttgtaagatctcccttagagagaccttcctgacgtccccagaggagctctatagagtgtttaccacccaggagctggttcaggcttttacccatgctcctgcggccttagaagcagacaaaggtgggaagtttcacatggtcgatggcaacgtcactggagagttcactgatctggtccctgagaaacacattgctatgaagtggaggtttaagtcgtggccagaggggcactttgctaccatcaccttgaccttcatcgacaagaatggagagacagaggtgtgcatggaaggccgtggcatccctgctcctgaggaagagcggacgaggcaaggctggcagcggtactactttgagggcatcaaacagacctttggctatggcgctcgcttgttttagggccagcagcagaggttccagcctgtttgacacttcagtccagcctgctcatgatgggcttgtgattcacaggattgcaccatcccaactgctaacttggggctggggcccctccctccacatataccttgggtttgtgcatgttttctgctgggtgggatctgagggtgatttctcttttatgtgtacat

SEQ ID NO: 5003 - DNA, 1323 bp, Cricetulus griseus
ggtcagtggtcactgcaagaacatccccactctagagtatggattccttgtccagatcatgaagtatgcagagcagaggattccaacattgaatgagtactgtgtggtgtgtgatgagcagcatgtcttccagaatgggtccatgcttaagccagctgtctgtactcgtgaactatgtgtcttctccttctacacactgggagtcatgtctggagctgcagaggaggtggctactggagcagaggtggtagatctgctggtggccatgtgtagagcagctttggagtcccctagaaagagcatcatcttcgagccttatccctctgtggtggaccccactgaccccaagactttggcctttaacccgaagaagaagaattatgagcggcttcagaaaagctctggatagtgtgatgtccatccgggagatgacccagatcccttggcccatcctcttctgcagtggattaatttctagcaacaggtcacacattgtcaaactacctctcagcaggctgaagttcatgcacacctcacaccaattcctcctgctgagcagccctcctgccaaggaggctcggttccggaccgccaagaagctctacggaagcacctttgccttccatgggtcccacattgagaactggcattcaatcctgcgcaattgggctggtcaatgcatcctacaccaaactgcagctgcatggagcagcctatggcaaaaggcatctacctgagccccatctccagtatttcctttggatactcaggaatgggcaaaggacagcacagaatgccttccaaggatgagctggtccagagatataacaggatgaacaccatcccccagacccgatccattcagtcaaggttcctgcagagtcggaatctaaactgtatagcactttgtgaagtgattacatctaaggaccttcagaagcatgggaacatttgggtgtgccctgtgtccgaccatgtctgcacaaggttcttctttgtatatgaggatgggcaggtgggcgatgccaacattaatactcaggaccccaagatacagaaggaaatcatgcgtgtgatcggaactcaggtttacacaaactgagggggccccagccctcgtaccaccctgttcccccaggatccatctgcccttgtaaaagggctcaggagcagcaggtgaggctgccctgagaaatttcaagggccaaaaaaaggatagaagaggcagccttcatggtggagattgatccaggaacttctccacatttggatggccctgactgactcccaccctgactttgcccagttgacttcaccctgttt

SEQ ID NO: 5004 - DNA, 1323 bp, Cricetulus griseus
tactatgcctgcctctgtgggcatgaggagttggtgcgctatctgttggctaacggagcccgctgtgaggccaacacttttgatggagagcgctgtctctatggggcactgagcgaccccattcgccgtgcactgcgcgactacaaacaggttaccgcatcctgcaggaggcgggattactacgatgatttcctgcagcggcttctggaacaaggtatccacagtgatgtggtcttcgtggtacacggaaagccgttccgggcgcatcgctgtgtcctcggtgctcgcagcacctacttcgccaacatgctggacactaagtggaagggcaagagcgttgtggttctcaggcacccctgatcaacccagtggcctttggggctctgctgcagtacctgtacacaggtcgcctagacatcggtgtggaacatgtcagtgattgtgaacgcctggccaagcagtgccaactgtgggacctgctagaagacctggaggctaaatgcgagaaggtgtctgaattcgtggcttccaagcctggcacgtgtgtgaaggtgcttactattgagccccctcccagcagatccccggttgcgggaggatatggcactgctggctgactgtgccctgccacctgagcttcggggcgacctaggagagctgcccttcccgtgtcccgatggcttcagcagctgccctgatatctgcttccgagtggctgactccagcttcctctgccacaaggctttcttctgtggccgcagtgactacttccgggctctgctggatgaccactttcgagagagcgaggaacctgcagcctctggagaccccccagttgtcaccctgcatgacatctccccagatatcttcactcatgtgctgtactatgtctacagtgaccatactgagctgcctcctgagttggcctatgacgtgctgagtgtggctgacatgtaccttctacctggcctgaagcggctttgtggccgcatcctggcccagctcctggaggaggacagtgtggtgggtgtctggcgcatagccaagatgtttcgtctggcccggctggaggaccagtgtaccgagtacatggccaaagtcattgagaagctggtagagcgagaggactttgtggaggccgtgcgggaagaggcagcagctgaggccgcccggcaggagacagactccattccacttgtcgatgacatccgcttccatgtggctagcacagtccagacctacagtgccattgaagaggcgcagcagcgactgcgggcacttgaggacctgcttgtgtccattggcttagactgctgagccctt

SEQ ID NO: 5005 - DNA, 1323 bp, Cricetulus griseus
gcggccatggggctaggggcgagctcggagcagccggcgggcggcgagggcttccacctgcacggggtgcaggagaactcgccggcccagcaggccggcctggaaccctacttcgacttcatcatcacgatcgggcactcaaggctgaacaaggagaacgacaccctgaaggctctgctgaaggccaatgtggagaagccagtgaggctggaggttttcaacatgaagaccatgaaggtgcgagaggtggaagtggtgcccagcaacatgtgaggcggccagggcctgctgggggccagcgtgcgcttctgcagcttccgcagggccagcgagcacgtgtggcatgttttggacgtggagccctcttcacctgctgccttggctggcctgtgcccctacacagactacgtagttggctctgaccagattctccaagagtctgaagacttctatacactccttcagtcccatgaggggaagcccttgaagctgatggtgtataattctgagtccgactcctgccgggaggtgactgtgactcccaatgcagcctggggtggagagggcagtctggggtgtggtattggttatgggtatctacaccggatcccaacgcagccctccagccactacaagaagccagctggggcctcaccgtctggcactccaccagctaatactccacaacttaatgccttgcctcttggtgcccccacccccttggcctgtccttcaagactcttctggcccagagttgggttccaggcacagtgactacatggaggccctgccacaggtccctgttggcttcgtggaagcacagctccttgggtctgggagccctagccatgacgctgctgattgtgggggatgtgcgcgctccatggagatccctctacagcctccacccccagtgcagcgggtcatggacccaggcttcctggatgtgtcaggtatgtctctcctggacagcagcaatacaagtgtgtgccccagcctgtcaccctccacagtgctgacctccacagctctctcagccttgggaccagaggacattggttccagtagcagttctcatgagcggggtggcgaagccacgtggtcagggtcagagtttgagatctctttcccggacagtccaggtgcccaggcccaggtgggccacctgccccagctgactctcccagatggtctcatctctgcatcctcaccagaagacgggctgtctgcagagttgctggaagcccagctcgaggagccagcagacacagaatcactgtaagctgcctttggacattgaagtatttaactaaagctttattc

SEQ ID NO: 5006 - DNA, 1323 bp, Cricetulus griseus
cgctggcggagcaatgtgcatggcgcacaagtcctgtgtctcggaggctgactccgccgcggctgccgcggcgctcttcgcttggggtgcaaatagctacgggcagcttggccttggccacaaggaagatgtgcttctgccccagcgactgagcaacttctgtgaacctgggtgtatcaagagtgtcacaggaggagggggccattctgcagctgtcacagatggaggaagtcttttgttgtggcctgataaagatgggcagttggggcttggtcacacagaagatgttctatgttttaccatctgcaagcctctccttggttgtccaatccgacaggtggcctgtggctgggattttactattatgctcacagaaataggtcaagttctgtcatgtggatccaatgcctttggccagttaggtgtgccgcacggccctcgcagatgtgtggtcccccaggctgttgagctcctgagagagaaagttgtttgtgtcgccgctggactgaggcatgcattagccactacagtgagtggcagtgtgttccagtggggcactggcttagcattcttctggccgacgcttgtgtgctgggcaggcctagaggattctacagcagtatgtgttgttgacgggatcctgaccactccgcctcattgacagatacaggagagctgtatgtctggggcccggaacaagcatgggcaactggcttccctggctgcgttcctccttctgccccagagaatagatgcccgctgctttcaggatgaaaaggtcactgctgtgtggagtggatggacacatctggttgctcagacagaaactggcaaggtgtttacctggggtcgagcagactatggtcagctagggaggaggttggaatctcctgaaggccaaaaaccccacaagcaagattcacagctcaccttctggaggccacagagcagtgtgtctttgcctctgtgttgcctgaccggagcagccaagatttcttgtggctcagagcacaatttggcagtaattagtgacaagtgtttttcctggggctggaacgaacatggcatgtgtggagatggcactgagtccaacgtctggactccatccccagtacaggctcttcagtcaccatcaagaatcctcctcgtgggctgtggggctggccactccttggccttatgtcagctgccagcactctctgagccgtgccaggatgtcaaggtcatctacacactccaagctgccacagggaaccctgaatctcagaatggcatgaacaaagagaggaaccggaaggagagacagtcagtaacttcaaccca

SEQ ID NO: 5007 - DNA, 1322 bp, Cricetulus griseus
gatggtgacaatgttcgtttggtactggacgtctctgaggaacaggactttggcctcttactgtactgggatcaggtccagggtcctctcaaaccctggaagtacaaaaacctgactggaccacagactattactttaaaccacacagacctgtttccctgcctctgcattcaggtgtggcccctggagccagactctgttaggaccagtttctgccccttccgggaagatccccgtgcacaccggaacctttggcacatagccaggctgcatgtgccgtcctcggggatatggcagctagatgcaccatgctctctgctggccaaggtggcactgtgctggcaggcaccagaccaggggccctgccagccacttgtgccaccaatgctccaggagaatgtcactgtgaatatgcctcatgagttccagtcggtgagaggccaccccaacctttgcgtccaggtgagcagctgggagaaggtacagttccaagagtgcttgtgggctgattccctggggcccttcaaggatgatatgctgttagtggagatgagaactggcctaaacgacacatcagtctgtgccttggaatccagcggctgcacagcattgcccagcaatacctccacgagagctgctcaccttggggaacagttgctgcaagacttccggacacaccagtgtgtgcagctgtggaaagatgataacctgggagcgctatgggcctgccctatggacaagtacatccataagcgctgggtcctggtgtggctggtctgcctactcttggccgctgcccttttcttttctccttctaaaaaggaccgcccgcacagccctgcttcctccactccgccgaaggagcgggctacgagcatctggtgggcgccctggcgtctgccttgagccaactgccgctgcgagtggccgtggacctgtggagccgccgcgagctgagcgcgcacggggccctggcctggttccacgggcagcggcgccgaaccctgcaggaggatggcgtggtggtcctgctcttctcgcccgcggcggtggcgcagtgccagcagtggctccaacaccagacggtggggccagggccgcatgacgccctcgcctcctggctcagctgcgtgctgcccgacttcctgcaaggccgggcggcgggccgctacgtcggggtctacttcgacgggctgctgcaccccgaggccgtgcccgccgcgttccgcgccgcgcctctcttctccctgccctcgcagctgccccggcttcctggacgtcctgcaggggaggctgcgcccggctcccggggcggcccgcgg

SEQ ID NO: 5008 - DNA, 1322 bp, Cricetulus griseus
ttgaggcagtagtgctgttttgctttttaggtctgggtgcacaggggccctcactgatacaagagcccatctcttctcttcacctcacgggagccacagaagtcaggcagcagctacaagagttatcctctttgtcttttaccatgatttgctttgtgttctcaaagcaagtttgtcctttggttctgcagagcaggcccacttcctgtccctgagcccatcttcatttctcgatggctgaccctcagcactgcgaagtgcttgcagaatttaagaaatgtgaatgtgatgtgggcggagcctcttctatgtcaccttgagctatagggatcagctggctggtaggattgcttgagtgcctctctgtcttgaggtctcatggaatcttttggagctgtgtggttatcttcggtgctgttaacccctggctccatttgaccatctggctgagcagtgagcaaagcaatatcatatccatttttatgttcctgttccttcccctgctcctcctctggagaagcaataattccacagagggtggcaaagtagcactttacaaatggctgtggcattcatcccaggagccaccagctcttcttggtaatcagcagagctccttctgaagggtgtgtattctgcagtccctagtcaaatcatgtgaatcaaccccccccccaaatgatcattggttctaaaccttcgcctgcctactgcctctctctgtctcccaaatcagagctcaagccaaattcttctatcctttttccttcttgcattaaccctttgctgatcctcagggaccactcccccagcactcccatatttgggtgagggacgttggacagagcccattttcatgtgctgcaggttgggggttgtgctaacatgtttgctcttggttgatggacaaggtacagaggccagggagtgaaaatactacactgagaaggggaatggctggatgctgtttcatagacgttgagtgtggaagtgaggggtaatggcttctccccactttcagggctctcaaatgctttggacatctctttccttagagccagatgtcttacaggtgagctctatgtggggaaaagaaaaaaaaatgggaggtgaggggaaggaagtggggttttgcgagtttgcatgagtgtgtgttgcttcatgccttgggagttggcaagaggaagagggagaggaggagagcaaaatccggaaggtctttgttgtaccagtgggatcctgctctgagtctcccgaatcttccactgtgaattgggggtgggggtggggtgctggggaaataaatcttgtatgagaaccat

SEQ ID NO: 5009 - DNA, 1321 bp, Cricetulus griseus
aaagatggcggcgtccaggtagaggtcttgtggagaccggaccggtatggcgttggcgtccgggcccgcttggcgggcgctagctggctctgggaggctcggcctcgggggctgcggggccccgaaacgcggggcgtacgaatggggcgtgcgttccacgcggaagcccgagcctcgccccctggacagggtgtacgagatcccgggtctggaacccatcacctacgaggggaagatgcacttcgtccccgggctggctcggccgatcttcccgccgtgggatcgcggctggaaggatccacggtaccaccgcacggccccgatccccgagcagcctctgtacaaggagcagccctgctacatattccaccggcgctgccgactccttgagggtatgaagcaggctctctggctaactaagaccaagttaatagaaggccttcccaagaaagtgcttagtcttgttgatgatccaaggaatcacatagagaaccaagaagaacgtgttctaaacatcatctctcatgcccgtctctggcactctcctgaggacatccccaagagagagacctactgcccagtcattgtgaacagcctcatacagctgtgtaagtcccagattttcaagcacccttctctggcaaggcggatgtctgcccaaaactactccttagccaccacctggaatcgagagtctcttctccttcaggtccgaggtagtaatggtaccatactgagtaccaaggaccctctgcccaccattgcctccagagaggaagtggaagccaccaaaagtcatgttctcgaaaccttctatcccatatctcctatcattgatcttcaggaatgccacgtttatgatgtgaaagatgacacaggattccgggaggactatccttacccccatctccacaccttgtatttcctggaaaatgccaatttacggccacaccgctttcctccagaacagctaagggccaagatgctcctgtttgcttttgggaatgccctggctcgggctaggctcctctatgggaatgccaccaaagtcttggaacagcccatagtcgtgcagagcgtgggcactgatggccgtgtcttccagttccttgtgttgcagttgaacaccacagatctggcctctagtgagggcatcaagaatttggtatggatagactcagaccagctcctttaccagcacttctggtgtcgcccagtcatcaaaaagaaggtgatggtggaacctgttggacctgttgatttccagccagagacgttcaggaagtttttagctctgtacttacatggtgctgtgtgaact

SEQ ID NO: 5010 - DNA, 1321 bp, Cricetulus griseus
gcggagggaagtggggagtcggagagacccagccggagtcctagcggcggagacccctgtgcggtccggagggggcggcggccccgactctgacccgcgccggggggtgggccatggcggaaatcagcgacctggaccggcagatcgagcaactgcggcgctgcgagctcatcaaagagagcgaagtcaaggccctctgcgcgaaggccagagagatcttggtagaagagagcaacgtgcagagggtggactcgccagtcacagtatgtggtgacattcatggacaattctatgacctcaaggagcttttcagagtaggtggcgatgtccctgagaccaactacctcttcatgggagactttgtggaccgtggtttctacagtgttgaaaccttcctcctcctgctggctcttaaggttcgatatcctgaccgcatcactttgatccggggcaatcatgagagccgccagatcacccaggtctatggcttctatgatgaatgcttgcgcaaatatggttcagtgactgtatggcgctactgcactgagatctttgactacctcagcctgtctgccatcattgatggcaagatcttctgtgtgcatgggggcctctccccttccatccagaccctggaccagatccggacaattgaccgaaagcaagaggtaccccatgatggacccatgtgtgacctcttgtggtctgaccctgaagacacaacaggctggggagtgagcccccgtggggcaggctacttgtttggcagtgatgtggtggcccagttcaatgcagccaatgacattgacatgatctgtcgcgcccatcaattggtgatggaaggttacaagtggcacttcaatgagaccgtgcttactgtgtggtcagcacctaattactgctaccgctgtgggaatgtggcagccatcttggaactagatgagcatctccagaaagatttcatcatcttcgaggctgcaccacaggaaacacgtggcatcccctccaagaagccggtggctgactatttcctgtgactcctaggccccagcccctctggcccttggaccactgtgactgccctctgcccagtcggaggccgggtgtggaggggctgcctggctttgcttgccctagggtgcggactgctctggagaggttggggcctccactccaggcttcctctcctttctcccatttgatccttgaagtttccagtcattttttttttcttttttctttttttttcttttgtttttttttttagaataaactattttgaagaaaaaaaagaaaaaaattctaataaaagaaagaaaaa

SEQ ID NO: 5011 - DNA, 1321 bp, Cricetulus griseus
ggggagcgtgagcctgcgggtgcggtgcagcgcatggtggcggcttctctcagagcgccgccgacccgctgacccgggcttggttccctgtgcacagtgcgctccggagaccagctggaggtacacgcagcagcaacattagcagcagcaaaggcggctgctccgccgctcgcctctccacgggagcatggagtgcgccctggacgcccagagcctgatcagcatctccctgcgcaagatccacagctcccggacccagcgcggtggcatcaagctgcacaagaacctcctagtgtcctacgtgctccgcaacgcgcgccagctctacctgagcgagcgctacgccgagctctaccggcgccagcagcagcagcagcaacagcaccagcaccaccaccagcaccagcacctcgcgtacgcggcaccgggaatgccggccaacgcggccgacttcggcccgctccaacttggcggcggcggggacgcggaggcgcgcgagccggtcgcccggcaccagctgcaccagcttcaccagctccaccagctgcacctccagcagcagctgcaccagcaccagcacccggcgcccaggagctgcgcggcggcggcggcggtggtggccggagcgcccgccccttcctcgtcccctggcttctaccggggcgcgttacccggccccctcggacttcggtgtgcactgcagcagccagaccaccgtgctggacttggacactcacgtggtgaccacggtggaaaacggctacttgcaccaggactgctgcgcctccgcccactgcccctgctgtggccagggcgctccgggacctggcctggcgtccgccgctggttgcaagcgcaagtattaccctgaccaggaggaagaggacgacgacgaggaggacgcgggtgacctgggagccgagccccccgggggcgccccgttcgccccctgtaaacgcgcccgctttgaggacttctgcccggactcgtccccggacgcgtccaacatctcaaacttgatctccatctttggctcgggcttctcggggctggtgagccgacagccggactcctcggagcagccgccgccgctcaacgggcagctgtgcgccaagcaggcgctcgccagcctcggcgcctggactcgagccattgtcgccttctagggacccccgagggcatggggaccctgggccccgcggggctggggccagacaaagactcggccaagggacggtagggagcgagcgggtcctggccactcggggcaagctgggggcgagcagaggcttgttttataaattgtaaaataaaaaaaaaa

SEQ ID NO: 5012 - DNA, 1321 bp, Cricetulus griseus
tctcacgtttcctggagggccagtcgggtgtgaccatcaagcatgtggcctgcggggacctgttcacggcttgcctgactgaccgaggcatcatcatgacctttggcagtggcagcaacggatgtttaggccatggcaacctcactgacatcagccagcccaccattgtggaagccctgctgggctatgagatggtacaggtggcctgtggtgcctctcatgtcctggccctgtccacagacggagagctgtttgcttggggccgaggagacggtgggaggcttggtctaggaaccagggagtcccatagctgccccagcaggtgcctgtgcccgtagggcaggaagctcaaagagttgtttgtggtattgactcttccatgatcatcaccttgcctggcagggtcctggcctgtggaagtaacaggtttaacaaactaggcttggatcacctatccctggatgaggagcctgattcccaccagcaagtggaggaggccctgagcttcacaccactgggctctgcacctctggaccgggagcccctgctgtgtgtggacctgggcactgctcattccgctgctgtgactgcctccggtgactgctatacttttggcagcaatcagcacgggcaattgggcaccagttctcggcgggccagcagggtgccctgtcgggtccaaggcctagagggcatcaagatggtgatggtggcctgtggggacgccttcactgtagccattggggcagaaggggaagtgtattcttggggcaaaggagcccgaggtcgactgggaaggagggatgaggatgctggactccctaggccagtgcagctggacgagactcttccttacatggtgacttcagtgtcctgctgccatgggaacactctcttggctgttcgatctgtcacagacgaaccagttcccccctgaggcaacaggattatccaagaatcagaccacctctgagagttctgaaaaatgcaggtgcctaaggaaccactgtttccagcgtcctggattgtgtcatcagtgaggtggaaaggccagaaggccactttgttcatccaagccgctgccccaaactccttatctcactctgtgtctccaggctccagtctggcaggaattaacagcaggacggtcttcaaagtttttgctaaaaagcacacacacacatacacaccccaagcctggttaaaaagaagtccctggctgtgtagtgtcctcgtggagactgatgccatgctttggagcagggcaagccagggcttgtttggactggctattgggcctgcctaatctctgcatagcttg

SEQ ID NO: 5013 - DNA, 1321 bp, Cricetulus griseus
gcgtggccccgcggtggccagtccgacggcgacgcggtagccggcttcctgcgctggtgcgcgggagtggggctggagctgagtcccaaggtggcggtgagccggcagggcacggtggccggctacggcatggtggcgcgggagagcgtgcagccgggggagctgctgttcgcagtgccgcgctcggcgcttctgtctccccacacctgctccatcagcggcctgctggagcgagagcgaggcgcgctgcagagcctgtcggggtgggtgccgctgctgctggcgctgctccacgagctgcaggccccagcctcaccctggagcccctacttcgcgctctggccagagctcgggcgtttggagcatcccatgttttggccagaggaggaacggcggcgcctcctacagggtacaggtgtcccggaggccgtggagaaggatttggtgaacatcactagcgaataccattccatcgtcctgcccttcatggaggctcactccgatctcttcagccccactgttcgctcactggaactctatcgtcagctcgtggctcttgtgatggcttatagctttcaagaaccactggaggaagaggatgatgatgaaaaggagcccaactcccccttgatggtgcctgctgcagatttactaaaccacatagccaatcacaatgccaatcttgagtactctgcagattatctccggatggtagctactcagcccattcccaaaggtcatgagattttcaacacctatgggcaaatggctaattggcaactgattcatatgtatggttttgctgagccctatcctgacaacacagacgacacagctgacattcagatggtgacagtccgggatgctgcactgcagggaacaaaggatgaagctgaaaagctgctcttgtgtgaacgctgggatttcctatgcaaactggagatggtaggggaagaaggagcctttgtgattggtcatgaggaggtgttgactgaagaggagctagccaccacactcaaggtactgtgcatgcctgctgaggaattcagaaactataaagaacaggctggacagggagaggaagaaagagaagaggtcagtctggcaatcgcaaatatccccaagctccaagcatcgtggaagcggcttcttcgagacagtgttctactgacccttcagacctatgccaccgacttaaaaactgagcaagatttacttagcaataaggaagtctacgccaagctcagctggcgggaacagcaagccttacaagtccgctatggtcagaagatgatcttacatcaggtgttggaactcacaa

SEQ ID NO: 5014 - DNA, 1320 bp, Cricetulus griseus
gggatggaagatggcgtctcccacggacgggacagatttggaagcatctttgctaagttttgagaaacttgaccgtgcctcgccagatctttggcctgaacaattaccaggtgttgctgaatttgcagcttctttcaaaagtccgatcactagctctccacccaaatggatggctgaaatagaacgtgatgacattgatatgttgaaagaattggggagcctcaccacagctaatttgatggagaaggtacgaggcctccagaacctggcctatcagctggggctggatgagtccagagagatgacaaggggaaaattcctgaacatcctagagaagcctaagaagtagcaaccgctcgagcacaggtgtcctgaagaccataaccaagttcccttccagatactttgcttatatgataaaacacactcttatgaaaatgttctggcttaaatacagctctcacagacttctttgctagttgaatgtatctgccaaactctgaaaatcttgcccatggtaagatggattagactagtctttcacattttgaaaagcacaggaagttccctcaatattataggaagaaaagctctgtggccgtcatccggtgggagtttggacacaggagaagctgtggccaagtccagggccatgtatctgttagggcacagtactcttgaggttcacagcaagctccttgaccattcttgacatttgtgcctaatgctagaattgctgttggattttccccttcattagtgctatttgatcaacacagttttactttttgaaaggaaaaagcaatgaaatatgtaccacagaagataagtatgagaagaaaagcactctgctggagtactccctagaagggagtggattttaagcttgagtctgtgattgacattttttatctcactaaatgcggttaaagtgggtgtatatgagtgatcggaaaataatgccttatgtcaaatttttttcttcactctgtttttgagagttgatgacatcaggcacttttcagagtttggggacattgaaaagtatgtggaaaatactgggatagctcccccaaaccagcttgtctgtaatgggaagccggtagttggtgttttgatctgctatggcctcctccttcttactgtcatcctattcaccagcacttaaattaatgtaagtagatgttttagaattgtgatatttattgtttttgtatttgtcatccttagaaatgttaatgatgtatttttatattgataatataaatttatgtacagtatgtatatgtattttagaatgttagaggattatactttgtg

SEQ ID NO: 5015 - DNA, 1320 bp, Cricetulus griseus
  modified_base (1167)..(1167): a, c, t, g, unknown or other
aaaatactggaagaggaccagcatgaagctgttggaccaagtggtgccccctgcagtgatgatgaggtcacagtaggcaagttctacgccaccttcctgatccaagagtacttccgaaaattcaagaagcgaaaagagcaaggtttggtgggaaagccttcacagaggaatgcactgtccctgcaggctggcttacgcacgttgcatgatattgggcctgagatccgacgggccatctctggggatcttactgctgaggaggagttggacaaggctatgaaggaggctgtgtctgctgcctctgaagacgacatcttcaggagagctggaggcctgtttggcaaccatgtcagctactatcaaagtgacagcaggagcaactttcctcagaccttcactacccaacgcccactgcatatcaacaagacgggaaacaaccaaggtgacaccgagtcaccatcccatgagaagctagtggactccactttcaccccagcagctactcatccacaggttccaatgccaacatcaacaatgccaacaacactgccctgggccgccttccccatccactgctactccagcacagtcagcactgtggccccccttgtcccctgctatccgggtacaggaggcagcatggaagctcagctctaagaggtgccactcccgagagagccagggggcctcggtgagtcaagagatgtttccagaagagacctgcagtgtgagaatgagtgaggacgctgagtactgcagtgagcccagcctgctctccacagatatactctcctaccaggatgatgaaaacagacaactgacatctccagaggataggagggagatccagcaatctccaaagaggagtttcctccgctctgcctctctaggtcgaagggcctccttccacctggaatgtctgaagagacaaaaggatcaagggggagacatctctcagaaaacagccttgcccttgcatctggttcatcatcaggcattggcagtggcaggtttgagtcccctcctgcagagaagccattctcctaccaagatccccagggcatcgcccctcaccccctgtccttcccctgcaggagctgaggtgcaggtggctagagccagtgcagaccacaccacccgccctcagctagccaggccaggggggtncaggctgctgcctagtaatcgcggtttcatggtttgatggtccttgttagcatgttgcggttttctgggtttttggtttctttattttttatttgctgtgcttttccacgggtaagggaggaagaagagcgtttacagttgcgcagcctcact

SEQ ID NO: 5016 - DNA, 1320 bp, Cricetulus griseus
aaggcgccggccggcccgcgggccgagagggcgacattagtggcttcgtcccctgcccccttccctgggggcgagatgtcggggctccgccacttggagacggagggctgccgtgacctgctcggcatgctggacaacgaagagatcatggccctgtgcgacaccgtcaccaaccgcctggtgcagccagtggaccgccaagatgctattcatgcaatattagtttatagtcaaagtgtagaagaacttctaaggcgcaaaaaagtccaccgagaagtcatatttaagtatttggcaacacaaggggtggttgtacctccaactactgaaaacacaatcttattcagtatgcaaaaggttattgggaagaacagtcactgaaactgaagactgcagcggaagcagttacaacgacagaagatatccagctctttgaacaggcaaaagaagataaagaggctgagaaggttgatttccgtcgcttaggagaagagttctgtcagtggttcttcgaacttcttaattctcagaatccttttctgggaccacctcaagatgaatggggcccacagcacttctggaatgatgtcaagcttaggttttattatagtaccacagaacaaaacgtgatagactaccatggagcagaaattgtgagccttcgattactgtcattagtgaaagaggaatttctttttcttagtcccaacctcgactctcagggactgaaatgtgcttcttctcctcatggattagttatggttggagttgcagggactgtccacagaggaaatacttgtttgggcatctttgaacaaattttcggacttattcgtagcccttttgtggaaaatacttggaaaatcaaatttatcaacctgagaattattggcggcagttcccttgctcctggaacattactgaaaccagctgttacatttgaacagagtgatctggagtccttttataatgtaatcactttgtgtgataaccctcaagtaagacctaatataaggcaggccttgggtagtgggactggagaccagggtttatgtagtggagatgaggccttgttgaacaaaaaggaactgaactcgcctaaccctctaaagcactgagctctgacggtcagcctgaggtagctgcagaaactgcccagcacagcactgatcacatctcagcgattgcagatgtgagggttgagatattttagctgaagtaccctttggactacagactaatgtgaatacttgcctatttctactcgagtcacagcaaacgtttcgagaacttactgcggtccatcaaataaatcccact

SEQ ID NO: 5017 - DNA, 1320 bp, Cricetulus griseus
tgccatggggacccagcactcctctgctccttgtcgtctttttgtcatggacgggaccccttcagggacagcagcaccaccttgtggagtacatggaacgccgattagctgccttagaggaacggctggcccagtgccaggaccagagtagtcggcatgctgctgagctgcgggacttcaagaacaagatgctgcctctgctggaggtggcagagaaggagcgggaagcactcagaactgaggcagacaccatctcagggagagtggaccggcttgaacgggaagtggactatctggagacccagaacccagcttgccctgtgtggagttggatgagaaggtgactggaggccctggggtcaaaggcaagggccgaagaaatgagaagtacgatatggtgacagactgtggctacacaatctctcaggtgaggtcaatgaagattctgaagcggtttggtggcccgtctggtctatggaccaaggatccactggggccagcagagaagatctacgtgttagatggcacacagaacgacacagctttcgtcttcccaaggctgcgtgatttcacccttgcgatggctgcccggaaagcttcccgaattcgggtgccccttcccctgggtaggcacagggcagctggtatatggtggcttcttgtattatgctcgaaggcctccgtggaggacctgggagggggtggccaagtggagaatactcttcagctgatcaaatttcacctgacaaaccgaacagtggtggacagctcagtgttccctgcggagaagttgatacccccctaccgggctgacagtagacacatatattgacctggcagctgatgaggagggcctttgggctgtctatgccactcaggacgatgacaggcatttgtgtctagccaagttagatccacagacgcttgacacagagcagcagtgggacacaccatgtcccagagagaatgcagaggctgcctttgtcatctgtgggaccctatatgttgtctataacacccgccctgccagtagggcccgtattcagtgttcctttgatgccagtggtactctggccccagaacgggcagcactctcttattttccacgacgatatggtgcccatgccagcctccgctactaacccccgtgacgcgccagctgtatgcctgggatgatggctaccagattgtctacaagctggagatgaggaagaaagaggaggaaaatgtaagcaactggtgcttttgattctcttatcccctcacatttatattcttattgggtctgctgttcattcttcacatgaaggccagtggtgg

SEQ ID NO: 5018 - DNA, 1320 bp, Cricetulus griseus
gattatcgaggccctaatggagtatggacattgcttcagaaaggaagaagtgtgagtgctgctgacctaagtgaagcggagcccaccctcacacacatgagcatcacccgtttgcatgagcaaaagctggtacagcatgtcgtgtctcagaactgcgacgggctccacctgcgcagtgggctcccacgaaccgccatctcagagcctccacgggaatatgtacattgaagtctgcacctcctgcgtccctaacagggagtatgtgcgagtgtttgatgtgaccgagcgtacggcccttcaccggcaccagaccggccggacctgccataagtgtgggacccagctccgggataccattgtgcactttggggagagggggacattagggcagcctctgaactgggaggcagcgaccgaagctgctagcaaagcagacacgatcctgtgtctagggtccagcttgaaggtactgaagaagtacccccgcctctggtgcatgacgaagcctccaagccggcggcccaaactctacattgtgaacttgcagtggacaccaaaggatgactgggccgcactgaagcttcatgggaaatgtgatgatgtcatgcagctcctcatggatgagttgggcctggagatcccagtctacagccggtggcaagaccccatcttctccttggccactcctctccgcgctggtgaagaaggtagccacagtaggaagtcgctgtgcagaagtagagaagaagccccgcctggggaccagagtgcaccacctagcccagctccccccatcctaggaggctggtttggcaggggctgcgccaagcgttcgaaaaggaagaaagcaacctagccaggcgttgacaaagaacaattggcactttgcagagggctttgacgcttgttcaggggcctatgtcaccgtgaaggctacagtgcccccaccggatctagtgggtggcatttcacggtgatgttttttttagccatttgtccttgtgggaagcctctcttgcactgttgtaactgccccaatatgggcttgactgtcaaggacgccgaccccctccatcccccctgtacaaaggcggcagcaaggcctttgtgaaaacagagctgtctttcctggcctggccagcagaggagcccaccactgccttacctcactctccaggctagtctcagggcctccccatttctactacttattactaaaagcgttcactttaatagaaacctttttctgtgttggtctgcagcacagggcggacggatctaagcctccagtctgagcaagtcggaattaaaacatctctc

SEQ ID NO: 5019 - DNA, 1319 bp, Cricetulus griseus
caggattacaggaagttctgggcaggcctccaggggctatccatctgcttctacaacagcaatcgggactgtcaggccctggagaagctggacctgaggctgttttcaaagctcaaagatgagtctccatggggaagctcaagggacaccagctgtcacttcagcctggttctccgagaccaggaggtcaaattcaaggttgagagcctggagtctcgtgagatgtggaaaggatttatcttgactgtggtggagctccgtgtcccatctaacctgaccctgctgcccggacacatgtacatgatggccgaggttctgaccaaagaggaggcgcggcgtgcggcggaggtgccctggtgcttcctgcaggtgagccggctggaggcacagttactcctggagcgctaccccgagtgcgggaacctgttgctgcgtcctggaggggatggcaaggatggcgtgtctgtcactacgaggcagatactcaatgggtcgccagtagttaagcactacaaggtgaagcgagagggtcctaagtatgtgatcgacgtggaagacccgttttcctgcccctcactggaagctgtggtcaactattttgtgacgcacaccaaaagggcgctggtccccttcctgatggaggaggactatgagaaggttctaggcttcgtgcactcggatcgagagaatggcgagagtgtatgggccgtgtcctcctcccgggactcaggtcctgcaccccatgctaatgtcccgaagccactcccacctgtgcctgtgtctgtgtccagccaggaggacagactgcctccactacctcccctgcctcagttacgggaccaggatgagaactatgtgacccccattgaagactccctagcaactgagtacatgaatcaagatgtgtctccctctagtcagccggttcccttgaagcccaagaagcccgtgaagctcccagcaaaacccccaaagccaccagttgtgcccaaaccggatctcaaagccatcactagtgtctgggccagaaagccagctgtcagttcaccccaggctccctccctcgtgacaaagctgggggatatcacagccgagctggaagagaaactgcagaagagaagagcactggaacactgatccaggctcccagggaccagtggactaactcggggcacaatagtcctccaccagctgtcctcactgaggggactggacataataaaactaaaaccaaacctaaaaaaaaaaaaaaaaaaaaaaaaaaaaaaaaaaaaaaaaaaaaaaaaaaaaaaaaaaaaaaaaaaaaaaaaaaaaaaaaa

SEQ ID NO: 5020 - DNA, 1319 bp, Cricetulus griseus
aggtcgggccatggtggggcagaggttgggaagatggcgttgcgaggttgggcacagcgaggctggggctgcggtcaggcgtgggcgcctcccgtggtcggcggctgcccggagctctctgcggcccgggccccgcggctgctcggacgcaggcttaacctatttcttcagcaaaaatgtggatttagaaaagcaccaaggaaggttgaacctcgaagatcagacacagggtcaagtggtgaagcatacaagagaagtgctttgatcccacctctggaagaaacagtcttttatccgtctccctaccctatacgaactctcgtgaagccctttttcttcactattgggttcacaggctgtgcatttggatcagctgctatctggcaatatgagtcactgaaatctagagtccagagttattttgatggcataaaagctgactggttggatagcatacggccacaaaaggaaggagacctcagaaaggagattaacaagtggtggaatagcctaagtgatggccagcggactgtgacaggtatcatagctgcaaatactctcgtattctgcctatggagggtgccgtcgctgaatcgaaccatgatgagatattttacatccaatccagcttcaaaggttctttgttctccaatgttgctgtcaacgttcagtcatttttccttattccacatggcagccaacatgtatgttttgtggagcttttcctctagcatcgtgaacattcttggccaagaacagtttgtggccgtgtacctgtctgcaggtgttatttccaattttgtcagttatgtgtgtaaagttgccacaggaagatatggaccttcacttggtgcatcaggagcaatcatgactgtgcttgcagcagtctgcaccaagatcccagaagggagactcgccatcatcttcctcccggtcttcaccttcacagcaggcaatgccttaaaagccatcattgctatggatacagctgggatgatcctgggatggaaattttttgatcatgcagcacatcttgggggagctctctttggaatatggtatatcacttatggtcatgaactcatttggaagaacagggagcctctagtgaaaatttggcatgaaataaggactaatggccccaagaaaggaggtggctctaagtgaagcaaaactggccagtctggtacatctgctccttgctgtctggaagactccgcatccagccaccccagtgttttaaatgttcccagtacatgtctccttagcaaattatggcagagttgtgaaataaacgtttatatctctagtttagtaaa

SEQ ID NO: 5021 - DNA, 1319 bp, Cricetulus griseus
  modified_base (900)..(900): a, c, t, g, unknown or other
gaagatgtatttgtcccctcggctcagaggatcacgtctaagtttttgtacacataagccactgagcccagagcactctagcttctcacttaaaactgtttcggatcatcaaaacaatacaagtggaccatgtgactggaaaaagcagccatgtccagagattcctgatgttcctctccacaatgccttggagaagagcccggcaaatgactgggactctgtcttagacagtcctggccgtcagcttccagcttaccagtccacttgcagtgagttggtagtaaccaaaacaattcccgacatccctctgcctcagaagagaaccaagcacaatcagaaggtccagagaagaggctctcagggatgctggcagccgagacaagcaagcaggaaggaaaacaccccaaggcagcacgaaaagagaaagaaggcagtggtggtcaaccgactgaaagcccagaggcctgaggaatgcctgaagcacattgtggtggtgttggatccagtgcttttacagatggaaggtggaggccagctcctgggagcactgcagtccatggagtgcagctgtgtgattgaagcccaggctgtgcctcaaagtatcacttggaggaggaggacagagttggcagaggatggagcagactggctggaagaaccaaccatcctggtattgctcctcaaataaacaggccaaagagaagcagcagaagagacaagagtctagcacaaggctcatgatgtccagggtagacatggaagaggcattggtggatctgcagctacatacagaagcccaggctcggatggtgcagagctggaaagagctggctgacttcgcctgtgcgtttacaaaggctgtggctgaagcgcccttcaagaagctccgggatcaaaccngcttttcctctgtctggagaaagagacagggtcagaagtacctctcaggtacagttagggattgagtctccaaatctctggtgacagagaaggctgagacactgcagtctacctccaccagcgtttaccgttcctctccctgcaaaccagatgccatggaccacaattaaccatcccaccctgccccaatcaaccttcacaacacaaaggagaaaggcagaccactcggacatggatttaataattgtagaaatccaaagaataagcatcaaatctcgaagtcagagtgaattcttgcctgcaggttggcttgactaggctcagccactgagctgcctcaaccagccaggttactatgactagcctgacttctgtttcatgatgtcaccatatgtagtatgtatgtatttgtctcaata

SEQ ID NO: 5022 - DNA, 1319 bp, Cricetulus griseus
tccttcactaaaattttcaataacgtctcaaaggagttacccggcaagaccttagactttcactttgacatctctgagacgcccatcattggaaacaagtatggaggccagcacagtgctgcgggaaggaacgggaaagcaaaggtgattgctgtcaccaggagtacctcctccacctcctctggctccacttccaatgccctggttcctgtcagttggaaactcagagcatgcctaaaagagcactgcaagattattttttgaagaaatttttattttattagatctaactcttcatagtgtgtaaatgtcagaacactttaataatattttaaaactgggctttcccagtgtctcaaaaagaaaaaaagaaataatatatctgttaatattattggactctgctgctcagctctctgatcagtgctttatgttgatattgttaactaaccaaagtagatgcctgcagagactttaaaatgtaaaataaagatgtacactgcccgccagcgctcctcattagacaagttaacttattttactccttaattattatagacactgcatagactaaaacctgtattttcttgtacattcatgcgcactgttataccagagtacatgtacaaagctaaaggaaaagttgtacttgtgtgtttatgcaggactcgacttgtttcaggctaaaggaatcttggagcatctgggagagaaagacagaaagcctaaagactggctcccaaaacatgcaatatacttctccactgtctaagtttgtagcataacaaactggatcctctgtaccttttaaaaaaaaatagcattttgtaaaggaaatgaatgtagtcccacaactcctccaatttgaaagaacaccttgtatattttatatgcatctcttatccactgtgacttttattttcgaaactgggctctgactccagagtttggaatgtagaaatgaattgcttagctttgccttttcctgggggcgtggaccctgacagaaatgtaatttaattatgctcaagtgcattaatcgaaggcactgtgcacgccgttggactgctgaccacagttatgtttcctgtaaaattccataactggtcacagcacattcataatcactgtattttttgacccagataaaattattttaatggtgttctggtactgtaaatggtgtcctttaaattattaataactttgggttgggggggtcagggcacagggatggtgtccagagacaccacacttcacatcccctctctttttgttaaaaataaaaaacaaggaaagacaaaaaaaaaaaaaaaaaa

SEQ ID NO: 5023 - DNA, 1319 bp, Cricetulus griseus
  modified_base (1311)..(1311): a, c, t, g, unknown or other
gtaggaagtggcgcttcggggagtggagatggccgcgctggccccgctgccgccgctgcccgcgcagtttaagagcatacagcatcatttgagaacggctcaggagcacgacaagcgggatcccgtggtggcctactactgtcgtttatatgctatgcaaactggaatgaagattgacagtaaaactccagagtgtcgtaaatttttatcaaagctaatggatcagttagaagcgcttaagaaacagttgggggataatgaagctgttactcaagaaatagttggttgtgcccatttggaaaattatgctttgaaaatgttcttatatgcagacaatgaagaccgagctggacgatttcacaaaaacatgatcaagtccttctacactgcaagccttttaatagatgtcataacagtgtttggcgagctgacagatgaaaatgtgaaacacagaaagtatgcaaggtggaaggcaacgtatatccataactgcttaaagaatggggagactcctcaagcaggccctgttggaatagaagaagataatgacgttgaagaaactgaagatgttggtgccacttctctgcccactcagccacctcagccatcatcatcttcaacatatgacccaagcaacttggcaccaggcagctacagtgggatacagattcctccaggtgcacatgctccagctaatacacctgcagaagtgccacacagcacaggtgtaacaagcaataccgtgcaacccagtccacagactgtccacagactgttccaaccattgatcctgacatgtatacaacttcccagggggatatccgtctgacaccagaggactttgctagagctcagaagtactgcaaatatgctggcagtgctctccagtacgaagatgtgggcactgccgtgcagaacctccagaaggcgctcaggctgctgacaacaggcagggagtgaagcctctgcactggaagccatgtgactacagcatgcggaactaatactccttacactttcctcaaccttttgggagcatggttcacagaagactgcagttccactcagtaagacaacgacgcctgtgtgcttctgagtgcatagagctgatgttagcatcgaaccctgcttcaaaaatgaaaatgtccctgtagaaaatcatgttgggtataagctttcttaatttatatacactaaaggatgtttttgaaaaatctgtaatatttggacaaacaaaccatattatgttgctataatattctaaattaaacttttaataaagattgccagaatattctggaaaaaaaaaanaaaaaaaa

SEQ ID NO: 5024 - DNA, 1319 bp, Cricetulus griseus
  modified_base (1312)..(1312): a, c, t, g, unknown or other
gcaagagactcctgtggcgacaagcctgggaccagacacacaggacctggaaaacgagagccctccacagaacctgccctcaagtcccaaagcagtatggaaagagtgccactgctccagcagtgacgatgacactgatgtggatgtggagggtctgcggagacggaggggccgggagcccagccccgcccagcccgccacacccatggatgcggaggaccaggccaagggcgagggtgtaggaggcgagctgggcatctctctcaacatgtgtctcctggggaccctggttcttctcggcctggggatcctcctgttctctggtgggttgctggagcctgagactgggtccatggaagaagcagagttgcaggtcttcccagatactgggctggagactgagttggtagatactgtagggaacaggaaggatgagctagagcagctgcaggcctcagtactaccagacagtgaggatgagcactggaagcataggaaggaggagtctggccggaagaggaagcggagctggagggatgggaatggggaagcaacaggagtgtggaaggaagacaagccaagggtagaagaattggggaacagaaaggatggcaagcgacaggacttcaaggtgtaccctaggaaaagtggggactcccactctggagaaaggcagaagccttcttgggggaaagacaacagccctgaccccctgtcctcctgggaggagctgctgaagcgcaagtaccggccccctcagggctgctcaggtgtagatgactgtgccaggcaggagggcctgaccttttttggcacggagctagcccctgtacggctacaggaactggcctctgtgctgagaacatacttggagaggctgccctgggctgggcaactgaccaaagagctgcccctcttacctgcttactttggagaagatggcatcttcaggcatgaccgtcttcgcttccgggactttgtggatgccctggaggacagcctggaggaggcagcattgaaacagatgggtgatgacgatgaagtagatgactttgaggatttcatcttcagtcacttctttggagacaaggcactgaagaagagatcaaggaggaaggagaagcattcctggaaccacagagttgtggggcccagggaagagcatgaccgccatccccaccactactaccatggctaatccctgcccctgctcgtaacaaatggccttggcacatacccagctcaagatccctggaattatgtgaccttagaagctgtgctcccactgtccagcaagaagaagaagaaaaanaaaaaag

SEQ ID NO: 5025 - DNA, 1319 bp, Cricetulus griseus
ggcacatggtactggatctgctattacagaaaggctacagtgagactttgaggggcgttagcgaagcatccacgagtccctcagcggtctccccgtccctggagttcgaaatgctttacctgatcggcttgggcctgggagatgccaaggacatcacagtcaagggcctggaagttgtgaggcgctgcagtcgagtgtatctggaagcctacacctcagtcctgactgtagggaaggaagccctggaagagttttatggaagaaaattgattcttgctgacagagaagaagtggaacaagaagcagataatatttttaaggatgctgatgtcagcgatgttgcattccttgtggttggtgatccatttggggctacaacacacagcgatcttattctgagagcaaccaagttgggaatcccttatcaagttattcacaatgcctccataatgaatgctgtaggctgctgtggtttacagttgtacaagtttggagaaactgtttctattgtgttttggacggacacttggagaccagaaagcttctttgacaaagtgaagaagaacagacaaaatggcatgcacacattgtgtttacttgatatcaaagtcaaggagcagtctctggagaacctcatcaggggaagaaagatctatgaacctcctcgatacatgagtgtgaaccaggcagcccagcagcttctggaaattgttcaaaatcagagggcacgcggggaagaaccagcaatcactgaggagacactctgtgttggcttagctagagttggtgctgaagaccagaaaatcgcagcaggcactttacagcagatgtgtacagtggacttgggagaaccattgcattctttggtcatcacagggggcaccctgcacccactggagatggaaatgctaagtctttctctatcccagaatcccaaagtattaatggactctgaacatggacagtttctgttgtctcacattgtctcagttagattggggtgtgtgatattcatatgacagatggcctgggtctgtcatttatctagaaagtataacagaagtgaccaagaggaagcaagttgaacccaacagttggtttcctgcagcagtttttccccatttcatcatcagttggctggagagatggctcagtggttaagagcactgactgctcttccagaggtcctgagttcaattcccagcaaccacatggtggctcacaaccatctgtaatgagatctggtgccctcttctggtgtgagtcttttttttcttttttgtaaaaaaaaaaaaaaaaaaaaaaaaaaaaaaaaaaaa

SEQ ID NO: 5026 - DNA, 1319 bp, Cricetulus griseus
  modified_base (421)..(421): a, c, t, g, unknown or other
gcccgcggctcgcacctggcggcgcacatgcacggccacaccggcgagaagccgttcgtgtgcggcgtgtgcggggcgggcttcagccggcgcgcgcatctcacggcgcacgggcgcgcgcacacgggcgagcggccctacgcgtgcggcgagtgcggccggcgctttggccagagcgcggcgctgacccggcaccagtgggcgcacgccgaggagaagccgcaccgctgccctgactgcggcaagggcttcggccacagctcggacttcaagcggcaccggcgcacgcacacgggcgagaagcctttccgctgtgccgactgtggccgcggcttcgcgcagcgctccaacctcgccaaacaccggcgcggccacaccggcgagcggcccttcccctgtcccgagtgcggcaagcgtttcnctcagcgctctgtgctcgtgacgcaccagcgcacgcacaccggggagccgggccgtacggcctccgggtccggaacgctactcgagttcgcaggcggaaccagctttggctccgatcccgccgcgttcgccgggccctcgggcgcctatgaggaaagtgtcctgtgaggttggtggaagcgcgcggtgtctcccgctcctcgaggcgggctgaggattcccaatcttgggtgcctgtgggccctatcgccccgagcttcagatctcgcttgggtgaacacgggccgacaccctgatcaagagcacctcatccctgtatctgtgctgcagggcaggcggggacctcaataggcttcggagggatggagttgcaaacaggaaaagcttgtgttctgtcgactgtgggtgtttttccatcttttgtaaggcctgaagaccggggaggagttgaaaaagcaagataccaaatgggtagccagattgcagatgctgactagatcccaggggagttggaagccttattctttgaaaatccttactccaacccctaaacacaggtctgtcgagcactggctacaaggtgggtttgttattggtatccctctaagcttgttggttctctagtagctgcaggaggcacacatggacatcttcggagtgcctggtgtgggcctccacataaggcatcacgtggacctgagctcacagcgccttactatgcaaggcccttgcacagtgcatagctatctctccaatctggactactggcatctgaggtgtggctcgcacaagcccctcccaccctccatgaattctgggccagtgtgactgagggctaaagaagtgagatctccagctgcattcccctttagacctagattcctttgttgtagtgtaga

SEQ ID NO: 5027 - DNA, 1319 bp, Cricetulus griseus
tgtaaactgctcggatttttgtttcttttttcctttcgtccgctcttcccggaaggtgaaatatcgaagcgtagatagacgcacctacagggtccaaaaatccacggccacaggggcgccattactctccggactcattggttaacgctcttttttgggagccttggcagggttagcggatgctgcaacacagcctcttgatgcagtgtgaatccaatccaagggaagaggagatcccgtccctcttttggggtttggatcctgtgtttctagcctttgcaaaactctacatcagggatatcctggagatgaaggagtcccaccaagtgccaggcatatatatttacaacgggcatccgataagacgggtggatatcctgggaactgtcatcagcgtgagagaaagagaaactttctacagctatggagtggatgacgccactggagttataaactgcacctgctggaaaaagctggacaatgctaagtcttcaccagacccagctgctccaagcactgcaagagagctaagcatgacctcacagcttaagaaattgcaggagaccatggagcagaaaaccaagatagaaattggggatgttatccgggtcagaggctatgtgcgggagttcaggaaagagcgagaaatctgtgccaccctttattataaggtggacgatccagtgtggaacatccaaattgcaaggatgcttgagctgcctgcactctacaagagaatatacgaccagcccttccgcaacccagccctaaaggaagaagaggcactcaacaatacagacactttggatcttggtggcctcatgtctttgttgagtgagaaaatcaaagaattcctccaggagaaaaaagtgcaaaccttctaccagcaggaagtggaaacagtggagtccttgcagtccctggccagccggctcgtgacttacagcgcctgttccaaccaagtggaatcaaagaacagcgccacttccagtgccattcacagtgtgtttaagaatgctctacagctgctgcaggaaaagggacttgtgttccagaaagatggtggctttgataaaccgtactacgtaaccagcaaggacaaagacttgcaccaaaagatctacaagatcattaaggaagactgccagagaccaaaccatgtggagaagggctgccacctgatgcatattctgagctgtgtgcgcctgaacctccgctggaccctgaacaaggctgtgctgcagcaggtgctgcagctcctggaggaccagagtgacatcgtgagcaccggagctcactactatgtggccttctgagca

SEQ ID NO: 5028 - DNA, 1319 bp, Cricetulus griseus
gaggttgaagccctcatggaaaagatgaagcagttacaagaatgtcgagatgaggaggaagccagccaggaggagatggcaattgacgagaaatttcacattgcttacaatcttacttacaatacaatggcaatgcacaaagatgtcgatacctcaatgctcagacgggctatctggaactatattcactgcatgtttgggatacgatacgatgactatgactatggtgaaattaaccagctcttggaccgtagctttaaagtttatatcaaaactgttgtctgcactcctgagaaggttactaaaagaatgtatgacagcttctggaggcagttcaagcactctgagaaggttcatgttaatctgcttcttatagaagctcggatgcaagcagagctcctgtatgctctgagagccattacccgctatatgacctgaatcctctcctccttcaacatgatcctggaatgaacggcaagtgtagtctacaaggggctggaacccagccccaggaccaatggtagataaaaagaattcagaaatccgttgtgccatgattcctgtagtgtctgctgttttactgtgggataccactgcttgtctagcagtggatgcttggcagcttcagcgttagagctgtgaggaaaggctgctggtcacagtgtttgctctttgacagtacaggatgctgtatacttgtttcagtacagcaactagtaattctccaaagcctgttgctctgatatcacagataacaagacttggagtgtgtaagactgggacttgggtactaagtttatacgtgaggaatccagcagctctcggtgctgctttggctggggtgagttttctcgcatctaaacaggcatagaattgttactcacagctcagcaaagaccatgatgatggtaacagacagtttctttcatgatagtttttaaaattcagttattggatgatattaccgtggcattcttagaagattttctccaaagagcaatcttacaatgaaagtgtgtggtttataagaaaaatgggctatcttttgatatgctgtttcccaagattttctggccctggagggcagctgtcttgtgccctgttgacctcctgaccctgactttgaaggcggtgcatctccttacagaataaagctggaaaatattttagtgaggttatcaaatttgtatcttgatttacaaaatgctaactttgagatacaaacattgaaaaatgtattaagtactttgtattctggaaccgtgaattgcttttgaagtctgtcagtattattggtatttttcaataaagaataattt

SEQ ID NO: 5029 - DNA, 1319 bp, Cricetulus griseus
cgatgttccgtagcttggtggcctcggcacagcagcggcagcctccagctgggcccgcgagcggcgacagcggcctggaggcgcagttcagctgtcccatctgcctggaggtgtactatcggccggtggccatcggcagctgcggccacacgttctgcggggagtgcctccagccatgtctgcaggtgccatcccctctgtgcccgctctgccgtctgcccttcgaccccaagaaagtggacaaggccactcatgtagagaagcagctctcatcttacaaggcacctgccggggttgcaacaagaaggtgactctggcaaagatgagagtgcacatttcctcctgcctgaaggtccaggagcagatggccaactgccctaagtttgtccctgtgttgcccacatcccagcccatccccagcaatattcccaatcggtccacctttgcttgcccctactgcggagcccgcaatctggatcagcaggagctggtgaagcattgtgtggagagtcaccgcagtgaccccaaccgtgtggtgtgccccatctgctcagcaatgccctggggggaccccagctacaaaagcgccaacttcttgcagcacctgctgcaccggcacaaattctcctatgataccttcgtggactatagcatcgatgaggaagccgccttccaggctgctctggctctgtccctctctgagaactgaggcacagcttggccacctgcctcaagtctggggccgaagacacaatcccgcctcaagggatagggcggttgccctcctgccctgacacctgcacaggaacacgcctcactgggctaagtggaatttcacacaaggagagctggtctcagagctcccagggctgggatactggctagctggccccttgccatcaagcagggccactgggtcctggccggcagcactgggtcatcggtgcttcaagaggcaggtgctggccgttgggttagagcagttggctgcctttcccagccatgatgtcctcgtgtggggaaggatgaggtgccctaagctgtgccccagcaggactaggggaggaggcgcctagccaggctgccagcccacccagtccccagcttcgcttccaccgtaagcatttggtactggcttttgtgatatttaggaatcctgcatttttctatcttatcctgtgtgataatcttttcacgttttatagagcaaagacaaagcagttcctcttcataccgcaatacctgtgtttgactaggaagaacagtatttttatggagcatttacaaagttataatttttaaaaaaaaaaatacaaaaa

SEQ ID NO: 5030 - DNA, 1319 bp, Cricetulus griseus
cacgtggacgcgtcgggggccgcggtggtccctgtcgcgttcccagctcccagccctcggcgcgccgcgcgcacatggcgacccaggcgcactccctcagctacgcggggtgcaacttcttgcgccagcggctggtcctgtccaccctgagcgggcgcccggtcaagatccgcaggattcgggccagggacgacaacccgggcctccgagattttgaagcaagctttataaggctgttggacaaaataactaatggttctcgaattgaaatcaaccaaacaggaacaaccttgtattaccagcctggcctcctgtatggggggtctgtggagcatgactgtagtgttctccgaagcattggctattacctggaggccctgctttgtctggctccgtttatgaagcacccattaaaaatcattctacgaggagtgaccaatgaccaagttgacccttcggttgatgttcttaaggcaacagcactccctctattgaaacagtttggaattgatggagagtcatttgagcttaagatcttgcgacggggaatgcctcctggaggaggaggcgaagtgcttttctcatgccctgtaaggaaggtcctgaagcccgtccagctcacagacccaggaaaaatcaagcgtatcagaggaatggcgtactctgtgcgcgtatctcctcagatggcaaaccggattgtggattctgccaggagcatcctcaacaagttcatccctgacatctatatttacacagaccacatgaaaggcatcaactctgggaagtctccaggctttggactgtcactggtggcagagactaccaatggtaccttcctgagtgctgaactggcctctaatccccagggccagggagcagcagtgcttcctgaggacctgggcagggactgtgcaaagctgctgcttgaagaaatctacaggggcggatgtgtggactcaaccaaccaaagtctagttctgctgctcatgacgcttggacagcaggacgtttccaaagtccttctgggaccactctccccttacacgatagaatttttacggcatttgaagagctttttccaggttatgtttaaaattgaaaccaagccgtgtggtgaagaactcaagggtggggacaaggtgctgatgacctgcgttggtgttggcttctctaatctcagcaagaccctcaagtgatgctgtcataacatgaggatccattgtgtatggatgaagcagaagcagccaaggaccaaggggaccaagtccagatgtgtctgtccatccaggacaggacagcctcataacattaaggacttt

SEQ ID NO: 5031 - DNA, 1319 bp, Cricetulus griseus
  modified_base (1271)..(1271): a, c, t, g, unknown or other
  modified_base (1286)..(1286): a, c, t, g, unknown or other
  modified_base (1294)..(1294): a, c, t, g, unknown or other
ccttaagcaactacactcagtgtttgaagcaagaagataatggatataaatgtacagctttgcctccaccaactcctctctcttcctcaaacgctaagcgtgtcaagatagaagaaaggccttcaaatattgacattcctccaaggttgcttggtactcacaacacctcatcggctcaggttgatgtagctgtgaaaatacataagaaagtagtgcaacttgatttttctatgagttctttagctaaaagaatgaaacagttacagcaccaaaagcagcggaatgacagtaagcagagttacaggaagtttagggccaagatttgccctggagaaaatcaagcggcagaagatgaactcagaaaagagattagtaagtcgatgtttgccgagatggagatcttgggtcagtttaacctgggatttataataaccaaactgaaggaggacctcttcctagtggaccagcatgctgcggatgagaagtacaattttgagatgctgcagcagcacactgtgctccaggtgcagaggctcatcactccccagactctgaacttaactgctgtcaatgaagctgtgctgatagaaaatctggaaatcttcaaaagaatggctttgattttgtcattgatgaggatgctccagtcactgaaagggctaaattgatttccttgccaactagtaaaaactggacctttggaccccaagatatagatgaactgatctttatgctaagtgacagccctggcgtcatgtgccggccctcaagagtcaggcagatgtttgcttcccgagcatgtcggaagtctgtgatgattggaaccgctctcaatacaagcgagatgaagaagctcatcacccacatgggtgagatggaccacccctggaactgcccccatggaaggccaaccatgaggcacattgcaaatctggatgtcatttctcagaactgatacttcctgcttgtaggatagagtttattgcagattattctgtcttggaaagacggggttttaagtagcttgtttatcattgtccagaaattaacatcctattttaatgtattagatccacttaaaaaccggtgttaagtcaagcatagtggcatcatgtgcctatagcccagctgcttgggaaacacagggggaggcttagttgaggccaggagtttgaggccaccctgagctacattaatgagactccattactttgtgtgtgtgtgtgtgtgtgtgtgtgtgtgtgtgtgtgtgtgtgtgtgtggcaataaanaaatatgtttgtttntaaaaaanaaaaaaaaaaaaaaaaaaaaaaaaa

SEQ ID NO: 5032 - DNA, 1319 bp, Cricetulus griseus
tcaaccatctgggcagtgacctggcaagggccctgttggactttgccgagggccggccactggggccacgaggcctcgactggatcaagatccacctggtcaacctgactggcctcaggaagcgtgattcgctgcgcatgcgcctgagattcgcagatgaggtcatggaagagatcttggactcggcagacaaccccatgacgggccggaagtggtggatggaagctgatgagccctggcagaccctggcctgctgcatagaggtggcccgagcagtccggtccccagatgcggctgcctatgtctcccacctgccggttcaccaggatggctcctgcaatggcttgcagcattacgctgcgctcggccgcgacagcgcaggtgccgcctcagttaacctaatgccctcggacctgccccaagatgtgtacagggaggtggcagcacaggtggaggagctccgccagcgggacgccaaggatggcctccaggtggcccacgtgctgaagggcttcattacccgcaaggtggtgaagcagaccgtaatgaccgtggtgtatggagtcacacgctatggtgggcgcctgcagatagagaagcgtctgcgcgaactcagcaacttcccccaggagtttgtttgggaagcctcacactacctcgtgcgcctcgtcttcaaaagcctacaggagatgttctccagcacccgggccatccagcactggctgaccgagagcgccaacctcatctctcactcaggctggcctgtggagtgggtcacacccctgggtatccccgtcatacagccctatcaccgtgaggccaaggtccaggtaaaaggtggcatccagagcatcaccatgaccagctccatggacatcacccagaagcccaacactctgaagcagaagaatggctttccgcccaacttcatccactccctggactctgcccacatgatgctgactgccctgcactgctacaggaagggcctgaccttcgtctctgtgcacgactgcttctggacacacgccgctgacatcccggtgatgaatgaggtgtgtcgtgagcagttcgtgcgtctacatagccagcccatcttagaagacctggctaagttcctggagaagcgcttctgctctgtctccagctcccagaagccctcagaacttgccctggccaccaaactgcagaagacactacagtccttgccaaagaccggtaccttcgatctgagtcaggtgatgaaaatccacctacttcttcagttgacccatcccgtgctgtccctagacctgtgcatagtgtaaataaattaaagt

SEQ ID NO: 5033 - DNA, 1318 bp, Cricetulus griseus
atgaggctgtggccgcaggcatggggtgccgtcggggccgcttggcgcgagtgcttccctctgcaaggtcacgatgtggcacgttggttccccggccacatggccaagggactgaagaagatgcagagcagtctgaagctggtggattgtgttatcgaggttcatgacgcccggatcccactttcaggtcgaaactctctgttccaagagctacttggtctgaagcctcatttgcttgtccttaacaaaatggatttggcggatcttacagagcagcagaaaattgtccagcacttagaaggaaaaggcctgaaaaatgtcattttcacaaactgtgtaaaggatgaaaacatcaagcagatcatcccaaaacttatggaattgatcaagtacagctaccgctacaatcgagcagagaacatggagtactgtgtcatggtgattggtgtacccaacgtaggcaaatcctctctcatcaactcgctgagacggcagcacctcaggacaggaaaagctaccagagtgggtggtgagccaggaatcaccagagctgtgacatccagaatccaggtgtgcgagcgtccactgacgttcttgctggatactcccggggtgctggctcctcggattgaaagtgtggagacaggcctgaagctggccctgtgtggaactgtgctggaccaccttgttggggaagagaccatggctgattacctcctttacaccctcaacaggcatgggctatttgggtacgtgcaacactatggcctggccagtgcctgtgaccacatagagtgggtgctgaagaatgtggctgtgaagcttgggaagacccggaaagtgaaagtgctcacaggcacaggtaatgtcaatgttatccagcctgattatgccatggcagcccgagacttcctccggaccttccgcagtgggctgttgggccaagtgatgctggaccgtgatcttattcctgtttgcggataatgctgacccctgaactggctggctggagtatggtcttctgcatacatactccatggaactgcagctggagtgtttaaagcttggaactgtttccctatccagaggctgtatgtgttagtacctgagactcaggccccagctccaaagggcactatgttctcttgtccactagagcctggtcagtccttgttactaccatgggatctcaggaagcctgtgtaaatggcttggtcaggagattttctctcagtctcaagaagagtttactgctatctaagaggagtcaaagctataatctagtaaattaaaaaagttggattaaaaagaccaattt

SEQ ID NO: 5034 - DNA, 1317 bp, Cricetulus griseus
atgatacctaccagacttggcttggcaaggtccttcactgtgttgggtgtttcaaagtgtgctccatccacccaagctaccctcaagcccagccagctccattcactgcaggcttcatctagattgctctccctgggcattgtaggccacgccaagcaccgggaggcctccggaaagaagctgctgtcagagaaaaaactgaaaagacattttgtggatcatcggagagtactggtccgtggagggaatggaggctccggcatgagctgctttcacagtgagccccgcaaggagttcggaggccctgatggtggggatggaggagacggtggacacatcatcctgagagttgaccagcaagtgaagtccttgtcctcagtcttgtcccagtatcagggtttcaatggagaaaatggtggcagtaaaaactgttttggacgaggtggtgccaccctctacatccaggttcctgtgggtaccttggtgaaagagggaggtgagattgtggctgatctatcccacccaggagatgagtacattgccgcactgggaggtgcaggaggaaaaggcaatcgctttttcctggccaatgacaaccgtgcccctgtaacttgcacccctggacaacccggtcaggagcgggtcctctacctggagctcaagacaatggcccatgctgggatggttggcttccccaatgctgggaaatcttctctccttcgagccatttcaaatgcaaaacctgctgtagcttcctaccctttcaccaccctgaaccctcatgtggggatagttcactacgaaggccaccaacagatagcagtggcagacatcccgggcatcatccgaggcgcacaccagaacaagggcctggggctcagcttcctcaggcacattgagcgttgtcgcttcttcctatttgtggtagatctctccttgcctgagccgtggactcaggttgatgacttaaagtatgaactagagaagtacgacaaaggcctgtctgagaggtcccatgtgattattgcaaataagattgatctcccgaaggccagagcccacctgtcccagctccaggcccacctgggacagaaggaggtcattgccttgtcagcgctgactggagagaacctggagcagctgcttctacacctgaaggtgctgcatgacgcccacgtggatgccgagcgggagcagggctgccagcctctcaggtggtagtgggcacagggctgcctgcccctgtgccagcatgggacaggggtggcctgcagtcagtcacaggaagcagaagcaaacctgttataaaatgtgggc

SEQ ID NO: 5035 - DNA, 1317 bp, Cricetulus griseus
ctgggaccagctttgcatccacttagttcccctctttgcctgaactgctaaagccggctaaccacgaatggctacccaaaggaaacacttggtgaaagacttcaacccttacatcacctgctatatctgtaaaggatacctgatcaagccaacaacagtgacagaatgcctccatacattctgtaagacctgtattgtccagcactttgaagacagcaatgattgtccaaggtgtggcaaccaagttcatgaaacaaatccattagaaatgttgaggttggataatacactggaggagattatatttaagctggtacctggactacgagaacaagaacttcagcgtgaattggaattttggaagaaaaataaacctcaagaaaatggacaagatgacatttcaaaggttgacaaatgtaaagcagatgaagaaggtgatgaaaaccaagatgataaggactaccatagaagtgacccacaaattgctatctgtctagattgtttacgaaataatgggcagtcaggggacaatgtagtaaagggtctcatgaagaaattcattcgatgttctacacgagttactgtaggaactattaaaaagtttctaagtttaaaactaaaacttccaagttcttatgagttggatgtgctgtgcaatggtgaaattatggggaaggatcatactatggaattcatctatatgacaagatggcgactaagaggagaaaattcgtaccccatggtattgcagtatcgaccaagaattgattttgggtaggacaaggggcccagactgcactgaacgaactctgcactgtttgtttactcctcggcagattgcacagtgtgtggacaggagagacacaatctgattttcagcatgcacataaggccatcgtctgtctctaaattgtcagttttctccatgttgtttctactaggagcaatccaagtgcccttctgctactgaccatctacataagatactcgtttcgtctcacagtgtgcaaagcacggctgaagtcacttaggtgtgcagccgtgactctgctttctcaatattttgcttgcctgttgcaagattgttctaatgttaattacactagtaaaatggctcaatccttgtggtgttgcggttttcacatacttaatacttttattcttgttaaaatagagtactgtacaagaacctagtataattatatcttgaaattattttgtataagagtatatttagaaaagtggtttctgagccactgttctattcttggtaaacttttatagtaaaaaagaaataaacagaccaaaaaaaaaccc

SEQ ID NO: 5036 - DNA, 1317 bp, Cricetulus griseus
ttggtggtgcccggctgcccgccgtgatgcagtggtccttgggccggcggtgggcatggatcgccctatttctggctgttgccgcggtgctgacccaggcggtgtggctgtggctgggtactcagaacttcgtcttccagcaagaagagatagcgcagcttgctcgacagtacgctggactggaccatgagctggccttctctcggctgatcgtggagctgcggaggctgcacccaggccacgtgctgccggatgaggagctgcagtgggtgtttgtgaacgccggcggctggatgggcgccatgtgtcttctgcacgcctcgctgtctgagtacgtgctgctcttcggcaccgccctgggctcccgtggccattcggggcgatattgggctgagatttctgacaccatcatctctggcactttccaccagtggagagagggcaccacgaaaagtgaagtcttctacccaggagagacagttgtacacggacctggagaggcaacggctgtggagtggggaccaaacacgtggatggtggagtacggccgaggtgtcattccatctaccttggcatttgcactggctgacactgtcttcagcacccaggacttcctcaccctcttctatacccttcgctcctatgcccggggcctccggcttgagctcaccacctacctctttggccaagacccctgaccagccaggcctgaaggaagacctgtggatggacaggagtgggcaggaccacattcatctacttgctggaactcatatgcacagacagcaccatacaccatgcagatattaagttcctactgtatgaggaaggtcatacatagttacacatccagacacagccctttgggagccagtgagacacatagagatgctaagatttgtatgtactgtaaggtcatgtactcatatccatccagagagggcccctacatatataagaagggggccagtcatgtttgaacatctatcacaagcttgactcactgactcaggcctttccagagcttgctgctggcattcagggctctgggattaaggattggggtggatgtttcattctgcctgatactctgatactacagtaggaatctcagtaaaggaaaagtggaactgcccttgggaggcccccttcacctgctgccatgatgtccttcccttcatctcccttttcctcaccatatgccttatctccattccacctcctgctatgcaagtgcccctgtggcttatcctccctgcccccctcagcaaccaactcagctgggaaagcagagaaatgtgtagaaggctaaaggga

SEQ ID NO: 5037 - DNA, 1316 bp, Cricetulus griseus
cggtgtgtgtgcgcgcctcggcagagggtctctaaaaccgatgtctgtgagcttgcctcctgacaccaaccagcctctatttcctggacgagcccgccgcccagggcgtgccagagcaggatcccgagtgaccggatgccgtgaggcgggccagatgccagcgccgctttcccaaaagatcggacaaaaaaaactgcaactagcagaatcacagcagcagcagatccctaaagacaggccaccctcatccctgggcctacagcggagcatctacttctccagtccagaggatcaccctgcccggctgggaccagagttttttgaccagccagcggtcaccctggcccgtgcatttctgggacaggtccttgtccggcgacttgctgatggaacagaactccgtggacgcattgtagagactgaggcatacttggggccagaagatgaagctgctcactcaaggggtggccggcagactccccgaaaccgtggcatgttcatgaaacctgggaccctgtatgtgtacatcatctatggcatgtacttctgcttgaatgtctccagtcaaggggctggggcttgtgtcctgttacgagcactagagcccctggagggcctggacaccatgcggcagcttcgcagcaccctccggaaaagcactgtcagccgtaccctcaaggaccgtgagctctgtagtggcccctccaagctgtgccaggccctggccattgataagagctttgaccagcgagacctgacccaagatgaggctgtgtggctggagcatggccccctggcgacaggcagcccagctgtggtggcagcagctcgcataggcattggtcatgcaggggagtggacccagaagccacttcgcttctatgtccagggcagcccatgggtcagtgtggtagacagagtggctgaacagatgtgtcagcctcagcaaacagcctgatggggcttttttattgtttaaaagtagaataaaaatcttatttgtggggaactgtccaagtctcagccagaatttgtgtgcatgcagttaattattcatctgggtcaggaaacctgggtacccgatatgtatggcaccaaagaggggagagtcgtcagtgtatgggtatatacacctaggagcaggaatgagttaaatgagtgtttggacactccagggcagctgcataagggggctcacaacctctgtaactctagctccagggtatgctttcttctgacctctgaggacacccacacacacaaaagcattaataaaaataaatatacatatatttttaaagtaaaaaaaaaaaaaa

SEQ ID NO: 5038 - DNA, 1316 bp, Cricetulus griseus
cgggctggcggcgactgcgggtggtggacctgcggagcggcggtcgcccacacctcgctccctcctcagccggcggatccttttgtctctccgagcggcgaaggtcgcagggccggcgcggcggctgcgggcgcacggacgcccgcgctcctaatcacttcctcggcctcagccgccgctgaacttgggctcgagaagccggcggaccgcgtccagtgccggagccggttagtctccactgccagataccatgggcaagcagaacagcaagctgcggcctgaggtgctacaggacctgcgggaacacacggagttcaccgaccacgagctgcaggagtggtacaagggcttcctcaaggactgtcccaccggccacctgacagtggatgaattcaagaagatctacgccaacttcttcccctacggtgatgcctccaagttcgccgagcacgtcttccgcacctttgacaccaacagcgatggcaccatcgacttccgggagttcatcatcgcactgagcgtgacctctcggggcaagctggaacagaagctcaagtgggccttcagcatgtatgacctggacggcaacggctacatcagccgcagcgagatgctagagatagtgcaggccatctacaagatggtgtcctctgtgatgaaaatgcctgaagatgagtccacaccggagaaacgaacggacaagatcttcaggcagatggacacaaacaatgatggcaagctgtccctggaagaattcatcaaaggtgccaagagtgacccgtccattgtccggttgctgcagtgcgaccccagcagcgctagccagttctaagggggaatgggctttgggacagttgcaaagaaacacaggcttgtcctgccatcttcagctttgcttgcaaaagtggattcctccgtgatctctatgaagaagatggagagtagacaggcaagcctttccagtgcatggctccacccccttgttcattttctctgaccaaagccgcttgcacgtatattccgtggtctccttttactctatgagttatgtgtacggtgaagtggactgtaacgtttaagccctctatttaatgccactgcctttgaagcatggtcccctgtggcctgtgattctccccctgccgccccaagtctggctgtgctgtggtatttatgcattcttgatttgcctgattccacaggagatacatgcatgcccaggactatggacatctgccctccgtgctgcgaatacagatgtttgtgtgtgctccatcctccctcttgattggtctggcatattaaagtgatcaaat

SEQ ID NO: 5039 - DNA, 1316 bp, Cricetulus griseus
ccagaaacagatcttgacttaattaaacggttgtcccaaccttgtccgcctcgacctaagtgacagtatcatgctaaagaatgactgcaactcaactacctccaacacctctcactcagccggtgctatgatataatacctgaaactctacttgaacttggagaaattcccacactaaaaacactacaagtctttggaatcgtgccagatgctaccctgcagctattgagagaagcccttcctcacctgcagattaattgtgcctatttcaccaccattgcaaggccaactatggacaacaaaaagaacccagagatttggggtatcaagtgccgactgactctgcaaaagcccagctgtgtatgaagtgcttgctgcagaatgatgtctcctcatcctttggaatgaggaacaccggcagcgaatccagttgctggagaccttggtttaccttcctatcggttttaccatagccttcattgtgcgtgtatgatagggagccattttttcaagaatatagagatgattctgtcagtgctgtgtcctcaaagcacaagtgtttaggtctttggaaattttaggtgagcctattattcaaaatagctttttaaagcgaaatttgagccaactcttccaagtgcccttcacattaagtctatttagaatcaggtttttaaaattaccgctggctaacagttttcatggtgtttgtcataactttttatctatttaattattcagtattttataaaacttgattttgaagaacaataagctatacgtatggtgggctgaaaggaaagaatcatgggctggtagcgtctcaggcctcctcttctgggaattaacacctatgggtgttgtgtgcaggtgtgaagtcagttgactagaaacacagccctgcatagtgtaccttcaactctaaatgagaaattttaacacctgatacacaaaagcaaaaagatcaaattgtgtttcttagaaaatgaaaagaaaaaaaagttaataaaggcaattacctcttttgaatacaacagtactattaactttttcatcaagaagtgttactgtttccaataatatgaagtgcctttatctgctcagacctaaagaacatttaaaaaagtgtaacacaggaatgattatgcttcaattcccgagtagttaaagtgctaactactacttgaaactattgtttacagattagtgatgggctgccagtgggctctggacatgtcgtagtaatctgtatttttgtatgtgatttctacttttatagactcattttaaaataaagtacatttttataaaaacaa

SEQ ID NO: 5040 - DNA, 1315 bp, Cricetulus griseus
tttccctttgttgttcgaggcccggccggcggcgtgagggccgcttccgggtcgcgctgccggaagcaggaagtggttggcccagcctcctggcccggcggctggtgtccccgaggcgggaggagcccgagagggcgcgggcccgcatggttaaaccactgttacagactcaagctcattcttccgaacttccctcggagacaaagctcctttctgccagtctggaccctctttttggagggatttcgttttggaagacatggatcttgctgctaatgagatcagcatctatgacaagctttcagagactgtcgatctggtgagacagacaggccatcagtgtggcatgtcagaaaaggcaatcgaaaaatttatcagacagctactggaaaagaatgaacctcagagggggccaccccagtaccctctcctcttagctgtgtataaggtcctcctaactctgggattaatcttgttcactgcctactttgtaattcagccttttagctccttagcacccgagccagtgctttcgggagctcacacttggcgctccttcatccatcacattcggctgatgtccttgcccattgccaagaagtacatgccagagaataagggcactcctctgcaaggaggagaggaagacaaacgtttcacagactttgacctctggtcatcaaggggctgtgagcagaacgagtcagagcccatccctgccaactgcactggctgtgcccagacattacccctcaaagtaacgctcccagaggacactccgaagaattttgagagactccgtcctctggtgatcaagacaggacagcctctgttgtcttcagagattcagcatttctcatgcctgtaccctgaagccacagagggcttcgctgaggggtttctcaccaagtggtggcgctgctttcctgagaggtggttcccatttccttacccatggaggagacctctgaacagatcacagattttacgggagctttttcctgtttttagccaacttccattcccaaaagatgcctccttaaacaagtgcttcctggtccccccggaacctgtggtgggcagcaagatgcataaggtgcatgacctgtttactgttggcagcggggaagccatgttgcagctcatccctcccttccagtgccgaaaacactgtcagtctgtggtcatgccgatagagcctggggatattggctatgccggtgctccccactggaaagtctacattgtagccagaggggcccagcctttggtcatctgcgatggaaccaccctctcagaactataggaaactact

SEQ ID NO: 5041 - DNA, 1315 bp, Cricetulus griseus
agacatggtgttgtcggagctggcggcgcgtctcaattgcgctgagtacaaaaactgggtgaaggcagggcactgcctgctgctgctgcgcagctgcctgcagggcttcgtcggccgcgaggtgctctccttccatcgcagactgcttactgcagtccccggccttggtcccaacgccacctgccgcggcggttcccgatgcaacccgcgagctcgccagtttcagcctcagtgtcaggtgtgcatagagtggaaacgtgagatcttgaggcatcacatcaacagaaatggagacgtgcactggggaaactgccggcctggcctctggcctgtggacgcttgggaggtagccaaggccttcatgcctcgaggactggcagacaaacgaggacccgaggaatgtgatgcagttgctcttttaagtctcatcaattcctgtgatcacttcatggttgaccggaagaaagtcacagagctaattaagtgtcggaatgagataatgcactcttcagagatgaaggtatcatctacatggcttcgggattttcagataaagattcaaaattttctgaatgaattcaagaatattccagagattgtagcagtacattccagaatagaacagctgttgacatctgactgggctgtgcacattcctgaggaagatgaacgagatggatgtgaatttgaaatgggaagttacttgagtgtgagccaaatccatgaaattgaaatggaattgctgaaggaaaagctgcaagagatgtatcttcaagcagcagaagaagaggtgttgccagaagagatctcaaatcaactggatgtggtaaaagcgtttctgagaaacaactcagatctcagaaatggccttacagaagacatccagaagctagacagcctccatctacagcatcaaaaagaaatttcagaggctgatgagagacagacacctgaaagagaggcttgaggtgatgccattagactgcttcgtgtcgcctccagactttgctgtgttctcaaaactgcctagaagaaatgttccatgccaaggctcagcaaagatgagatcgctccttctcctggtcagctgcctgcccaagatggactctgcagactagatgggggggggactggtatttggcatatatttgactttagaacccaaatgaatgcaaatgtgcctatagcttgggttaatttcatttcctggttgctgtttgttttcagtctttatgttttctttctccctttgtctagttagtttgtctttatcaattcagcacacacagtatcaacccctgtgccagacattgaa

SEQ ID NO: 5042 - DNA, 1315 bp, Cricetulus griseus
gccgccagcatgcgcgccgaggcccgcggtggcctggagcgcttctgcagcgcgggcaagggccgggggctccgcgcgctgcgacccttccacgtgggcgacctcctcttctcctgcccggcctacgcctgcgtgctcaccgtgggcgagcggggccaccactgcgagtgctgcttcgccaggaaagaaggactgtcaaaatgtggacgatgcaagcaggcgttttactgcggtgtggaatgtcagaaagaagactggcctctgcacaagctggagtgctcatccatggttgtttttggggagaactggaatccttcggagacggtgcggctcacagcaaggattctggccaaacagaaaatccacccagagaggacgccttcagagaaactgttggctgtgaaggagtttgaatcccatctggacaagctagacaatgagaagaaggacctcatccagagtgacatcgccgctctccatcagttctactccaggcacctggagttccccgaccacagcagcctcgtggtgctcttcgcccaggtgaactgcaatggcttcaccattgaagacgaagagctctctcatttggggtcggcgatattccctgatgttgcattgatgaatcacagctgttgccctaacgtcatcgtgacctacaaagggaccctggcggaagtcagagctgtacaggagatccaccctggagatgaggtgttcaccagctacatcgacctgctatatccaacagaagacaggaatgaccggttaagagactcctatttctttacctgtgagtgccgggagtgcaccaccaaggacaaggacaaggccaaggtggagatccggaagctcagcagcccaccacaggcagaagccgtccgagacatggtcagatacgcacgcaacgtcattgaggaattccgaagggccaagcactacaaatcccccagcgagctgctggagatctgtgaacttagccaggagaagatgagctccgtgtttgaggacagcaatgtgtacatgttacacatgatgtaccaggccatgggcgtgtgcctgtacatgcaggactgggaaggagccctgaaatacgggcagaagatcatcaagccttacagtaagcactaccctgtgtactccctcaatgtagcctccatgtggctgaagctgggaagactgtacatgggcctggagaacaaggccgctggacagaaggccctgaagaaggccattgccatcatggaagtagctcatggtaaggaccatccatacatctccgagatcaagcaggaaatcgagagccactgactgc

SEQ ID NO: 5043 - DNA, 1314 bp, Cricetulus griseus
gcgattgcagctctagctgcttcgtatggctcgggttcagggtccgaatcggactcggacagtgagggcagtcggtgtccgctgccagccgccgactctctcatgcacctgaccaaatcgccttcagccaagccctctctgacagtggcggtagattcggctccggaggtggcggttaaggaagatttggagactggagttcaccttgaccctgcgatcaaagaagttcagtataatcctacctatgagaccatgtttgcccctgagtttggaccagaaaatccctttagaacacagcaaatggctgcccctaggaatatgctttctggatatgccgagccagcacatatcaatgactttatgttttgagcagcaaagaagaacatttgccacatacggctatgcactggacccttcactagataatcaccaagtgtctgctaaatacattggttctgtggaagaagcatgtagccaaaccatcagaagaagaacaaaaggaattggatgagatcacagcaaagaggcagaaaaaaggcaaacaggaagaggagagacctggggaggagaagacaatcttacatgttaaagaaatgtatgactatcagggcaggtcctaccttcacatacctcaggatgttggtgttaatctacggtcgtctgtgccgcctgaaaaatgttatcttcccaaaaaacaaattcatgtgtggtctggacacacaaagggtgtcagtgcagtcagactgtttccgctttcgggacatttgttgctgtcttgttccatggactgtaaaattaagctatgggaagtttatggagaccggcgctgtctgagaacatttattggtcacagtaaagccgtaagagacatctgcttcaacactgcaggaacacagttcctcagtgcagcctatgacaggtacctgaaactctgggacacagagacgggacagtgtatatcaagatttacaaatcgaaaagtgccctattgtgtcaagttcaatcctgatgaagacaagcaaaacctctttgtggccgggatgtctgacaaaaagattgtgcagtacaccattgtttttgtggatgagaatcgacggtttgtgagtacgtctgatgataagagcctacgagtttgggaatgggataatccctgtggattttaagtacatagcagaaacccagtatgcactcaatgcctgcagtgactttgtctccaaatggaaaatggctagcatgccagtcaatggataaccaaatcttaatttttggagcacaaaacagattcagattaaataagaagaaaatttttaaggg

SEQ ID NO: 5044 - DNA, 1314 bp, Cricetulus griseus
caggaagatggcggcttcctagaaccctgtgattgactggctgtggttcctaggttgcagagtggaacctggcggtgtgatctcgtgcgagctttttgtcgttgtggtcggacatcgatccggcttgctgcagttccaggatcctggcttccgcgatcccctctccatccaagcacccagcagccatggaggtggctgaggccaacagccccacaggaggaggaagaggaggaggaggaagaaggggaggagccgactcctgagccccggcctcacactcgctccaaccctgagggggcggaggaccgggccctgggagctcaggccaatgtgggcagtcgcagcgagggtgagggtgaggcagccagtgcagacgatggggcagccagtgtcccaggagctgggcccaagccctggcaagtaccagcaccggcacccgaggtccagattcgaacaccacgggtcaactgtccagagaaggtgatcatctgtttggatctttcagaggagatgtctgtgccaaaactggagtcttttaatggctccaggacgaacgccctgaacgtgtctcagaagatggttgagatgtttgtgcgcacaaagcacaagattgacaagagccacgagtttgcactggttgtagtgaacgacgactctgcttggctgtctggcctgacctctgacccacgagagctctgcagctgcctgtacgacctggagacagcatcctgttccacgttcaatctggaaggcctcttcagtctcatccagcagaagaccgagctgccagtcacagagaacgtgcaaaccatccctcccccctatgtcgtgcgcactatcctggtctacagccgcccgccctgccagccccagttctccctgactgagcccatgaagaagatgttccaatgtccctacttcttcttcgacatcatttacatccacaatggcgccgaggagaaggaggaggagacgaggtggaaggacatgttctccttcatgggaagcctggacgccaagggcaccagctacaagtatgaggtagcactggctgggcctgcccttgagctgcacaactgcatggccaagctgttggcccatccgctacagaggccctgccagactcacgcgagctacagcctgctggaggaggatgaggaagctggggagggtgaagccaccgtgtgacctgtgacatcccatgcccgctcctactgtgtctgctgtaaattcattcttcctgggaccactttgtcaccagaataaaaaatactgaggcttctgaaaaaaaaaaaaaaaaaaaaaaaaaaaaaa

SEQ ID NO: 5045 - DNA, 1314 bp, Cricetulus griseus
ggcggcggcggcggaggcggaggcgggggtctgggcggcggcctgggcaatgtgctcggcggcctcatcagcggagctacgggaggcggcggcggcagcggtggaggcggcggcggcggcggcctgggaatgggaggtggcggaggaactgccatgcgtatcctgggcggggtcattagcgccatcagcgaggctgctgcgcagtacaacccggagcccccgcccccacgtagccatttctctaacactgaggccaatgagagtgaggaggtccggcagttccggagactttttgcccagctggctggagacgacatggaggtcagcgccacagaactcatgaatatcctcaacaaggtcgtgacccgacacccggatctgaaaactgatggttttggccttgacacttgtcgaagcatggtggctgtgatggatagcgacaccacaggaaagctgggctttgaggagttcaagtacctctggaacaacattaaaaactggcaggccatatacaaacgctttgatgttgaccgatcggggaccatcactggcaacgaactcccaggggcctttgaggcagcagggttccacctgaacgaacatctctacaacatgatcatccggcgctactcggatgagagtggtaacatggacttcgataacttcatcagctgcttggtcaggctggacgccatgttccgtgctttcaaatctcttgacaaaaacgacactgggcagatcgaagtgaacatccaggagtggctgcagctgacaatgtattcctgaacagagctgcctcctcacagttcactatggagccacctcgaatcctgttcctgtctgcagccgtgtttttatagtcatgtcctgctacccacaggccttcctgtctcctgtcttgtaccccagcttcccagtcagcagccggagctcaacacgccccagcttgccatacccgagttaccccgggctcgaagacaagactaagactagctctctctgctgaagggtcaccccaccccacccaccccacacactccgttacctccatcctgtctgtgtgccaagcctagcactcctgttgcttccatgtcccaagggccctgtgtcagttctgggaggatcatgcctgtccctacacacaccacgccccgttatgcactcattcagttacctcccaggcagccaaatgaactccaggccttggcaggcccacacaccctagtgcctcgcctactctttttccccagctgtcaggcccaggagtaaataaactctccacttgctgcttcctatgggctctgcctcctgagt

SEQ ID NO: 5046 - DNA, 1313 bp, Cricetulus griseus
caccctcgcgaagcccccacccaggtctcagcggactttagggagaagtgagtctggacctcgtgacccggccgtcctgggtgtttgctcagattccgctcggccgcctcatggcagcgctgagctcgctgctgctggccgcgctgctgtgggcccctgccgaggccctgagctgctatggagactccgggcagcctgtggactggttcgtggtatacaagctgccagctcacagcgggtctggagatagttcggggaagggtttgaagtataaatacatggaccagagctccgagggttggcgcgacggcgtggggtacatcaacagctcagagggagccgtgggccgcagcctgctgccgttgtaccgggacaactccagccagctggccttcctactctacaacgaccagcctcctaaatccagctcagctccggactcttccagccgtgggcatacaaagggtgttctgctcctggaccaagaagggggtttctggctgatccacagtgtgccacgcttcccaccgcctgtgtcctctggtgcatacagctggcctcctaatgctcacacctatgggcagaccctactctgcgtgtcctttcccttcgcccagtttctcaagattggcaggcagctaacctatacctatcccctggtctatgactacaagctggaaggcatttttgcccagaaattacctgacctacaagaggtgatcaagggtcaccatgccctccatgagccctggaatagtagtgtaatactcacttcacaagctggggccaccttccagagctttgccaaatttggaaaatatggagatgacctgtactccggctggttggcagcagtccttgacaccaacctacaggtccaattctggccaaattctccaggcaccctgcattccaactgctctgggacccatcagattcttaatgtgaatcagataggcttccctggcccatctgggccaacttttaatgccacagaagaccactccaaatggtgtgtggcccctcaagggccctgggcctgtgtgggtgacatgaatcggaacaaaggagaaatgcaccgaggtgggggcactctgtgtacccagatgccttccctttggaaggccttgcagtctctggtgaaggcctgggagccctgtaaagagtttcgagacagggtttctctgtatagccttggaggagcctaccctggcactcgctctgtagaccaggcaggctggcctcgaactcacaagatatccatccacctgcctctctgccttccgagtgctgggattaaaggcatgtgccac

SEQ ID NO: 5047 - DNA, 1313 bp, Cricetulus griseus
aggttttggttctcaccatggccatcactcagtttcggttatttaaagtttgtacctgcctagcaacagtgttctccttcctaaagagactaatatgcagatctggcagaggaaggaaattaagtggagaccaaataactctgcccacctcagttgattattcatctgtcccgaagcagacagacgtggaggagtggacttcctgggatgaagacgcacccacaagtgtgaagattgaaggagggaatgggggcgtggcaacacaacaaaattctctggaacaactggaacctgactatttcaaggacatgacaccaaccataaggaaaactcagaaaattgtcattaagaagagagaaccattgaattttggtatccccgatggtaacacgggtttttccagtagattggcggccacacaagacatgcctttcattcatcaatcatcagaattaggagacttagatacctggcaagaaaataccaacgcgtgggaagaggaagaagatgcagcctggcaagcggaagaagttctgaggcagcagaagatggcagacagagaaaagagagcagcagagcaacaaaggaggaaaatggagaaggaagcccagcgtctgatgaagaaggagcaaaacaaaatgggtgtgaaactctcgtaaggcgcgctcgcctgccgtgtgccggggccaggaggagaagtctgggcctgcggcctacaccacaagtgtttgtgtggactggagacagttttcagagtacaaacgcctgcttgatcttcatgtgcttattgagccatccaggacaccaggattctcccacaataccttgtactgatagtaatcaagactcaaaacacaaatcagtgagacaactattttcttcaacatgttccaaatatcagacagttgtttgctgtatcgaagttacttcaagtggaatattccagaccagtacctctccagctagtgttcctagctgaataaattgggtgtaaataattttatggtagaagagttctctgctatctattacactctcattcattgtgcataattataaagtaattttaatagcctttgtttccatgatcacttgacataaattaaacaaagtgttaggggggctttataccctccttaattttgttggcaggtagtgttgacatacattttctataatttgaactggcattgtgtggtacaacattaaggaatatgatgatttggattctcaagaaaataacattaaatgcaataattttatttatcaaaaaaaaaaaaaaaaaaaaaaaaaaaaaaaaaaaaaaaaaaaaa

SEQ ID NO: 5048 - DNA, 1313 bp, Cricetulus griseus
gccagtgaacatggcggcgggctctgcgtcctccctgggcggcgccgcgtggcccggctctgaggctggggacttcttggcccgctatcgtcaggtgtccaacaagctcaagaagcgcttcctgcggaagccgaacgtggcggaagccggggagcagttcgcacagctggcccgcgagctgcgcgcccaggagtgcctgccctatgccgcgtggtgccaactggctgtggcgcgctgccagcaggcactcttccatgggccgggggagacgctggccctcaccgaagccgcccgacttttcctgcggcaggagtgcgacgtgcgccagcgcctgggctgtccggccgcctatggcgagcctctacaggccgccgccagtgccctcggcgccgctgtgcgccttcacctcgagctgggccagcctgccgccgccgccgctctgtgcctcgagctggccgccgcccttcgcgccctgggccagccggccgccgccgcaggtcactttcagcgcgctgctcagctgcacctgcccctgatgccactggctgcgctgcaggcgttcggcgacgctgcctcctgccagctcctggcgcgcgactacaccggcgccctggcgctgtttacacgcatgcaacgtctggcacgggagcatggcggccacccggtacagcactccgagctgccactgccttcaccgcctcttcctgggctccaaccgcccccaccaggaacccagccaagacctggctcggccccgaccccgcccctcccgctgctcgcggaccacgccccaggctctgctgcaccttctcttggtacactgggtgccttcgcagacattcttgtcaggtgcgaggtgtcccgcgtgctgctgctgctgctcctgcaaccaccgcccgcaaagctgctgcccgagcatgcccagaccctggaaaagtactcctgggaggctttcgatgcccacggccaggataccagcggccagcttcctgaggagctgtttttgcttttgcagtccctggtcatggctgcccatgaaaaggacacggaaggcatcaagaagctgcaggtggagatgtggccgctgctgactgctgagcagaaccacctccttcacctcgttctacaggaagccgtctctccctcaggccagggggtctgataagtcacctcttaaggctgaaggagattccactgtgtaacaatctgctggctttatgcattggtctgtggctggatactgcgttgattcctttccctagctgttctaagtatagagacaataaacacgggaggacagatgttcctttggc

SEQ ID NO: 5049 - DNA, 1313 bp, Cricetulus griseus
agagtggaagcgtttggaacctgcacagagggacctctacagggatgtgatgctggagaattatgggaatgtgttctcactggatggtgaatccaaaactggaaatgaccaagtaatctctgaaggcatggggtcacatgagatgatactgggacgattccaaactgatgtttctcagggtcttaagtttggagaagcctataaacatgaagtcagtctgaatagacagctggggaactcctctgttggaagactgaataggaaaatacaggagtttcaccaagtgacagttgagggaaagctcgcccatatgggacaaagaaatgacaagaataatgagtttgggaacagcttcactgtgaattccagcctcacttcacatcagagatttcccatgggacacagaccacacaagtgtgatgaatgtagcaagagttttaatcgaacttcagaccttattcaacatcagagaatccacactggggaaaaccatatgaatgtagtgaatgtgggaaggccttcagccagagcgcacatcttactcaacaccagagatatgagtgtagggattgtggggaagaccttcagttgtagctctgctctcattctgcatcagagaacccacactggggagaagccttatgagtgtaacgagtgtgggaagaccttcagttggagctccacccttactcatcatcagaggatccatactggcgagaagccctatgcttgcaatgagtgtgggaaagccttcagtaggagctcaacacttattcatcaccagaaagaataccacactggggagaaaaccctacgaatgtagtgagtgtgggaaggccttcagccagagctcacacctctatcagcaccagaggatccacactggagagaagccctatgagtgtatggagtgtggaggaagtttacctacagctcaggccttattcagcatcagagaatccacacaggggagaacccctatgagtgcagtgagtgtgggaaggccttcaggtatagctcagctcttgttcgccatcagaggattcacactggagagaagcctttgaatgtaatgggtgtaggcagaaattctcccagagtttctcctgaattaaacatcagagaatccattttttgctttttagagacagggcttctctgtgtagccctggctgccctggaactagctccatagaccagactggcctcgaactcagggatccacctgtctctgcctccaagtgctaggattaaaggcatgcaccaccatgcccgtgtcctggaactagctcttgttagaccaggctggtctt

SEQ ID NO: 5050 - DNA, 1313 bp, Cricetulus griseus
gcggtagcgagcaggcgaggatccgccgccccgcgaggccatgaaggtgaagaagggcggcggcgggaccgggacgggggcggagcccgctccaggggcctcgaaccggagtgtggaacccacgcgggagcctagggcagaatccgagtccgggtccgagtcggagccagaaccaggcccggggcccagggtgggaccgctgcagggcaagcagcccatcgggccggacgacgtgctggggctgcagcggattacgggcgactacctgtgctccccggaagaaaatatctacaagattgacttcgtcagattcaagatccgggacatggactcaggcactgtcctctttgaaatcaagaagccccctgtctcagaacggttgcccatcaaccggcgggacctggaccccaatgcagggcgctttgttcgctaccagttcacacctgccttccttcgcctaaggcaggtgggagccacggtggagttcacagtgggagacaagccagtcaacaacttccgcatgatcgagaggcactacttccggaaccagctgctcaaaagcttcgacttccactttggcttctgcatccccagcagcaagaacacctgtgaacacatctatgacttcccgcctctgtctgaggagctaatcagcgagatgattcgtcacccatatgagacacagtccgacagcttctacttcgtggatgaccggctcgtgatgcacaataaagcagactattcctacagcgggacaccctgacccccacgctgcccctgcctatgaggctctggcctagcccttgtgctgtgacctctccaacatcatctcaacttgggaccggctccagtggctctggaccctgagtcagtgttgggaggaagggtgcccagcatccctaggccaagcctctgaagctgggggagaactgtttgccactatgttctggaaggcctcctggaagcagaggacttctggatacctccttggtccactgggcctgagtttcagaatagtgttcccttcttgaggctgtgactagatcaggttagggatccattccctatcccctgcccaccacctccaggctatttatagttgtcagtttatagacgaagatccatgatgggtgccctggtctcagccctggcttcctccatcaaggaccaaaacactgcccaaggtgtgagagggacgggtcctattgcagcctgtgggaggacctggacaaactgtatatagttttcaataaaactactttcactaaactaaaaaaaaaaaaaaaaaaaaaaaaaaaaaaaaaaaaaaaaaa

SEQ ID NO: 5051 - DNA, 1313 bp, Cricetulus griseus
cgaggcttagtaaagcacctagtatttttggttgggtcaaagacaaggattctcaaccatgccagaaatagaagcaagtatcagagataccgaactattttcaccaccctctgatgttcgaggaatgacaaaaacttgacagaacagcttttaaaaagacagtgtccatcccggtgcttaaagtgagaaaagaagtggtcaaacagactgatgcgagccctcaagagggtggccctgcagcgtccaggcgtaaagcgagtcattgaggatcccgaagatggggatagtagactcattatgctggatccctacaaaatgctcaccgttgactcatttgagaaagcagaattcgctgttctagaggaacttgatgtcaacccacagttatctgaatacaatttggaactaacttatgaaactttaagtcagaagaagttttgagggctgtgcttcctgagggtcaagatgttgacctcagggttcagcagggttggacatattgcacacctgaatctccgagatcatcagctaccattcaagcatttaattggccaagttatgatagacaaaaatccaggaatcacctctgcagtaaataaaaccagcaatattgacaacacataccgaaatttccaaatggaggtgctgtctggagaggagaatatgctgaccaaggttcgagaaaacaactacacatatgagtttgatttttccaaagtctattggaatcctcgtctttccacagaacatggccggatcactgaacttctcaatcctggagatgtcttgtttgatgttttttgctggggttgggcccttttccattccagcagcaagaaaaaactgcacagtatttgccaatgatctcaaccctgagtcccataaatggctgttgcacaattgtaagctgaacaaagttaaccaaaaagtaaaagtctttaacatggatggaaaagactttctccagggaccagtcagagaagagttaatgcttcggctaagactgccaactgaagaaaaaccctctatccacattgtcatgaacttgccagcaaaggccatagagtttctcagtgttttcaaatcacttctagatgggcagccgtgcagcaatgagtgccttcccacagtgcactgctactgtttctccaaagatgctaatcctgctaaggatgtttgtcagcaagctggagccatgttaggcatttccttggaggcaagtagttcagttcacctcgtgagaaatgtggcccctaacaaggaaatgctatgcatcaccttccagattcctgctgcaactctctacaagaacc

SEQ ID NO: 5052 - DNA, 1312 bp, Cricetulus griseus
gtcacgtgccggctggccgggaaaatggcggcttcgggagagagcggggtttcgggcggaggaggcagcacggaggaggcgtttatgaccttctacagcgaggtgaaacaaatagagaagagagattcagttctaacgtccaaaaatcagattgaaagattgactcgtcctggttcttcttactttaatttgaacccgtttgaggttcttcagatagatcctgaagtgacagatgaagaaataaaaaagaggtttcgccagttgtctatattggtgcatcctgacaaaaatcaagatgatgctgacagagcacagaaggcttttgaagctgtggacaaagcttacaagttgctactggatcaggaacaaaagaagagggccctggatgtaattcaggcaggaaaagaatacgtggaacacactgttaaagagcgaaaaaaacaactaaagaaggaaggaaagcctacaaatgtagaggaagatgaccctgaactgttcaaacaggcagtctacaaacagaccatgaaactgtttgctgagctggaaattaaaaggaaagagagagaagccaaagaaatgcatgaaaggaaacgacagagagaagaggagatcgaagctcaagagaaagccaagcgagaaagggaatggcagaaaaacttcgaggaaagccgggatgggcgagtggacagctggcgaaatttccaggcaaatacaaaggggaagaaggagaagaagaatcggaccttccttcggccgccaaaagtaaaaatggaacagcgagagtgaccctcagggccacagcctccccggctgcctccttccgcttcaaggactcattctttctccacctccacccgacatagagtagcgtttgctttttagtctattttgttttcaatacaatttaatatcaatcaaagtaatttgtacttgaggggaggggcttggtctaaccttcccctctcctcgcccacggagccaccaggatcggaaggtgccactgactcgtgctgccttctcttcccacagctgtaacttaatgttttgtattcactgaattgtggtggctcgaaggtcatgtatagtttgtggaaaccctccaattaaacgtcttgcttacagtggtgttgccgtgactccagaccagctttggccaccgtgggaacagccacttaaacctgttcactttccaaagagttagccatcttccagccagtcccactgtgtcctcgcttgtctgcattcattagtggtaatattcttttacgtataataaatttttatacccaaaaaaaaaaaaaaaaaaaaaaaa

SEQ ID NO: 5053 - DNA, 1312 bp, Cricetulus griseus
ccccgctgcagacgagcgtcatggctgcttggagaccgcctaaggttgaggagctgctggccgaggcccggcgggccttcctggaggagttcggagctgagccggagctggccgtgtccgcgccgggccgcgtcaacctcatcggggagcacacggactacaaccagggcctggtgctgcccatggctctggagcttgtgaccgtgctggttggcagcccccggacagatgggcttgtttctcttctcaccacctccaagaatgcagatgagccccagcgactgcaattcccactgcccacagccctgcggtccttggagcctggaaccccacaatgggccaattatgtcaagggagtgattcaacactacccagctgctcccctccctggcttcagtgcagtggtggtcagctcagtgcccctggggggtgggctttccagctcagcttctctggaagtggccacctacaccttcctccagcagctctgcccagactcgggagccatagctgcccgggcccaggtgtgtcaacgggctgagcacagcttcgcaggggtgccctgtggcatcatggatcagctcatcgcactgctggggcagaaaggccatgcactactgattgactgcaggtccctggaaacaagcctggtgcctctgtcagaccccaagctggctgtgctcatcactaactccaatgtccgccatgccctgggctccagtgagtatccgattcggcggcgccagtgtgaagaagtggcccaggctctgggcaaggagagccttcgagaggtgcggttcgaggagcttgaggcgggcagggagctgataagcaaggaaggcttccggcgggcccggcacgtggtaggcgagatccggcgaacagcccaggcagcggctgctctgagccgtggagactatagggcctttgggcgtctcatggtggagagtcattactcactcagggatgactttgaggtaagttgccctgagctggaccaattggttgaggctgctctctcggtgcctggagtctatggcagtcgcatgacaggtggtggctttggtggctgcacagtaacgttgctggaggcctctgctgcttccctcgccatggatcacatacaggagcagtacagtggcacagccaccttctacctctctcaagctgccgacggagcccaggtgctgagcctgtgaggcgttcctgcgcctgatggacacacagacgtagggcggaggcagcaggtgtacgctgcggtctgcctctggcatcctcattctacagctgggtgcttaataaacttgtgcct

SEQ ID NO: 5054 - DNA, 1312 bp, Cricetulus griseus
  modified_base (1190)..(1190): a, c, t, g, unknown or other
gttccttcttcagctcctgcaggagcctcagaacgagcacatgatctgctggacatctaacaatggggagttcaagcttctgcaagctgaggaggtggctcgtctctgggggattcgaaagaacaagcctaatatgaattacgataagctcagcagagccctgagatactactacgtaaagaacatcaattaaaaaagtgaatggtcagaagtttgtgtacaagtttgtctcttatccagagattttgaaaatggatccactgacagtaggcaggatagagggagactgtgaaactttaaattcccttgacgccagcagttccaaagatgctgagagtggggcaaaggaacgggcacctcagcctgcagccaggacatctagtcgcaatgactacatacattctggttttgtactcttcattttactctcaactctttgaacacctccaataagaagcttttcaagtcaatcaagatagagaatccagctgaaaaactggcagagaaaaaaactcaggagccaacaccatctgtcatcaaatttgtaacaacacctgccaaaaagccaaccatcgaacctgttgctgttaccttttcaacaagcccaagtatttctccctcttctgaagaaactatccaagctttggagacactggtttctcccacactgccttctctggaagccccagcctctgcatccattctggctaccacctttaaccccactcctccagttccatccgtaccccttcccccaaaggagcctcctaggacgccttctccaccactgagttctaacccagacattgacacagacattgactcagtggcgtctcagccaatggaacttccagagaacttgtcattggagcctaaaaatgaggattcagctgtgccagaaaaggacaaaacaaataactcctcgagatccaagaagcccaaagggttagaactgacacccgcccttgtggtcacaggcagtgaccccagccccctggggatcttaagtccatctctcccaacagcgtctctcacaccagcacttttttcacagacacccatcttgctgactccaagccccttgctctccagtatccacttttggagcactctcagcccattcgctcccctgagcccagccagactgcaaggtgctaatacgcttttccagtttccttctgtgctcaacngtcatggaccattcactctgtctagcctggatggaccttccactcccggcccgttttctccagacctacagaagacataacccttgcagttgtggactaagaccaaggaactaagaaacaga

SEQ ID NO: 5055 - DNA, 1312 bp, Cricetulus griseus
agctctgaagataatgtaaggaggaaagtggggtccacagagagagcaagtgctcgacagcaccagactgctcctgcagcctctccagcaccccatgtaaagccagtcaaatgtgtcactcctgagaggacaagatgccacagcactcaaccctctgttgtagaagagactggagcagtaaaaagacagctgaaaactcagaagaaagtgaggctgtctcccggcagaaagaagaaatcaggcagtgaagccacagactcagatgcttctgaaaggatgcatatttggtgtctggaaggaaagagacgtagcagcatcatggagttggatgttattctgtctgtatttgagaaaaccttcctggagtataaacaaagaatagaatctgaaccatgtagtcaagctgtcaacaaaatttattttaaatataaaaggacaactccatcagaatgcttaaagaagtccaggtgctgaaagctctgaagagaaagaacaccaagatcatttccaacatggagaagaaacggcaacgtttgattgaagtccaggatgaactgcttcaattagaaccacaactgaaacaactacaaacaaaatatgaccaccttacggagagaaagtcgtcacttaagaattccacaaatttcttatctaatttaaaacagctgtatcaagactattcagaagttcaagagaaagaaccaaaggaaaaggagaagtatgactcatctagccttccagctctattgtttgaagcaagaacggttctgggagccaaaaaacacctgaaaaccatcaactatcagctggggaagctccttgagcaggaatgagaataaactaagtgataaaacagttactataaataggtccaataataagttaatagaatttggtttgttacagtgctgggaattaaatgcagggccctacacatgataggtaagtattctacccttgggctatagccccagccctaatttaacatttatgtcctaaacctcaggcttcaggcaaatggtagcctcattatgtaagtcctgtccacagttagctgctctgtaatgcttctataattagttcgtcaggaatatcgtccattgaagactcctgtctgcagcatcagcgaattcagcatcttctgtagcttctaagaagcaggcatcatcttggtcatcccagccagcatcagaaaagctgtctggtaacagattacttgatggtgggttttgagaattcttagtcagtgagttgctggtttcacctacttcatcaggagtgaactcctcctttattttgatgagaaagagga

SEQ ID NO: 5056 - DNA, 1311 bp, Cricetulus griseus
gggcggggttgcaagactgcgggctcggcagccaccgctgtgcggtgaacaaacgcggggctggcggatcgcagcggccctcggagagcgcgagggaaccgggagccgctgggaccccggctgcgcgcctttcggcccggccgggagccgcgccagttggcgtcccaggccgagcgcggctcgcctccctctcagcgtttatatgtccgctgtgcagccagcgggtatgaccgatccaccagaggcgccgccccctgcacttgcaggccgcggatgaagaagaaagtccgtccccgctcctctcagagcgagtacgtggctcacagcagggagttgaccaggggaaggaaactgtcccatagcaacgacattgaccgagctggaggaagtgaccacgatcgaggaggggacccagactgaggaggtgaccgtggccgaagaggtgacccagaccgaggccatggcccaaattgaagagatggttcagacggaggaaatggaaacacccgtgctcaatgtgaccgtcacccacagcaatgatcgatatgaacttcttgttaccccacagcaggatcatagtgaaccaattgtccaagacctagctgagcttgttgaagaggccacaggggttccggtaccttttcagaagctcatatttaagggaaaatctctaaaagaaatggagacaccattgtcagcacttggaatacaaaatggttgccgagtcatgttaattggagaaaagaacaatcctgaggaagagcctgagttaaagaagctgaaagacctggaggtatctgtagagaagacagctgaccacctggaagagcttaataaagagctttctgacattcagcagggttttctggctaaggaagttgaagcagaggttctttacaaacttgataggaaagtaaaggccacaattgagcagttcatgaagatcttggaggagattgacacaatggtactaccagaagattttaaagacagcaggctaaaaaggaagaatttggtaaaaaaggttcaggtgttcctagctgagtgtgacatggtggagcaatacatctgccaagagacacagcgactgcactcttcagactttgcccttgatgaatgaagtgcggtagagagtggctatgctgacctgaagtgcagcttcacagctctgccctgtcttgaacagaagctgcttgtttcttccgggctgccagaggcaactggccaaatgtcactttccctacttctccatcggttctgaatgaaaaagtactgtctttgcaacctagaagtagagttcctgctttctca

SEQ ID NO: 5057 - DNA, 1311 bp, Cricetulus griseus
ttggggatggtggaaagcagcagacataactggagtggcttggacaaacaaactgacattcagaacttgaatgaagagaggattttagcattacagctctgtgggtggataaagaaaggaacagatgtagacgtggggccgtttttgaactctcttgtgcaagaaggagaatgggaaagagctgctgctgtggctttgttcaacttggatattcggcgagcgatccaaatcctgaatgaaggggcatcttcagaaaaaggagacctgaatctcaatgtggtggcaatggctttatccggctatacggatgagaagaactccctgtggagagagatgtgcagcacactgcgattgcaactccacaacccctatctgtgtgtcatgtttgcattcctgacgagtgaagcaggagcttatgacggagttttgtatgaaaataaagttgcagtacgtgacagagtggcatttgcttgtaaattccttggtgatactcagttaaataaatacatcgaaaagctgaccaacgaaatgaaagaagctggaaatttggaaggaatcttgcttacaggcctcactaaagatggagtggacttgatggagagctatgtggatagaactggagatgtccagacagcaagctactgcatgttacaggggtcacctttagatgttctaaaagatgaaagggttcaatattggattgagaattacagaaatttattagatgcctggagattttggcacaaacgagctgaatttgatattcataggagtaagttggatcccagttccaagcctttagcccaggtatttgtgagttgtaatttttgtggcaaatcaatctcctacagttgctcctcagtgcctcaccagggaagaggctttagtcagtatggtgtgagtggctcaccaacaaaatcgaaagtcacaagttgccctggctgtcgaaaaccccttcctcgatgtgcactttgcctcattaatatgggaacacctgtttctagctgtcctggtggatcgaaatcagatgaaaaagtggacttgagcaaggacaaaaagttagctcagtttaacaattggtttacctggtgtcacaattgtcggcatggtgggcatgccggacatatgcttagttggttcagggaccatgcagagtgccctgtatctgcatgcacgtgtaaatgtatgcagttggatacaacaggaaatctggtaccagcagagactgtccagccatgaaatgttgtacctaaagagaaaccttcaaatgtggagtttttaaatagatgtccttcatagttcagaaacata

SEQ ID NO: 5058 - DNA, 1311 bp, Cricetulus griseus
ggggccgcggctgggttgaatcggtgtctccaggggcctgggacctaggctgcgacgaggtgaggcgaggcggcgttgctcggtgggcaccatgtcgaggcaggcgaaccgtggcaccgagagcaagaaaatgagttctgagctatttacgctgacgtatggagcgcttgtcacccagctgtgcaaggactatgaaaacgatgaagacgtgaataagcagctggacagaatgggctataacattggagtccgactaattgaagattttttggcacgttcaaatgttggaagatgtcatgattttcgggaaactgcggatgtcattgctaaggtggcattcaagatgtacttaggcatcactccaagcatcacgaattggagcccagctggcgatgaattctccctcatcttggaaaataacccgttggtggactttgtggagcttcccgatagccactcatcccttatttactccaacctcctgtgtggggtgctgcggggagccttggagatggtccagatggctgtggaagccaagtttgtccaggacactctgaagggagatggtgtgacagagatcaggatgaggttcctcaggcggattgaagacaatcttccagctggagaagaataagcagctctaggacttggggcagccaggagcagcacctgctggggtgagaaaggtggctgctccctctgcccctggaactcagtgacttttcagccgatgttatatattcttctaaccttatttccattcttcatgctaataaagagcagacgggtactttgcttgccctacgagtgtgcacttcagagggggattctctgctctatttcccctcagaggggcaggaggtacttgccctggttggactaaaaaagttcaaacattttacattcctgtgaattttccaaagcaaaagccactttgaccccattaagagacaaccctgacacacctactcctgaatcttcacgaaactattggcaaatggctgtaggaagtcttgggttatggacgggagggagaacgctgggaaggggcgggtaagaattgttggctgtagtgacacactgtagtcttgccaggccacggaagccagtcatgccggaagcactggcttctgggaagccacccaggtctcattcctccctgctgtttggaggcaacatctcctctttttacggagggtccatccttttttcttacaaatgcttcaataaagacacattgttgagtgaagaaaaaaaaaaaaaaaaaaaaaaaaaaaaaaaaaaaaaaaaaaaaaaaaaaaaaaaaaaaaa

SEQ ID NO: 5059 - DNA, 1311 bp, Cricetulus griseus
ctaatgcggcgtgctgacccgccggcaccatgcagtcggatgatgttatctggaataccctaggaaacaagcaattttgttctttcaaaataagaaccaagactcaaggcttttgcagaaatgagtatagtctgactgggctgtgcaatcggtcatcctgtccttttagcaaatagtcagtatgctacaattaaagaagagaaaggacagtgctacctgtatatgaaagttatagaaacgggcagctttttcctcggcggctctgggaacgggtccgacttagtaaaaactatgagaaagcactggaacaaatagatgaaaatttattactggccccgcttcattcggcacaaatgtaagcagaggtttaccaagattacccagtacctgattcgaattagaaacttacgctgaagcggaacgaagggaaaaagaagagaggaaaagcgttaatagctgcccagctggacaatgccattgagaaggaattactggaaagactgaaacaagacacgtatggtgacatctacaacttccccatccatgccttcgataaggccctagagaaacaggaagcagagagtgactctgaagaagaagaagatgaggaggaagatgaagaggatgtggggaaaagagagtttgtagaagatgatgaggtagatgagagtgacctgagtgactttgaggatatggataaactggatgctggcagtgacgaaggacaggatgaagaatcctccagtgaagaagactttgcggaaaaaacgggcctatgtggaaatagttagtatgagcaggagacagagcccatgaccaaagccaaaaccacatgagttcccttcactgtgctcttttgtgctatatttcatacagtatttatattgttaatatttatgtcacttcagtggaccaaaaacctggagtgagaggagaagagtctcaattgtacagcagtatttttaaaacacatgtgctgtaacagagggagcccaaggggcctaattgatgaattcctggagctggaatgacattgtgcctgtaaatatttctgaattacaacttacaatctttaatataaaaatagaattttctgtaactccatccatatgatctgggataggaaaagcgccctttcttgctggttccttatctaagagtcatcacagggaacagctgcagagctctgctgcactctcctgatgcagttcaccactgtgcggtcttcacaggataggacaattttagacagaagaacctgaaacatgaaaccaaacagacattcatttgtgtaaaacctgttttccccac

SEQ ID NO: 5060 - DNA, 1311 bp, Cricetulus griseus
ggttcttcaaccagctcttctcagggtttagacccccatgctctggctgggcgcatcatcacagaaagcctcaacaccagccagtacacatatgagattgcccctgtgtttgtcctcatggaagaggaggtgctgaagaaactccgtgccctggcccttagcccttttctacatcaaaggagtgtcactactccatcagtaagggagctgcttttctgggacttggcactgacagtgtccgagtggtcaaggctgatgagagagggaaaatgatccctgaggatctggagaggcagatcagtctggctgaggcagagggctctgtgccatttctggtcagtaccacctctggtaccaccgtgctaggggcctttgaccccctggatgcaattgctgatgtttgccagcgtcacggattatggttacacgtggatgccgcctggggtgggagcgtcctgctgtcccggacacacaggcatctcctggatgggatccagagggctgactctgtggcctggaaccctcacaagcttctcggtgcagggctgcagtgctctgctcttcttctccgggacacctcgaacctgctcaagcgctgccacgggtcccaggccagctacctgttccagcaggacaaattctatgacgtggctcttgacactggagacaaggtggtgcagtgtggccgccgtgtggactgtctgaagttgtggctcatgtggaaggcacagggtgggcaaggactggagcggcgcatcgaccaggcctttgctctcacccggtacctggtggaggagataaaaaagcgggaaggatttgagttggtcatggagcctgagtttgtcaatgtgtgcttctggtttgtgcctcccagcctgcgggggaagaaagagagtccagattacagcaaaaggctgtctcaggtggcgcctgtactcaaggagcgcatggtgaagaagggctccatgatgattggctaccagccccatgggacccgggccaacttcttccggatggtggtggccaaccccacactgacccaggctgatatagacttccttctgtgtgagctggagcgtctgggccaggacctgtgacctgctaccccgcccgctcagcctcaccgaagctctgcatagcctcctgggttctcaaaagcaacctttgtaggaaacagtggccttggctgtgtgcttcctcacactaactctcctagcgaagtacttgctattaggagagtgtttaaatacactacattacattttatgatacatgctttcattaagctgggtgtggtggcacacactttta

SEQ ID NO: 5061 - DNA, 1311 bp, Cricetulus griseus
gtagttgcccaagatgcctaacatcaaaatcttcagcgggagctcccaccaggacttatcccagaaaattgctgaccgcctgggcctggagctaggcaaggtggtgactaagaaattcagcaaccaggagacctgtgtggaaattggagaaagtgtacgtggagaggatgtctacattgttcagagtgggtgtggtgagataaatgacaatctaatggagcttctgatcatgattaatgcttgcaagattgcttcagccagccgggttactgcagtcatcccttgtttcccttatgcccgccaggataagaaggataagagccgggctcccatttcggctaagcttgttgcaaatatgctatctgtagcaggagcggatcatattatcaccatggatctacatgcatctcaaattcagggcttttttgatatcccagtggacaatttgtatgcggagccagctgtcttaaagtggataaaggaaaatatatctgagtggagaaactgtactattgtctctcctgatgctggtggagccaagagagtgacctccatcgcagaccgattgaacgtggattttgccttgattcacaaggagcgcaagaaggccaatgaagtggatcgcatggtgctggtaggagatgtgaaagaccgcgtggccatacttgtggatgacatggctgacacttgtggcacaatctgtcatgctgctgacaaacttctctcagctggagctaccagagtttatgctatcttgactcatggaatcttttctggcccagccatttctcgcatcaacaacgcatgctttgaagcagtagtagtcaccaataccatacctcaggaggataagatgaagcactgctccaaaatacaggtgattgacatctccatgatccttgcagaagctatcaggagaacccacaatggagagtctgtctcctacctgttcagccatgttcctttataatagaataacttctgaagcattttgaaaataaaaccaaccccaccccttgtttttcttggtatttggtgagttcatcggaagacccagcttgctccagtgtagctttttacatcccacattagatacattagaatttagcctaaattggaaaaaggcattgtgattaactgctaggatgtcctacttgcattgtttcatcctggcttttttgtttattttgtgagccttgcagctttaactagagctcagctgctgaaagatgtatagactgttgagagtattccacaaggtccttaggctgtgattgacaaagctcacactccattgcatgtgactgcttt

SEQ ID NO: 5062 - DNA, 1311 bp, Cricetulus griseus
tggctgcggcgctgcgcgggtctcagagccagttcggcgcgtcgactgtccagagtccgcggccgggagccccgagccccgaggagacaagactatggcctaccacagcttcctggtggagcccatcagctgccatgcctggaacaaggaccgaacacagatcgccatctgccccaacaaccatgaggtgcacatctatgagaagagcggtgccaagtggaacaaggttcacgagcttaaggagcacaacgggcaggtgacaggtattgactgggcccctgagagtaaccgcattgtgacctgcggcacagaccgaaatgcctatgtgtggacactgaagggccgcacgtggaagcccactctggtcatcctgcggatcaaccgagctgcacgctgtgtgcgctgggcccccaatgagaacaagttcgccgtgggcagcggctcccgtgtcatctccatctgttattttgagcaggagaatgattggtgggtgtgcaagcacatcaaaaagcccatccgctccactgtcctcagcctcgactggcaccccaacaacgtgctcctagctgcaggctcctgtgacttcaagtgcaggatcttctctgcctatatcaaggaggtggaggagcggccagcgcctacaccgtggggctctaagatgccttttggggagctgatgtttgagtcgagcagcagttgtggctgggtgcacggcgtctgcttctcggccagtgggagccgtgtggcttgggtaagccatgacagcaccgtgtgcctggcagatgctgacaagaagatggccgttgcaaccctggcctctgaaaccttgccactactggccatcacctttatcacagaaaatagtctagtggcagcgggccacgactgcttccctgtgctatttacctatgacagtgctgcagggacattgagctttggtggccggctggatgtgcccaagcagagctcccagcgtggcctgacagcccgagaacgcttccagaacctcgacaaaaaggccagctctgagggtggtgcatccacgggtgctggcctggactcgctgcacaagaacagcgtcagtcaaatctcggtgctcagcgggggcaaggccaagtgctcgcagttctgcactacaggcatggatggtggcatgagcatctgggatgtgaagagcttggagtcagccttgaaggacctgaagatcaaatgagctatggaataccaccctcatcccagctgctgggaaaaggggaaaggggctggggaggccaagggttgctttgctgaatgcttctagggtgccagtac

SEQ ID NO: 5063 - DNA, 1311 bp, Cricetulus griseus
ctgttacaagtctgtgtgaatcagaattgcatcccaaacccaattacttagcaggaaagagcaatggagaaaatggcatttcactgttcaggggacaaatagataagagccactgggcccgggccctagccaggccttcatgtctgtgcctcagaggtggtcctgatctcctcctggacccccaggggggcttcaggggacaaagaagaagaggaccagaagcatgtactaaggagatccactggtgccaggggtcgagagggagatgcacaagtacaattatggcttggaaacaccagcacacttgaggcacctgaactggagcacagaacagagaagtcaggaggtcactaccaagctgactcggcagcccagtaagaatgagccatccacatgccaaatgccccatggttcctgtatgccctatcatggaagccagggcatgttcagtgccagcagtatggcttctttcaaagatttaccagatcatcccactggtgcctactgcagccaaatgaatagacccttgcaagatatccaccagggccaggtacatccttccacctgtcatatcccccaaggcagcctgggatccaggatccctctgcctggaatgcagcgcttcacagccaggggattttctacagaggatgcaaaattgtccagcctgccagtcaccatagacaccccatgccgacatggccaggagacatctggtcagtttccctgccaggatgcacctgaaaacagagcccgactataggcaacaggtctgtaccccacaccttgggcatggtatgctggtaactaatgcccacagcagagatactgttggatcctgcagggaacaagctcctctccatcctgcacattgcacctgcctggatccagagcctcctcatcacctcttcatgcggggccacagtgagagccaacatccctctttggtccaagactgcagtgctcctattgttaagagttgaacccctggattcgccatcatgggctggtcctggccaggtggctgtgcctaggatgttccctaagagtacctctataactgtgatcccacccaaaggctctgatgggattttcctaccctagagctagctgcttctctgctggaaatctcagtccttgggtgatgggatgtgatcagagatgcttcttgtaacactttacagaactcagtgagtgattctgacatttcctgtgtgtagatgagcaatagagcatcctgaatcaatatagaatatcagaggattcccatgcataaacctaagtctgttcaagtggacagtatttctcttt

SEQ ID NO: 5064 - DNA, 1310 bp, Cricetulus griseus
cgcaccatggaatgcctgcgttgcctgcccaggctgcttccccgcgccgtgcagtcccggcgggccctgtgtgcggcgcccctgagccccgctgcctgctgcggtcgcgcgaccccgctgctctccgggagccggaaggcgccgagctcgccctgcgctgcaggtaatgttcaccggtctagaacctccgatgcctctcaagctactttagccagcgtggcccaggtgtttgctgtgacaaagtttgacaaagatggaaatgttacttcttatgagaggaagaaaactgagttgtaccatgaattagcactccaggccagagacttgaggtttcagcatgtgatgagcatcacgaccaggaacaacaggattatcataaggatggagtatttgaaggctgtgataactccagagtgtcttatgatactagattatcggaatttaaacctggagcagtggctgttccgggaactgccatcccagctggctggagaaggtcagctcgtcacatacccgttgccgtttgagttcagagctattgaagcactcctgcagtattggatcaacacccttcaggggaaacttagcatcctgcagccactgatccttgagaccctggatgcattagtggaccctaagcactcgtctgtcgacagaagcaaactgcatgtcctactccaaaatggcaaaagtctctccgagttagaaacagacatcaaaattttcaaagagtcaattttggagcttttggatgaggaagagatgctggaagaactctgtctaaccaagtggagtgacccacaggtctttgaaaagagaagtactgggattgaccatgcagacgagatggaactgctgctagaaaactactaccggttagctgaggacctttccaatgaggctcgggagcttcgggtcctgattgatgactcgcagagcatcatcttcatcaatctagacagccatcgcaatgtgatgatgaggttaaatctacaactaaccatgggaaccttctctctttcactctttggactaatgggagttgcttttggcatgaatttggaatcttcccttgaagaggaccaccgtgtgttttggctgattacagggattatgtttatgggaagtggcctcatctggaggaggttgctttctttccttggaagacagctggaagcccctttgccccctatgatggcctccttacctaaaaagacccttctggcagatagaaggatggaagtgaaaaacagcctcagggcggaaggactcggaacaagcagaactgtcctggcaagccgctaacagca

SEQ ID NO: 5065 - DNA, 1310 bp, Cricetulus griseus
tccccagtaatgtgagtgattctgtgtctgaggagagcaaccaggccctacatgtagccatggagaagctgcagagccgcttcttggaggtcatgcaggagaaagtggagctcaaggagagggtagaggaactcgaacattgctgtatccagctctctggagagacagacaccattggagagtacattgccctctaccaaaaccagagggcagtgctaaaggctaggcatttggagaaggaggagtacatcagcaggctagcccaggacaaggaggaaatgaaaataaagctgctagagctgcaggagctggtgttgaggcttgtgaatgagcgcaatgaatggcagggcaaattcctggcagtctctcagaaccctgttgatgtgcccaccccagtgcccacaggctcccagggatttggagctgctgaccagcagggtgaccttagggaggtgagcctggccgacagtatagagcctgcacaaggagcgccgggggcactcactccccctgagaaccccactgcacagcagatcatgcagctactgcgtgagatccagaaccctcaggaacgtccaggcctgggcagcaatccttgtatcccctttttctaccgtgctgatgagaatgacgaagtgaaaattatggttgtctaaaagactggcagccaaagcctgctcatcactgtgcctggtgttttgcagtgctgagcaggcactctaccaattgatttacaccccagcactacctaactttttcttaagtgtgggaacactggggatggaacccagggcccagcacattcccagaccaactcccatcttcttaaaggcactttagggagtgggactgggcagcatttccatgggttcccaggcagttgggctaactgcctctggaaagcatcccacttaggagggcttccatctttttagaggcactttgggacagggaaattgggtactattctctcaggccttatgacaattggggtaactgtatgccaagcaggatagaggctcgttgggggggggggtttccccgtctcctggtgtacatattgtacctgtgtaccattttgtatattctggggtagggacaccctctgtattatagtagaggttggagctggcaagtggggaggagattctaataatcacttggggctgggaaacttatttattggtagtgtaggacagaggacaggaggcggagagtgggggttgtagcatcctgctgatgcagctcctcttttattttgtctttttacttgggaaactgggaaaaaaaaaaaaaaaaaaaaaaaaaaa

SEQ ID NO: 5066 - DNA, 1310 bp, Cricetulus griseus
gaaagccaggacttggtataaggacaaggaaaagtcctttatgggatacgaatgagagttctgttcaaatgttgaaaagtaagatgagaaaggaagtaaatgagaattctgggctgttaccttgtaccaagtcagtgctcatcaatgctatcttgaaagaggataaccatggtcttacatctttcccggaggcagttggacatagtgcatcccacatagacccaaatggtgaagaaaccatatctcctaccgcttcagagaaatctccctgtaagattttaactcagagacatgttgctttgggacaagataaagtcaactcttcagaaactgaatgcagctgccactaagcttcaaggccgtgttaggcggggcttttataccaggaactacaatccacaagccaaagggtacgttatgaaatccggctgcgcagaatgcaggagcacattgtttgcctgacagatgaagtaaggagactaagaaaagaaagagatgaagaacgtgtgaaaacttttgtacaagaagaggctgtccgattcctttggaatgaggtaagatctctacaagcttggcagcagacagtggagcagcgtctaatttcctggcaaactgacatgccttctgtgtcaagtactctggtgtcacctaaacctccattcccacaacatcagggcccctcttctgatcagagttctgattggttccttgctgaggatgaagctcctcaagagaaatctgttccggaatttccagactctggttttcattcctctctaacagatcaagttcactgtttgaaggattctttggattttgaaaaagttccatagaaagcagagtgtgtgtgtgtgtgtgtgtgtgtgtgtgtgtgtgtgtttgtttggttgtgtttttttttttttgagacagggtttctctgtgtagtcctgtctgtcctggaacttgacttgtagaccaggctagcctcgaattcagagatcttttttttttttgagacagggtctgtctacacggccctgtttgtcctgtaacttgtaataatttgtgtatggtgctggcattataggcaagcaccgtactatttaactacactgtagccctgtgttttagaatatcactaatgttggcaataagagtttaatatgatttgattttgtactatttcttgatttttttttaaaaaaatgttactatagtgtataacctaagatggctggagtatgtttgatgaaggttttactatttcatattgtactcttcatttgtattgagtctgtctaattttaaataaaagctttatacaattt

SEQ ID NO: 5067 - DNA, 1310 bp, Cricetulus griseus
  modified_base (1301)..(1301): a, c, t, g, unknown or other
gcgcggctcagcagtgacgtagtatcccgcgcctcccagcaccagcagctactgccagccgtttcggcgctcggaagtcgaagatggcagagcaagtttctcaggaaaagtcggcggaccaggtgtgctctttcctcttcaaaaagcccgggcggaaagggagtgctggtcgccgaaagcggcctgtgtgcgatccggactccggggaaagcggaagcagtagcgacgaaggctgctctgtggtgcgaccggagaagaagcgggccacccacaatccaatgatccagaagacgagtggcagcggtaaacagaaggcggcctactgtgatgtgagcagcgaagaggaggagaagccggagactgagtgtctaggcgtagtctacaagtccacgcgctcggcgaaaccggtggggcccgaggacatgggggcgacagctgtctacgagctggacacagagaaggagcgagacgcacagtccatctttgagcgcagccagaaaatccaggaggagttgagaggcaaggaggatgacaagatctatcgtggaattaataattaccagaaatacatgaagcccaaggatacgtccatgggcaatgcctcctccggcatggtgaggaagggccccatccgagcccccgaacatttacgtgccaccgtgcgctgggattaccagcctgacatctgtaaggactacaaggaaactggcttctgtggctttggagacagctgcaaattcctccatgaccgttcagattacaagcacgggtggcagatagaacgtgagcttgacgagggccgttacggtgtgtatgaagatgaaaactacgaagtagaaagtgatgatgaggaaataccattcaaatgtttcatctgtcgacaaaccttccgaaatccagttgtcaccaagtgtaagcattatttctgcgagacctgtgcactgcagcatttccgcactactccacgctgctatgtttgtgagcagcagacccatggggtcttcaatcccgcaaaagaattgattgctaaactggagaagtatcgtacagcagagggtggtgcttccaacaccccagaagaccctgatggggtctaattgccgttacttaggttttccataattgtcagatctcaaagtacttcttgttttggccacctcaaaaaccaaccatagttgaaaaaaataattaagttttctaggaagaatataccaagcctttgttttatataacaatgctgcagattgaatcaactcaagttaacttaatggaactctcaactagtacatactataaaaaanaaaaaaaaa

SEQ ID NO: 5068 - DNA, 1309 bp, Cricetulus griseus
gcaaacagagtgctgaggataagtcagctggatgcacttgaactgaacaaggctctggagcagcttgtgtggtcccagttcacacagtgctttcatgggttcaagccaggcctgttagctcgatttgaacctgaagtgaaagcatgtctgtggcttttcctatggaggttcaccatctactccaaaaatgccactgtgggccagtcagtcttgaatattcagtacaaaaatgatttctcttccaactcaagataccaaccaccaagtaaaaaccagaaactgtggtatgctgtgtgcaccattgggggtagatggttagaggaacgatgttatgatttgtttcgaaaccgtcatttagcatctttcgggaaagtcaaacagtgcatgaatgttatggttggacttttaaaattaggggaattgataaacttcttaattttcttgcagaagggaaagtttgcaaactttgacagaacgcctccttggcattcattctgtattttgcaagccccagaacattcgtgaagttggctttgactacatgaatagggagcttctctggcatggctttgcttgagtttctgtatttttctactggtgctgctagtagtgacagtgccctagccagcagtggcaaagaatgtgctctctgtggagagtggcccacaatgcctcacaccattggatgtgaacacgtcttctgttattactgtgttaaaagtagcttcctatttgacatgtactttacctgtcctaagtgtggcatagaagtgcacagtgtgcagccactgaagtcaggaattgaaatgtcagaagtgaatgctctttagacagcacattgtttcctctgagggaggatgtattgtgtcccagtccttggtattagtcatcctcagtatcatggggaggcagctgggaaaagccatgtgtggctcagccgctgtcctcttcttttccaagcacaactaaattctaatcactggaaactaaatgatacgagagactcttacaaatgttcacggtactctttaaaatcatctattacatcttttaatgtcaagaataatggaaaatttttgtcagatgaatactgagaatgactaagaatcctttatagaaaaggtcaagctactaaaaataaaagatttttgagacgctgggatgagtgtgcatttattttcagaaatgacagaacatcataagctgacatcataagactctgttttgttaaacctcaggttctagagtcttgctcataactaagcttctccctgaagccagtttttaagaggttcagtctgtaactgtc

SEQ ID NO: 5069 - DNA, 1308 bp, Cricetulus griseus
ggttcatggaattgtacggcgatccagttcatttaatacaggtcgaattgaacatttatataagaatccacaggctcatattgaaggaaacatgaagttgcactatggtgacctcaccgacagcacctgcctagtaaaaatcatcaatgaagtcaaacctacagagatctacaatcttggtgcccagagccatgtcaagatttcctttgacttagcagagtacactgcagatgttgatggagttggcaccttgcggcttctggatgcaattaagacttgtggccttataaattctgtgaagttctaccaggcctcaactagtgaactgtatggaaaagtgcaagaaataccccagaaagagaccacccctttctatccaaggtcgccctatggagcagccaaactttatgcctattggattgtagtgaactttcgagaggcttataatctctttgcggtgaacggcattctcttcaatcatgagagtcctagaagaggagctaattttgttactcgaaaaattagccggtcagtagctaagatttaccttggacaactggaatgtttcagtttgggaaatctggacgccaaacgagactggggccatgccaaggactatgtcgaggctatgtggctgatgttacaaaatgatgaaccagaggactttgtcatagctactggggaagttcatagtgtccgtgaatttgttgagaaatcattcatgcacattggaaagaccattgtgtgggaaggaaagaatgaaaatgaagtgggcagatgtaaagagaccggcaaaattcatgtgactgtggatctgaaatactaccgaccaactgaagtggacttcctgcagggagactgctccaaggcgcagcagaaactgaactggaagccccgcgttgcctttgacgagctggtgagggagatggtgcaagccgatgtggagctcatgagaaccaaccccaacgcctgagcacctctacaaaaattcgcgagacatggactatggtgcagagccagccaaccagagtccagccactcctgagaccatcgaccataaaccctcgactgcctgtgtcgtccccacagctaagagctgggccacaggtttgtgggcaccaggacggggacactccagagctaaggccacttcgcttttgtcaaaggctcctctgaatgattttgggaaatcaagaagtttaaaatcacatactcattttacttgaaattatgtcactagacaacttaaatttttgagtcttgagattgtttttctcttttcttattaaatgatctttctatgaacca

SEQ ID NO: 5070 - DNA, 1308 bp, Cricetulus griseus
ggctccggaacagctgggacaagcgggggtcgcgggcgtccctgggagggggcgacatggagcggaggtgggtcttcgtgctgctggacgtgctgtgcgtgctggtcgcctctctgcccttcatcatcctgaccctggtgaacacaccatacaaacgagggttttactgcggcgatgactccatccggtacccgtaccgtccagacacaatcacccatggactcatggccggggtcatcatcacagccactgtcatccttgtctcatcgggggaggcctacctggtgtacacagagcgtctctattcacgctctgacttcaacaactatgtggctgccatctacaaggtgctggggaccttcctgtttggggccgctgtgagccagtctctgactgacctggccaagtacatgattggccgtctgcgacccagcttcttggctgtctgtgaccccgactggagccgggtcaactgttccggctatgtgcagctggaggtgtgcagaggcagccctgccaatgtcactgaggccaggctgtccttttactccgggcactcctcctttggcatgtactgcatgctgttcctggcgctgtatgtgcaggcccggctctgctggaagtgggcacggctgctgaggcccacggttcagttcttcttggtggcctttgcaatctatgtgggctacacccgagtgtctgaccacaagcaccactggagtgatgtcctcgtcggcctcctgcaaggagccttggtggcctgcctcacggtccgatatgtctcagacttcttcaaatcccggccgccccagtcctgccaggaggatgaggaaccccagcgcaagcccagtctgtcactgacactgactctcggcgatggatcttagccactatgagtacccagtctcttcctgctttggaagctgggaagccacctgtgggccagtcatgtgttggccccttggccctggtcaggcactactggctttggagctgccccagggtcccggctggtgaccattgactagagtcttgggtgcctggctagccctgagtatggacagggtccatgaaaggtcacacgtggctttgggtctgaatcctgttctcaagcctagtagaagattcctgctcgaggcctccaagccctccctcaatttgatgtccagtcctgcctctactctgcccacatggaccagatatgtagccaggctttggaagtgggtcctgggtctgccattcccatctatttcagaacacttaaagttgctttttcatgggagggtgagttataaactttgtaccaaa

SEQ ID NO: 5071 - DNA, 1308 bp, Cricetulus griseus
cttttccagttaatttactaccttgtgatcgcagtcttaaggaatgccatccacctcctttggtttgttgccaagcaggtgataaatggcattgagagttgtctataccgtctgggcgcagccactgtgtcataccttgtagccattggacaagagttggtgggcattccctggaaagtgctcaaagttgtggccaaagtcatcagggcccttctccggatcctctgctgtctgctgaagactatctgtcgagctctgagcatccctctccgagtccttgtggatgtagccacgttccctgtgtataccatgggggccattcccattgtgtgcaaggacattgctgtgggcctggggggcactctctctctcctctttgacactgcttttggcaccatgggtggtctgtttcaggttgtttttagtgttcttcaagtcggtttggctactaaggttacttttgactaattctggggagttataggactcaaaaacctagcggtatccattgtgatgtattttattttttcattttctcccaaagttgaatttgctaagtcacaatgagcattttatgacaaatgtggcataataaaattttaatgcagccctgttataactatctaggtaatagacaacgtgaaaaataattctggccatattgggcaaaaatacatgtatgtatatatttaagaatcattatctcttagagcattatttttataggatatttgaggctaaaaaaatgtaagtccttccttaatgcaagttaaatttgagagcttattcccgattttgatcaatcacttgtaattttaaatcttgcactaaaaagtataacaaagtgaaccaaacatgctttgtaggaaccaaacatccccacagtggcaatggattgtctagtattttttctgagtgttccaaagagttgctgtgaaggagaaaggggcctagtgtggacttcacttgggtacatagcagctggaagttagctgtaaagactaggagtctagaaagaaaacagaggggacagcagtgcatcagctgttattcagatgtctggttatttattttgttgtggtctttttttttttttaatatgggaaaggataataagacaaagaagctgagccctgtcttcagcttggagactttgctgtggcttcattcctttcttaggctctcggggacattagctaactctgtcatttaagagctgcttttctagtcactggcagccatgttctcagatgtgccctctgcccttttgtgccttctccacacaatcaaactaggggatggaaggaa

SEQ ID NO: 5072 - DNA, 1307 bp, Cricetulus griseus
cggccgggctgcaaccccggctgcaggccatggtggctctggacgaccctgacggcggcccggaggcgacccccggcgcggaagccaggctgccccttccaggctgcctgcccacgctcggtggttcacaggtgaagagggtctcagcttccaggcgcaagcaacattttatcaaccaagctgtacggaattcggacctggtgcccaaagccaagggacggaagagtctgcagcgtttggagaacacccggtacctcctaacactgctggagacagctgggggtcctccaggcctggaagatggggacctgactcctcctgcagcacctggcatctttgcagaggcttgcagtaatgccacctatgtggaggtctggaatgattttatgaaccgctctggagaggagcaagaacgagtgctccgctacctggaggatgagggccagggcaagcgaaggccagggcgtgggcctggccgaggggaggacaggcggagagaggacccagcttttacacctcatgagtgcttcaggcgtatcagccgtcgcctgcggtccgtgctcaagcgcagccgcatcccgatggaaaccctggagagttgggaggagcgtctgctggcgttcttctccgtgtctccccaggctgtgtacaccgccatgctggacaacagctttgagaggctgctgcttcacgccgtctgccagtacatggatctcatttcagccagtgctgacctggagggccggaggcagatgaaggtcagcaaccgtcacctggacttcctgcctccagagctactattgtctgcctacctggatcagcaatgatggtggagcccctacctgctgactcgccctgccgagacctccaatgtctgctaatttcttgcatactttcagaatcagaacacccccacttctcttcgggagtcccccttgcccctaccccttcatggcccagcttgcacagggcagcctcgtagccccctgctctggtacttgtgtttgggtggggagacctttggcatgtttgggataggtttgctttaatttctcctctgaagcgttgaggcacaactaaaacacctagtgccagctggtagtgggttctgttgtgacccctgcctgacccctccaggtttcagctctgatggaggtgtctggtcctctctaggactcagctgatctccccagggcactttgtcttgtgtgtgtgtgtgtgtgtgtgtgtgtgtgtgtgtgtctgtctgtctgtctgtctgtctgtctgtctgtaaagggactacttttaataaagccttggtgctc

SEQ ID NO: 5073 - DNA, 1307 bp, Cricetulus griseus
tgcctggacatggaggcctccccaccatcacctgcagaccaaggcctatgtgcgtcagttccaggtcattgacaaccagaatctcctcttcgagctctcctacaaattggaggctaatagtcagtgagagtgagggggtccagtgcccccacataggtccttggcacctggcactcaagcactttgcacgatgccctcaacaacccccacctggacatctttcccctggagccacttcctgtcctacaaggaggagttgggttgaccaaccagaatgcacaagcctgtccatcctgctgaggtcctcttaccttattcttttacactcctggtttctgacctctctgggcaagagaccgagcagcccctgtgccttcccagtgaggtctgttccagagatggagtttctagactctgcttcccaagaaggaaggaaggaagcgccccctcccagatcgcagctgggtatggaggcactgggagccgccttagtgtgtgtgtgtgtgtgtgtgtgtgtgtgtgtgtgtgtgtgtgtgtgtgtgtgtacgtgtgtgcccaagatctctgggtatgtgccagtgagaagctagaagatgctcagggaaacacagggaaacacaggcttaggctgcctaaggccctgcctccgcctgacagtggatgggatgcagcggtgtcaggagtcaggggcacctggtccccatacctctctgctttttgggggtgtctcactgctaaggaggaagttgtcatccttcctctggctctgtgtctgccatcaattgcacaatctgtccatctgtcttcaccccctccctgccctttgtctttctagagagtcaaaggtggatctcagtacctggggcagtttttacccaaagctctggaattgtacatttattttttaaaacccaaagagggaaagtcccttgtatcatatgtaaacattgtattataggttatgttgtacagtcccttttatacagcagttcctgacaaaatagccacaaacatgccacaccactcccccagctgctagtggtgatggtgaccatgctatcccgcagcccataatggagaggtgaccatacctccccatcctctgcttctacacaactgctgactgctcttcctgcagcccaggcttcctgcccctcttcagtaacccctcatccgctttctctagttccttagtctccaagaacactgcctcccccaccccttggctgttgcttgcctctggttgtgatgcttgccccactgcttctcacgggggccccccacttcccccaaccctgtagctttaa

SEQ ID NO: 5074 - DNA, 1306 bp, Cricetulus griseus
ggcggcgggcgaggaggggacggcggagagcggtgtgaggtggggagggcagctaagagacctgagggggacccgggccggaggccgccgccgccgccatgcaggaaatcatcgccagcgtggaccatatcaagttcgacttggagatcgccgtggagcaacagctcggggcgcagccgctgcccttccctggcatggataagtcgggggctgctgtctgcgaattctttttgaaagctgcctgtggcaaagggggcatgtgtccattccgccacattagtggtgagaagacagttgtgtgcaaacactggctaagaggactgtgcaagaaaggggaccagtgtgagttcttacatgagtatgacatgaccaagatgcccgagtgctacttttactccaagttcggtcccctgtgcaggcaccggcacactcggagagtcatttgtgtgaattacctcgtgggattctgccctgagggaccctcttgtaaattcatgcaccctagatttgaactgcccatgggaaccactgagcagcccccactaccacagcagacacagcctccaacaaagcagagagccccgcaggtcattggggtcatgcagagtcaaaacagcagtgcagggaaccggggaccccggccgttggagcaagtcacttgctacaagtgtggtgaaaaaggacactacgccaacagatgcaccaaagggcatttggcctttctcagtggacagtgacaacagcattttttggactccgtgcacactgccctcttggggagagagaagttgggaagggctgtgcttcttggtcctgtgtggaagatggctagcagttcccctcagggcctcattaaacaccagcacctggacaggatgggtggatcatgtggggctgtggccaggccagcctgctttctccgtgtccagctgaagcctcaagctgtgcctatgaatgtgacttgaacaagggagcgcttccagacaaacttggagcatctactgcctggcctggccctggctctttagaagtgtcaggatcccaggctgagctgcttttctgggcttgcttcaccttcggtcagtgctgcagaccacctttaactagctgacccaggtgagctgcgcctacctcctgccaagcaaactctgtgctgtcattcagacccctgtggcatgcagaggccacccatccttgagcctagaaaatgtgaacccatcacctgcaacctgctgggcaagtgggcctatccaagttcagttacaagaatactttttatgaagttgattaaaaagcttagtttttt

SEQ ID NO: 5075 - DNA, 1306 bp, Cricetulus griseus
acccacacttcctcacttcagaggcatgttcttcccagacctgacttccccactcccacatacactggcctcagggaaccaaggctgggccaagaagaacccctcagaaccagccacagtgctgcccttcagacaacttcccctgagagctggcctgaacctccctgaagaagagcccagtaactttgacttcctgaatgccagtggggacttcacatcccaggcaaagacaactgaggcctgcccccctggagaaaaaaatgaacaagacaagtccaaggctcttcccctagaggaggctgtgacttccatccagcaactctttcagctcagtgttgccatcgcttttaacttcctggggacagagaacatgaagacagggaacgacacagcagccttctcttacttccagaaagccgcagaccgaagctacagcaaagcacagtacaatgtgggcttgtgtcttgagtatggccgaggcacccctagggacctcaggaaggctatcctcttttaccacttggcagccatccagggccacagcctagctcagtaccgctatgctcggtgcctattgcaaagttcaagctctttgtcagaccctgagcggcagagggcagtgtctatgctgaagcaggccgcagactctggcttgagagaggcccaagctttccttggggtgctttttaccaaggagccacacctggatgagcagagagcagtgaaatacctttggctggcagccaagaatggggactctcaaagcagattccacttgggagtctgctacgagaggggccttggtgttcagaggaatctgggcgaggctgttaagtgctaccaacagtcagcagctgtggggaatgaaccggcccgggagaggcttcggaccctctttaacatggaagcagcagccccagggcccatcaacctgaccatgacaggactgaagtctttctccagtccctccctctgtagcctgaacaccctgttggcaagtgcctcgggcctccctcatgcctcaagcactgggaaccttggcctcctctgcagaagtggccatcttggagccagccagggagcccccagcaggactatcccatccttggaaatgaatctcatgagactgggtttcggctaagacctccaccttaacaatggagcctgagagagagttctcagagatattacaacttgattcccaaagaggaggccaggtagctactcaccttcctggaaaccttcagcacctccccagcaccataaagaagaaggcagatttgtatgggtttgagtccagcctggt

SEQ ID NO: 5076 - DNA, 1304 bp, Cricetulus griseus
agacagtctcgtggctgtggcaccagtagctggctatagtgtgtggctgtgggccgtggaagccttgccaagcagctgtgtttcctaggatcagtatgtcaaggcggcctcttacctgctttccatccacaaagtgtatgaagctgtggaacttctcaagtcaaatcatttctacagagaagctattgcagttgccaaggctcggctgcgccctgatgaccccgttctgaaggacctgtacctgagctggggttccatcctggagagagatggccactacgctattgcagccaagtgctacttaggagccacttccgcctatgatgcagccaaagttctggccagaaaaggagatgcagcctcgctcagaacagctgcagagctggcttccatagcaggagaaagtgagctggctgcttccctggctctcagatgtgctgtgtggcgcagtaccttgagtgtggacaccccggagcagtgtcgggccgccttgcagaagctgcaggatgtcaaatatccatctgcaacaagtaacactcccttcagacagctgctgcttcatgtctgtcatgacctgaccctggcaatgctgagccaacaggctgcctcctgggaggaggctgtgccagcactgctgcaggctgtgcttcggagctacacctcagggaacttcaccctcatgcaggaatctactcagcccaacagagatgatcccagccaggaaacagagcagctaccttcccaacctcagagcccaagcagagaagaaagaaagacaccagtctctctccctgaattaaccagaagactcacagaggcaaatgagagaatagctgagtttccagagagtataaaggcctggccctttccagatgtgctggagtgctgccttgtcttgcttcacatcgggtcacagtgtcctggtgccgtgaaccctgagatgcagcaacaggcccaggagctccttcagaagtatggccacactagagcttacagaagacactgccagaccctgcacacatgaactaccagaggccataaagctgtgtcacacaagttgtgacagctttcttctcagtcagagttcaccaggccttcaccctgatcttcaacggaaagatgctgtgatccaactgacagctgagggtgaagcttgagtccactcacagtggatcctgcctgggcccccccaagtggctcctgtaatggagcaaaccagccctcaccaagaccgtcgactcaagccttctcaagccttacgtggtgtccccagagagaagcctttgtattcacccaaagtctgt

SEQ ID NO: 5077 - DNA, 1304 bp, Cricetulus griseus
aaagtcctcaaatacaggtctggcgaacagagcagaaagaagcccaaaggcagcgtctgcggcagatatcctcctttgacatgagtcatggcagtgcctatgaagggccaagtgtgtgtggtgactggtgcctccaggggtattggccgtggcattgccttacagctatgcaaagcaggtgccacagtgtacatcactggccgcaatctggacacccttagagctactgcccaggaggcacagtcccttgggggccggtgtgtaccagtggtgtgtgattcaagccaggagagtgaagtgaaaagcctctttgagcaagttgatcgggaacagcaagggcggctagatgtgctggtcaataatgcctttgctggtgtccagacaatcctgagcaccatcaataagccattctgggaagtacctgcctccatttgggatgatataaacaatgttggactcagaggccactacttgtgctctgtgtatggggcacggctgatggtaccagctggcaaaggactcatcgtggttgtctcttcccctggggggctgcagcatatgttcaatgtcccttatggtgtgggcaaaactgcgtgtgacagactggctgctgactgtgcccatgagctacggtgtcatggagtcagctatgtgtctctgtggccagggttggtgcaaacagaactggtgaaggaatttatggcaaaagaggatcaacctgaggattctttgtttaagaaggccaaaccaaatttctcaaaggcagaaagcccagaaatgagtggcaagtgtgtggtggccttggcaacagaccccaagatcctaagcttgagtgggaaggtgctaccatcctgtgaccttgctcggcgctatggccttcaggatgtagacggtcgcccagtccaggactatttttctttgggctatgccctttcacatgtctccagcctgggatggctgacctcctacctgcctggcttcctccgtgtgcccaagtggattgtcaccctctacaccagcaaattctaacctcctggcctgataccccagccctgccaggtcctcttctcattgaggctcaggtggctgggcctgtctcggtggaacaaagcagcttctcacatacccacttcctcctatgaagagaaagcggctgcctagtgagttctgggggctctggtccattctttgtgccttggttttccctgttcctgtagcttaatattttgcttcagtattgaaaagtgcttataaatagaagctaataaagatcttgtctcccctataaaaaaaaaaaaaaaaaa

SEQ ID NO: 5078 - DNA, 1304 bp, Cricetulus griseus
  modified_base (1294)..(1294): a, c, t, g, unknown or other
ttgaaacccataattacagagagatggatgacagaagatccaagcatagaatgtttgagcaaagattcccgtgtgagactttccagacttacacagatccacacaacagttcgcatgttgtagaaaacaagttacctcattatttaccagcttatgagagccagcagagcctagattctgatagctactatcagttcacgagagattgtttctcagaaaaacctgttcccctgagccttagtcagcaagaaaataatcctggctcacacagtgtagagtttgacatttacaagcagctgccctcgtatgacagtgccagtgcccatgaaacaagtcataaaagacgacatcagaagagaaggacgacacctggaggaaggaaagaaaggccagagaaggaacaatccaagcataaaagaaaaaggagctgtcaggataaagattagaccaagacaagggatgataaagctggggtcagctctgagaaaataaagcatcgaaaaagaaaaggaaacatgaagcagcctcagagaaggaagaacgtaagcacaagaaggagaaaaagaagtctgttgaagaaagaacagaagaggaaatcctttgggatgagtcaattcttgggttttgaacttagagaatacccaggaatggataaaagaaataatgctaatttagataaagacaggagtaaaatttgtgttatttgtgtatttgtacatgtgtacagttaattactaacaaaagccagatgaggtaaaaatattcaatatgcttttttaaagttactttctctgatttttttaagaaagaaaatgtattctattgcttatatatattatgattttcttaagtagaggtgtttctactttgtccatcaagttgcaatgaaaatgaattgtttgctcatagaaatcatgtacttaaaatggtgaactacacagcagtctacagccataccaccctgaattttcccagtcttgtttgattttggaagaatggtcaggcctgtgggagaccagacttcgaagaatctattccttttagaatttgtgttagtattggtggtattttactactgttgtgtgttaatgttttctttctccaatgaaaatgaatgaagcaacttagacaatttttgttaaatctaatttgcagtgtatttttgtattttctagttctgaaagtggaaaattagagtataataaattagatgatatatacttttaaaaggttctccaaagggctgatagaaatcggtctatattactagaaaaatttaattactaaaaaaaanaaaaaaaaaa

SEQ ID NO: 5079 - DNA, 1304 bp, Cricetulus griseus
aaacgtggccattgtccttcctgtcaccagctgagctggccagagccggcttctactatgtaggacctggagacagggtggcctgctttgcgtgtggtgggaaactgagcaactgggaaccgaaggatgacgctatgtcagagcatcggagactattttcccaattgcccattcttaaaagatccgagtcaatccgcttcaagatactctgtctctaacctgagcatgcagacacacgcagcacgagttaggacgttctttaactggcctcccagtgctcccgttcatcctcagcaacttgcaagtgccggcttttattacacaggacacagtgatgatgtcaaatgcttttgctgtgatggcgggctgagatgctgggagtctggagatgacccctgggtggagcacgccaagtggtttccaaggtgtgaatacttgataagaatcaaaggacaagagtttgttggccaagttcaagctgggtaccctcatctacttgaacagctattatctacctcagacaccccagaagacgagagcgcagagtcaccaattgtgcatttcggacttggtgaaagttcagaagatgtggtcatgatgaacacgcctgtggttaaagcagctttggaaatgggcttcagtaggagcctggtaagacagacagttcagcgtcaaatcctggccactggcgagaactacaggaccgtcagcgacctcgtgataggcttacttgatgcggaagacgagataagggaggagcagaaggagcaggcagccgaggaaatagagtcagatgatctgacattaatccggaagaacaagatagggctttctcaacatttgacatgtgtgatgccaatcctggattgtctcctaagtgccagggcaatctctgaacaggagtacgatgctgttaaacagaaaccacagaccttgcaagcaagaaccctgattgatactgtgttggcgaaaggaaacactgcagcaacatcattcagaaactcccttcaggaaagtgaccctgtgctatacaaagatttatttgtgcgacaggacgtcaggcgtcttcccacagatgacattgcagctctaccaatggaagaacaattgcggaagctacaggaagaaagaacttgcaaagtgtgtatggacagagaggtgtccatcgtgttcattccctgtggccatctggttgtgtgcaaagactgtgcgccctctctgagaaagtgccccatctgcagaggtaccatcaaaggcacagtgcgcacatttctctcctaaatgggaccgatgatccatggctg

SEQ ID NO: 5080 - DNA, 1303 bp, Cricetulus griseus
  modified_base (538)..(538): a, c, t, g, unknown or other
  modified_base (1258)..(1258): a, c, t, g, unknown or other
ccccatccagcagcctcgcacctctgacagcccaccccgcgacctcgaggcctggcgggtgctgctgccctcgcgtccggaggaggagagggtggcacgcctcgtgccgcacgagaacgcttccagggactccgcctcggacctggcgctgctgcagctgaggacgcgcgtcaacctgaccgccgccccgagtgccgtttgcctgcctcatcccgaacacttcttcctgcccgggagccgctgtcgcctggctcgctggggccgcggggaatccgcacccggctccagcgcgcagctggaggcgcagctgatgagcagctggtggtgtcactgcctgtacggccgccagggggcgtcagtgccgccgccgggagaaccgccgctctggctttgccccgcctacctggaggaggaagaggcgggccgatgctggaagattccggttggagccttctgtgtcgtgaggaggggacgtggttcctggctggatacgaggtgcatgtgactggtaatggagtctgcactgggattctggttnccccgggctgggtcctagcagccactcactgtattctcaggctgggctctacaacagtgccttacattgaagtgtatctgggcctggaaggggccagctccctcccacagggccaccaggtatctcgctctgtcatcagcatccgcctgcccaggcacttaggacttagacccccctggccctactggagctgaactctcgggtggagccttccccatcagctctgcccatctgcctccagccagggggtattcccccaggggccagctgctgggtgctgggctggaaggacccccaggacagagttcctgtagctgctgctgtctccatcttgacaccacgactctgtcactgcctctatcagggcattctgactcctggaaccttctgtgtcctctatactgagggtcaggaagataaatgtgaggtgacctcggcacctcccctacctgtgccagtctgagggaggcccctgggttctcatgggcatggctgttcgaggtagccaggagctgtttgcagccattggccctgaagctgcctggatatcgcaaacagtgggagaagcccatttccttcctcctagtggtcccccttactggcctcctgaagacagtgacctctgcccccaagacttggcaggagctgcgagctcctctaaggtagctgctctgcttctgctcccactggcctccactgatccagggctgagtctggctnttctcacaccaccatcagggctggaatgtggctcaaccagccagc

SEQ ID NO: 5081 - DNA, 1303 bp, Cricetulus griseus
ggccgcggagtcccttggagatggctttgctcagcagtgtcctggcagcctgttcctatatctcagaaaaccctgagagagctgctctgtacttcgtctctggtgtgtgcatcggactgttcctgaccttggccgccttagtaatgaggatctcctgccacactgactgcaggaggggtccccggaggaggtgcttgcaggaccacgagagcagcagcgacagtagtgacagtgaagatggcagcgaggacacagcctcggacctgtccgtgcgcagacaccgccgcttcgagaggactttgaacaagaatgtgttcacctctgcagaggagctggagcgcgcacagaggttggaggagcgcgagcgcatcatcagggaaatctggatgaacgggcagcctgaggtgcccggcacccggagcctaaaccgctactactaaggcacagtttggaccccagaacttctgcaggcctccaggaatagagagtgggttctgtaggcagggacggtgtgcacaacggaagcccctatgctaatgtgtccggagagaaagaagcacagggccagcctgctttcccaatggcaggacggtttgctttagactcttacctctggagaaatagacaacccgagcagcggcatcagcctttccaggtcttgacacccacgtgggcacactggcccaacctttccaggtcttagaatggtgctgagatttcctctccagccatgtgacagtgatgtgacaggctgaaagttctgaggcgctcagaagttttgtgcagacttaccactgtgttactcctttacaaaaggaaaagttctcatagctggagagctgggggtatcagggtgaacttaacccagaaaattcaattttctaaaggattccatgcagtggaagtctttttaattgagatagcatgatctatgctaattatttaaagctaatttttaaaacgaaaaatttcttggcaacctctgcattttaactgacacctcagggattaaaatcctatttttagtctaattcccacctcattcatggaaatgaatagaattcactgtattgtgagatgtattggtgacttaggatacatacatcattaacctcaaaggataaagggttttatttttagtagtttataaatatatattgacatgtatatttaaaaatgctgcataaaaatagaagccctgtgtccttccattttggagagaagaaaaatctctcgtgacttcagagacttgtgatatttaaataatattttgtttaaaaaaactagttggaatttccaagaa

SEQ ID NO: 5082 - DNA, 1303 bp, Cricetulus griseus
catcatggcagctgcgttccgcagaggctgcggggtcctaagaagtctttctcatttcgagttttaattttgagttgactgaacagcagaaagaatttcaagcaaccgctcggaagtttgcaagagaagaaataatcccagtcgctgcagagtatgacagaacgggtgaatacccgttccccctaattaaaagagcctgggaacttggtttgatcaatgcacacattccggagaactgtggtggtcttggactggggacttttgatgcttgtctaattaccgaagagttggcgtatggatgtacaggggtgcaaactgccattgaagcaaactctctggggcaaatgcctgtgattctcgctggaaacgatgaacagaagaagaagtatttggggagaatgacagagcagccaatgatgtgtgcctactgtgttactgagccctcagcaggctctgacgtggctggcattaagaccagagcagaaaagaagggcgatgagtatgttatcaatggccagaagatgtggataaccaacggagggaaggcaaactggtattttttactggcacgttctgacccggatcctaaagtacctcctagtaaagcctttactggattcattgtggaagctgacaccccaggaatacatattgggaaaaaggaattaaacatgggccagcgatgctctgatacaagaggaattgcctttgaagatgtcagagtgcccaaggaaaacgtcttgattgctgaaggagctggcttcaaaattgcaatgggggcttttgatagaaccagacctacagttgcagctggcgctgtcgggctagcccagagagctctggacgaagctacaaagtatgccctggagaggaaaacatttggaaagctgctagcagagcaccaagcagtttcatttctgctcgcagaaatggcgatgaaagttgaactcgctagactcagttaccagagagctgcttgggaagttgacgctggccgccggaatacatactatgcctccattgcaaaggcctttgctggagatattgccaatcagttagctactgatgccgtgcagatttttggaggctatggattcaatacagaataccctgtggaaaaactgatgagggatgccaagatctatcagatttatgaaggtactgcacaaattcagaggctgatcatagcccgtgagcacattggaaagtttaaaaattaaaggaaattgcttttgaagagatgcttcatactcgtgcaactaaacctcaaggcattgtttatgcttaagagaaaaagggcttt

SEQ ID NO: 5083 - DNA, 1303 bp, Cricetulus griseus
agcagcagtcaagaggggtggcaggatgaatgtgggcacggcacacagtgaggtgaaccccaacacacgggtgatgaacagccgcggcatctggctctcgtatgtgctggccatcggactcctgcatgtcgtgctgctcagcatcccctttgtgagcgtccctgtcgtctggaccctcaccaaccttatccacaacttgggcatgtacatcttcctgcacacggtgaaagggacacccttcgagactccagaccagggcaaagccaggttgctgacccactgggagcagatggactatcacagcctctaggaaattcttgaccatcaccccgattgtgctgtacttcctcaccagcttctacaccaagtatgaccaagtccatttcatactcaacactgtgtccttgatgagtgtgctcatccccaagctgccccagctccatggagtccggatttttggaatcaataagtactgaggttgtagccccttcctcagccaggttggcaggggaagggtagaaggcctttgctgtgatgctgaagacaggagcctctggacactcactgccagagatggggtgtgccctgggcctggcttcccctcgcttcccagtagccgacttggagtagcttgtagtggggttagggtggggcccttgggctctaacccattctgaagtttttgatctttccttttgccttttgagtagagatgccgtgggggtggtcatgaaaggggctgggctttccggctgactgtggacctcagaagttgggacaggaagccaggaaaaacccctgttggcttgtttaccctcaggcagccatagcactttagcccctgagaggggcagagggacggtacggcttctgcatcgtctccccctcagtctttgagtgtgtggggtgagactcacttttgtatgtattggaatggccaagaggccccctccatgtgaggtcagtgggctccacagtgctataggatccctgcccaaacagggcactagtagggacagctgcaggcactgtctcctcagcccgaagagaggtggctcacagagtctgactaagctgaagaggggctgtcttctcccctcgctggtttggttcgactggggcatgttcctttggaagggtgtgggtgcctgagctctcccagaggggatggagggaagtcactcaccctgtttccttcccctgaccctcattctcaaccccatgtatcatagggatctttcaccttgtggtctttctaagcaaagtgtgaataggatttttactccctttgtacagtattctg

SEQ ID NO: 5084 - DNA, 1303 bp, Cricetulus griseus
cacagtcagcacaccctgctttacaggactctgcagaagtggctgacttaccaggacagggtgaggagtgtgctacaggaggtggcagccagggagagacaatacaacaggcagctgctaaggtgggtgttacgacgttggagagaaaacactgtggcccgtttggatatggccaaagaaaacctcccaagcaagagcccaatacaacaggactctgtgctccaaggtcctggtgcagtggcgggaggttacatcaatgcagatatattaccgagaaaagaaggcggttgccctcagggaggcccggaaagcactgggcaggggtcgtctccgtaactggtttcagcgctggcagttctacagccagagggaggcgcagcagagatcccaggtggaacaggcggctcagcatcaccgccagcagctgctgatggaagcaatggctcggtggaaggcataccacctagggtgtgtcaggaaaaagtgtctgcagaagcaaagtgcccaactcctggcacagagacttggtcgtgcctgcttctgccagtggaggaagcagctggcagccaggaaacaagagcagtggagtacagcccgagccctgtggttctgggccttctcactacaggcaagggtgtggactgcatggctgggcttcatatttgagaggaggaggaagaaggcacggctggagcaagccgtgcaagactaccatcagcagctcctgcaggagggcgtcacacggcttctgcgctttgcagctggtatgaaggcttcccggcagcagctgcagacacagcagcaggtccaggcagcccacagcctccactgtgcagtccgccactgtgctgagctctaggaaaaagaaggtacttggtccaggcaggatgtctcagccaccagcacccatcacattcagcaacggtccaggtccaggcctggtgctactgcctctcctccctggggatttcacaagcaccaggattgggcctgattatggctacgaggctacagttgctgcaggccacacaaagcttgaggctgagctggaggggatccagcagcagttacagcactaccagaccaccaagcagaaccttcggtcatgccagcgtcaagccaacagcctacgcaggtggctggagctaagccaggaggagcccaggcccgaggactgggatctagaacagacgggtaaaaaaagactaggaggaggtggaactacagatccagcagctgtctgaggagctccaggcccagcgtcagcccattggtacatgcattgctcgtgttcaggccctga

SEQ ID NO: 5085 - DNA, 1303 bp, Cricetulus griseus
acgtccgaagccgtgagtcgccgcagcaacagctatggtgtcagtaatcaacaccgtggacacctctcatgaggacatgattcatgatgcccagatggactattatggcacccgcctagcaacctgctcctcggacaggtccgtcaaaatctttgatgtgcgaaatggagggcagatcctcattgcagaccttagaggacatgaggggccagtatggcaagtagcctgggcccaccccatgtacggcaatatcctggcctcctgttcctatgaccggaaagttattatctggaaggaggaaaatggcacttgggagaagactcatgagcactcaggacatgactcctcagtgaactctgtatgctgggcccctcatgattatggcctgattttggcctgtgggagctcggatggggccatctccctgctgacctatacaggggaaggccaatgggaagtgaagaagattaacaacgctcacacgattggctgtaacgccgtcagttgggcccctgctgttgtgcctggaagcctcatagaccaaccatcagggcagaagcccaattacatcaagaagtttgcatcaggtggctgtgacaacctcatcaagctgtggagggaggaggaagatggccaatggaaggaggagcagaagctagaggcacacagcgactgggttcgagacgttgcctgggccccctccattggcctgcccaccagcaccattgccagctgctctcaggatggtcgagtatttatttggacctgcgatgatgcttcaggcaatatgtggtcacccaaactcctgcacaaattcaacgatgtcgtgtggcatgtgagctggtctatcacagcaaacatcctagctgtgtcaggtggagacaataaggtgaccctatggaaagagtcggtggatggacagtgggtgtgcatcagtgatgtcaacaagggccagggttccgtgtcagcctccatcacagaaggccaacagaatgagcagtgacaacacaggtggcctggtcttatttctaggactgcctattttggaacaacatcccaacaactgggaagaagggtcctaatgctaccaagattcctcaccctgggagtacccacagatggaacactgggtgctcacctgccttactgggatttcctgtgtttaatttaatgtccatctgaaaagtattcatgctaggaacaaatgactattatttttaaatatttttggccatttttaactatcttttggttcaggctgtttccaagctaataaaatcatattgcatagaaactttactgt

SEQ ID NO: 5086 - DNA, 1303 bp, Cricetulus griseus
cggctgccggccttccaggcgccgccatgttgggagcgcagggctcgaaccatggcggcgagccccaggctgcggctgccaaccccggcagctcagctgggcacaccgtgcaagtgcggccaggactgtatctaggcggggcagcggcgctggcggagccagaccgcctgatggaggccggcatcaccgccgtgctcacggtagactcggaaccgggcttccaggctggggccgggttcgaaggcctccggagcctcttcgtgccggcgctggacgaacccgagaccgacttgctcagccacctggatcgctgcgcggccttcatcggccagtcccgagccgagggacgggcggtgttggtgcactgtcatgcaggagtgagtcgaagtgttgctgtagttactgcctttataatgaagacagaacagcttccctttgaaaaagcctatgaaaacctccagactgtcaagccagaagcaaagatgaatgagggatttgaatggcaactgaagttatatgagacaatgggatatgaagtggatccctctagtgcaatttacaagcagtaccgtttacagaaggttactgagaagtatccagaacttcggaatttacctcaagaactctttgctgttgacccaacgaccatttcacaaggattaaaagatgacattctctacaaatgtagaaagtgcaggcgatctttattcagaagttctagtattttggatcataatgaaggaagtgggccattagcctttgctcacaagagaactgcaccatctttggtacttaccacggggagtcaggctcagtgcacatccttcttcattgaacctgtacagtggatggaatctactttgttgggagtaatagacggacagcttctttgcccaaaatgcagtgccaagttgggttccttcaactggtatggagaacagtgctcgtgtggtcgatggataacccctgcttttcaaatacacaagaacagagtggatgaaatgaaaatgttgccagccctggggtcacaaacaaggaaactgtgaatttaggacacagcttggaataaaagcccaggaaacatacttctcttgattactatctttcatagtggagtcaaaatttcctttggagtgtccaaagataattactgaagtagatgtgtgctgggagcttatacatggtatatgatgtatgtgcaatacttcactgggcaatccaggcttttaatcatgtaattttgatttgatataaaaatacttaataaaacaaaaaaaaaaaaaaaaaaaaaaaaaaaaaaaaa

SEQ ID NO: 5087 - DNA, 1302 bp, Cricetulus griseus
cctggggctttaggaggtgagcgggccgccggccggcctgacgctgctgcatcgcgggaggcgcatggcgggcatggggctggcgcgggcctggaagcagatgtcctggttctactaccagtacctgctggtcacggcgctctacatgctggaaccctgggagcggaccgtgttcaattcaatgctggtttctgttgtggggatggcgctgtacaccggctatgtcttcatgcctcaacacatcatggcaatactgcattactttgagattgtacagtgacgaagatgtgaccaggatccagaggttcctggggaagatccaccttatgaagttggaatgagacctcatcagactaagatgctctacagatgtcaacataaccaaccttataagttaacaaagactgaaattcatgagtagaacaggaaaatcatcctgactcatgtgttgtgttctttctttttgattttaaaagaggctcttatatagtagcttttgtctattttaacattgtagtcatttgtactttgatatcagtattttcttaacctttgtgactgtttcaatattctccagtgaaagcttttcttaatgtaactttgagtacatcttaattgccttctatttttaaaacccaaggtcattagttgggctttactgttcttgctattgaatggcatatacatctgcctggatatatttctactcttgaccaaagttttgtaagacacaatacagaatttggggatgggagggaggatacttggagaactacttacaaaagatttatctgcaagcttgaactcaggagtatggttttagccctctagactctttaacagcttttgctctaaaactattaaagtgtttcttagtaatgaaaaagtaacaatcttgctaaaattaatacaaggaatgcttcaccttttaaataatctaattcttacgtggacttatttccaagcaactttgatgattctcatgagggtgggtggtcagtagcagcattgtgtaatacttagatatactgtagcgcttttcacagaaggcagagcagttccttctgagacaatattgacagtgtatttgcttttagtttgctcactgtgacaggtgctgtgaaatgtacttgcacattgtgatcagatgtgatgaattgttcagtaccataaccaaaagacatgtaaatttggttaaaaatcctttcactctttgttattttttttaaaaaggtttttattccttagatgtaaaatgactacttatttttttgatgtaaactcattaaattcaaagaaaaa

SEQ ID NO: 5088 - DNA, 1302 bp, Cricetulus griseus
cggagagagggcaatgcaaaggcaagctggtgaagacctttcttctccccaccatggtcgacagcaccaagtatgaagtggctgcccagcatgaggaaaatgcctctgctctgggagacagggccagcccggtggccgagcaggtaaaactgaagaaggagatctcactactaaatggcgtgtgcctcatagtagggaacatgattggctccggacccttaattatgtcactgaagagatcaggaatcctgagaggaacttgcccctctccattgccatttccatgcccattgtcaccatcatctacctcttgaccaacgtggcctattacagtgtgctagacataaaggacatcttggcgagtgaagctgttgctgtgacctttgcagaccggatttttggtaatattcaattggtacaattccagtggcagttgcgttatcctgctttggtggcctcaatgcttccattgtggctgcttccaggcttctatttgtgggctcaagagaaaggccacctccctgatgccatctgtatgattcatgttgagcggttcacgccagtgccttctctactcttcaatggtatcttggcactggtctacttatgtgtggaggacatcttccagctcattaactactacagcttcagctactggttctttgtggggctttctattgtgggtcagctttatctacgatggaaggaacctgaccggcctcgccctctcaagctcagccttttcttccccattgtcttctgcctctgtaccatcttcctggtggccgtgcccctctacagtgacaccatcaactccctcatcggcattgccattgcactctcaggcttacccttctacttcctcatcatcagagtgccggaacataaacgacctctttgccttcgaaggattgtagcctccactacacggtacctccagatcctctgtatgtcagttgctgcagaactggatttggaagatgaagagatgcccaaacaacaaggtcgcaagtctaaatagagcttgggattctgagacatggacaaacaggtgcttatgtcccattgaccagaacctctctggaggcacctgtccaggagcccagccttggcagcttcaactctgaacttgctttgagggatagaaaagttaatttatttgtttagctatatgttgtttcagacttcataaggggttaatgtagactgtggcaggaatcaggccacttctggagcttggttctagaagttcctgggtgtgcctacccacttcctttttcctttacaagggccaacaatgct

SEQ ID NO: 5089 - DNA, 1302 bp, Cricetulus griseus
aaagtctgctttctcctgcccaagctacgtaaggtcaacgggaaggaagcagcctctgcctgctcacaggtggagaacctggatcgggagctgacctacagggtcacagctcactgggagaagttcatggccaccgtgaaccctgaagaggaagctgacaaattccagactgacttcgtgacatctgccatcagggacgtgcattatggccctgagtctctcagcgagttcacccagtggcgggtgcagatgatcgctgagaaactggtggcctcaggtggggcccaggtgcaggaagctgacatacgaaaggagccgccacaggctgcagctgcctccaagcccaggtgcagagcggtggcctccaagcggccagataatgtcccactcgacctccctccatcaagcgagtgtgttcctcccagcttccagccccacccaccgagacccacctcttcactgcctcttacgacaaacggatcatcctctgggacattgggtgcccaaccatgaataccagttccaggctagccagctactcatgctcaactgcagctctgtccccttgcgcctctgccctgttgccccctgtccggatgacttcctgatagctggctgtgagggaggctgctgctgctgggatgtgcggctagaccagcccaaaaagcaaagggtgtgtgaagtggaattaatcttctctgaagactccaagatgtcagggcagagagtggacgggctggcatttgtgagtgacgatgttgtggcctctaaagggagtggacagggcgttatctacctgtggagctggagccagacgtgggcaggccgggacagccggtctgtgttgcctgtggtcatcctggcccggctgcagtggtcacccaccaatttggcttacttctcactcagcacctgtcctgacaagaaccttgtgctgtgtggtgatgaggagggcagcgtatggatctatgatgttggacacctgctaaagcagccgcctccactggcagcaactccgcaggccccaactcagatcctgaaatggcctcagccagtagcacagggccaaccagtgaccaagaccatggtaaacacggttgtggccaatgcagcttttacgtacctcactgctctgactgactccaacatcgtgtccatctggaggagttgctagcttgcacaggcagggtatcagggtcacagcgtatcagcttggggctaatggtagaggtttttgtaccagtgagtatttttattaaattctctactgtagagtaggaaaaaaaaaaaaaaaaaaaaaaa

SEQ ID NO: 5090 - DNA, 1302 bp, Cricetulus griseus
ggcgtgtagggctgggctgcctaggctgagggtcggaaaggccttcactgcgttggtgagaggcgatcctacgaatcggcggcgctgagagacgccatggagagcaggtgctacggctgtgcagtcaagttcaccctcttcaagaaggagtatggctgtaagaactgtggccgggccttctgtagcggctgtcttagcttcaacgctctggtacctcgggctggcaacactcaacagaaagtctgcaagcagtgccacacagtcctgaccagagggcctcccgacaatacctccaagtggtcgccacctcagaactacaagaagcgtgtggcagccttggaagccaagaaaaagcccagcatttcccagagccagggcttgacccaacaagaccaagccatcgctgatcgcctagcacggctccgtcaggaaaacaagcccaagtcagtaccctcacaagcagagatagaggcacggctagctgccctgaaggatgaagtccagggcgccatcccttccacacgagaaatggaggatcggcttgcagcattacagggcagagtaccaccttctcacaccgtgagaccggcacaccaggcaccagataccaggacccaggctcagcagactcaggatctgctaacacagctggcagctgaggtggctatcgatgaaagctgggaacgaagagccccagtggccccctcagaatgacctcaacaagggaggtacaaggaaccagcacacaaattcccagggggcaggccagcccatccctggagaaggagaagagcaggctgctggccgaggcagccattgagctacgagaggagaacaccaggcaggaacggatcctggctctcgccaaaagattggctatacttcagggacaggaccccaacagagtgaccctccaggactatcacctaccagacagtgatgaggaggatgaagagacagccatccagagagtgctgcagcagctcaccgaagaagctgccctggatgaggcaagtggctttaacatgcgctgtgctggctgcgatgggagacctctactgtgcccggtgcttccgggagggccacgataactttgatcttaaagagcatcagacttctgcctaccgcccccgaccacctggccgagaacactgaggaaaaccctgatgccctcctgaggtggcagagccacaggcagccagcaggctgggacagctcccccgggcccggtgtcagggcatccagtgggatagccgatcctgctctactgatggtaaacacactcttgtgagctttgcagtc

SEQ ID NO: 5091 - DNA, 1302 bp, Cricetulus griseus
tgcagggacttcacggcccacacgggatatgaggtactgctgcagcggctgctggatggcaggaagatgtgcaaagatgtggaggagctgctcaggcagagggcccaggcggaagagaggtacgggaaggagctggtgcagattgcgcgcaaggctggtggccagacagagatcaattccctgaggacctcctttgactccctgaagcagcagacagagaacgtgggcagcgcacacatccagctggccctggccctccgtgaggagctgcggagcctggaggagttccgtgagaggcagaaagagcagcggaagaagtatgaggctgtcatggaccgtgtccagaagagcaagctgtcactctacaagaagaccatggagtccaagaaggcatatgaccagaagtgccgggatgcagatgatgctgaacaggcctttgagcgcatgagtgccaacggccatcagaagcaagtagaaaagagccagaataaagccaagcagtgcaaggagtccgccaccgaggcagagcgagtatacaggcaaaatattgaacagctggagagagcgaggactgaatgggagcaggaacaccggaccacctgtgaggccttccagctgcaggagtttgaccgactgaccatcctccgaaatgccctgtgggtgcactgtaaccagctctccatgcaatgtgtcaaggatgatgagctctatgaagaggtacggctgacacttgaaggctgtaatgtggacggtgacatcaatggcttcatccagtccaagagcactggcagagagcccccagctccggtgccgtatcagaattactatgaccgggaagtcaccccactaatttgcagccctagtgtccagccatcctgtggtgtgataaagaggttctctgggctgctgcatggaagtcccaagatcacatcttctcaactacctgctgcttccacagattctctggctcctactcctgagcacaaagagttggtctatgcagccatcgacgtgcaggcaacacaggggaaccatgacacatcagcccagaactaccgggcgctctatgactacacagcacagaattccgatgagctggacatttctgcaggagacattctggtggtcatcttggaaggagaggatggctggtggacagtggaacggaatggacagcgtggctttgtccctgggtcctacttggagaagctctgaggaaagactggtgctcacacctctgccctcacagtgaggttaggactgtttctcaccactgcccaggcctcatggggccagaaccaa

SEQ ID NO: 5092 - DNA, 1302 bp, Cricetulus griseus
cctgaatcccttgctgctgcagctgctgctgcccaacaactccaaagtggccaggaagcaggacacacgacagacagccaccttcagacagcagcctccacctatgaaggcctgcttgtcatgtcaccagcagattcatcgaaatgcacctatatgccctctttgtaaaagccaagagtcgctcacggaaccccaaaaagccaaaacggaagcaagatgaatgaagagaaggtgaagggctagacctctgttgatcataaaccctccccttggtcagagtgatagaggtcccgatttttctaaaatctacccttccttgccctcctgagtttctatttaatttactggaagaataacccctctctccttgctcttatttctttcttgctcttgggagccccggttcaagaacagctatagtttgggtgctaatgcctgggtctcatgaccccttctctcctgctcacatctcaactactgtcctagtttggagctgactaaggggcaaaaggctctcattgactctttcttttgctcctgaggactggagcctaatgagctgcagggtgtaaggactggaggaggtccatatcttgctttaagaaaaggcctctatgatttcctcccctctagttttgccttaggttctgaagggacaacaactttatttttgctggacatcccagtgggctgaatgcatatatctcccctatattcagctcatcattaaagcccaggagtaacttagacaagtgttcttttttacagtaatttgtgaggctctggtgttgttctatagtcccatcaaagtcttccagttatattcaagttctttcataccagggcatctttagatcccaagatctgtgggtctttccctatactttgccaatcattttatacatgtaagaggctatgactttgcttttccattctttcctccctttgggtctgtattctttaatgtagcctcagttaaggaagtcattggtcactctttttctgtgggttatgtaggtgacctttcttacccccaaatggcactaagctcttcaaaccccacagtgctctcatttttatcaaagccaagtctcctagtcatgttactcttagacctatgggataacatcagggctgagtgatgaaaaagatttagctccaggtctctatccctgactggggagaagagggagagatttatcctgtttttctttaacttttgactttgagtcacaataatatgtgttccaaacatcaaagattcctctgcctttttgaaagtaagtgttatgatatgatttc

SEQ ID NO: 5093 - DNA, 1301 bp, Cricetulus griseus
gcaagatggcggcgcccatggaagtggccgtgtgtacggactcgtcggcgcagctatggagctgcgtggtgtgggagcttcactcgggcgccaacctgctcacctaccgcggcggccaggcggggccgcggggcctggcgctgctcaatggcgagtacctgctggcggctcagcaaggcaagaactacatctgcacttgggagctgcagcgcaaggaccagctccaacagaaaatcatgtgtcctggtccggtcacctgtctgaccacagcacccaatggcctgtatgtcctggcaggaattgcagagagcatctacctgtgggaggtctccactgggaacctcctggttgtcctcagccgtcactaccaagatgtgtcatgcctgaagttcacgggtgacagcagccattttgtctcaggaggcaaggactgtctggtgctcgtctggagtctctgcagtgtgctgcaggcagacccgtccaggatcctcgccccaaggcatgtctggtctcaacacacactcccgatcacagacctgcactgtggctttgggggccccatggcccgggtggccaccgcttcgctggatcagactgtgaagctgtgggccatctcctcgggagacctgcttctgtctgtcttgtttgacgtgggcatcacttctgtgaccatggacctggccgagcaccacatgttctgtggaggtagcgatggcactatcttccaggtggacctgtgcagctggccgggacagagagagcacagcttccggcctgatcagaatgtggggaaagtcttcaaggggcacaggaaccaagtgacgtgcctgtcggtgtccacggatggcagtgttctcctctcgggctcccatgatgagtcagtgagactgtgggacgtgaagagcaagcagtgtctgcgtacagtcaccctcaaaggcccagtgaccaatgcagccatcatgctggccccgcccagcatgctgaaccctgaattcaggcccagcctgcccctgccccacttcaacaagcacctactgggtgctgagcacggagatgaggcccagggtgggggcctgcgcctgcagctaggcctgcacctgcagggcactgagcagacctacctggagcggctagagcagctgcaggccgacctgtcaggctacttggcgaagaacatgctaggcaaccagatgttgccagcgcgggtgttggagctggaggaggaggtgcgcagcctgcgcaagatcaaccgggacctcttcgacttctccacgcgcatcatcacgcggccctctaagtga

SEQ ID NO: 5094 - DNA, 1301 bp, Cricetulus griseus
  modified_base (107)..(107): a, c, t, g, unknown or other
agatgccatttacagactttgttctggccctaaaagacaatccctactttggggctggatttggactggtaggtgtaggcacggttctggctgcagcccgaaaaggngcccaactgggtctaggtggcattccggcgccattacatgatcacactcgaagtccctgctagagacagaagttatgcctggttgcttagctggcttacccgacacagtacccgcacgcagcacctcagtgttgaaacctcataccttcaacatgaaagtggccgaatctccaccaagttcgaatttatccccagccctggaaaccacttcatttggtatcaggggaaatggatccgggtacaacgaaatcgagacatgcagatggtagacttgcaaacgggaactccctgggaatctgtcatctttacagccctgggcactgaccgaaaggttttcttcaatatcctggaagaagcacgagcactagccctgcagcaggaggaggggaagacggtgatgtacacagctgtgggttctgaatggcgtacctttggatatccacgacgccgcaggccactggattctgtagtcctacagcagggtctggctgaccgaattgtcaaagatattcgggaattcattgataacccaaagtggtacattgacagaggcattccctacagacgtggttaccttctttatgggccccctggttgtggaaaaagcagcttcataacagctctggctggagaagtggagcacagcatctgcctgctcagcctcacagactctagtctctcagatgaccggctcaaccatctgctcagtgtagccccgcagcagagcttggtgctcctggaggatgtggatgccgcttttctcagtcgagacttggctgtggagaatcctgtaaagtaccaaggtctaggtcgtctcaccttcagcggactgctcaatgctttggatggtgtagcctccactgaggcacgtattgtgttcatgaccaccaatcacattgacaggctggatcctgccctgatacgtcctgggcgagtagatatgaaggagtatgtgggctactgctcacactggcagctgacccagatgttcaagaggttctatccagggcaagcaccttccttggctgagaactttgcagaacatgtccttaaagctacatcccagattagtcctgcccaggtgcaaggctacttcatgctgtataaaaatgaccccatggggctgttgacaatgttgaatctctaaggtgatcatcaggccactgtcctggaacttgttctatataccaggct

SEQ ID NO: 5095 - DNA, 1301 bp, Cricetulus griseus
gctgctgatgggagctccactctggggagggggcgctggcaccatgggtttgagcgctcgatatggaccccagttcaccctacagcacgtgcctgactaccgccagaatgtgtacatccccggcagcaatgccacactgaccaatgcagctggcaaacgagatggcaaggctccagcgaggcggtaacggcaacaagaagaagtcgggaaagaaagagaagaagtaatatggaggccaggccttgagccacagggcagcctcctccccagccagtccagcttgtccttacttgtacccaggcctcagaattttagggctcaccccaggatactggtaggagccaaggccatgctgtccctctcttgagcaaggtggttgggctgttgtggggacaggtgacccaagcaggctcctagttctggagagttgggcgagtgttataaccttttggcctctccatcagttcagctttcccccaaagcatggtttggtaccagtcttctcatttccttctagagcctgagaccaatgcttaagtttgggggacacagtcaccatccccctggtactgatgcttgctggattttcgggaaggcattttgctacccagtctcttttcactgcctggggatcagtctagtcttttcattgtttcatttgttcccattgttcccactgcatgctatgacttccctactcctcaaagaagagactcctttgcatgtctggagacagtagggggtgtaagctaaagggaagtggacaaaacagctcattaacggggtcttgcaaggggctctgtatgtacccagggtactggcccaaccccccaattcctagccatagacaaactccaggcccagacccctccaccctggttcagcctgggcagcttgggctgagccaccaggaccaatagatttaagctggcatttcagtccaagaaggcttctaagtggatttaggacctgagaggaagaggggcctctgtgggtgctgggtactccagaggtgcccctggtggaagggtgggtcagtggtcctagcaggaagggagacccagcaaggccattcttgctgggttgagtcaaggagctagaacaagggaccaagtggctgtaaagtctcaagccaatgatggggcttctccactgggctcctgtagtcctcaagtccctggcctccaccttaccaggtgccacttctcagaaggccactgcccaggcccccaggccgccccttcgtggccagagactggttaaagccccccagtgcctccttgtgcatagaacttcctctg

SEQ ID NO: 5096 - DNA, 1301 bp, Cricetulus griseus
acctgaccggagcgtgcgttagaaatggcgtcttccttgcttggtggtgagcgactggttcgcgctttgggccctggcggagaactggaacgggagcagctgccccggaagctgcgtgcccagctcgaggctgctctggggaagaaacacacgagcagagataacgccacgggcccccttcgcctgattcccttccgtctgatccgagaactgcatcagcacctgagagaaagaaactccaggctatatcttcatgaactcctcaaaggcagtgaaatctaccttccagaggttgtgaagcctcctcggaatccagagctagttgcccgtctagagaagattaagatacagctagccaatgaggaatacaagcggatcactcgaaatgtcacttgtcaggatgcgcagcgtggggggactctcagtgacctgggaaaacaagtgagatcagtgaaagctctggtcattaccatcttcaacttcattgtcacagtggcagctgcctttgtctgcacttacctgggaagccagtatatcttcacagaaatggcctcgagagtgctggctgcattgatcgtcgcctcggtggtaggtttggcagagttgtacatcatggtgagagcaatggaaggtgaattgggtgagctgtaactagtgcttcaccgtcaaagtctggaagaagcttggggagccccagactctccattgcccatcactgactttcagtcaacccatgaagcttggtactcagctccagttagtcagaggaccaggtcaagttcttctttggagagctgtgtctgctatcaatctccttggagaggaacagaggaaattgagacagtgcttttttaaaactgaaagaactcagtagctacttctgaatccatcgcacatttgccttctggggtccattctggggtctgctgagtctgggttttcccatcagaagtaagtagaatccagaccttccccccaaattgggccgtattgccttcaactggcccaaagaaaaactagattgatacaggatggtggaactagaatccaggcagctaacttttttctagaaaaggaaatggtatcaggccctttttccagaaagcaaaacaacaggaaagaaaccagatgatcagctgtgtccttctgttaaatagagccaaagatgtctatattgtcctgttgtctctgtggtatgttacacttttccgaacttagttaagttagagaatctatttaaggcacttgaaaaatgttatttatccaataaatgtttcttgtgttcagtgtaaaaaaaaaaa

SEQ ID NO: 5097 - DNA, 1301 bp, Cricetulus griseus
aaggaacaacccacgtgcagacgcagcctctctccggagcgcttcccccgttcgatgctcagattcttcccgcggcgcagcctcctttcgatgcccaggccccgctggatgtacagcctcagtacagcggccagccggcctggaatttccaagcctcgacgccttggtactgggggctgcctcctaatggttaccccgcgtatcacacgtcctaccactcttcggttacacaatcttattttccacgaacacacgatgcaaaattgacttcagtttgcctcaaaacagaaaacagagaaagaagaaaagaaaggaaccggttttccactttttctgtgatacctgtgatcgtggctttaaaaatcaagaaaaatatgacatacatatgtctgaacatacaaaatgccctgaagccgattgctctttcagtgcacacgagaagattgtccagtttcactggaaaaatatgcatgctcctggtatgaggaagatcaagctagacactccagaagagattgcaaggtggagggaagaaagaagaaaaaactacccaactctggccaatattgaaaggaagaaaaagttacaacttgaaaaggaaaagagaaggagaagtgttgacgaccacacagtatagggaaaatgaagggcatgtccagacattcacagatggcaaagataagaagtcccggtaaacatcgtaaatggaaaaatggtagacagagagcaggcactagactaggcaatcatgccagaaattcgaagcctcaagttccatccgtggttaatgtagaccctctcggtgctttgatacacagtgactctgagtctgataaggaagagaaaccacaaaggactgtagtacctaaggaggtgacaccagccttgtgttcgctgatgagcagctacggcagtgtttctgggtcagagagtgaaccagaagaaatccccatcaagtctgaagcagatgtcctgacagaaaaccatgtccctcatagcagtccccccaagagtccaagacagagtgttaaaacaactggtagaactatctcaagagccaagttggagagccagaggaatggcttcaggaagatagccctaaagaggaaaaagagttgttaccacccactatttgaaccaagaacacgtcacccgtacctcctggaaatgcttctagctccagacattcgacatgaaagaaatgtgattttgcagtgtgttcggtacatcatcaaaaaagacttttttggacttaatactaattctgtgaaaactgaagctgagtcgatgcctcatgtttc

SEQ ID NO: 5098 - DNA, 1301 bp, Cricetulus griseus
gttctagcccgcgggtcggactcgcctctgcgtcttccaccactgcgaaagagggggaaatgccgaagaagaagacaggcgcgaggaagaaggcagagaaccgccgagagcgggagaaacagctcagagcatcgagaagcactgtagacttagccaagcacccgtgcaatgcttcaatggaatgtgacaagtgccagaggcggcagaagaatagagcattttgctatttttgtaattctgttcagaagttaccaatttgtgcccagtgtggaaaaacaaagtgcatgatgaagtcttcagactgtgtcatcaagcatgctggtgtatacagtactggccttgctatggtgggtgcaatatgtgacttctgtgaagcttgggtttgccatgggaggaagtgtcttagtacccatgcctgtgcctgcccactcactgatgcagagtgtgtggaatgtgagcgaggggtttgggaccatgggggcagaatattcagctgttcattttgccataattttctttgtgaagatgatcagtttgagcatcaagccagctgccaagttttagaagcagaaacatttaaatgtgtttcctgcaaccgccttggccagcattcatgtctgcggtgtaaggcttgtttctgtgatgaacatacaaggagcaaggtgtttaaacaagaaaaagggaaacaacctccttgcccaaaatgtggacatgaaactcaggagacaaaggatctcagcatgtcaactcgctccttgaaatttggcaggcagactggaggtgaagagggagatggagcctctgggtatgatgcttactggaagaacctgtcatctgacaagtatgctgatactgggtaccatgatgatgaagaggaggatgaagcagaggatgaggaggaggaagaggatgggaaggattcagatgctgagtcatcagatctgttcactagtttgaacttaggaaggacctatgccagtggctatgctcactatgaggagcaggagaactaggagcagctcccgctggcacttgaagaagagcaggctgaatcatgaggatgctcagacgtcccctcccttggccttgtccaaaaggctagtcatactagggggtacattctggcggtttgtaggaactgatactggacttctagtgtaaggaaaatgggttaaatgtaatggagtatcatgaattggattattactgatttcaatcatctggtaggttttgtcagttagatacatataaaatacatgataaaggaatagaaaggaaatatatttatttgaaattaaatt

SEQ ID NO: 5099 - DNA, 1301 bp, Cricetulus griseus
ccatcttggaagctgagcggcggtagcagcgaaggcgctgcggcgggtgcggtgggctaagtcccagcgcgggtgcggctcacagaacgggccccactcttccgcaccctgctctggcctcgaccacggcgaacctgagcgcggcggcggcctcagggagaggtgagatgagcagtaacagcaataagagagctccaacaacagcaacacagaggttgaaacaggactaccttcgaattaagaaagacccagtgccttatatctgtgcggagcccctcccttcaaatattcttgaatggcattatgttgtccgaggcccagagatgactccttatgaaggtggctattatcatggaaaactaatttttcccagagaatttccatttaagcctcctagtatttacatgataacccccaatgggaggtttaagtgcaacacaaggctgtgtctctccatcacagatttccacccagacacatggaatccagcgtggtctgtctccaccattctaacagggcttctgagcttcatggtggagaagggccccaccctgggcagcatagagacatcggacttcacgaaaagacagctggcagcacagagtttagtgtttaatttaaaagataaagtcttttgtgaattatttcctgaagttgtggaggaaattaaacagaaacaaaaagcacaagatgaactaagtagcaggccccagaaccttcccttgccagacgtggttcctgatggggagatgcaccgtggccagaatgggctccagctcctcaatgggcatgcacctgctgccggcccgaacctcggtgggctcccacaggccaacaggcatcatggactcctgggcggcgctttggcgaacttgtttgttatagttgggtttgcagcctttgcctacactgtcaagtatgtgctgagaagcatagcacaggagtgaggctcaagagccaccgcaatctacagttgctgctgagggacatgggccagagcttgatgcaggcaggatggacttgctgctaagcacaggatggcctgctggactcctgggcttcactttttaaaaaccttaaaagaaagcaaaaaccaaaatgtgtgatatggaggagattggagagtcttaactcctcttgaggctgatgtggacaagggccactcacgctttggttttattgcttactcctgtgttgtcttttggactgtttagtaaacctggtttgtttgtttgttttttttttttccattttattagatttgatcacttaaaaatataaaactttaatgcctatacaaa

SEQ ID NO: 5100 - DNA, 1301 bp, Cricetulus griseus
  modified_base (1277)..(1277): a, c, t, g, unknown or other
cactggtcactctatgaaggaaaagccttacccaggcctggttcttgtgccagcaaggtgaatggagggaagtatgggaccactaaagactaccctgatgatgccattcgattcgcaagaactcatccactaatgtatcagcccataaagcctgctcataaaaagccaatactagtaaaaacagatggaaaatataacctgaagcaactagcagtggatcgagtggaagctgaggatggccaatatgatgttttatttattgggacagatagaggaattatgctgaaagtaatcacaaatttaacaaaccaaagaaaacggagtggatggaggaagtcatcctagaggaacttctagatattcaagaccggtcctatcatttctatggaaatctcttcaaagagacaacagctctacatcggatcaccctctgcagtggcacaggtcagattccatcattgcgacatgtatggcagtgcttgtgccgactgctgcctggctagagacccttactgtgcctgggatggcatatcctgctccaggtactacccaacaggtgcacatgcaaagaggcggttccgcaggcaggatgttcgccatggcaatgccgcccagcagtgctttggacaacagtttgttggagacgctttcgacaggactgaagagaggctggcatatggcatagagagcaatagtactttgctggaatgcaccccgagatcattacaggcaaaggtcgtctggtttgttcagaaaggacgtgaagcaagaaaagaagaggtgaagacagatgacagagtggtgaagatggacctgggtttactcttcctcagagtgcgcaaatctgatgctgggacctatttttgccagacagtagagcatagctttgtccatactgtgcgcaaaatcacgctggaggtggtggaagagcagaaggtagaggggatgttcttaaggaccacgaagaggaaaaacatcacaagatgccctgcccgcccttgagcagcatgcctcagggcacaaaaccctggtacaaggagttcttgcagctgattggctacagcaacttccagagagtagaagaatactgcgaaaaggtgtggtgtacagacaagaagaggaaaaagcttaaaatgtctccctcgaagtggaagtacgccaacccccaggaaaagaggctccgctccaagccggagcacttccgcctgccccggcacgcactggactcctgagggcgccttctgctggctgccaagggaccgagcatgggaacaaanaaattaaagttaaaagaaaaaaag

SEQ ID NO: 5101 - DNA, 1301 bp, Cricetulus griseus
ggtggcggcggcggcggctcccgcgcgctccgggtcgctgaggccgagggtacagctgggctgactatagaccagagacaatgttccgagcagcggcgcctgggcagctccggcgggcggcctcattgctccgatttcagagtaccttggtaatagctgagcatgcaaatgattctctagcacccattactctaaataccatcactgcagctggacgtcttggaggtgaagtgtcctgcttagtagctggaaccaaatgtgacaaggtggtacaagatctctgtaaagtagctggagttgcaaaggttctggtggctcagcatgatgcctataaaggcctccttccagaggaactgacaccattgattttggaaactcagaagcagttcaattacacacacatctgtgctggagcatctgcttttggaaagaaccttttgcccagagtagcagccaaacttgatgttgccccaatttctgacatcattgagatcaagtcaccggatacatttgtgagaactatctatgcaggaaatgcattgtgtaccgtaaagtgtgatgagagagtgaaggtgttttctgttcgagggacatcttttgaggctgcagcaacaagtggaggtagtgctagttcagaaaaggcaccaagttcttcaccagtgggaatatcagagtggcttgatcagaagttgacaaaaagtgatcgaccagaattaaccggtgccaaagtggtggtatctggtggtcggggcttgaagagtggggagaactttaagctactgtacgatctggcagatcaactgcacgctgcagttggtgcttcccgtgctgctgttgatgctggctttgttcccaatgacatgcaagttggtcagacaggaaaaatagtagcaccagaactttatattgctgttggaatatctggagccattcaacatttagctgggatgaaggacagcaagacaattgtggctattaacaaagacccagaagctccaattttccaagtggcagattatgggatagttgcagatttgtttaaggtggttcctgaaatgacagaaatactgaagaaaaaataaataaaaatcatatcttaaggaaactatcaaaagtattcagctgaaatcatagaaatataatctgaggaaagaaagtatgctaacagcagctagaatgccttttgatgaatcaattattcctttttaattttttgtggtcctaaacaattattttttgacattttctaattctgtaataaaaaataaagttttgtcatcctttaaaattactatcaaaaa

SEQ ID NO: 5102 - DNA, 1300 bp, Cricetulus griseus
ttctcggagatcacagcggctgggccctgtgggtcgccttgtagctttctgccgtggcggggtccagctggtcgtcctgctgctcttcttgccgtcatctactctgggccagtgccaagccccatcatggttttcatttgctagccgaataaatcaaactgatgaatccgtgtttcctattggagcatctttgatgtatcaatgtcgcccaggacatttcaccaggcagttctccatcatctgccaacaaaactcagaatggacaagtgctgaaaatatatgtatacgcaaacaatgtgaaactcctcaagatcctaacaatggcgtagtacatgtactcacagacacccagtttggatctgtaattaattatacttgtaatgcaggataccgcctcattggttcctcttcggctgcatgcataatttcagataaaaatgttgcttgggataatgagccacctatatgtgagataattccttgtgaaccaccccaagccattgccaatggagatctcgttgatcctacagaagattttcattatggaatggtggctacctatcgatgcaaaactgatgagagggggaagaagctctttaacctggtgggtgagccatccatacactgtaccagcaatgatggtcaagttggagtctggagtgggcctcctcctcagtgcattgatgtcaagaaatgtacgcctcctcatgttgaaaatgccttcatggtgtctgaaagcagaagcttattttccttaggggatattgtggagtttggatgtcagcctgggtttatgatggcaggaaacaacagagtgcaatgtaacaaattaaacaaatgggagccaaagttaccaagctgcttcaaggaagtggaatgtattctccgagtgaaatccggaaggagttgaaagagaaaaaatattactatgaagatactttaaccttggaatgtcaggatgggtatactctagaaggcaattctcagagcaagtgccagtcaaatgccagctgggttccttctctgggcaaatgtgtacctcattcaaacagtggtctcataactggtattgtcattggaatgatcatcgttattttattcatcattgctctctgttgtttgattcagaaagaaaaaaaaaagacaaaacctccgacggcaagtgtaaaggagtgagtatccatttaaatcctcaagaagacagctgtaatcaccctcaagctctgctctcaagtcaggagaacagcagttccaatagcgcagctcggaattcactcacccaagaagcctcctaaatagc

SEQ ID NO: 5103 - DNA, 1300 bp, Cricetulus griseus
cgggatttccacaccgccgtgtcccggcccggccttcggggagccccggtacatctctgtcggctacgtggaccacacggagttcgtgcgcttcgacagcgacgccgagaatccgagatacgagccgcgggcgccgtgggtgcagcgggaggggccggagtattgggaggaggagacgcggagagccaagggcaacgcgcagaatgaccgagtgagcctcaggaacctgctcggctactacaaccagagcgagggcggctctcacaccatccagaggatgtacggctgtcacgtggggtcggacgggcgcctcctccgcgggtacagtcagatcgcctacgatggcaacgattacatcgccctgaacgaggacctgaggacgtggacggcggcggacacggcggcgcagatcacccagcgcaagtgggagcaggctggttttgcagacagatacagggcctacctggagggcacgtgcgtggagtggctcggcagatacctggagcacgggaaggaccagctgctgcgcacagatcccccaaaggcacatgtgacccatcatcctggacctaaaggtgatgtcaccctgaggtgctgggccctgggcttctaccctgctgtcatcgccctgacctggcagagggaggaggaagaacagactcaggacatggagctggtggagaccagaccttctggggatggaaccttccagaagtgggcatctctggtggtgccttctggggaggagcagaaatacacatgccatgtgtaccatgaggggctgcctgagcccctcaccctgagatgggagcctcctcctcagtccactgtcccatcatggcagtcattgctgctctggttctccttggagctgtgatcattggagctgtggtgttttttgtgaggaagaggagaaactcaggtggaaaaggagggaactatgctccagctccaggcagggacagttcccagagctcggatgtgtctctctcagattgtaaagcttgaagacagctgcctggcatggacggagtgacagacaatgtgttcagccctctcctgtgacatccacggttgactctgcaacagtgtctgatgttccctgtgatcctatgggctcaatgtgaagaactgaggagcccagcccagccctgcacaccaggaccctgtccctgcactgcctgtgttcccttccatggccaacacttcctgttccagcagacaggaggggacatctccatcctgtcacctccatgctgccctgagctgcacccctgaccttcccctctgaaaataataa

SEQ ID NO: 5104 - DNA, 1300 bp, Cricetulus griseus
ctccgctgcggaaggccggcgaggggaccgttgggcccgacgcgaaccgtgcggagcgcgggcatcgccgagcgcgagtgcagggctcgcagtgcagcgcgatgggcggggagcaggaggaggagcgcttcgacggcatgctgctggccatggcgcagcagcacgagggcggcgtgcaggagcttgtgaacaccttcttcagcttccttcgacgcaaaacggactttttcgttggaggagaagaggggatggcagagaagctcatcacgcagacctttaaccaccacaaccagctggcacagaaggctcggagagagaagcgagctcggcaggagactgaacgtcaggagaaggcagagcgggcagccaggctggccaaggaggccaaggcagagactcctgggccgcagatcaaggagctgactgatgaggaggccgagaggctgcagctggagattgatcggaaaaaggatgcagagaatcatgaggtccaactcaaaaatggcagtctcgactcacctgggaaacaggatgctgaagaggaggaggaggaagatgagaaggacaaagggaagctgaagcccaacctgggcaacggggctgacctgcccaactaccgctggacccagaccctgtcggaactagatctggctgtgcccttccgagtcagcttccggctgaaagggaaggatgtggtggtggacatccagcggcggcacctccgggtgggcctcaaggggcagccgccggtgattgacggagagctgtacaatgaagtaaaggtggaggagagctcgtggctcattgaagacggcaaggtggtgacggtgcatctggagaagatcaataaaatggaatggtggaaccgcctggttaccagtgaccccgaaatcaataccaagaagattaatcctgagaactccaagctgtcagacctggacagtgagactcgcagcatggtggaaaaaatgatgtatgaccaaaggcagaagtccatgggattgcccacctctgatgaacagaagaaacaggaaatcctgaagaagttcatggatcagcacccagagatggatttctccaaagccaaattcaactagctcctgtgtttgccttcctgaactcttgggattgagcccctaaacttcctttcccaccttttcctgggaccttggaaccttagggctggggcaggcatgggacatcctaggcatgtgagctccagggcttcaccggacatgggctgggtcttggggtcttctcctccccatttggcctgttacacattaaagctctttatcct

SEQ ID NO: 5105 - DNA, 1300 bp, Cricetulus griseus
tgtgctggcaccggaacaccgagcgtctccatggtggacttcagcatcgcggtggagaaccagctgtctgggaacctgctgaggaagttcaagaacagcaacgggtggcagaagctgtgggtagtcttcaccaacttctgcctgttcttctacaaatcacaccaggacaatcaccccctcgccagcctgcccctgctgggctactcactcaccgttccctcagagtctgagaacattcacaaggactacgtcttcaagctgcatttcaagtcccacgtgtactacttcagggctgagagcgaatacacattcgagaggtggatggaagtcatccgaagtgctaccacctgctcagcctctcgggcccacattttgagtcacaaagaatctcacctgtattgatggctggacaccattggttgttccagtcacggctgctttcttggaagatagaatgaagcctggcaaaattcacacctgtctgaacaccagactgctgttttccaaaatggatttctccagtgtctacaacaaatggcgcagtcttaagcaaatgagatcatttttggatttcattttttttcagtctttctacttttataataatagggcactcataggactcacttcccttgactaataagcaatttgtggggcactccgttccactgaagggtttggctccagtgagaccccggttaccagacctattttcttggtggaagttgaccaaattgtttgtgattcttatttacaaactgtagtggggttttctgttaagagcagcagatatccagtgcaatacctgggcgtcaccatcccgtgcgtggtgtgtaaaatgggggctcttaggctgtgatgttttgctgtctgtttcacaagcatgagaagctgtatgtcgttgaccgaagccattgtgctgttatgttatggggtgttgagtgagcttcgcagagaagcactcactgtatggtaatggtacgtagtcccagccctggtgactggacccagttcctcctgacgccatggtttgaacctgcacattctctaagtatgtcttcaagtctttctttttatactcattccttccgggcatggggtacagatggatgacaccccacatcttgtacagactcctctggggacctggctgccaaacactacctaagcctcccagtggaaaaatgtttgcctgttctccagggtggctgggtggctgccattcccttcatgcatagagccttctacaatgcaagatggccacatcagcacgtcctctcccaatgccctacatcccagc

SEQ ID NO: 5106 - DNA, 1299 bp, Cricetulus griseus
aacggcctgggcagcctgtgcagatcgccagccctgaatgccgtgcctggctctgcagtcccagcaacacagtcagcatgcagcagcaaccgtcgccaagatccttggctccttctgcagagcccaccaagcccccttacagctacatagccctgatcgccatggctatccagagttcaccggggcagcgggccaccctcagtggcatctacggctacatcatgggtcgcttcgccttttaccggcacaaccggccgggctggcaaaacagcatccgccataacctgtctctcaatgagtgcttcgtcaaggtgccccgcgacgaccgcaagccaggcaagggcagctactggaccctggatccggactgccacgacatgttccagcatggcagcttcctccgtcgccgcagacgcttcaccaagcgcacaggtgcccagggcaccaagggccctgtcaaggcagaccacagactcctcagagctgccagcccagacccaggagcccccaacaccactactggcaggctgtgcccattcccaccagaggcgccaaaccccaagggtctaaactttggggatctgatggggtcgttgccagccagcatatgtccggcaactagtgacgccaggccccagctggccactgaatccaaagagatgtgctcgcccaagtctgcatgtccaagggagctcactgaagccacctcgccctccccgtgcccagcattcagcttttcggctgccttccctgaagctgagagtcttggcaaggcccccacacctggagtggcccctgagggcgccgggagcagctaccagtgccggatgcaagcgttaaatttctgtatgggaactgactcgggccttgaacatctcttggcctctgcagtacccgcccctgcaccctcgactccttccgcctctcaccgggccccattgcccttgccagctgactccaaggaaccctgggtgactgggaacttccctgtccagggaggttccgggtaccccctggcgttacctccttgcctttaccggacaccaggaatgttcttcttcgagtgattgactgcagcagtcgcttcgcagggcctctgtgaactactctctgaagaccctggctgtgggacctagggcactcttcaaggacccagccctggcaggccaaggactgtgaggaccagaaggccgaagtgagccatcagccaggtcccggggcctcctgacaaacttgggatgaggggaggtggggccctcggattttctctgtggttctcagggctaataaagccagtgt

SEQ ID NO: 5107 - DNA, 1299 bp, Cricetulus griseus
ccatgccgctggaaaacctagaggaagagggtcttcccaagaaccccgacctgcgcatcgcgcagctgcgcttcctgctcagcctgcccgagcaccgcgggaacgcggcggtgcgcgaggagctgatggcggcggtccgggaaaacaatatggctccttattatgaagccttgtgtaaatccctcgactggcagatggacatggatctcctcagtaaaatgaagaaagcaaatgaagaagagttgaaacgcttggatgaggagctggaggatgcagagaagaatctgggagagagtgaaattcgagatgcaatgatggcaaaagcagagtacctctgtctgataggtgacaaggagggagctctgacagcgtttcgaaagacatatgataagactgtggccctgggtcatcgactagatattgtgttttatctcctaaggattggtctcttttatatggataatgacctcatcactcgaaacacagaaaaggccaagagtctaatagaagaaggtggagactgggacaggagaaataggctgaaagtataccaaggtctgtactgtgtggctatccgtgatttcaaacaggcagcggagctctttctcgacacggtttctacatttacatcctatgagctcatggactataagacgtttgtgacttacactgtttacgtcagtatgattgccttagaaagaccagatctcagggaaaaggtcattaaaggagcagagattcttgaagttttgcacagtcttccagcagttcggcagtatctgttttctctctacgaatgccgttattcagttttctttcaatcattagcaatcgtggaacaggaaatgaaaaaggattggctctttgcacctcattatcgatactatgtaagggaaatgagaattcatgcgtacagccagctgctggaatcatataggtcattaacccttggctatatggcagaagcgtttggtgtgggcgtggaattcattgaccaggagctgtccaggtttattgctgctggaagactacactgcaaaatcgataaagtaaatgaaatagtagaaaccaacagacctgatagcaagaactggcagtaccaagaaaccatcaagaaaggagacttgctgctaaacagggttcagaaattgtctagagtaatcaacatgtaaaaactatttaaaaatgtattccctcacagatgttacttgaagccttcatagatttcttcactgtgtgcccacttcaacagcatcaaataaatatgccattgtttctagtttaaaaaaaaaaaaaaaa

SEQ ID NO: 5108 - DNA, 1299 bp, Cricetulus griseus
gcccagcccgtcactgtcaggaaccccgtgtagctgctccagctatgtgtgaagaagaggacagcaccgccctggtgtgtgacaatggctctgggctctgtaaagctggctttgctggtgatgatgctcccagggtctgttttcccatccatcgtgggacgtcccagacatcagggagtaatggtgggaatgggacagaaagacagctacgtgggcgatgaagcacagagcaaaagaggaatcctgaccttgaagtacccgatagagcacggaatcatcaccaactgggatgacatggaaaagatctggcaccactccttctataatgagcttcgtgtggcccctgaagagcaccccaccctgctgacagaggcccctctgaaccccaaggccaaccgggagaaaatgacccagattatgtttgaaaccttcaacgtgcctgccatgtatgtggccattcaggctgtgctgtccctctatgcctctggacgtacaactggtattgtgctggactctggagatggtgtaactcacaatgtccccatctatgagggatatgccctgccccatgccatcatgcgtctggacttggctggccgagatctcaccgactacctcatgaagatcctgactgaacgtggctattccttcgtgactactgctgagcgtgagattgtccgagacatcaaggagaagctgtgctacgtagctctggactttgaaaatgagatggccactgccgcctcctcgtcttccctggagaagagctatgaactgcctgacgggcaggtcatcaccattgggaatgaacgcttccgctgccccgagaccctcttccaaccatctttcattgggatggagtcggctggtatccatgaaaccacctataacagcatcatgaagtgtgatattgacatcaggaaggacctctatgctaacaacgtcctctcagggggcaccaccatgtacccaggcattgctgaccggatgcagaaggaaatcacagctcttgcgcccagcaccatgaagatcaagatcattgcccccccagagcgcaaatactctgtctggattggaggctccatcctggcgtctctatctaccttccagcagatgtggatcagcaagcaggaatacgatgaagctggtccctcccatccgtccaccgcaaatgcttctaacgtcacctcccctgctctgtctccagcacacgactgtgaatgttttgtggttcagcgccttcagttcctttctaaatcattcctacccaaagctttgacttgttaccttgtttttttt

SEQ ID NO: 5109 - DNA, 1299 bp, Cricetulus griseus
cggaggatatgaggaggaagggctgttcggaacagcagctggaagccatcctggggcatcgtgcatctccgccaccaagtcctggcaacgggagggaggttggggagggctgtgtgtgactggaaggatgtcctggtctggaggtgagaagcagaggattggcatggcccgaatgttctaccacaggccaaagtacgccctcctggatgagtgcaccagtgctgtgagcattgatgtggaaggcaagatcttccaagcagccaaagatgctggtatcgcactactatccatcacccatcggccctccctatggaagtaccacacacatttgctgcagtttgatggggagggaggctggaagtttgagaagctggactctgcagtccgcctaagcctgaccgaggagaagcagcgcctggaacagcagctggcaggcatccccaagatgcaggggcgccttcaggaactctgccagatccttggcgagactgcagccccagttcagcccctggtcccaggtgtccccacttgactggggaccttgtccccagcccccacccttctttatactctcagatcacatgaaggaagctgcagcccccacccttcccttactgtcctgcatgcctccccctcccaagcctcctagccaattgcctgctttacctgaagcccccactctcaagagcaactggatatgaatgggaacactctgcatcccaccgttaccctgaggtctgctccatgaactgtgcccttatagggcaatgtgtcctttacttttctctggggaggggtggagggtttggaaggccccagttctaaccctacagcagtatggctgagccatgaaaagtaagcaggagctgcccacaccccttactgccagcagccagaatgtgtggcaaagcctgatggttgtgggttacatccctcctgaaacccaagttcttgttcctttgatccatccctttgttgccatcctctagggtagccagccaatgcccctgtcccacaggacacacccccatggaaacagccaaatggggcataggatcaaacagggcccaaagcattcccttccccgtggtaactcccagaatggcacggtgttactcctgagccatgagaagaatgtagccctggccttctcattcctttaccttctacaacctaatttattggactcccagtttatagcggtctgaattgccaacgtgagcgccctgccagcacaggaggtgactgggtggtcccttctgtctgttcagtttctggtgccaaacctggcccctcacc

SEQ ID NO: 5110 - DNA, 1298 bp, Cricetulus griseus
gcggcgcggaagaacgccacggcggtggtggtgtacaaccaggagcgctacgggaacgccaccgagcccatgtcgcacgcgggaacaggaaatacagtcgtcattatgattagctatccaaaaggaagagaaatttttgatctggtgcaaaaaggaattccagtaaaaatgaccatagggattggtacccgtcatatgcaggaattcatcagtggtcagtctgtggtgtttgtggccattgccttcatcacgatgatgattatttcattagcatggctaatattctattatatacagcgtttcctatatactggctcacagtttggaagtcagaatcatagaaaggaaactaaaaaagttattggccagcttccactacacaccgtaaagcatggagagaagggacttgatgttgatgccgagaattgtgcagtgtgtattgaaaactttaaagtaaaggatgttatcagaatcctgccatgcaagcatatttttcatagaatatgcattgacccatggcttttggatcaccgaacgtgtccaatgtgtaaacttgatgtcatcaaagccctgggatattggggggaccctgaagatgcacaggagctacctattccagaagctgccccaggaagtgtttctattgggaatctgagtgtgacatcccaagatgaggacaggagtgctgaaagcaaccttccatcatcatcctcgagtgaatctgggccaaaccgcccctgtttcaaagaagatgcaggggaagacacagcattactaggagccggcaggaatgaacctcagcgtggaggatccatctgctagtgcacctcctcaatgacagcctcaccgacagagccttggcttgaactacaggacatttaattttttactctagggcatagtttgtatacttgaaaacagtggatattattttactttacctttcagattcagatttgatatacaaagggctgagatattttattcctaaaaagacttaattagccttcatctatttatctactgaagtatgatgtatatcataaattttgttgcgtcagactgtcacagatgtggagggtagtgtttctgagtactagactagcttctgtggtactgtaaaccaagattctgtttctcaggcttttagacaaagctcactatgtagaattgtgtaatataattcagtaattgatcaaatgggctttccctgaagcagagactctttagaacttgtaaaacgagaaatcttgccataggcagtggtttttgtataaactaaaaaaaaaaaaaaaaaa

SEQ ID NO: 5111 - DNA, 1298 bp, Cricetulus griseus
ccggttactgatcggactaagttccagtggtgacttataaatcaagttaaaatgtctccagaaattgccttgaatcgaatttctccaatgctgtccccattcatatctagcgtggtccgaaatggaaaggtcggactggatgctacaaactgtttgagaataacggacttgaagtctggctgtacatcattgactcctggacccaactgtgaccgcttcaaactgcacataccatatgctggagagacattaaaatgggacatcattttcaatgctcagtacccagagctgccccctgatttcatctttggagaggatgctgagttcctgccagacccctctgctctacataaccttgcctcctggaacccttcaaaccctgagtgcctcctgcttgtggtgaaggagctggtgcagcagtaccaccagttccaatgcagccgcctccgcgagagctctcgcctcatgttcgaataccagacgctcctggaagaacctcagtatggagagaacatggaaatttatgctgggaagaaaaacaactggactggtgaattttcagctcgattcctactgaagttacctgtagatttcagcaacattcctacatatcttctcaaggatgtaaatgaagaccctggagaagatgtggccctcctttctgtcagttttgaagatactgaagccacccaagtgtaccccaagttgtacttgtcaccccgaattgagcatgccctcggaggctcttcagctcttcatatccctgcttttccaggaggaggctgtctcattgattatgtgcctcaagtttgccacctgctcaccaacaaggtacagtatgtgattcaaggatatcacaaaagaagggagtatattgctgcttttctcagtcactttggcacaggtgtcgtggaatatgatgcagaaggctttacaaaacttactctgctgctcatgtggaaagatttttgtttccttgtacacattgacctgcccctgtttttccctcgggatcagccaactcttacctttcagtccgtctaccattttaccaacagtggacaactttactcccaagcacaaaaaaattacccatacagccccagatgggatggaaatgaaatggccaagagagcgaaggcttatttcaaaacctttgtccctcagttccaggaggccgcatttgccaatggaaagctctaggaaacagcagtgttgagaggcagccaaccagactgctcagtccacatgtgtgtcagcacacaggctgcttcccggaagccacttggaatgtcttc

SEQ ID NO: 5112 - DNA, 1297 bp, Cricetulus griseus
ggagcctcgcagcctcacgtccatgtccgcggtggtggcgcctgtggctgtgcaccccgacagcatgctctccgaggtggaggagcccaaggaagtggccacagatgtctttaattctaaaaacttggctgttcaggcgcaaaagaagatcctgggtaaaatggtatctaaatccattgccaccaccctgatcgatgacaccagcagcgaggtgctggatgagctctacagggtgaccaaggagtacacgcaaaacaagaaggaggcagagagggtcatcaagaacctcatcaagaccgtcatcaagctggccgtcctccacaggaacaatcagttcaatcaagatgagctggcgctgatggagaagtttaagaagaaggttcaccagcttgccatgacagtggtcagcttccatcaggtagaatacacctttgaccgcaatgtgctgtccaggctgctgaacgaatgccgagagctgctgcatgacatcatccagcgccacctcaccgccaagtctcacggacgggttaacaatgtctttgaccatttttcagattgtgagtttctggctgccttgtataatccctttggaaaatttaaacctcacttacagaaactttgcgatggcatcaacaaaatgttggatgaagagaacatatgagttggacattaatggtagtacttttgtgtggcttgttgtagttgaaaaaaaaaaaaagacatattgccaaaaattctggctgaaaatgtcttagtgaatgtcaggatgtgggaaaaatagacggttggtaattcaaaaacagagtgacacaaagacagacgagtgtgtcttcaatcactgaggctttctgtgttttagggaaattttgttggtggcacattagatatttctaatatgtacaaagttgtgtatcttgattcacttttattctttactgtgtctgtgtatctcttttaaaatggcaaggacctctctttgctgtcattgatccttttgaaacaattctgcttcttgtaagaaagtgcttctgaagctgagttgtactttttactaccatcagtgacacttagatctctcaaaatggtagtaacatgtcattgtcttgaaatacttgcttagggcctaactttgatgtcatcttgaacttatgttgacaaatgtctctgaaattaacatccatttcacacataggaagaaaaatcttctaagattggctttgatattgaaataataaaatattttttatttaaaaaaaaaaaaaaaaaaaaaaaaaaaaaaaaaaaaaaaaaaaaaaaa

SEQ ID NO: 5113 - DNA, 1297 bp, Cricetulus griseus
gactgcccagaggctgagaaggaaagcaacactctgaggatttgcagccacgtggccgggatctgtcacaacatcctgagctgctgtccagaggagctgctgcagcagagggctgtgctggagcaggtgcagctggacgacccttcaagtctagaaatccatactatcaacaactgcctgcacttcgtgtccccctgaagccccaagcacacttccagaaaaaacagcagagcctccagagacttcaggacaccctgacaagagtcccatccttggtcagaagaaatcaaaaggtgtggccacgaggttgagccgtcggcgggtgtcctgccgggagctgggcctgccagactgtgatggatggcttctactacgcaaggtacccagtggctttatgggcccacgctggcgccgctgctggtttgtgctcaagggacacaccctctactggtaccaccaaccccaggatgaaaaggccgaagggctcatcaacctctccaactacagcctggagagtggacatgaccagaagaaaaaatatgtgttccagctgacccatgacgtgtacaagcccttcgtctttgctgctgagaccctgtctgatctgagcatgtgggtgcgtcatctcattacctgcatttccaagtaccagactccaggccgggccccctctgccagaaaggaagattgctacagtgagacggaagccgaagaccctgacgaggaagctgggtcccgctcagcttcacctggtccagctccaacttggagtgacacatcacccgtggcttcacccttgcagagtccaaggacatcttttggctcttcagcagacagcagtgacagggcactggaaggaatggttcaggggctgaggcaggggggtgtgtccctcctggggcagccacagcccctgacccatgagcagtggcggagctctttcatgcgtcgaaaccgtgaccctcatctcaatgagcgagtacaccgcgtgcgggcactgcagagcacactcaaggcaaagttgcaggaactgcaggccctggatgaagtgctgggtgaccctgatctcacgggagcaaagttccgccagtggaaggaacagaaccaggagctgtactcagagggcctgagtacctggggagggatgcgggcccagaacagctccccagccccaacctctgactccagtggtcagtctccacagcccctgccttctgaccctgacggggcccctcccagcctggcccaattcggccccagagaacatcctccaacctcctgacctctgaccctggct

SEQ ID NO: 5114 - DNA, 1296 bp, Cricetulus griseus
gaggcatgggctgggtccaggccagcctgctggtccgaggcctgtccaggggctggggaagcatctgcagtactgccctctcaagagctgccaccactcaggtgtccctccaggccccacgaggcctccactgcagtgcagttatacataaggatgacgtgtcgttggttcctcgacctcccgagccccagaggaaacccatcaaggtcccagttctccacgaagaactgttcacgccatcagcaactggggagaaggacaaggcaagcttcttacgtgcattgcgcagctttgaggagcacagtgtgcgcaagcgtggccatgtggacttcatctacctagcgttgcgcaagatgccagagttcggtgtggagcgggacctgtcagtgtacaacctgctgctggatgtcttccccaaggagatcttccggccccgaaatattatccagcgcatcttcgtccactatccacggcagcaggagtgtgggatttcggtcctggaacagatggagagatatggagttatgcccaacacagagacagagttcctgctgactcagatatttggacgcacaagttaccccatgctcaagttcctgcggatgaagctgtggctcacccgcttcaagaatatcaacccctaccctgtgccccgagatctgccccaggaccctttggacctggctaagctaagcctgcgacgcatggagcctgacctcagtgccaaggtcactgtctaccagatgtctttgcccagtgactccacaggcacagatcccatccagccccacattgtaggaatccagagtcctgatcagcaagctgccctggcccgccacaatccatccaagcctgtttttgtcgagggccctttccctctctggctgcgcaataagtgtgtctattatcacatcctgagagctgatctgccactccctgaggaagagaaagtagaggaaatcccagaagaatggaatctctactatccaatgaagctggacctggaatattcaaggagtggctgggacaactatgagtttgacctggatgaagtgacagaaggccccgttttcgccatgtgcatggctggtgcccatgaccaggcaacactggtcaagtggatccagggcttgcaggagaccaacccaatcctggcacaggtccctgtggtatttcgcctggccaggtccaccggggagctgctgacaacctcaaggctggaggaacagtcccctcccacggttctcccagggaccaggaggaagatgatgctcttcaggcacagccgcagcaggg

SEQ ID NO: 5115 - DNA, 1296 bp, Cricetulus griseus
cagactcgggcttcaagccctgtagccggaagacgtctaatggtgcatcactggtgtcttctgcctcagtttcgggtccatgcggaaagctttccgataaggattctcagcgagaccgcactcgattaaatcggtctgtctcttcaaaccaaggaggcgggctcgccgcagccgcttccaggccgaggctagaagagcctactgcgcacgcgcagtagacagcgacggagccaccaatggagcagtccggaggggagcaagaaccgggagccgtcaggctcctggacctgccctgggaagacgtgctgctcccgcacgtcctgaactgggtcccgctgcgccagctgctccggctgcagcgcgtcagccgcgccttccgggcgctcgtgcagctgcacctggcggggctgcgccgcttcgacgccgcacaggtggggccacagatcccacgggccgcgctagcccggctactgcgggatgccgaggggctgcaggagctggcgctggctccgtgtcacgaatggctgtcggacgaggacctggtaccagtgctggcacggaacccgcagctacggagcgtagcgctggccggctgcggccagctgagtcgccgagcgctgggggcgctggctgagggctgcccgcgtctgcagcgcctttcgctcgctcactgtgactgggtggacgggctggcactacgtggcctcgccgaccgctgcccggctctggaggagctagacctaaccgcctgtcgccaactcaaggatgaggccatcgtgtacctggcgcagaggcgcggcgcaggcctccgcagcctctcgttggctgtcaacgccaatgtgggggacaccgcggtccaagagttggctcgaaactgcccgcaactcgaacaccttgacctcacaggctgcctccgtgtcggaagcgatggtgtcaggacactggcggagtactgcccggcactgcgctcgctgcgggtgcggcactgccaccatgtggccgaacccagcctgagccgcttacggaagcgtggtgtggacatcgacgtggagccacccctgcaccaggctctggtgctactccaggacatggcaggcttcgcaccctttgtcaacctgcaggtctgacagaatttcctgtgggtgggagcacagctggactgtgtagccggggcctgacactgagctgtagggaaaccgaactgtgggggcctgtgtggttgagaggcctgtgccctgccccaccctggaatttcaaataaagagctttttaaccctaaaaaaaaaaaaaaaaaaa

SEQ ID NO: 5116 - DNA, 1296 bp, Cricetulus griseus
aaatggaccaattttgacaagatgtagtgctgcagcgtgcgtgatcagacatgttcagtcatggcatccgaactttgtaagacgatctctgtggccaggcttgaaaagcacaagaatttgttcttaaattataggaatttgcaccatttcccattggagttattgaaagatgaagggctgcaacatctggagaggctctatatgaaaagaaactcactcacaaccttgccagaaaatctcgcccagaagcttccaaaccttgtggaactgtaccttcattcaaataacatagttgtggttccagaagccatcgggtcccttgtaaaactccagtgtttggatctcagtgacaatgccttagagattgtttgcccggaaattggtcgtctgagagcattacgtcatcttcgattagctaacaaccaactacaattcctacctccagaggttggcgatttgaaggagctgcagacactagacatttctaccaatcgtttgctagctttacccgagaggcttcacctgtgcctttctctgcagtacctcactgtggaccgcaatcggctatggtgtgtgccgcgccatctctgccagctgcccagcctcaatgagctctccatggctggaaaccgtcttgcatttttgccacttgatttagggcgctctcgagaactgcagtacgtgtacgtggataacaacatccacctgaaaggcctgccatcctatctctacaacaaagtcatcggctgcagtggctgtggagtcaccatccaggtgtctgaggtgaagctgctgtccttttcatctgggcagctgaccgtcttcctcccagccgaggtgaaggccatcggcacacaggatgaccatgtcctgcctctgcaggagctggccatgcggagtctctaccacacctaccataagtttccaaaagatctgaactttttgtctccaatctcattacccagaagtctcctggagctgctgcactgccccctggggcactgtcaccggtgtagtgagcccatgtttaccttcgtctatcccaagctcttccccttgagagagacaccgatggcaggcctgcaccaggggaggacaactgttggcttcgtggcttactgctgctccacccagtgtctgcagacttttgacctgctgagttgataaacactcaagagccttaggagcactgccagctgacactgcagctgcctgctgtcgcccagcgtgtgtggcggggccaggagagtccagccgggtggaacagacccttccatcccatccagtcctgtcctg

SEQ ID NO: 5117 - DNA, 1296 bp, Cricetulus griseus
ggtgcgcgagggactggggccgcggccccgcacggccgccgccgcgatggcccagcagcagatgaccagctcgcaaaaagccttgatgcttgagctgaaatccctgcaggaggaaccagtggagggcttccggatcaccctggtggatgagtccgacctctacaactgggaggtggccatcttcggaccccctaacaccctctacgaaggcggctacttcaaggcacaacccatattcaccacctaccttcagattcttgaccaaaatgtggcaccccaacatttatgagaatggagatgtatgcatttcaattcttcatccgcctgtagatgacccacagagtggagaactgccctctgaaaggtggaatcctactcagaatgtgaggactatcctcctaagtgtaatctcactgcttaatgagcccaacaccttttccccagccaatgtggacgcttccgttatgttcaggaaatggagggacagtaaagggaaagacaaggagtacgccgagattatcaggaaacaggtctcggccactaaggctgaagcagagaaggatggagtgaaggtccccacaaccctggcagaatactgcatcaaaactaaagtgccttccaatgacaacagctcagatttgctttatgacgacttgtatgacgacgacattgatgatgaagatgaggaggaagaagatgccgactgttatgatgatgatgattctgggaatgaggagtcgtgacatgttccttcagtaccctgtactgccctgacgtctcaggccaaagggagggagcaagtggggatctatggtggcccctcagtgaaaacttactcatggggtggggaaacacacacagctcctgctgactcccctgcggatctcagtttgctcctttttatggacttttactggagagaaagtaacccccacagaatgtctgaattctcgcattcttcacccttccatcactgtattgattcttttaaaacagacaccaccgcccttcaaactcccacctcacttcatctctgcagaatgttcacagcaaaacacgtttgtctgtttttagattcttgaagaattagtctgtttaagacatcaatgtgtttaaagctgggaacccactgggagtccacaagtgctgcatatattgggtagcaaaaggaaatggggaaaaaagaaaacacaaaaacaaaaaaccaaaaaaaaaaaaaacaaaaaaaaaaaaacaaaaaaacccaacaaaacaaacttaaaaaaaaaaaaaagccaaatttagaccaaaggttag

SEQ ID NO: 5118 - DNA, 1295 bp, Cricetulus griseus
ttcacctaggcggaaagttgagccgcggcggaagttttgaggactcggccggatctcggtcactgagtgtctcgcagacgagcaaagcggcagagatgcggcccctggacgcggtggagctggcggagcccgaggaggtggaggtgctggagcccgaggaggacttcgagcagtttctgctgcccgtcatccacgagatgcgcgaggacatcgcgtcgctgacgcgcgagcgcgggcgcgcgcccgtgcgcaaccggggcaagctgtgggagatggacaatatgctgatccagatcaagacgcaagtggaggcctctgaggagagcgcgctcaaccacctgcagggcgcgggcggcgcagagccccgcggccccagggcggagaaggccgaggagaaggcgcaggagatggcgaagatggctgagatgctggtgcagctggtgcggcggatagagaagagcgagtcgtcgtgaacgggccgcgcggtttccagccaatggattctggtcgagtgatggcgattggctgacatgacaccctagagaagctgaaaccagagagccttttgttttccctccttcttttacttttactttttttttacccccccgtccccccccccgtccttcactctgttctcacttgacactacgtttctgctacggtctgcggttgacgacctcggtatgagtttttgattattcagtggttcactttttgtttgtttgtttgggagacataactttgatttggaaaatgcgctcacatacgggaattagggcctagattgtaagcccttgcggcagtcgaatgacgttcgttcctgggctttggttgttgtttatgcattttaaggtgctttgctctttcttgggtgacctaatagctccctggaactttgggtccctgtgacacttgagactcagaagggaccagacttcatctgggactgtggatgggccttacatggctaagactgatgacctgggagaagggtctgaggatagtgttgtttgtaggggggtggggggcgctttaatttctgtgtgagaccaaaggaggagagatgtattttgtgcaaaatttaaattttatgtgctccattatctattgtaacctgtctggtgagtttgtttggacagcctaactcatttctaaatgaaatggaatccagaatgggagatgaggtcttgttagtctgtacaagttggtattttatccccatatattcgaggagatcctgggcataaagtgaaagatacttgcgatgccctttgtgggctgggaaggaaaac

SEQ ID NO: 5119 - DNA, 1295 bp, Cricetulus griseus
  modified_base (773)..(773): a, c, t, g, unknown or other
cctgaaggaaatcaaccatcccttccttgtcaagctgttctggactggccatgaccaccgctttctatacatgctaatggagttcgtgcctggtggtgagctgttcacctacctgaggaaccgtggccgcttctcctcagctgctggaatcttctactccacagagattgtgtgtgccatcgactacctgcatgccaaggagattgtctacagggacctgaagcctgaaaacattcttctagatcgggaaggacacattaaactcaccgacttcggcttctccaagaaactggtggataggacatggaccctctgtgggacaccagaatacctcgccccagaagtcattcagagcaaaggccatggagggccgtggactggtgggcgactgggcgatccttatattcgagatgctgtctgggtttacacttggatttcacctctaaggaccttcatcaagaagctgctggtggtggacaggaccccggcgcctgggcagcatgaagaacggggtagaagacatcaagcggcaccggtggttccggggtgtggactgggattctgtgccacagaggaaattgaagccacccattgtgcccaagttatccagtgacggcgacacctccaacttcgagacttatccagagagtgactgggacaagaccccgcctgtatccgacaaagaactggaaatgttcaaaaatttctgaggatgggaacccacatctgcaagttagttactttttgtttatttagttcctctctggtcactntaaactcagaagttgggaagccacatgccctacaggccccccattcaaatatggcacaaacaagtggctttccccagtcttccagtttagacgtctgcagtaaaatatcctttcctaaagttaagccagaactctgcatactgcattgcctttttatgataatacaaatttagccacatttcccaaaagggaacttcaaggatccaccccacaactccctcctgtcgtaagtgacattttcttcccaccaaactcaatcctgttctcccagcctcgtccatctgtaaaaactcaggttccaggcgggggagctttttatgaacgtttgtacagagctgtattttcagtcagctttcccaacctttccaatatgcaaaataactgggttatgtactatgaacaaacatacacaggagatagaattctggttataatcattgccttaattctaaacacatatggaggagatcacacatgcacacatgtaccccactgtgtgctcctaatgtacttagcaatctg

SEQ ID NO: 5120 - DNA, 1295 bp, Cricetulus griseus
gtcatagggctgcttggttggtcagtggggagtcggcgcctgcgtactaagacccgtgtgcagcagcggcggcggcgctagaggcggcggcggcggcggcggcggtagcagcagcgggttcggaggcagcggttgggctcgcggcgagcggacggggtcgagtcagtgcgttcgcgcgagttggaatcgaagcctcttaaaatggcagatgatttggacttcgagacaggagatgcaggggcctcagccaccttcccaatgcaatgctcagcattacgtaagaatggttttgtggtgctcaaaggccggccatgtaagatcgtcgagatgtctacttcgaagactggcaagcatggccatgccaaggtccacctggttggtattgacatttttactgggaagaaatatgaagatatctgcccgtcaactcataatatggatgtccccaacatcaaaaggaatgacttccagctgattggcatccaggatgggtacctatccctgctccaggacagtggggaggtacgagaggaccttcgtctgcctgagggagaccttggcaaggagattgagcagaagtatgactgtggagaagagatcctgatcacggtgctgtctgccatgacagaggaggcagctgttgcaatcaaggccatggcaaaataactggctcccagggtggcggtggtggcagcagtgatccttgagcctacagaggcccctctcccagctgggttccactctggctgggcccttggctggactcctatacaatttatttgacgttttattttggttttcctcaccccttcaaactgtcggggagaccctgcccttcacctagctcccttggccaggaataagggagccatggccttggtgaagctacctgcctcttccctcacggccctggtgggggaaagggagttgggtattgcttgtggtttaggtcctccatctcccctttttcttttaattcaatttggaatcagaaagctgtggattctggcaaatggtcttgtgccctttatcccatttatccctggtctggtcccctgttctccatagtccttcacccccaagcaccacttgtacagactggggaccagcccccttccctgcctgtgtctcttcccaaacccctttaggggtggtgagaagaggggggggagcagccacaatccctcctcaggcatctggaagggccttgcccccatgggcttcaccctttcctgcggctctccctgacacatttgttaaaaatcaaacctgaataaaactacaagtttaatatg

SEQ ID NO: 5121 - DNA, 1295 bp, Cricetulus griseus
cggcggcggttccgggcgctttgggcgccctgcgaacgggtcgcgtccgcctggtggccgcgtgctgtgcgcggctcggcccagtggcctgggctgggggtcccgccccgaggaggggctacagctctgaggtgaagacggaggacgagctgcgcgtgcggtacctggaggaggagaaccgaggaattgtggtgcttggaataaacagagcttatgggaaaaattcaatcagtaaaaatcttctcaaaatgttttcaaaagccgtggatgcattaaaatcagataagaaagttcggaccattataatcaggagtgaagtccctgggatattctgtgctggtgctgaccttaaggaaagagccaaaatgcattccagtgaagtcggcccctttgtctccaagatacgagcagtaatcaatgacattgctaacctccctgtgcccacgatcgcagctatagatggacttgccttaggaggtggtctggagctggctttagcatgtgacattcgtgtagcagcttcctctgcaaaaatgggcctggttgaaacaaagttggcaatcattcctggtggaggagggacacagagattaccacgtgccatcgggatgtccctggccaaggaactcatcttctccgcacgggttcttgatggccaagaagccaaagctgtgggcttgatcagccacgtgttagaacagaaccaagaaggggacgctgcctacaggaaggcactggacctggccagagagtttctacctcaggggcctgttgcaatgagagtggccaaactagcaattaatcaagggatggaggtcgacttagtaacggggttagccatagaagaagcctgctatgctcagaccatctccacaaaagacagactggaaggtcttcttgcttttaaggagaaaagaccccctcgctataaaggagaataggaggcaaagcctagtgctggaagctctttcagatcagctctgtgtctggcacggggaatctcagtgaccaaagtggagagtgtgggctctcactacgcctggagcaggcccatctgtgctcaagccactgtgcgccatgttgtatttattcagatttataaagctagcagtgtctatggtcaatacattcaaattaggtgtatgtttttaatatttcccgcatatcaggctttctgtcattaattttttaatgtgaataatttatattgcacactctagggaataattgattgtatgtctactgtgctgcattaaggaaataaaactatttctgtataccaaaaatgtgaagtt

SEQ ID NO: 5122 - DNA, 1295 bp, Cricetulus griseus
gagggcctgggcgcggtgtccctccggtcgctgggattctttgcaaaagggaggaatttgcgtccatcttcttcactagaaatggctcatgtgctctgtaacagggccaggctggtttcctatctcccaggattctgttctttagtgaaaagagttatcagtccaaaagccttttcaactgcagggtcttcaggttctgatgagtctcatgtggccactgcacccccagatatatgttcccgaacagtgtggcctgatgaaactatgggaccatttggccctcaggatcagaggttccagcttcctgggaatatgggcttcgattgtcacctcaatgggactgcttcacagaagaaaagcctgacccataaaactttgcctgatgttctagcagagcctctttcaaccgaaagacatgagtttgtgatggctcagtatgtgaacgagtttcagagtagtgatgcacctgtcgaacaagaaattaacagtgcagaaacttactttgaaagtgccagagttgagtgtgtaatccagacatgtccagaactgctgcaaagagattttgagacactttttccagaagtggctaataacaaactaatgattctgactgtaacacagaaaactgaaaatgacatgactgcttggagtgaagaggtagaagttgaaagagagatgctcttggagaagttcattaatggtgctaaggaaatttgctatgctcttcgggctgaaggatactgggctgacttcattgacccatcatctggtttggcattttttggaccatatacaaacaacacactttttgaaacagatgaacgctaccggcatttaggattctctgttgatgaccttggctgctgtaaagtgatccgtcatagtctctggggtactcatgtgtttgtaggaagtatcttcactaatgcagcagcagacagccatatcatgaggaagctcagtggaaactagcaatgccctgtgataattgcagctctatttgtgtgtaatggagttagtgctctgtggaaacactgttgaggaattcaacttctacgggattctggtttctaggtatttatttcatcatttatgggtttacatcgggaggtgactcagatttcaaaattgcaaatgctagttcatattctggagtacgtgttgagcatgttctgcaaaatgtggtcagcaacatgtaaccagggtatatttgatctcttattgttaattctcccctttattgggaaaaccttagtttattttttccaaaaataaatcatacatttggctatgaa

SEQ ID NO: 5123 - DNA, 1295 bp, Cricetulus griseus
cagtatggaggccgccccggggcggctcgggccggaaccggacccgtcggccgcagccagccatcaggccgcgacttccagcggcaagccggtcccgacgccctcgaagccgccctcggccttgacggtgcccggggagcttgaagaggctgagaacgttggggtcgcgagccgtcacccacgagcgtccccgaggacgtcgagcggcagcgtcgtccaccggccggagccggatgcctgggaggaccagccgggcatccgggcgacgccgtcagggcccggggaccaccgggggcccgcaggttctgagcacgccccggccccgtcctcctggggcggcgggtagggccggccgctcgttccccagccgccttcaggacagccgcagcctggacgggctgagtggggcgtgcggcggaggggcgtcctccgtgggcggcgaggccggcgcgggcgggggcgtcgcgccaccatctccagccccctggagctcgagggcacggtgagccgccacggcgacctcacccactttgtcgccaacaacctacagctcaagatccgactgagcgccgccccccgccctgcccccggcctccgcgcggccctgcctgacgcccgcacccactcccacgattcctcccatcgaccccgacgtgctgagggagtctggagcggctgagtcgcgatctgggcggccgggtggaccgtctgcttcgcgggctgggtggggcgggtacaggagctgacggcactgagcgtgggctgtatccagacctaccgcgacgcggtggattccttaggcgaagccgtggacatgagcatcaagggcatgtacaccttgcttgcgcgctgcgaggagctggaacgggctctgcagccggttcaggggctggcacgccaagtccgagatatccgacgcactctggaagtgttggaggccctatgcaagtgaccaggaggacagatgagaggccacccgctgtggctgtcttgattccaacggtcagacctcaagtgctaggggctttaggagcttgagtggtccttggccacacaccattcgggcaagggcgcacatctgcagataacctcctgcttcttccctctgggcccctaaaatgccacggggtggagctaacaggagcacatttcatggtggagggggtgaggtgggaggtgtctcactgctctctgctcaggtagaactgttgctggtttagaagcccacctgttgtggagtattctaatccattttggctttttgagttttgtggaattaaagtgccgctgctgct

SEQ ID NO: 5124 - DNA, 1295 bp, Cricetulus griseus
  modified_base (996)..(996): a, c, t, g, unknown or other
actgcaggagcgagagggcgaggcacgccagctacgtgagaggctggaccaggagcgcacagaactagagcggcaacgccaggcctaccagcatgacctggagcgtctacgcgaggcccagcgtgcagtagaccgagaacgtgagcgcctggagctgctgcgcaggttcaagaaacagaacactgtacccggggcactgcccccagaggtgctggcagaggcccagcccacaagccatcctcccagtttcaatggggacggactggaggggcgcttggctctagccaaaacaccagggacccaagggagcatgctactacctggcacaggacctgagtacatagaacgacctgaggtggcccgctgggacagtgtccccgctgagagccggacagccaagagtgatgtgcccatccagctgctcagtgccaccaaccagattcagaggcagacagccgtgcaacagcaaatccccaccaagctggctgcctccaccaagggtggcaaggacaaaggcagcaagagcaggggctcccagcgttgggagagctcagcatccttcgacctgaagcagtcacgaaaccgccggtcactcgagtcccatcctacccgccacccatggatcctgcacctgtcccagacccctgcctcccaagcccagccccagctgccacgtcccctcgaggccttcttcaagtccggaagcacatccctgccacctgcatccccatccccctcactgccaaccacaccactcaccgccaaggatgaagttggcaaggaagatgtcatcttcttctgagggggccatggcccaagagcagatctcctgtcctgataaccctttgtctctggggatcccatgggtgactgttactgtctggccatccccttcccctgcctgagcatccccaggcacttgctcatctgaggttgtcctgttagtgtcgggtctcacagctctctgtagaattagtggtttttttggttttggtnttgttgtttgttttgtgtcttcttttgtactgaggtatatcagaacacttcaggaaagctgacttttaagttcccactctgtgaagcatcagtgtatctgtcaccagcagccgggggttcctccttggcagatctccttggtaaagctggtgagactgagtagcatcccttgtcaattgtgaccgtgatctttgtctaccccatgattattttcacagtgatggcagagcatcctggccacggggtactctggaatcaccctagaacatatgaccagattctagcaataaaagtatcca

SEQ ID NO: 5125 - DNA, 1294 bp, Cricetulus griseus
ggtgcatccctgcttggaagctgcaccgaggtcttcggatccgggtctttccaggctcggaccctgagcccaggattcccagcgtctccgggtcggcgcttgcggggatcctgcggccatgagtgtgggtttcatcggcgcgggccagctggcctgtgcgctggcgcggggcttcacggccgccggcgtcctgtcggctcacaagataatagccagctccccggaaatggacctgcccacggtgtctgcgctcaggagattgggcgtgaatgtgacccgaagcaataaggacaccgtgcggcacagtgatgtcctgttcctggctgtgaagccgcacatcatccccttcatcctggatgagattggggccgacgtgcaggagaggcacatcgtggtgtcctgtgcagccggtgtcaccatcagctctgtggagaagaagctgatggcgttccagccagcccccaaagtgatccgctgcatgaccaacacacccgtggtggtccgcgagggggccacggtgtatgccacaggcacccatgctctagtggaggacgggaagctgctggagcagctgatgagcagcgtgggcttctgcacagaggtggaggaggacctcatcgacgccatcacggggctcagcggcagtgggcctgcctatgcatttatggccctggatgcgctggcggatggtggggtgaagatgggcgtgccaaggcgcctggcagtccgactgggagctcaggcgttgctgggagcggctaagatgctgctggactcggaggaccacccaggccagctcaaggacaatgtctgctcccctgggggggccaccatccatgccctgcacttcctagagagtgggggcttccgctctctgctcatcaatgccgttgaggcctcctgtatccgaacaagagagctgcagtccatggctgaccaggaaaaggtctcccctgctgcccttaagaagactctcctggacagagtgaagctggagtcccccaccgtatccacgctggctccacccagctcagggaagctgctcacgagaagccccgcccagggaagcaagaaggactgaggagtgcggtgtggggtctccctgtcctcagcagtgcaggggcggtcaagcttaggtctggcgggggaagctgcttggatctgttcacttagtggcatagagtccttctcttgtcccacagcagaaggtgctctggagaggcatctgatgcccgaagccagcacacctctctgagggaggtgggaggcccgtgtgttagcactccccctcagc

SEQ ID NO: 5126 - DNA, 1294 bp, Cricetulus griseus
ctcgccgcccagccgccagcagcttgcagctcgcagccccgcacgcagccccgcgcagccatgtttcagccagccggccacggccaggactgggccatggagggcccgcgggacgctctcaagaaggagcggctggtggacgatcgccacgacagcggcctggactccatgaaggacgaggagtacgagcagatggtgaaggagctgcaggagatccgcctgcagccgcaggaggcgccgctggccgccgagccctggaagcagcagctcacggaggacggagactcgttcctgcacttggcaatcatccatgaagagaagactctgaccatggaagtgattcggcaggtgaagggagacctggccttcctcaacttccagaacaacctgcagcagactccacttcacttggctgtgatcaccaaccagccaggaattgctgaggcacttttggaagctggctgtgatcctgagctccgagactttcgaggaaatacccctctacatcttgcctgtgagcagggctgcctggccagtgtaggagtcctgacacagacgtgcacacctcagcatctccactccatcctgcaggccaccaactacaatggccacacgtgtctgcacctcgcctccatccatggctacctgggcatcgtggagcatttggtgtctttgggtgccgatgtcaatgcccaggagccctgcaatggccggacagccctccacctggcagtggacctgcagaaccctgaactggtgtcgctcctgttgaagtgtggtgctgacgtcaatagagtgacctaccaaggctactccccctatcagctcacctggggccgaccaagtacccggatacagcagcagctgggccagctgacccgggaaaatcttcagatgctgcccgagagtgaggatgaggagagctacgacacagagtcagaattcacggaggatgagctgccctatgatgactgtgtatttggaggccaacgtctgacattatgagtggaaagtgtcaaaaagaacatggacttgtatatttgtataaaacaagagttttatttttctaaaaaaaaaaaaaaaaaaaaaaagaaaaaaaatagatctggtagctgagcctggtatgtcctcacatgtagaaccaggtgttgagtggtatgtgctagtcactcccgactgaggtttttgttaccctcttgtaaatgttgtatatggtgtattttgttggtaattattttggtacttctaagatgtatatttattaaacagatttttacagacaaaaaaaaaaaaa

SEQ ID NO: 5127 - DNA, 1294 bp, Cricetulus griseus
gcgacctcccctcccgagtcctcgcgggaccgtggcggggcgccggtcgccttgtgcagaaagcgagggacgtcagagaggaagtagaagatgaacaagcctctgacaccatccacatacgtacggagcctcaatgttggactcattaggaagctgtctgattttattgatcctcaagaaggatggaagaaattagcagtagctattaaaaagccgtctggtgatgataggtacaatcaatttcatataaggagatttgaagccttactccaaactgggaaaagccccacgtgtgagctgctgttcgactggggcaccacaaactgcacagttggtgaccttgtggatcttctgatccagaactcgttttcacagttttctttttatgaactgaagagtatcactaataactttgacgagcgacctgtttctgtgggtggcaacagaatgggagagggaggctttggagtggtgtacaaaggctgtgtgaacaacacaactgtggcagtgaagaagcttggagcgatggttgaaatcagtactgaggaactaaagcaacagtttgatcaagaaattaaagtcatggcaaagtgtcagcatgaaaacctggtagagctacttggcttctcaagcgacagtgatgacctgtgtttaatatatgcttacatgcccaatggttccttgttggacagactatcctgcttggatggcaccccaccactttcttggcacatgagatgcaagattgctcagggtgcagctaatggtatcagttttctgcatgaaaatcatcatattcatagagatattaaaagtgcaaatatcttactagacaaagactttactgccaaaatatctgactttggacttgcccgggcttcggcaaagtttacccagacagtaatgacgagccgaattgtgggcacaacggcttatatggcacctgaagctctgcgaggagaaataacacccaaatcggatatctatagctttggtgtggttttattagaactaatcactgggcttgcagctgtggatgaaaaccgtgagcctcaattactactggatattaaagacgagattgaagatgaagagaagacgattgaagattacaccgatgagaagatgaatgatactgaccctgcttctgttgaagcgatgtatgctgcagctagtcagtgtctgcatgaaaagaaaaataagaggccagacattacgaaggttcaacagctgctacaagagatatctgcttaaaaactaattaactttttttttttttttttacttctcaaga

SEQ ID NO: 5128 - DNA, 1294 bp, Cricetulus griseus
gcctgtgacactggggtctagggcacaatggcccaggccctgggggaggacctggtgttgccatcagagctacaggatgattctagctctctagggtctgactcggagctgagtgggcccagtccatatcgccaggctgaccgctatggcttcattgggggccctacactctgtaccggccagaacagggctattgccaggctcagggccctgtagctgctgtgctgctcatgcatctgcccccagaggaagccttctggtgcttggtgcagatctgcgaggtctacctccctggctactatgggccccacatggaagcagtgcagctggatgctgaagtattcatggcccttctgcggcggctgctcccacgtgtatacaagcacctgcagcaggtgggcgttggacccctgctctacctgcccgagtggttcctgtgtctcttcacccgctcgctgcccttccccacggtgctgcgcatctgggatgccttcctcagtgagggtgccaaggtactgttccgtgtggggctgacactgatgcgcctggcactgggcactgtagaacagcgcacagcatgcccagggctcttggagacactgggggcccttcgagccatccccacctcccagcttcaggaagaggccttcatgtcccaggtccacagtgtagccctgtctgagagagatctgcaacgagaaatcaggatccagttggcccatctgcccaagtcatcacctgggccagcacctctgccacaggcccgccttcctggggcccaagccatctttgagtcccagcagctggcaggggatcgaggaagcaccaaacctgagatacctcgaatagtggtgcagcccccagaggagcccaggccaccacggcgcaagccacagacccgtggcaagactttccatgggctcctgacaaggtcccggggaccccctattgagggtccctctaggtcccaccgaggctctgcctctttcctggacacccgcttctgagtgtgcagtgtgtgcttagtgccaccatatcttaatcatctgaacagccatgccagccccagccagcaaggaccacctaaagagggagtaactccccactttaaggactgtgtcagtcacaagataaaggaaggtcactgagtggagcttgtggggagttgtctggtacctgccattgccagcatcaaagccagcactgaaggagtgaggggtgatgcttctggctgggatacagtatccccatgggcttcttgttgggaacaccaaataaagcctggctgagaaga

SEQ ID NO: 5129 - DNA, 1293 bp, Cricetulus griseus
tggcacaggctggacccatgggcatgacaaggcagagcagcatcttgcagttggtgctcccctgaggaactctcttctggacattgtggaaagccaaagagctggcccatggtctggagccggggtccgagtagtagtacagagggtttactcccttcctagcagagacggtgccaggagccagcaagggcacacagtgggacatgcagattcttctggagcatggtcctgccttctagtccaggatgcctgcgggatgttcggtgaagtgtacttggatggcaccctctggaagaacatacagttagaagggaggtcctggcagcagtggccagcccagtgaagagataaagccttgcctgcctcctcctaccttctgttatatcttctctgtgcctccgagtctgggccgtgtcaatataattgaaggggacccaatttctgagctctaccagcctccagttgtccactgcttacgagaaatcctccagactgatgagcagggtgcacgttgcagcttctatgccagagtgatttatcaaagaccacagctaaacagtcttttagcacgaaaggaaatctggctgctggtaactgacattaccctacaaatacaggatgaaagggaccactgccttcccaaaaccctcccgatctatgtagccccctcatgtatgctggacccagaagttctagaaggacttgctatggctgtacctcaaaacatactcttcagggacgctcttcgagacaagggtcagattatatgtgttgagcggacagtcctcctatcccagaaatccctcttgcatgtaccttctggtgctggttcctgtgacttgcctggtccagtgacagtggatgaactggactttctcacacctgtcaactccatttgcagtgtgcaaggaactgtggttgacatagatgagagcactgtctactcgtggccttcgtgtgaccagtgtggcaatgggagattggaacagaagccagaagatggaggccccttctcctgtgggaactgttcacaattggccgtgtcacctcttcaaaagaagcacctgcacatctttctggactgtcacacgaggcccaggagtactgtgaaggtcaagctgttggagaccagtgtttcttcactgctgatgtctgctgcctccaaggatgggagttctgaagtgaagaatgtccttgggaaggagttggggcctttactctgctttgtgcagtccatcaccccacagcagaccagctgcgtcaccctggaggagattgagtttctgggtgcag

SEQ ID NO: 5130 - DNA, 1292 bp, Cricetulus griseus
  modified_base (466)..(466): a, c, t, g, unknown or other
acaccttcattagcttgtgggaagaggagaagaacgaaaccttcgagcaagtgatcgagaagagtaagctggtgctgtctttgattaagaagctgaagttgattttactggagactccgccatgtgatctggaaaacagaattattgcacagcatcaagggtcaattctgcgtctgcaggagctcctcagcctgaagatggaccgtggccactgaactgcttctccgagaagctagtaccttagtggatgtggacagtgggaacatggaaaaatcattcaagatgagaatgttagcctgtgaactggagatgcggttgctaagtgaagctgtctcagcagcacagctgcacctggtagagaacatcgtggatattccatatgcctttgaaaaattccaggtggatttgtgtcatttttccaccctgggcggagtgtaccacctggatatcctggagctgccccctnagtacaaaccagtgaagggctgggtgctagtagagataccgccaaggaagggattacagaggtttacatatcccagacggcatcagctgtgtgtattacgatcgagaaacaggctctaaccttcaatttggacactttgggacctgtggccttgattcaagatgcccatatcaacatgccataccagtcctgggaactgtgcccccttgatgtaaacagagttgtcctgactgtgactacgttgtttattgaactccagatacacatcaaggaaaacctctgcatgttagcgtcagtcaaactgaaggggcaagagcatcagtgtcatttagaagggagatggatgacccccgtgcccttcatcctggctctgaaggaagcagggctgaatatcttcccggccctgtactcacacttctacgttgtggtcaacaataaggtccccctggtggaagtgaaggcctatcggcaaatagccctgctgagctccgccttcgtgtttcgctggagcaagtggaacatggcatgcaactccaccaatgtcgtgattaaggtgaaggagtaccaggcggaaggtgcagagaaccgtccctggtccctcctcatgttcagcggtgacagagcacagattctcaggatcagagaagacagcgatgtgttctctgaggccctcaaggacaacactgagttccactctaccttgtaccacatggtgaaggactttgcctccccaaaggcaatggagagggtgaggtcttcagacagcctcttcatcgactcggtgtgccatatgctgctgtccatccgggtcctcagctactcgtag

SEQ ID NO: 5131 - DNA, 1292 bp, Cricetulus griseus
gaggaccccgacggctacgcctgcagtcgggtcccgggcggccaccgggcctggaggaagagctgaccctcaagtacggggcgaagcatgtgatcatgctgtttgtccctgtcacactgtgcatgattgtggtggtcgccaccatcaagtctgtccgcttctacacagagaagaatgggcagctcatctacacgcccttcactgaggacacgccctcagtgggccagcgtctcctcaactctgtgctgaacaccctcatcatgatcagcgtcatcgtggtcatgaccatcttcctagtggtactctacaagtatcgatgctacaagttcatccacggctggctgatcctgtcttccctcatgctcctcttcttgttcacctacatctacctcggggaagtactcaagacctacaacgtggccatggactaccccacactcttcctggccgtctggaattttggagccgtgggcatggtatgcattcactggaagggaccactggtgctgcagcaggcttacctcatcatgatcagcgcactcatggccctggtgttcatcaagtacctgccagagtggtctgcctgggtcatcttgggtgccatctctgtgtatgatcttgtggctgtgctgtgccctaagggaccactaaggatgctggtggaaactgcccaggagagaaacgagcccatatttcctgccctgatatactcatctgccatggtgtggacagtgggcatggcaaagctggatccctcctctcagggagcactgcagctcccctatgacccagaaatggaagaagactcctatgacagttttggggagccctcataccccgaagcctttgaagccccccttcctggctacccaggggaagagttggaagaagaggaggaaaggggcgtgaagcttggcctgggagacttcatcttctacagcgtcctggtgggcaaagcggcggcggctggcaacggagactggaacaccacactggcctgctttatcgccatcctcattggtttgtgtctgactctcctgctgctggctgtgttcaagaaggccctgcctgccctccccatctccatcaccttcgggctcatcttctacttctccacagacaacctggtgcggcctttcatggacacgttggcttctcaccagctctacatctgacaggagacagagcgtggctctgagggctgtaggaagcttctctggatgcaggtgtatagttttccactctagtgccatataaatttttaaaaaaacaatttttcttccttaacaaaa

SEQ ID NO: 5132 - DNA, 1292 bp, Cricetulus griseus
gacctggtgaggggtgtggaggcgcttgcccaggaaagagaaaagtggctgagcaggcctgccttgctggttcgagctgcccgccattatgagggtgctgagcagatcctgatccgccaggctgtgatgacatcccagcactttgtgtccacccagccagtggagctgacagcacttgggcagtgggtggtgactgagtgcccagcccgtgtggatttctctggtggctggagtgacacaccacccattgcctatgagcttggtggagcaggtgttggcctggctgtgcgggtggatggcaccagcagcatcctagcaggggctgccctggctgccttacctggaacaggtgcgtcaccacaggaggtggctgggcaggaccaagtgagtggcctaatgcctggcatcaaggtggggcggctcccgggctcacctgcccctaaaaggtggaggtggaggaaatcactgtgcctgagggctttgtccagaagatcaatgatcatctgcttctggtatacactggcaagacccgactggctcggaacctgctgcaggatgtgttgaggaactggtatgctcggttgcctgctgtggtgcagaatgcccgcagactggtgcgacagactgagaaatgtgctgaagcttttcgccaaggaaacttgcctctgttaggccagtacctgacctcatattgggaacagaagaagcttatggccccaggctgtgagccactggctgtgcggcgaatgatggatatcctggctcctcacgtgtatggccaaagcctggcaggggcaggtggtgggggctttctctatctgttgacaaaggaaccacggcagaaagaggctctagaagctgtgctggccaaagctgagggcctcggcaactacagtgtgcacctggtggaagtggacactcagggtctgagcttgcagctgctaggaagcgacatgtatctttgtggggctgggccctctgaagcaggcaacacttagagctacagctgcatttcccttcagtggagctcagtctgctattcatcacctacctcttcaaggctgctaataaggaagcaagacttgagaagaagaggcagtgtctatgaattggactgtacttcatgactggccatggctaagacttggtctctactccatctggactaaggaaaatcttaatgatagtgtcccatgtggactttacaaattccatggcccagtataggcctactagggccttggaagggatgacaatcagaccaaccccaatgatacacttttagacattcc

SEQ ID NO: 5133 - DNA, 1292 bp, Cricetulus griseus
  modified_base (594)..(594): a, c, t, g, unknown or other
tcccgcgagcgtcatggcggaggcggcgctgggtacggtgcggaaggtgttgcaagagttcccggcggcggctcgcgacctcagtgtacctcgtgctgtgccctacctggatgagcccccaagtccactctgcttctaccgggattgggtgtgtcccaataggccctgtattattcgcaatgccctgcagcactggccagccctccagaagtggtccctatcctacttaagagccatagtgggctccacggaggtgagtgtggctgtgaccccagatggatatgcggatgctgtgcgaggggaccggtttgtgatgcctgctgaacgtcgcctgcccatgagccatgtgctggatgtgttggagggtcaggcccagcacccaggagtcctctatgtgcagaaacagtgctccaatctgcccactgaactgcctcagcttctgtcagacatggagtcccatgtgccctgggcctctgagtcactgggaaagatgcctgatgctgtgaacttctggctgggggaggcagctgcggtgacatccttgcacaaggaccactatgagaatctctactgtgtggtctctggcgagaaacncttcttgttacatccacccagtgaccggcccttcatcccctatggtttgtacacaccagcaacctaccagctgactgaagagggcacttttagggtggtagacgaggaggccatggaaaaggtgccctggatcccactggaccccctggctccagacctggtccgctaccccagttacagcctggcacacgcccttcactgcacagttcgggcaggcgaactgttgtacctgccagctatgtggttccaccatgtccagcagtcccacggctgcattgctgtgaatttctggtatgacatggagtatgacctcaagtacagttacttccagctggtggactccctcactagggctgcaggccttgactgatgggaccctcacagacactgcaaaggacagcggctgttgcctggttcctgtgtggttgagatcagccttaaagaaattttggaatatagttggaggaacaggagataccagacaggtctgggtgagggtgcccaggaagttgccacacaggtgacaaggaagcatggatcaggtacagcaatgcttctcaccagtgctatgaccttgggtgagtcactgcatgttgggatcagtctggctgtaaagtggagataataatggctctagctcccagggctgtcatggggatagacgtggaccaacataggaagcagtcaaataaaaggtg

SEQ ID NO: 5134 - DNA, 1292 bp, Cricetulus griseus
gaccagggccttgcagctggtgcagtttgactgcagccccgagctctcaagaagatcaaagagctgtacgagacacgctatgccaagaagagtgtggagcccagcccacaggtgccacggcccctggaccccctggctctgcactccatgcccaggactcccctgtcagggcccaccgtggactaccccgtgatgtacgggaagtacttgaatggactgggacgcctgcccactaaggcccttaagccggaggtgcgcctggtgaagctgcctttcttcaacatgctggacgagttgctgaagcccaccgagctggtcccacagagcacggagaagctacaggagacgcccatgcatcttcgcgctgacaccgaggcaggtggaaatgatccgcaactccagagagctgcagcctggagtgaaagccgtgcaggtggtgctgaggataagaggccctgcagacccatcaacctcacccatctcatgtacctttcctccgccaccaaccgcatcactgtcacctggggcaactatggcaagagctactccgtggcattgtacctggtccggcagctgacctcctcagacctgctgcagaggttgaagacaattggtgtgaagcatccagagctctgcaaggcacttgtcaaggagaagcttcgcctagatccggacagtgagatcgccaccactggagtacgagtgtccctcatctgcccactagtgaagatgcggctttcggttccctgccgtgcagagagctgtgcacaccttcagtgcttcgatgccgtcttctacctgcagatgaacgaaaagaagcccacgtggatgtgccctgtgtgtgacaagcccgcagcctatgaccagctcatcattgacgggctgctgtcaaagatcctgagtgagtgtgaggacgcagatgagatcgaattcctggccgaaggctcctggcgcccaatccgtgcggagaaggagccgagctgcagcccccagggccccatcctggttctcggcacctctgacgccaacggcctcccaccggcctccagcacccctggcgtgggaggcagcgtgggcagctcgctgggcggcgcaggcagcggggcaggggcagcgggcggcccggagaacgggaggcctggcgccgacgtggtggacctcacactggacagctcatcatcctccgaggatgacgatgaggatgacgaggatgacgaggatgacgatgagggtccccggcaaagcgccgctgcccattccaaaaagggcctggtgcccgcctgctgacgccg

SEQ ID NO: 5135 - DNA, 1291 bp, Cricetulus griseus
gaaatagcatcttcctgggcacagttcttgaggagtatatatcctaggaaaatatggacagaaaaaattagagaaatacaagaaagagaagctgcagaatacattgcccaagctcggcgacagtaccatttgaaagtaaccagaggacttgcaacatgacagtgctgtccatgctgccaacactaagagaggctttaatgcagcaactcaattctgagagtctaacagctttgttgaaaaacaggccttcaaacaagctggaaatatgggaggacctaaagataataagtttcacaagaagtattgtagctgtatatagcacgtgtatgctggtcgttcttttgcgagtccagttaaacataattggtggatatatttacctggataatgcaacagttggaaaaaatggcactacagttcttgctcctaggaagtgtttctcttaaacattctttgtcccttttggacttggagcaaaaactaaaagaaattagaattcttgtggagcagcataggtctccttcttggattgataaagatgtatccaagtcttctctgtgccaatacatgatgccagatgaagaaacgccattagcagctcaggcctatgggctttctccaagagatattaccactattaaacttctcaatgagacaagagacatgttggaaagtccagattttagtacagttttgaatacctgtttaaacagaggcttcagtcggctactagacaacatggcagaattctttcggcccactgaacaggatctgcaacatggtaactccataaaatagtctgtccagtgtcagcctgcctttagctaagataattcccatagtaaacggacagatccattcagtttgcagtgacacacctagtctattttgtgcaggtatcttttgatgatggagcaagtaaaagactttgctgctaacgtgtacgaagcttttagtaccccccaacaactggagaaatgactttcttccttcaagaagagctaggatccatctacattaaaatcatctatacctagagtgacaattgcaaccaaaatgcctaataaaatatattcttaagcaaagtcttatttcataatgaagtagattcatttggcaccttattgtatttttaattcatcagcagtctacttcatcaggtgtatctaactggtgcacaaattacaacatcgggatcattcatgatctgtttcagcctggatagctgatccaaaccaagtagataattttatacatacatgtaatggaatgtgatgtcctttcacacata

SEQ ID NO: 5136 - DNA, 1291 bp, Cricetulus griseus
gcgttgtccgaggtacctgtctccggcctcctctgctggcctctgccccgggtcgtcctggccgcgttgccgcctccgacgtgaggaggaactatgaatgggagggctgattttcgagagccgaatgcagaagttccaagaccaattccccacataggggctgattacattccaacagaggaagagaggagagtcttccgagagtgcaatgaagaaagcttctggttcagatctgtgcctttggctgccacaagtatgttgattactcaaggattaattagtaaaggaatcctgtcaagtcatccaaaatttggctccattcctaaacttatatttgcgtgtatcatgggatactttgctggaaagctttcttatgtgaaaacttgccaagaaaagttcaagaatcttgaaaactccccccttggagaagctcttcggtcaggccaagcaaggcgctcttccccacctgggcattatgctcaaaagtcaaaatatgactcaaatgtgagtggtcagtcttcttttgtgacatctccagcagcagacgacatagacaaggagacacttcctcgttatgagccaattccatttagtgcttcaatgaatgaatccactcccactggtattactgaccatattgcccaaggacctgatcccaactttgaagaaagtcccaaaagaaaaagtattacatatgaggaattaaggagtaagaacagagagtcatatgaagtaactttaacacacaagactgacccctcagtcaggcctatgcaggaaagagtgccccaaaaagaagtcaaagtaaacaaatatggagatacttgggatgagtgaaaaactccgtcattggacctcctgaaggccttccatacccggcttcatccaggtggtcgcccacacctgtgtgcttggactcagcagcagtcttcataaacacatttaaaacaaaaccctggttttcgtgacttatcatgtgatgctttacaaacacagattttagtgtttactgttgggcaaatgtactgacgcaggacactcagaatgatggtattaggccatggttgtgtatacttggtgaaactgttttcagttacagggagagagactgacgaaactcaactgtgactctcgataaacctacatgagaataagtgatagtgcatgttgaaagggttggggggggagcaagcacacacctggggttcagctttacatcagtttttaaaggcctttcttcagcatttgctctagcatcttaatgtttatggtgaataaaatgtaaaaacac

SEQ ID NO: 5137 - DNA, 1291 bp, Cricetulus griseus
ttcctcaggccaggacccagcgaactgaacacacgctgggcgtgggcaccatgagccgcctgggctcggtgcagcggaagatgccgcgcgtgtttgtgacggaggtgaaagccgagccctcggccaagcgggagcatcagccatttaaagttttggcaactgagactctaagtgaaaaggcgttagatgcagatgtatacaatgcaattgcaacagaaaaagtggatggaacgtgttgttatgttactaactacaaaggccagccatacctttgggctcggctagacagaaaacctaacaagcaagctgacaaaaagaattaaaaaatttactaacattacaaaagaataaattcaaaagcgtttctttggaacatggaggaagatttcaagcctgtcccagagtgctggataccagcaaaggaaatagaacaaacagaatgggaagccagtacctgatgaaaacggacacattcctggttgggtaccagtggaaaagaacagcaagcagtattgttggcattcctccgtagtgaattacgagtttggaattgccctggtactaaggcatgatcctgatgagcctggacttttggaaatttgtgccgtgcccctgtcagagcttttagagcagaccctggagctgataggaacgaacatcaatggaaacccatacgggctaggaagcaagaaatcgccattgcactttcttataccacatggagcatttccagtaagaaatctgcctacactgaaacacaatgacttgctgtcctggtttgaagactgcagagagggtaaaattgaagggattgtatggcattgtggtgatggctgtttaattaaggttcatcgccatcatcttggtttatgctggccacttccagatacttacatgaattccaaaccagttattgttaacatgaacctaaacaaatatgactgtgcttttgataatgagtgtttgtttaatcagtttttagaaaaaagataaacagaaatttgataggcttaaagatataatgcttgatgtataaaatgtaataaatagggaaattattaggactttctccaggactttctccatcttccgaagcagcaacagggctaggtaattcaaatccaaattgctcagaaagttttttttaacttctgttctaagagaatatttttttttcacttctttcttataattgtacttcaggtcttcaatttcttcaaaaaatgaaggatcaaaattttgcagttcttttttcagctttttaatttcctcctaaaagtcacatatagga

SEQ ID NO: 5138 - DNA, 1291 bp, Cricetulus griseus
agtgataacatcactgttattgtggtattcctgagggacatgaacaaagctgtaaatgttagtgaggaatcagattggacagacaactcttttcaaggagggcaagaagatggtggggatgataaggagaatcatggagagtgcaaacgcccttggcctcagcaccagtgctcagcaccagccgatctaggctatgaggggcgagtggattcattcactgatagaactagcctgagcccagggccccaaatcaacgtgctggaagatccagactacctagatctcacacaaatagaagcaagcaaacctcacagtgcccaatttttgccatcagttgagatgattgtcctggtgcaccaaagaaagcagatcttaatgagctaataatggaaggaaaaatcagtcaagtcatcattgcctgaaacggagtggtgctggagagtttctggcttcttttaatttgggttcaacagggcaacagatatgcagaatggagagcttgtctcccgtctgtcctgggttggaaaatgaacagttcaaatccctggggaaaacagcgtctagattgtatcatttacgccaccactactccaaaaggcagcgtggattcaggtttaatccaaagttttatgttaagaagttctttgccatggagggaaaatagctgggaaggatatagtggaaacatgaaagattagaaaagtgtaatgatattccatgcccagaccttccctggagctataaaatataagacttttcttcaatgtaggctagctagcactctcaaaaatacaactatcagagtagaaacaaggtagacatttttaacatacatgtgcttcattatgaatccattgatggctcaatccttaaatgtacatagatctctaggaaactcaaaatagtgttttcaatctttaaaaagtattggcggtttcactagcaaaatcatacaactggtccctgtgatgtgtctttatacctacatacagccccctctccaccatcccttcacgtcactagtggaagctttgaagttattccagtcagaatacatggtatggaaatcgcaagtatctggtatgatgtgcctaatctaaaggaaaaattgttttccccaagggaatgaagtaattggtttgaaggaggctgagtgagaacccagagaccatgtgcacaggagaatgcaaattactgagggccaaggctgtttagctgtaagtggaagacgagccagagtccagctacccgcttcagactatagtgacaggtcatgcgcttctcgtttcaa

SEQ ID NO: 5139 - DNA, 1291 bp, Cricetulus griseus
ggtcctcagccgtccctgtcaccggcccagcagcacctcgagtcgcccgtgcccagcgccccggaggccctggcgggcggccccacccaggcagccccgggagtgcgcggggaggaggacgagtgggcccgggagatcggggcccagctgcggcggatggcagacgacctcaacgcgcagtacgagcggcggagacaagaagaccagcatcgacaccgtccctcgccctggagggtcatgtacaatctcttcatgggactccttcccttacccagggatcccggagccccagaaatggagcccaactaggtgcctacacccgctcgagggacgtcggggacttgaggggcaggaccccttccgccttctgacaacctggccagcgtcgggggacttttttctgcaccatgtagcatactggactgccagccttgcctgtcccaggggcaagcaaggaaagccactcgagcccaggcagcctgggtgcactgatggagatacggacttggaggacccctggcctcctgaaagccaggggagggagggctgacggactcatggtgaccgagggggtggggaccgagccgcctgcctctgccgccccaccaccatctcaggaaaggctgctggtgctggctgcccgttccagctgcaggggggacgctggggggtgtccccagtgcgccttcactttgggcctggcctcaggcccctggtgcttccccccctcctcctggggagggggtctgtgaagagcatatgagccaaacctgaccactagcctcctggagccagagaatgggggggcatgtgacggccttctctgcccagtgcccagccatcttccctgaaccgccggcgggcggtgaccgatgcctgcctcaccttcatctgggggtgtccaggaggggtccagactgtgaatcctgtgcgctgcccgggaccacccccaccccaccccccagtccccatccatcccattgcataggtttagagagagcacgtgtgaccactggcattcatttggggggtggagatattggcggaagccttaggccccagggcaaagcgctgcggaagaagatggggaggtcagggagggggggaaaatactcagaaggagggaggaggtcgtgggaggcgggggaggggacgggcccagcctgtaaaaatattgtacatgctctgctgtagatataccggaatggattttctgtacatgtttggttaaatttttttgtacatgatttttgtatgtttccttttcaataaaatcagattgaacagtgaa

SEQ ID NO: 5140 - DNA, 1291 bp, Cricetulus griseus
gggagggacaaaccgcccctgcgatgtttgcagtctggtttccaggttagcgtttgtctgcatctgcaccatgtccgcgtttgagaagcctcagatcattgtccacattcaaaaaggcctcaactacacggtgttcgactgcaaatgggtgccctgcagtgccaagttcgtaacgatgggcaacttcgctcggggcaccggcgttatccaggtgtacgagatccagcgtggggacctgaaactgctgcgggagattgaaaaggctaagcccattaaatgtggaacatttggtgccgcgtctttgcagcagaggtacttagctactggagattttgatggaaatcttcatatatggaatttggaagctccagagatgccagtgtattctgtaaagggccacaaggaaattataaatactatagatggtataggtggaacttggaattggggaaggagcgcctgaaattgtgactggcagccgggatggaactggcatttggcaatgcttacaatcaggaagagcgttgtttgtttgtgctggctatgacaatggggatatcaagctgtttgatctcagaaacatgtcactacgatgggagacaaacattaaaaatggggtgtgtagcttggagtttgacagaaaggacataagtatgaataaattagtagctacatctctggaaggcaagttccacgtctttgacatgagaacacagcatcccaccaaaggctttgcttctgttacagaaaaggcccataaatctaccatatggcaagttcgacacctgcctcagaacagagagctctttctgacagcgggaggtgctggcagtcttcacctctggaagtatgaataccctactcatcggtcaaagaaggattcggagggaatacagatgggagtcgcaggttccgtcagcctcctgcagaatgtgaccttgtccactcagcccgtctccagtttggactggagtcctgacaaaagggggctctgcatctgtagctcctttgaccagacagtgcgcgtgctgattgttacgaagctccagaccatttgacccaatgctttgaacttgacgttttccagagggttactcagaatttgagctatgttctacatcctctggcctcattgaagactttggatttgactgatgaatgacagtcgatggcacaaagcctgagagtcagcctccagtttttctgggtgtttggtggcccgactggtatgctgctgcatgtgaagttgccacacagcagggccagttttgttcctttcccccatatttct

SEQ ID NO: 5141 - DNA, 1291 bp, Cricetulus griseus
caggaattagctctccgaagccagttgcccacactggagcaggacggaggaactcagaatgctgtgtcttccccgggatgtctcaggaattgaggacaatgacaaccaatagttcagatccctttcttaacagtggcacctatcaactggaaggagatgcgatgaacatagaaggagaggagctgatgcccagcctgcaggaagcactgagttccgacatccttaatgacatggagtctgtgttggctgccaccaagctagattaaagaaagctttctcacatggttatagagttgccaggaagccactctctgagtctgaaggatccacggagcctaagatgtgcacccctgaaattcagataagccagtggttgagtatttggctattacaggaaacagatgaacaaatgtccagtgattggttttgttggaacataggcaaattagtaaagttgtttatggctatagcttgggtgggcagtactgtggggggggtgcaggaaatctgtatttcctggctttttaccatcttatttaaatcttggttatctcctttctacatatgtacacacacttataatgtctatggtagtgtgatagcagaatgtatctttttaaaggtttccttcttttccagtttattttttaaacagtagccttgaacatacgcatttagaatacatgactagtagtttttgtttcacaaataggtaaagtgatcagacttaatgtggggggtagttgaacttagcaaagggatagagataagcatgagtatgccttattttgcaagaagagagattgctagagtatgtgtcttcaggagtaatgatggcttccaaagagtattttttaaaggaacaaaataagcatgaattaacttttcaatataagctatgacgtgtaatagttggttatgaattgtagtggcaccagctagcacctctgtcatttaaggatctttttgaatgcttttagaagaatcccttattttcaagggttaaaatgagcagacaaactattctttccctggctaaagctgctgtgggaaccctcagcttaggaaggtggaaatctgttggcgctttggtttagtgtagcacgggaatggaagtagaaaagttttattcagttctttgagtgctcagaaaatgcaatcagtgtattatatatgattcgtagtcagagtgtttaatgcttcctggctgtagtgggtagcatgcggataagaatttaactggttattcttgaatttcttttacaataaaccaatttttataatcttaaaa

SEQ ID NO: 5142 - DNA, 1290 bp, Cricetulus griseus
gtggtctcatgtcgcaaaacggagatgatcctgagcagcgccagcaggcgtcagaggcggacgccatggcagcgaccttccgggcgagcgaacaccagcatattcgctacaatccgctccaggatgagtgggtgttagtgtcggcccatcgcatgaagcggccctggcaaggacaagtggagccccagcttctgaagacagtgccccgctatgacccactcaaccctctgtgtcccggggccacacgagccaatggggaggtgaatccacactatgacagcaccttcctgtttgacaatgacttcccagctctgcagcccgatgctccggatccaggacccagtgaccatcctctttttcgagcagaggcggccagaggagtttgtaaggtcatgtgcttccatccctggtcggatgtgacactgccactcatgtcagtccctgagatccgagctgtcatcgatgcctgggcttcagtcaccgaggatctgggtgcccagtatccttgggtgcagatctttgaaaacaaaggagccatgatgggctgttctaacccccacccccactgccaggtttggccagcagtttcctgccagatattgcccagcgtgaagagcgatcccagcagaactatcacagccagcatggagaacctctgttactggaatatggccgccaagaactcctcaggaaggaacgtctggtcttatctagtgagcactggctagtcctggtccccttctgggcagtgtggcctttccagacactactgctgccccgccggcatgtacgtcggctacctgagctgacccctgctgaacgtgatgatctagcctccatcatgaagaagctattgaccaagtatgacaacctatttgagacatcttttccctactccatgggctggcatggggctcccacgggattaaagactggagccgcctatgaccactggcagctacatgctcattactatcccccactcctgcgctctgctactgtccggaaattcatggttggctatgaaatgcttgcccaggctcagcgggacctcactcctgaacaggctgcagagagactaagggcgcttcctgaggtacattattgcctggcaaagaaagacaaggaaacagcagctgttgcttgaccgtgatgatagcagagctttgaatctttttgcctgagagaactgggacctggaatttgggctggtgtgacatcaataaaactgcatctcaaaattttaaccattgttttactgaggcaggaggatttaacttcaaggcgagt

SEQ ID NO: 5143 - DNA, 1290 bp, Cricetulus griseus
gaggacggaggcatggcggcgcccacgtcgatcctggggcccccgccggtcagccagagcggccccggctcgatggcgccctggtgctctatgagcagcggcccgtctcgctacgtgctcgggatgcaggagctgttccgaggccacagcaagacgcgcgagttcccggcgcacagtgccaaggtgcactcggtggcctggagctgcgacggccgtcgcttggcctcggggtccttcgacaagacggccagcgtgttcctgctggagaaggaccggctggtcaaagaaaacaactaccggggccacggagatagtgtggatcagctctgctggcacccaagcaaccctgacctctttgtcaccgcatctggagataaaaccattcgcatctgggacgtgaggactacaaagtgcatcgccactgtgaatactaaaggggagaacattaatatctgctggagtcccgatgggcagaccattgctgtgggcaacaaggatgatgttgtcacctttatcgatgccaagacacaccgttccaaagcggaagagcagttcaagtttgaggtcaatgaaatctcctggaataacgacaataacatgttcttcctgaccaatggcaacggttgtatcaacattctcagctaccccgaactgaagcctgtgcagtccatcaacgcccacccttctaactgcatatgtatcaagtttgatcccatggggaagtattttgccacaggaagcgcagatgctttggttagcctctgggatgtcgatgagttagtgtgtgtgcggtgcttctctaggttggactggcctgtgaggaccctcagttttagccacgatgggaaaatgctggcgtcagcctcagaggatcatttcattgacatagctgaagtagagacaggagacaagctgtgggaggtgcagtgtgagtccccgaccttcaccgtggcgtggcaccccaagaggcctctgctggcgtttgcctgtgatgacaaagatggcaaatatgacagcagtcgggaagctggaactgtgaagctgtttgggcttccgaatgactcctgagagggaaattcaaaatgaccaaaaaaaaaaaaaaaatttttccatgtctttttataggctgccactagaatatgtggcctaggtttagggtgggtcttcccacctcaaaagatcaagaaaaatctccatcaggtgtgcccagctggttgggtttcagtgatttccagatgcagtcaagttaacacccaagagtaaccatcacatgactgtcacagcatgccc

SEQ ID NO: 5144 - DNA, 1290 bp, Cricetulus griseus
gagatgccgagcggaagccgctgcccggactgcggctcctctgagctcgtagaagattcgcattattctcagagccagctggtgtgctccgactgcggctgtgtggtcacagaaggggtccttactaccaccttcaacgacgagggcaacctcagagaagtgacctattctagaagacaccggggaaaatgaacaagttagtcgcagccagcaacgagatctccgtcgagtgagagacctgtgtcgaattctgaagttgccccccacgttcgaggatacagcaatctcctactatcaaagggcctatcagctgcctggcatccgagatgctaggctacagaagaaggaggtgttagttggatgctgtgttctaatcacctgccggcagcacaactggcccctgaccatgggaaccatctgcaccctgttgtatgccgatctggatgtgttttcaggcacctacatgcagctagtgaagcttctggggctggatgtgccagctctgtgcctggaagaactggtgaagtcttactgcagcagcttcagactgttccaagcttcctcacccataccagccaaatatgtggaagacaaagacaagatgctgtcccgaacgttgctgcttgtggagctggcaaatgagacatggctagtgactgggaggcatcccttgcctgtcatcactgcagccaccttcctggcatggcagtctctgcggccttcagcccgactgacatgctctcttgcccagttttgtaaattggccaatgtggacctgccctacccggctgcctctcgtctgcaggagctcctggctgtgctgcttcagatggccagccagctggcctggctacgagtcctaaagcttgataagcggactgtggtgaaacacattggtgacctcctccagcaccgccacatgctggtccgcatggcttttcgagatggaacagcagaagcggagacccaggagcaagagcagggagagcaaggacacaaggacagcaagaggaggcggaggacaggaccttcaatttgtccaagaggaaacgcccttctagtcctgcacctctcctcccaccttgcatgttgaagccttccaaacgaacccatcccacaccctccatttctacagtgactggggatgaggacatttctgatagtgaaattgagcaatatttgcgcacccctcaggaagttagggactttcagagagcccaagctgctagccaggcagccatgagtgtcccctaaccctccctgatgcacattcttcaaagtatattcagt

SEQ ID NO: 5145 - DNA, 1290 bp, Cricetulus griseus
tcgcgaggccgaggcgggagcgacgaggcccaggcgggagccaggagcacagccggcatggagacgctgctgctgggtgccgggctgctgctgggcgcctacgtgcttgtctactacaacctggtgaaggccccaccatgcggcggcatcggcagcctgcggggtcgcacggccgtggtcacgggcgccaacagcggcatcgggaagatgacagcgctggagctggcgcgccggggagcgcgcgtggtgctggcctgccgcagccgggagcgcggggaggcggccgtcttcgacctccgccaggaaagtgggaacaatgaggtcatcttcatggccttggacttagccagtctggcctcggtacaggcctttgccactgccttcctgagctctgagccaaggctggacatcctcatccacaatgcagggatcagttcctgtggccggactcgggagacctttaaccttctgttgcgagtgaaccacgttggcccttttctgctgacacacttgttgctaccccgcctaaaatcatgtgcccccagccgtgtggtggtagtgtcctcagctgcccaccgtcgtggtcgtctggacttcacacgtctggattgcccggtggtgggctggcaacaggagcttcgggcatatgctgacagcaaactagccaatgtgctctttgcccgggaacttgccaaccaacttgagggcactggtgttacgtgctatgcagctcacccaggacctgtgaactcagaactcttcctgcgtcaccttcctggatggctgtgtcctattttgcgcccactggcctggctactactccgggcacctcaagggggtgcccagacacccctgtactgtgctctgcaggagggcattgaaccactcagtgggagatattttgccaactgtcgcgtggaggaggtctccccagctgctagagatgaccaggctgcccacaggctgtggaaagctaccaagaagcttgcaggacttgggcctggagaggatgatgatgaccctgaggaagagcctcaacctcagggtccaagggccctgtcttctctgagtgccccctaccctgagaaaaccacagtttctggactttctcatagctgtccgggctcaccagacttgtctaaattgacacagcgaagaattcagatgaaggctcggcctttacctgactaactttcctaacccccaggctagaatgcatttctagtgcggtgggacccctcaaagcctcggctgtgtgcctgggcactgaggggttgccacatttacctc

SEQ ID NO: 5146 - DNA, 1290 bp, Cricetulus griseus
cggcctcgactctgagctgtcgcgggggagctcaagcgaggtgcaccgagagaacccctggccacttctaggggggaccctgagggacgagcggcccctgtggcccgcatcccgggcgccgtgatccggcccggagcatctcgggggtcaaggcgcgtcttccgaggccgcccggggcccagcgctaccgctcccgagccccggggcgccccctggatggccgagctgccccctcgccggccgcccgggcgccgcagcggctgaggtcgctgggatcgccggccgctgtccccatcgccggcccctgcatgcccggcgcccgggtcgcagcccacctggacgctctgggccccctggtctcctacgtgcagccaccgctgctgccctctatgttctacgtgggcttgtttttcgtcaatgtgctgatcctctactacgccttcctcatggaatacatcgtcctcaacgtgggcctcgtctttctgcccgaggacttggaccaggcgctggtggaccttggcgtactctccgatcccggctctggcctttacgatgccgactcggagctcgacgtctttgatggatatttggagtaaggtcttgactactgctccccacttgccctccaccacccgcaactcttggcctggaccagccgccaatatcatgccactgccactagttgcgggtaccatctggaccgggatgagaccccaggaagaggcccgcctgcttgtgccaacaacagggttcctgccccaacccaggagtgtaccagaagactcacctaccacccagttctcagactcctggatctggcttgtgactctctgcctttgtgatggatgtttacaggaacccagccagaggtcacctctctgcacttcacccccaactgcacctgcctcccccacttaacctctggaaaggacacggagagctgaagtggggtgcaaacagactcatacttaggccaccctctccagcgttgtttaatgcagttgagccttaagcctgggtaggcttcagccccaaaattgttgaacacagtttcagggagtcactctgaagagggacatgccaaggccagagcgggggttagtctctccaggttgacagaactgagatgctgtgctggggaaggctgtctctggctagaagtctatttttggaagtgtgagtggtgtggagagtgtgagtgatgtagatacttgatttccataaacctgtaaaagcaatacttagaggctgacttatttcattaaaaaaatgtaagcaattccaaaaaaa

SEQ ID NO: 5147 - DNA, 1290 bp, Cricetulus griseus
gcggccggacccgcatcgagaagatgagctccgaggtggtggactccaatccctacagccgcctgatggcattgaaacggatgggaattgtcagtgactatgagagaatccgtacttacacggtggcaatcgtaggtgttggtggagttggtagtgtgactgctgaaatgctgacaagatgtggcattggtaagttactgctctttgactatgacaaggtggaactggccaacatgaatcgacttttcttccagcctcatcaagcaggactgagtaaagttcaagcagcagagtataccttgaggaacattaaccctgatgttgtgtttgaagttcacaactacaatatcaccacggtggaacactttgaacacttcatgagtagaataagtaatggtgggttagaagaaggaaaacctgttgacctggttcttagctgtgtggacaactttgaagctcgaatggcaataaatacggcttgtaatgaacttggtcagacgtggatggagtctggggtcagtgaaaatgcagtttctgggcacatccagctcatgatccccggagagtcggcttgttttgcgtgtgcgccaccacttgtagttgcttcaaatattgatgaaaaaaccctgaaacgagaaggcgtctgcgcggccagtctccccaccaccatgggagtggttgcagggattttggtacaaaacgtattaaagtttctgttaagttttggcaccgtcagtttttaccttggatacaatgcaatgcaggatttttttcctaccatgtccatgaagccaaaccctcagtgtgatgacagaaactgcaggaagcaacaagaagaatacaagaagaaggcagcgacacggcccacacaggaggctgcgcctaaggaggaggaagagataatacatgaggataacgagtggggtattgagttggtgtctgaggtttcagaagaggaactgaagaactcttcaggtcccattccagacttacctgagggaattacagtggcatacacagtcccaaagaagcaagaggattcggtttctgaagtaacagtggaagattctggtgaaagcttggaagatctcatggccaagatgaagaacatgtagacagtggactggcatttgtttcattttctgtgcttattctattcccttggaattaaaaaaaatcagaactaacaaaacttagggctgccttaactggtatgtgaatcattactgagttgtcatgctgtatggaacacgtggttgcttcttgcttctctctacaactgaatcagta

SEQ ID NO: 5148 - DNA, 1290 bp, Cricetulus griseus
caggttttcctttggaatatggagaaatacaccatgataaggaaactagaagggcatcaccatgatgttgtagcttgtgacttttctcctgatggagcattgctagctactgcatcttatgatactcgtgtgtgtatctgggatccacacaatggagacattctgatggaattcgggcacctgtttcccccacccactccaatatttgctggaggagcaaatgaccgatgggtacgaggtgtgtcttttagtcacgacggactccatgttgcgagcattgctgatgataaaatggtgaggttttggagaattggtgaggattgtccagtacaagttgcacctttgagcaatggtctttgctgtgccttttctgctgatggcagtgttttagctgctgggacacaagatggaagtgtatgtttttgggccactccaaggcaagttcctagccttcaacatttatgtcgaatgtcaatccgaagagtgatgcccacccaagaagtccagaaacttccagttccttccaaagttttggagtttctctcctaccgtttttagaaggaagactccatttcctggtggggcctgagagaatggcctttacaagacacacctcaagctttaccaacttaagcatttgttcttaaaggctcggaagatttatttaatttgattgactcttacacttcatttcttacattagttgaatttttaaagcattatttatagaccataggaaaaatatttctgaacatatcatgtaattttgttaaagtattaactgtgaaaacatatacatacctgtatatatttagacacaagctgctatgtattgaatgggccctttggtttctaactcttagttctgacctgtatatattgctttagtagagccatggtgtaaatatgtgctatttgttggaacaaattcagtggaattttagtcttttaagagccagtgaaaatggtagctagaaaaaagttgtttctcgtaggccttaatattgaaaggagctacttacccctcagagagtaaagtattatgcattcttgtcaatttgaaaaatacaccttctgcattattgctgaatattttgttaatactaaggaacagttattttaagactatgggttttttttttaactggtgacttaccaaagagaagcgatacaatatgtctgcttttgccttctgttatttatctcatctgcggatgttgagaatgtatgcattatgtaaaatgcttgttttatatctttgttgagtttttttaattaaaagacataaaa

SEQ ID NO: 5149 - DNA, 1289 bp, Cricetulus griseus
gggagccgggagcggggcctccgcggggtgcagaagctgttgcggggcgcacgggattagaaatggtctactccccaatcagtttttgtctttgcaatttgcattttaatgataacagaattaatcctagcctcaaagagctactatgatatcttaggtgtgcccaaaatctgcctcagagcgacaaatcaagaaggcctttcacaaattagcgatgaagtaccaccccgacaaaaataagagccctgatgctgaagcaaaattcagagagattgcagaagcatatgaaacgctctcagatgctcaccggcggaaggagtatgatacagttggacacactgctttcactaatggcaaaggacaaagagggagtggaagtccttttgagcagtcttttaacttcaattttgatgacttatttaaagactttaatctttttggccagaaccaaaacactcggtctaagaagcattttgaaaatcacttccagacacaccaggatggttccaatagacaaaggcatcatttccaggagttttctttggtggtggattgtttgatgatatgtttgaagatatggagaaaatgttttctttcagtggctttgataccaccaatcgacacacagtacagactgaaaataagatttcatggggttccagtaagcactgcaggactgtcactcagcgaagaggaaatatggttactacatacactgactgttcaggacaatagttgattctcttctgtttctactaaaccacgtagttctaatctttctcactgtgtctgatgaaaacaactgttttctgtgaagtactttaacaaatgcatgatttcacttatgttaagcagttggttataggtattccatatattaaatatttttgacaggttcaatcacattcagctagtagacaactctaattattaatttttctgattaggaaaggttcatttgaaagatcatcatttgcaagatttttttctctgctaatttaaaatcgcatgccctgtagcacctgtgacttgggttgctaaatgtctgtgaaactgtaattgagtcagtcagtgaaagagacaacaggcttttggctaattgccactgaatgctttagaaactgctggtttgataccacaaaaagatgcctcttcagtagaattggtgtaacaggaatgattgtattgcacgtagttaagctgaaaaagtttaaagcttatggtgaaatattgccaagagattgtgtgtttggcctgcgctaatggtttgtatgatcaaaatcatagct

SEQ ID NO: 5150 - DNA, 1289 bp, Cricetulus griseus
atctactctgactgactttggaagaagtagcatctcgggaacgaaggggaaacgtaccagaaaaagaagaaattaacctgcaaaagctatctatgatttcaaagctcagacatctaaggagctatcatttaagaaaggagatactgtctacatcctcaggaaaatcgaccagaactggtatgagggggagcactacggcagagtgggcatctttccaatctcatacgtagagaaactaacacctccagaaaaagcacagcctgccagaccaccacccccagtccagcctggagagattggcgaagccatagccaaatacaacttcaatgcagacacaaacgtggaactctccctgcgaaagggtgatagaattattcttcttaaaagagttgatcaaaactggtatgaaggtaaaatcccgggaagcaacaggcaaggcatcttccctgtctcctatgtagaagtcatcaagaagaacacaaaaggtagctgacgattaccctgaccctcctctaccccacagctactctagtgatagaattcacagcctaagttccaataagccacatcgtcctgcgttcactcatgacaacattcaaggtgggggtgaaccgtttcaggctctgtataactatactcctaggaatgaagatgagctggaactcagagaaagtgaccacctctctggaaggtgttctgtcctcaggaagccagaagactgttttctgaaatgctatagtttgcattttcaccctaagcttggcagtatatttttctttcacaagtttgcctagtgccctggtttacactatatgacaactatacttcagctattgtttgcctgcacttctcatatattgttttatgcacagtgatcataaaatctagaacgagtaggaaagttcattgggatgggtgtgatttttgttaattgcattaagttttcacataaggtttagccacactgcaggacaaatcgtgttgtaaaatttgcattgctattttatattaaaatataatcatcagcatcgtggacaatgagctcttagtgtttatttatctgttaaaacttaaaagcagtgttagtaagaggggcaaagagatgaaagtaatacccataggtaaggttcactgtgtgtacacttatacgttcgattgtataaggacaaataaatcatatgctgtgttgtacatttatggaaatgtaaaaaattccacattattttatagagtacttcaggagcatcctgagtgttaaggctggactttagcaaggattatgatcaata

SEQ ID NO: 5151 - DNA, 1288 bp, Cricetulus griseus
ggggaggatcgggaacccacacagctgtaatcagcccccaggaccccactcttctcatcggctcttccctgcaagctacctgctctatacatggagacacacctggggccaccgctgagggtctctattggaccctcaatgggcgccgcctgccctcggagctgtcccatctacttaacacctctaccctggccctggccctggccaacctcaatgggtccaggcagcagtcaggggacaacctggtgtgtcatgcccgggacggcagcattctggctggctcctgcctctatgttggcctcccccctgagaagcccttcaacatcagctgctggtctcggaacatgaaggacctcacttgccgctggacaccaggcgcacacggggatacattcttacacaccaactactccctcaaatacaagctaaggtggtatggtcaggacaacacatgtgaggactaccacactgtgggtcctcattcctgccacatccccaaagacctggccctcttcactccctatgagatctgggtggaagccaccaatcgtctgggctcagctcgatctgatgtgctgacattggacgtcctggacgtggtgaccacggaccccccacccgatgtgcacgtgagccgtgttgggggcctggaggaccagctgagcgtccgctgggtttcaccacctgccctcaaggacttcctcttccaagccaagtaccagatccgctaccgcgtggaggacagcgtggactggaaggtggtggatgatgtcagcaaccagacctcctgccgccttgcgggcctgaagcccggtactgtatactttgtccaagtgcgttgtaatccatttgggatctacgggtcgaaaaaggcgggaatctggagcgagtggagccaccccaccgctgcctccacccctcgaagtgagcgcccgggcccgggcggcggggtgtgcgagccgcggggcggcgagcccagctcgggcccggtgcggcgcgagctcaagcagttcctcggctggctgaagaagcacgcatactgctcgaacctcagcttccgcctgtacgaccagtggcgtgcttggatgcagaagtcacacaagactcgaaaccaggacgaggggatcctgccctcgggcagacggggcacggcgagaggtcctgccggataaactataaaggacaggctatcctcctgcagcttgcagaactggaggtttgccccaactagggcccctctgaactatcaagagtgttctttaaataaataaaggagctgttcaggtcc

SEQ ID NO: 5152 - DNA, 1288 bp, Cricetulus griseus
caaatgcatggacaaggacagcccagatctccaccaggacctgaatgctctcaaaacaaagttccaggagatgcggaagctcataggcaccatgcctggcatccacatgagtcctgagcagcaacagcagcagcttcacagcctccgggagcaagtcaggaccaagaatgagcttctgcagaagtacaagagcctctgcatgtttgagatccccaaggagtaggaccaactcccaggacagctgccaaagaactgagaacttcacacctgtgctgtccatctccttgggagcccagctctaaactgggaggccacatatggctgttgtggggcctcagtggctgtactcagccttgacagatctggagggcacagaaggagaggaggtggctgttcccttctttcctttggctcctcccactccccatatcatcagtgcatatctggtacatactgttcctgttaacagcagtttcatgaagcatttgcatagaattcatgggataaattagacctgcactcagatggcatggatttaatataatttttaaagaaggctgggagagtgtgaacattgttttgaaaggccagagggtgggtggcttctcccccaaaactgttcacttccttttttgtttgagctactgaatgaaactgtatctcgggggcgtcatcccagagccctgccagccagccaccaactccagtttccagcctcctgcacactagccttataggctcttgctccctttatctccatcactccaggcagtgctcagaatagccaaagcactgcttgcctggggccttttgtccttcccacgctggctcaaaaaggctgttgagcaagcagctctgccctgattcataggccctggcttacctcgtcatctcctctctaaccagggagtcagccatatttgctaccctgcacatggtccctgcacacttctggtttagagcagagtggctggaaggggtaatcagggtggttcctcagccagggggactgtcacactgagggcagggtggcccttcgtcctctcaggagtaaggtgggaagtacccagtattgtttagatcttgaaatgggcacggtctgggctgaccagtgtaagacttagcaggtgcctgccagctggccttgttggcaggagtactggctgggaacgtttttagcaggggttctggtggcattgtctatccaagatgcctcacagttgggcctgggatgtgtgaaagagggtgttgagttccagtggtttggacagaaaagtgggctctgagt

SEQ ID NO: 5153 - DNA, 1287 bp, Cricetulus griseus
ggacccagttttgaaaccgtctctgcttagtggcctgaatgctgccctggcccattacagccctaccaaggatctgcaccgcaagctgtcctcagatgagatgtacctggtggagttctggaggtcaatactgggatgggaccacagatatcaccagaacagtgcgattggggcacccctacctgccttccaaaaggaggcatacacacgtgtactaatgggaaacattgatctgtccagactcatctttcctgcttcaacaaaaggaaggatggtggaagcttttgctcgaagagccttgtgggaagttggactcaattatggccatgggacaggccatggcattggcaatttcctctgcgtacatgagtggccagtgggattccagtctaacaacattgccatggccaagggcatgttcacttccattgaacctggatactaccaggatggggagtttggaatccgtcttgaagatgtggcccttgtggtagaagcaaagaccaagcacccaggggcctacctgacttttgaagtggtgtcctttgtgccctatgaccggaacctcattgatgtcagcctgctgtccccagagcaactccagtacctgaatcaatactaccagaccattcgcgagaaagttggcccagaactgcagcgtcgccagcttctggaggagttcgcatggctagagcagcacacacaaccgctgtcagccatggcccctattaccacctccttgacctctatgtgggtagccttcactctggccatcctcagctggagcagctagacgcccccgactccactgaccacttcagtttgggattcatttgctcttgcttagctatcctccctctgtgccatccatgtcccaagctatcccagactcctctgctctcagggagcattttaagcttctaaggtatagccaccatgataatgctattaaacctccgtgtctttgaaacactcttaaccttgtgtgggcagactctgatttccccattttatagacaggaaaactgagtttcagacaggaggcgtggcctgcctgaagaaactcagcacttggttaggagatagggttagcagatggtggggccagatgggctggcattccagttccttggcccatcagcactgtgccaagtctcttagcctacatctcagccacggccccatttactgaacccacttcatcagggttttctctggtctgacctggactagccgttagccacctgggctcacatcctgctagatgcttgaaacaactttgacaaa

SEQ ID NO: 5154 - DNA, 1287 bp, Cricetulus griseus
ctctggctgaccatcgagctagccattgtggggcgtcagacatgcaggaagtcatcggcacggcgatctccttcaatctgctctctgccggacgcatccccctgtggggtggcgtcctgatcaccatcgtggacacattcttcttcctcttcctggataattatggattgcgcaagctggaagctttctttggacttcttattactattatggctttgaccttcggttatgagtatgtggtagcgcgtccgtcccagggagcgcttcttcggggcctgttcctgccctcctgcccgggctgcggtcagcccgagctgctgcaggcggtgggcattgtcggcgctatcatcatgcctcataacatctatctgcactcagccttggtcaagtctagagaggtagacagaacccgccgggtggacattcgagaagccaacatgtacttcctgattgaagccaccattgctctatcggtgtccttcatcatcaacctctttgtcatggctgtttttggtcaggccttctaccagcaaaccaatgaggaagcgttcagcatctgtgccaacagcagcctccacaactatgctaagatcttccctagggacaatcacacagtgtcagtggatatttaccaaggaggtgtgatcctaggctgtctctttggccctgctgccctctatatctgggccgtgggtctcctggcagccgggcagagttctactatgaccggcacctatgcaggacagttcgtcatggagggcttcctgaggctgcggtggtcgcgcttcgcacgtgtcctcctcactcgctcttgcgccatcctgcccactgtgcttgtggccgtcttccgtgacctgagggacctatccggcctcaacgatttgctcaatgttctgcagagtctgctgctgccctttgctgtgctgcccatcttgactttcaccagcatgccagccgtcatgcaggagtttgccaatggcctgttgagcaaagtcatcacttcctgcatcatggcactggtctgtgccatcaacctctactttgtggtcagctacctgcccagcctcccgcaccccgcctactttggccttgtagctgttctggctgtgggctacttgggccttactgtctatctggcctggacctgtagcattgcccatggagctacctttctcactcacagctcccaccagcacttcctgtatgggctccctaaggaggagcaggaagggaggtcctgagttcaattcccagcaaccacatggtggctcacaaccatccattatg

SEQ ID NO: 5155 - DNA, 1287 bp, Cricetulus griseus
tggcgggcgattgcaatggagtcggttgcttcagagagctccccagctccagagaatgagcattttcaagagactccggaatcaaacaatggtgtgtatacatcctttatgaagtctcatcgctgctacgacctgatccccacaagttccaagttggttgtgtttgatacttccctgcaggtaaagaaagccttctttgccctggtgactaacggtgttcgggctgcccctctgtgggatagtaagaagcagagttttgtgggcatgctgaccatcactgactttatcaacatcctgcaccgatactataagtcggccttggtgcagatctatgaactggaagaacacaagatagaaacttggagagaggtatacctacaggactcctttaagccccttgtctgcatttctccaaatgccagcttgttcgatgctgtctcttcattaattcaaaataagatccacaggcttccagtcattgacccagagtcaggcaacaccttgtacatccttactcacaagcgcatcctcaagttcctcaagctgtttatcactgagttccccaagccagaattcatgtctaagtctctggaagagctacagattggcacctatgccaacattgctatggtccgtactaccacacctgtctatgtggctctaggcatctttgtacagcaccgagtctctgccctgcctgtggtggatgagaaagggcgtgttgtggacatctactccaagtttgatgtgattaatttggcagcagaaaagacctataacaacctggatatatctgtgacaaaagctctacaacaccggtctcactactttgagggtgttctcaagtgctatctacaggagactctggagactatcattaatagactggtggaagcagaggttcaccgtctggtggtggtggatgagaacgacgtggtcaagggcatcgtatcgctgtccgatatcctgcaggctctggtgctcacaggtggagagaagaagccctgagcgtggggagggacaggcagcgccagggaagatggccccctcactgcctcctgagagctctgggaatcagatgaaatcctggaagaaccgagtgtgttccctcaggagctccatacccactgtctggaactagaggagggaaggcagatggctgtggaggagggcaatgggtaggtagccaagattaatgcatttgttgacaaacctaattaaatagacaagattttctatcataggtaaaaaaaaaaaaaaaaaaaaaaaaaaaaaaaaaaaaaaaaa

SEQ ID NO: 5156 - DNA, 1287 bp, Cricetulus griseus
ccccgaaaagggaaacgagggcggaagcccagcaaaccccggttgattcccaggcagacatctgggggccccatctgccctgactgtggctgtaccttccctgaccactccgccatggagagccacaaatgtgcccagaatctgaagaagccctacccttgcccggactgtgggcgtcgcttttcctacccatccctgttggtcagtcaccggcgggcacactctggtgaatgcccttacgtttgtgaccagtgtggcaaacgtttttcccagcgtaaaaacctgtctcagcaccaagtcatacacacaggcgagaaaccctaccactgccctgactgtggtcgctgctttcggcggagcaggtccttggcccaatccaccggaccacgcatacgggcgagaaacctcatcagtgctctagttgtgggcgtcgcttcgcctacccatctctgcttgctatccatcaacggacacacacaggagagaagccctatatctgcctagaatgcagccgtcgcttccgccagcgcactgccctggtcatccaccagcgcatccacactggagagaagccttacccctgtcctgactgcgagcggcggttctcctcctcctctcgcctggttagccaccggcgtgtgcactctggggagcggccttatgcctgtgagcactgtgaagcccgcttttcccagcgcagcaccttgctccaacaccagctcttgcatacaggcgagaaaccctacccctgcccggactgcggacgtgccttccgaaggagcggctccttggctatccatcgcagcacccacacagaggagaagctgcacgcttgcgaggactgtggccgacgctttgcctacccttcactgctggccagtcatcggcgtgtgcactcaggcgagcggccctatgcctgtgacctttgctccaaacgctttgcccagtggagccacctagctcaacatcagcttctgcacacgggggagaagcctttctcctgccttgagtgtggccgatgcttccgacagaggtggtctctggctgtccacaagtgcagcccccaacaccccccaatggtagccctagacctgttatagaagggcccagtcagaggagcagtgtcctttagcacgacaaagactatgggagatcactttatggaggggttcagaactcgggaggagctgccagaagtcatacagggggagcagaactaaagccctcggtcccctcgccccaccctctgcaagagcagtgcgtgctcttaaccacggagccatctct

SEQ ID NO: 5157 - DNA, 1287 bp, Cricetulus griseus
  modified_base (1281)..(1281): a, c, t, g, unknown or other
gggcaaactcagaaaatgaacctctttcagtcaataacaagtgccttggataactcattggccaaagaccctactgcagtaatatttggtgaagatgttgcctttggtggagtcttccgatgcactgttggtttgcgagacaaatatggaaaagatagagtgttcaacaccccgttgtgtgaacaaggaattgttggatttgggattggaatcgcagtcactggtgctacggccattgcggaaatccagtttgccgactatattttccctgcctttgatcagattgtcaacgaagctgccaagtaccgttatcgctctggggatcttttcaactgtgggagcctcaccatccgggccccatggggctgtgtaggccacggggccctctaccattctcagagtcctgaagccttttttgcccactgcccaggaatcaaggtggttatacccagaagccctttccaggccaagggacttctattgtcatgcatagaagataaaaatccatgtatattttttgaacctaaaatactttacagggcagcagtggaacaggtcccagtagaaccctacaagattcctctgtctcaggctgaagtcatccaggagggcagtgatgtgactctggttgcctggggcactcaggttcatgtcatccgggaggtggcttccatggcacaagaaaagcttggagtgtcttgtgaaatcattgatctgcggacgattgtgccttgggatatggatacagtttgcaagtctgtggtcaaaaccggacgactgctgatcagccacgaggctcccttgacaggcggctttgcctctgagatcagttccacagtccaggaagaatgtttcttgaacttagaggctccaatatcaagagtgtgtggatatgacaccccgtttcctcacatttttgagccgttttatatcccagacaaatggaagtgctacgatgccctacggaagatgatcaactattgaccacagagaaaatctggaagattatgactagatatggaaatatttttctgtaatttttttttatatttccttagactttctttcttcttacatatcattttatgaaatgaactatcatggatattggctgatgagctgcgaattacttattgtgttaatataagtggattgggggttgagtaacagtttaaagtgcaccgtgggtggtggccttatgattgtttcataactataagtattgggtggtgttgtattcaataaagcaaactcacatcgcctcaaaaaaaaaaaaaaaanaaaaaa

SEQ ID NO: 5158 - DNA, 1287 bp, Cricetulus griseus
atttctacctggacaaggcctggtactatacccacagataggagacaaattggatattatttgcccaaaagtggactctaaaactgttggccagtatgagtattataaagtttatatggttgataaagaccaagcagacagatgcattattaagaagaagaaaaaaaccctgctcaactgttcccgaccacaccgagatgtgaaatttaccatcaagtttcaagaattcagccctaacatcaggggtctagaatttcagaagaacaaagattattacatcatatctacatcaaatgggtctttggaaggcctgcataaccaggagggaggggtgtgccaaacaagatctatgaagatcctcatgaaagttggacaagatgcaagtcctgctggatcaaccaggaataatgatccaacaagacgtccagagctagaagctggtacaaacaggagaaattcaataacaagcccttttgtgaaaccaaatccaggagcactgaaggcaacagcgcagggcattccgggaacaatccctgggttccaaagtggccttattcgcaggaatcacatcaggatgcatcatcttcatcgtcatcatcatcaccttggtggtactgctgctcaagtaccgcaggaggcaccgcaaacactctccacagcacaggaccaccagcacagtaccacacccaagcaaggtggcaacaactctggctgggaacccagtgatgttctcatacccctaaggactgcagacagtgtcttccgcccacactatgagaaggtcagcggggactatgggcacccagtgtacatcgtgcaggagatgcccccacagaatcctgccaacatttactacaaggtctgaggcctgggaccttcgcctcccaagggaactctcaccttgttgtgggcgcagggactgcctgagcctggctctgggggcggaatgcctcctggaagaacctggagctggacagttttgtaggctgtaacttttcagccttggggaaccacagaccctccccagaagctggaagactgctaagagatccccacttggactgctgtgtccctgtgcggacctctatgctatgcacccagccaggcactcaggcctctgcagatcccggggaggacacggtgggctatgggtgatgcagcagtaccttaggagaaagttgcgcacctctgcctctgtgtttcctgccatgcacactggacttgtcactcggacctcgggtaacctcagtaaggttttcaaagatccctagcatttagtcctcactc

SEQ ID NO: 5159 - DNA, 1287 bp, Cricetulus griseus
cgagagaaagcgcgctgcgtgcggccccgctgcccagagcctgccagcagcgcgccctcggcggctccggtcccaaccgcgcccgccgcctcgcctcctccgcctcggccgcgtccggactacggggctcgcccggcctctcggaggttccccgcccgccccggctccccgcagcgccgtccggctccagccccgcagctccagccctgccgcccgccgcccgggggaaggtagcaagcgagcgagcgcgaccgcgccctcgcctcagccccgcgccccagccccgcgcggcgactaaggaccgggaagatgaacggcggaggcaaagccgaaaaggagaacactccgagcgaggccaaccttcaggaggaggaggtccggaccctatttgtcagtggtctgcccctggacatcaaaccccgggagctctacctgctcttcagaccattcaagggctatgaaggttctcttataaagctcacatctaaacagcctgtaggttttgtcagtttcgacagtcgctcagaagcagaggccgcaaagaatgctttgaacggcatacgcttcgatcctgaaatcccgcaaacactacgactagagtttgctaaggcaaacacgaagatggccaagaacaaactcgtagggactccaaaccccagtactcctttgcccaacactgtacctcagttcattgccagagagccatatgagctcacagtgcccgcactttaccccagtagccctgaagtgtgggccccgtaccctctgtacccagcggagttagcgcctgctcttcctcctcctgctgctttcacctatcccgcctcactgcatgcccagatgcgctggctccctccctccgaggctacttctcagggttggaagtccagacagttctgctgaaggctgtgaaaaacatatatataataaaatgtgttttactctttttacactgtataattttaagaaatacgtgttatttgtgaatgcatggtctgacactgctgtacagtttggaggcatccttgaatagaacaaagacaacagtaaagccaaaacggttagtatttttctaacagacattttaagaatggagggatgaattcttacactaggttagctcacttctgcgcttcagttttgaatgcttttaatgacaaatatcatgttttttctcctaataagctgcatgtttgaggcatgtctctgaatagcatcagaacttacacaattgtgttgtgaatgtgtggactccatctgccgtttttaaaggtttaaaaaaaaaaa

SEQ ID NO: 5160 - DNA, 1286 bp, Cricetulus griseus
ctggcagcatgggtgctctgcgccggcaagggatcatcatactcacctatgtgctggctgccttggagctaacttgtctcttcatgcaattctccattttaccatatctgtctcggacactgggcctagattctgtggtctttggctacgttcagacaacctttggtgtgcttcagctgctgggtgggcctgtgtttggcaggtttgcagaccagtatggggcacgggcggcactttcactctccttcgtggcagcctccactctatacctgctcctggtggcctcctgtagcccagccctacctggtgtcttcctgctcttcgcctcgcgcatacctgcagcactcatgcacactcttccagctgcccagatggtcatcacagatctgacggcgcccgcagaacggcccgcggccctaggccgactgggtctctgcttcggcatcggagtcatcttcggctccctgcttggcgggacccttaacaccacgtacgggatccagtgtcctgccatcgtggctcttgtggtcacactcctaggagctgtcctcagctttacttgtgttcctgtcaccaccaaggaagctggtgtccaatcagcccatcagggtggaaccaaggccagtgtatttgacctgaaggccatcacccgcctgctgctgctgcctaatgtgctgcctgtattcctggtcaaggtcatctctggcttcccttcaggggtcttcatggtcatgttctccattatctccatggacttcttccagctagaggctgcacaggctggctacctcatgtccttcttcggggtcctccagatggtgatccaaggcctggtcattgggagactgagcacccatttcccagaggaagccttgctgcgatccagtgtgctggtctttgctgttgtgggactgggcatggcgctgatgtccaatgttctgcacttctgctttctgatgcccggcctggtattcagtttctgtgccctcaatgtggtcaccgacagcatgctgaccaaggctgtgtcagcttcagacacagggaccatgctgggcctctctgcctctgtgcatccactgactcgcactgtaggacccaccctgggtggcctgttgtaccgcagctatggtgtcgccatctttggccaggtgcagcttatggtgaatttgcttgtcctattggtcctctggaggaagccactgtacccagaagaaagacaaagcccagtgaccacacagcctggtgacctggtccagtcaggcaataaacttcggagtctcttcctc

SEQ ID NO: 5161 - DNA, 1286 bp, Cricetulus griseus
cctggagccgtgcaatgcagcgggaaggtcccatcgaacaatgtttccttgaacttgcttcaccaatgtctctcatactgaatatattaagaaacatgctggcgtattttggtgttcctgtagaccaggatttttctgacttggcaaaataaagactatgggtcagctcggagtatcattcgtattattgggaaaatgcttcccttagaaccttgtcgaagacctaattttgagttgatcccacatttgaactctgaggaatttgatgattatgaacctacggttccatcttttgcttgacgttttatgtgtggcaaatgatgaagaagctggttatctcagatttcgacatagtccctggaaaaaggaagaggaagagaaaattgctcctttccattctccaaaattaatttgggatccatcattacctgctctaagacagaacaaaccagtgaaaaatgatctgccagcaagtgaggctgcaattaaaaaatagctgcccttgaagatgaactcacttttcttcggtctcagattgctgcaattgtggcaatgcaggagctgagagagagtaaagagaacagagataatccagcaactgcaatggaaaagcagcactcaggtgttaacaaggtgaatggtagccatcattcagaaagccagagagttagtgatgtcccaaacatgttagacattctaaaggacatgaataaggtcaaacttcgtcccattgaaaggtcaccaggtggtagacccattcagaagcagaaaagacagagttcacaatgggatccagtgtctttaatatccaatgcacttaagcagaagtttgcatttcaagatgattcctttgacatagaaaatagatcttgggagtgctctccattttctagtccagaaacttcaaggttttgacatcacatttctccaacaaaatgtcatcgatctaagggaagaactgataatataaaagcaattaatcaaggtcagaagtgaaagctgtgcctacacttggaaggacagatccagaaatgccctgtggtttccttcattgactttcagagaattacaacttttgttagggtgactaaaccttatcctgggacctatctgtacccaacctgaggaagatgtttaaaaatgtttgtccctatttttggaagttattattctagtagttaactggctactgtggagttgggtatatagattcccactttatgtgagtgctactgaaaatggaatatatgcttcagtatatatatatatatatatatatataatgt

SEQ ID NO: 5162 - DNA, 1286 bp, Cricetulus griseus
tgtggaaagatgttcaagaagaagtctcacgtgcggaaccatctgcgcacacacaccggagagcggcccttcccctgccccgactgctccaagcccttcaactcacctgccaacctggcccgccaccgcctcacacacacgggggagcggccctaccgctgtggggactgtggcaaggcctttactcagagctccactctgaggcagcatcgcctggtgcatgcccagcactttccctaccgctgccaggagtgtggactgcgttttcaccgcccttaccgcctgctcatgcaccgctaccaccacacaggagagtacccctacaagtgtcgggagtgctcccgctccttcttgttgcgcaggctgctagaggtgcaccagcttgtggtccacgccgggcgccagccccaccactgcccttcctgtggggctgccttcccctcttctctgcggctttatgagcatcgctgtgcagctgctgccacccaggccccacggcgctttgagtgtgggacctgtggcaagaaagtgggctctgctgctcgcctgcaggcccatgaggctgcccatgctgctgctggccctggagaggtcttggctaaggagcccccagctcccagggcctcccgggccactcgcacaccagtcactccctccccaaccaggccctcggcggtgcaccctccgctgcccctacagcccctgcaaggcggcgtggcctggaatgcagtgagtgcaagaagctcttcagcacagagacatcgctgcaggtgcatcggcggatccacacgggggagcggccatacccgtgtccagactgcggcaaggccttccgccagagtacccatctgaaagaccaccggcgcctacacacaggcgagcggccctttgcctgtgaggtgtgtggcaaggcctttgccatctccatgcgcctggcagaacatcgtcgcattcacacgggtgaacgaccctactcctgccctgactgcggcaagagctaccgctccttctccaacctctggaagcaccgcaagactcaccagcagcagcaccaggctgcggtgcggcagcagctggcagaggcggaggctgctgtgggcctggctgtgatggaaaccgcagtggaggctctgcccctcgtagaggccattgagatctacccgttagcagaggctgagggggtccagatcagcggctgactcggccccgttttctcttttctctgaaggcctccaacagccccttaaaacctgtgtacatattgtacccctctcctctccaccacc

SEQ ID NO: 5163 - DNA, 1286 bp, Cricetulus griseus
cgacccgcgcggggctctcagtcttttcccgccatgtccttcgtagagagtgcgaggtctgtggccgcgcgacggcgccgccaggtcaccccaggcccggtgactcggcctgtgtattccgacttcactctacggggatggcgatggctggggtgcgggcgaaatcgacgaagacgagggatgcgaccaagtagcccgcgatttgcgggcggagttctcagccggggcgtcgtgggagcccaagagggccccgctactcccgccggtcggggatgggtcacccgtcctgcccgagaagcgcaacggcatcttcccggcgactgcggccaccagaagccagactcggcggtggcctgtccaggtcctttccattctctgttcgctgctcttcgccggcctccttgctttcctcctggccatcgcctacctgatcgttaaagaattgcatgcagaaaatttgaaaaatgaagaagatgcagatactgggctgttaggattctggtctctgctgacattatctctaactgctggattctcctgttgtagcttctcttggacagtgacttactttgattcttttgaaccaggaatgtttccgcctactcctctttcacctgctaggttcaagaaactgactggacattctttccacatgggctatagtatggcaattttgaatggcattgtagctgctcttactgtggcgtggtgcctcatgtaaacctacaatagagaaatactgttggtgaaagtcctgcttgttttataacaacagaaacaaatgttgcctactccaaagactatgaaatgtgatgaaccaggttctgtgggttggaagccagcctgtagctacacagtgagaccatttaaagaaaaagaagagagaaaacaatgctttttctttgtaacattttatagaaactacatcagagtttttgataatcaatagaatgcaaatgtgcacttatattttttatggagtatacctaggggttttatatattcataatgctgaatttatgtttttaaaattatatttatacctatatggctgcaaattttatttcttagccagtgtaaacttttccattatatatatcagggcagcaaaacttgtactgttttgtttttatcaaatgaaaacctgaattttttttatgtagaaatgtttgaactttgtgattttttaatctcaagaatatagttgccaaagtagaaaagatattttgagattttgtaaatgtatatacaattgaactttaatatgtatgttgtaatatatatag

SEQ ID NO: 5164 - DNA, 1286 bp, Cricetulus griseus
agcgagcgcgcccctgcttctgagcggtagcgactctcgcgcttcctgttaggcctccagcccttctctaccccgcatctcgctctcgacaccccagttccccggcccgccagcgcccctggccacctgccaatcccggacccagtcctgcgtacccagcccgctcgctccaggacaagcccaagctccgcaggccgcgcgccgccatgggggtggagggctgcaccaaatgcatcaaatacctgctcttcgttttcaatttcatcttctggctggctggaggtgtgatcctaggtgtggctctgtggttacgccatgacccacagaccaccagcctgctctatctggaattaggagacagaccagcacccagcaccttctatgtgggcatctacattctcattgctgtgggagctgtgatgatgtttgtgggcttcctggggtgctatggggccatccaagagtcccagtgcctgctggggacgttcttcacctgccttgtgatcctgtttgcctgtgaggtggctgctggcatctggggcttcgtaaacaaagaccagatcgccaaggatgtgaagcagttctatgatcaagcccttcaacaggctgtggtggatgacgatgccaataatgccaaggctgtggtgaagaccttccatgagacgctcaactgctgtggctccaacgcactgaccgcactgaccacctctgtgctgaagaacagcctgtgtccctcaggcaccaacatattcaactccttgatgaaggaggattgccatcagaaaatcgatgagctcttttctgggaagctgtacctcattggtattgcggccatcgtggtagctgtcatcatgatcttcgagatgattctgagcatggtgctgtgctgtggcatccggaacagctccgtgtactgaggtcctccctgagtgaccagaggccacctcgggggccatggcctgtgtatatatttctgtattactctgctacacttagccttttctgcctgctgagccaaacctcctccacagctgcttgcccagaggctatgtagctgagctagagagccatggtcactcaccctgcccactgtgggtcacatcgatcacatctttttaatccttgtccctttcctgtccccatttcaagagctgggtttgtaagcactcttatgccttcaatgcacctgttctttctaacgtgtcaccttcaactgtaattacatctgaaacagtcatttaataaaggaggagaaaatcaggcatgctaaaaaaaaaaaaaaaaaa

SEQ ID NO: 5165 - DNA, 1285 bp, Cricetulus griseus
aaaaaaaaaaaaacagcccttagccccctcctcccctttcctgcttctgcgagaactccctccctccctccagctccgccggccccggcgcccctgccctggaagccgagcggctccgctcgcatttcgccgtcgccgccgcctctcgcagtattgcaatataggggagaagcagaccatggtgaatccgggcagcagctcgcagccgccccggtgacggccggctccctctcttggaagcgctgcgcaggctgcgggggcaagattgcggaccgctttctgctctatgccatggacagctactggcacagccgctgcctcaagtgctcctgctgccaggcgcagctgggcgacatcggcacgtcctgttacaccaagagcggcatgatcctctgcagaaatgactacattaggttatttgggaatagcggtgcttgcagcgcctgtggacagtcgattcctgcgagtgaactcgtcatgagggctcaaggcaacgtgtatcatctcaagtgttttacgtgctctacctgccggaatcgcctggtcccgggagatcggtttcactacatcaatggcagtttattctgtgaacacgatagacccacagccctcatcaatggccatctgaattcacttcagagcaatccactactgccagaccagaaggtctgctgaaaggtcagagtaatgcagagtgcgtgccttcatctcagattttcttcatcacaggtggatcccatgtgtcttcagtagaccagtcacctttgtagccagccccttgtcatcgcaccttctttagtcttgagtgccctttctgcatttatgatgtattaaaatgactgaatatgaacattaaggactccatgaacctgggctaatgggagatggtagcgaaaaggaaaaagatccaccgaaggacatcgttggggggggggagcctgcgtgggggagggaaatgactaatgaacctaattaaaagaagcatcggaatccgctttctaccctcattaacaattagcagggcaccggccagagtgtgtaccctgtgttttaccttaacaacattctgtttgctctttgtatatttaagtgttgtaatgaaatgtgtttcaatcaaactgaacatgagttaaaggaaaagagatgtggcttttgtgatattatatcacgaacacttttattgtaactctgtaaaatacaatgtatgtatgcatgtgagtgttcttgtttcgatgttgctccacccctggcaaaaggttaaaaaaaaaaaaaaaaaaaaaaaaaa

SEQ ID NO: 5166 - DNA, 1285 bp, Cricetulus griseus
ggcggccatggaccgcttcgtgtggaccagcggcctcctggagatcaacgagacgctggtgatccagcagcgcggggtgcgcgtctacgacggcgaggagaagataaaattcgatgctgggactcttcttcttagtacacaccggttgatttggagagaccagaaaaacaatgagtgctgcatggccattcctctgtcccagatcgtgttcattgaggaacaggcagctggaattgggaagagtgccaaaatcgtggttcatctgcacccccctccatctaacaaagagcctggtccattccagggcagtaagaactcctacatcaaactctccttcaaagagcatggccagattgagttttacaggcgtttgtcagaggagatgacacagagaagatgggaaagtgtgccagtttcccagtcattacaaacaataaaggaccccagccaggaagagtaagagctgtaggaattgtaggtatcgaaaggaaacttgaagaaaagagaaaagaaactgacaaaaacatttctgaggcctttgaagaccttagcaagctaatgattaaggctaaggaaatggtggagttatctaaatcaatcgctaataagattaaagagaaacaaggtgacgtcacagaagatgagaccatcaggtttaagtcctacttgctgagtatgggaatagccaacccggttaccagggaaacttatggctcaggcacacagtaccacatgcagctagccaaacagctggctggaatattgcaggcacctttagaggaacgcgggggaataatgtcactcacagaggtgtactgtttagtgaaccgagctcgaggaatggaattgctctcaccagaagatttagtgaatgcttgcaagatgctagaagccctgaaattacctgtcaggcttcgggtgtttgatagcggtgtcatggtaattgagcttcagacccacagagaagaggagatggtagcctcagccctggagacagtttcagaaaggggatccttaacatcagaagagtttgccaaacttgtggggatgtctgtcctcctggctaaagaaaggctgctactcgcagagaagatgggccatctttgccgagatgactccgtggaaggcttgcggttttacccaaatttatttatgacacagaactaaaattttgtatccgatataccttttgccaatagacttggtattatgccaaggccatatgaaattgagctaagcaaagaatacaaataaaccaagaatttgttagaaaaaaaaaaaaaaa

SEQ ID NO: 5167 - DNA, 1285 bp, Cricetulus griseus
gtgcggccatcagggatggcggcgtccagtgggactgaggcgggtggaggtggcggagaggaaggtgtctgtggggagccgagaggagcaaagatcctggccgctggagcccagcgtcgcgtcggggcgtgacggtcgtccccaagaggccaagctcaggtgccatcctttccttctgaaagctaccaccatgaccctgacgaaaggttcctttacctattccagtggggaggaataccgtggcgaatggaaggagggccggagacatggttttggtcaactgatgtttgccgatggtggcacctacctgggtcactttgagaatgggctctttaatggctttggggtactgaccttctcagatggctcaaggtatgagggggagtttgcccagggcaagtttaacggcgtcggagttttcattcgctatgacaacatgacctttgagggggaatttaaaaatggcagagtagatggcttcggcttgctgactttccctgatggttctcatggaataccccgaaatgaaggcctgtttgagaacaacaagctgctaaggcgtgagaagtgctctgctgtggttcaacgggctcagagtgcctccaagtcagccaggaatctcactgcctgatggagctctgggcacagctggaaaccagtcctgtgtgctgccatggagaaatcaggaaaaagataggggtaactaagaccacagcagctctgtaaaacccaggccagagcttttctgtgtgttaccccctcattcactgcatttggaggcctgggtccaggcttgtctctgtgtcttcttgtttcccctcattgtaagagtgtggctttcttccctctcaactttaaagtaaactgtcttccttacctgagttacagcagatagcccagtccccatctgtgcctctctctcccttagatgtcagacaggatcccttcatagaatagccaaataagaaactagtgtaagagtaactatgacttgtactcattattcaatccagggcaaggggcaaagctatccaggtctcctatgggatgacctgaatccctgggaaagcttgcactgagagttccttctcagtgcaccaatggatcagactctcagccccttgagtgttggaagacttggctccatcctcatgtgtactgactggcattggctcctccatttcactcatgactcttcaagcaagagtcttgaccctcaagcctggggcagatcttcctgccaaaataatccccaggtctccagttacgcccagcctcccactcc

SEQ ID NO: 5168 - DNA, 1285 bp, Cricetulus griseus
ggtcatggccccaccaccactactgcctttggcttccagtactccaatccttcatggcgagtttggttcctatccagcccatggcccacggtttgcactcacccttacaatgcaagccctgcacatacagcggttgcgcccaaagcctgaagcccggccccgagatggcctagtccctcctggcagaggtctcaggctgtggcactctgcagagccgcagcccctcagacactgcagcttacttctgcgtctacacctacccacggggccggcgtggaggccggcgcagagctactcgtaccttccgggttgatggtgcggccacttacgaggagaatcgtgcagaggcccagcgctgctctccgtcacgctagcctcaggatccgctgttttccttcctgtcagtggcctggggattcttgtcagatgtagacatccacagcgagcgtttcagggccctgggcagcgctagattcaccttaggtgcagcactaggcctggccacattgcatacctaccgcggacgcctctcctacctccctgctaccacagagccagtcttgcccatcccaggtcacagcctgccacgagccaagtcagaactagctttggccccagccccagcccctactgtcacccactcgcccttacatcgctcagtgtctgatctgcccctgccccaacctgccttggcctccccgggctcccctgaacccctacctggcctttctctcaatggcggcggcccagagctgactggagactggggcggagctggggatgcacctctgtccccagacccactgctgccaactgctcagctttcacccatcactgaagggcccccagaaatgccaacatcctcggggatcctgcctcccacctctagtactccgaaagtctctacctggggcccagtggaccacctgctccctcccctgggctctccactgcccccagactgggtgacaatagaaggggagtttgtactcatgttggctatcttgcccagccacctctgtgcagacctggtggccgccccacatgctcgatttgatgatggcgtggtgcatctgtgctgggtgcgcagtggcatttcacgggctgcactactccgtattttgctggccatggagcacggaaaccacttcagcctgggctgccctcacctgggctatgctgcacgctcgtgccttttcgccttgaaccactcacgccacgtggtgtgctcactgtggatggggaattagtggagtacgggccaatgcaggcacaggtgcatccc

SEQ ID NO: 5169 - DNA, 1285 bp, Cricetulus griseus
cggctccaaagatggcggcgggggtggccgggtggggggttgaggcagaggagttcgaggatgctcctgacgtggagccgctggaacccacgcttagcaatatcatcgagcagcgcagccttaagtggatcttcgtcgggggcaagggtggcgtgggtaagaccacctgcagctgcagcctagcggtccagctgtctaaaggacgtgagagtgttctaatcatttccacagacccagcccacaacatctcagatgcttttgatcagaagttctccaaggtgcctaccaaggtcaaaggctatgacaacctctttgctatggagatagaccccagcttgggcgtggcagagctccccgatgagttcttcgaggaggacaacatgctgagcatgggcaagaagatgatgcaggaggccatgagcgccttcccaggcattgatgaggccatgagctatgctgaggtcatgaggctggtgaaaggcatgaatttctcagtggtagtattcgacacagcacccaccggacacacactcagactcctgaacttccccaccatcgtggagcggggcctgggccgcctcatgcaaatcaagaaccagatcagccccttcatctcacagatgtgcaacatgctgggtctgggggacatgaatgctgaccagctggcctccaagctagaagagacattgcctgtcatccgatcggttagcgaacagttcaaggaccctgaacagacgaccttcatctgtgtgtgcatcgctgaattcttgtccttgtatgagacggaacggctgatccaggagctggctaagtgcaagatcgacacccacaacatcatcgtcaaccagctcgtcttccctgaccctgaaaaaccctgcaagatgtgtgaggctcgccacaagatccaggccaaatacctggaccagatggaagacctttatgaagactttcacattgtgaagctgccactgttaccccatgaggttcggggagccgacaaagtcaacactttctctgccctgctcctggagccctacaagccccccagtacccaatagcacaccactcatcccagctgctgccacttcacaccctcctctttccctatggggcagagtttgcacaaagtcccccatagtacgggggagccgtttaggaggtgggaggggatctgttccccctggtggggcctggggaggctgcaatgcccccccaccctctccctgcctcacactcctcaataaaataatcttaaacaaaaaaaaaaaaaaaaaaaaaaaaaaaa

SEQ ID NO: 5170 - DNA, 1285 bp, Cricetulus griseus
gatgtctcaagggcatttgacactcttgcaaaggcattgactcctggagaaagcacagcctgtcagagcccagtagaggacatgaaaggaaacgtgcatctaatcactggagagtcgagctacatggagaaagaggggccactgctcagacgaattcacatgtagttttcaggctcaccatgccttctcctatgcccgagtacctgaatgtgcactacattggggagtcggcctccagactgctgttcttatcgatgcactgggcactctccattccttctttccaggccctagggcaagaaaacagtatatcattggtaaaagcgtactggaatgaactcttcactcttggccttgcccaatgctggcaagtgatgaacgtagcaactatattagcaacatttgtcaattgtatgaatacgcctacctgaaggccatagttctcttcagtccagatcatccaggcttggagaacatggagctcattgagaagtttcaggaaaaagggcttatgtggaattccaggattacatcaccaggacatacccagatgatacctacaggctatctcgactacttctcagactgccggcattgagactgatgaacgccaccatcactgaagaattgttcttcaagggtctcatagggaatgtacgaatcgacagtgtcatcccacacattttaaaaatggagcctgcagattacaactcccaaatcattggtcacagcctttgaaagtcaagggcacattgctatgaactgagtttactgttccttcttgggacacaagacaccaaatcaaactgttgcttccagggcatctgcaaatattaactttaagagtaaccaaaattcaaaagttattttttctttggattccttaagaagaatgtaagtgattaagcagggatccggaattagacttccatgcctgtgctatggggatgaataagaaatggtatgggtctattcttggtagaagatgacatccaagactgtctcctcctgaccatctacacttaacttctctattctttctgctttctcgctctccctctttaataaagatttttgctgaatttttctatgggagtagattttactaataattatagtaacaaaatgtttaaacgtatactcttgtaaattttatcaacttactatgagggctttattccctgttaaactttgtcaacagctttttttataataggctactgggggaaactacatagagcataaaatgctcagatagactatttcagtagagcatgtctaacct

SEQ ID NO: 5171 - DNA, 1285 bp, Cricetulus griseus
cttccatgacagcatcaccctcattgctctgtcatccgaggagggcacctctgagctgaggctggaaagaatgctgcacatggtgtttggggccatggttctcattgtgggacttgaggagctgaccaatatccggaatgtagagagactgaagaaagagttgagggccagctactgtctcatcgacagcttcctggggaactctgagctcatcggagacctgacccagtgtgtggactgtgtcattcctccagaggggtccttcatgcaggaaaccctgtcagggttcgcggaggccactggcacggccttcgtcagcctgctggtatcaggccgagtggtggcagccaccgagggctggtggcgcctgggcatgcctgaagccgtgctgctcccctggctggtggggtccctgccaccacaggctgcccgtgactaccccgtgtacctgcctcacgggagccccacggtcccgcatcggctgttgaccctcacgctcctgcggggcctggagctgtgtctgctgtgcgggccgcgcccgcccctcagccagctggacccacagttgttggaacgctggtggcagccgctgctggagcccctccgggcctgtctgcctctgggccctagggtactgcctgaaggtttcccgctacacagcgacattctcggtctgctgttgctccacttggatctgagacgctgcctcttcactgtggagccctctcggaataaagagccttcccctgagcagcgccggcgcctccttagaaacttctacactctggtggccaccacacacttctcaccagaaccagggcctacagagaaagaagaggacgaagcccacccagcccagagcccccgagcttgctatctcgtgctaggaccaggcgagggatggcggttggtggctctgcagctagggctgcggctgctattgttgatgctgtctcctcagagcccgacccatgggctgcggagccttgccacacacactctacaagcccttactccgttcctttgattacctaagggtggacagtcaaattgatggggtaatattagcgtctctctgtttattcgctcacaataatacacggccccagatggggaaagggagggagggcgacaatggggggaggggaggaggtaccgacttccccggaccctctcccctctgtgctctgggggacaagggagggagggtgcttcccttggcccccccagaatgtaaacagcagcagatgaacaaaaataaaataacaaaaaggaccaagaagga

SEQ ID NO: 5172 - DNA, 1285 bp, Cricetulus griseus
agcagatgaggaagtggccggcaggcggccctggggacttctctctggccctgatccctccgaaccctccactgctacccgcctggttcccactgtccttagccaggatggaggctgttacgaacttgtatcaggaattgatgaagcatgcatgtctggttggctgagtacctacacctggcgctgtgaccctgtggattattccaatagtcctgaggcacttcggatggttcgagtggcctggctcttcatgctttccaaggtcattgagctgatggacactgtgatatttattctccggaagaaagacgggcaggtgaccttcctacatgtcttccatcactcagtgcttccctggagctggtggtgggggataaagattgctccaggaggaatgggctctttccatgccatgataaattcctctgtacatgttgtcatgtacctgtactatggattgtctgcccttggtcctgtggctcagccttacctttggtggaaaaaacatatgacagccatccagctgatccagtttgtcctggtctcactgcacatcagccaatactacttcatgcccagctgcaactaccagtatcccgtcattatccacctcatctggatgtatggcaccatcttctttgtgctcttctccaatttctggtatcactcttacactaagggaaagcggctgccccgtgctgttcagcaaaatggaactccagctatcaccaaggtcaaggccaactgagaagcatggcctagatattgcccacctaagtgcctcaggactgcaccttgggcagcatccaccagtgtcctctccacctacacctatgaccagggctcaggtggtcaggactgagtaggaggactggctctcccctcccacagctggtctacagggaccactgttcccatcccttctcccagccagctccagggatgtggcctcactgctgtctgccaccagaactggaggctgaaagggctggacacttacttccccctccctgccttaaacttgggagaggaacactcagggctggccccaatcagggtcttgtggcctttctcctcacactgaagaggtcagcaataatctgtcacaatggactcaggctcccttttcactccacactgaagcatgagcttctgggccaaaggtcaggatgggcagcaggcctgacaatacaggctgtgtactcatttgtcttaattaaagtgacagaggaaaccactgagatcgtgtgtatgcataaatggaggtggggcacacagcttatag

SEQ ID NO: 5173 - DNA, 1285 bp, Cricetulus griseus
gcgcagccgcttccgcgctactcgagctgcgagcactgcgagctatagccgagtacgcgggcctgccatcatgtcacgttacgggcggtatggaggagaaaccaaggtgtatgtcggtaacctgggcaccggtgctggtaaaggagaattagaaagggcattcagttactatgggcccttaaggactgtatggatcgccagaaaccctccagggtttgcctttgtggaatttgaagatcctagagatgcagaagatgcagttcgtggattggatgggaaggtgatttgtggttctcgagtgagagttgaattatcgacgggcatgcctcggagatctcgttttgataggccacctgcccgacgtccctttgatcctaatgatagatgctatgagtgtggtgaaaagggacattatgcttatgactgtcatcgctatagccgtcgaagaagaagcaggtcacgatctagatcacattcccgatccaggggaaggcgatactctcgctcacgaagcaggagccggggaagaaggtcaagatcagcatcccctcgaagatcaaggtctgtgtctcttcgtagatcaagatcagcttcactaagaagatctaggtctggttctataaaaggatcgaggtatttccaatcgcgttccaggtcgagatcgagatccaggtctatttcacggccaagaagcagccgatcaaaatccagatctccatctcctaaaagaagtcgttccccatcaggaagtccacgaagaagtgcaagtcctgaaagaatggactgaagttctcaaattcaccctttagggaaatgttttgtttacattattataagggatttgttatgtctgtaaaatgtaacctaggaaggatcatcaaccatctaatcaaaatggatctgggttattatattgctctgtaaaattcacagcagttaaatatgtttttgttgaatgtaataacatcttatggtctgaaaatgtgggtttttatttggcacatttaaataaaatgtttctaactagatattttgtttttgtgttcaattattaataactttgcaatttggtaacatcaggtcactagtatgatggaagtcatttggattctttggttttagaatttgattgaatacatggttggtatgaagctatgtgtgtaacggcagtcttatctgttgcacttggttagctttaattctgtattcaatgaaaattaagtttgttcaacaataaatctgcagagattgaacaaataaaaaaaaaaaaaaaaaaaaaaaaaaa

SEQ ID NO: 5174 - DNA, 1285 bp, Cricetulus griseus
agggaaagcaactcagggaagtaaagaggaaagccccagggatgcaggcaaccaaaacctgagtgtgaggtttacgaccccaatgccctctattgcatctgccgccagcctcacaacaacaggtttatgatctgctgtgaccggtgtgaggagtggttccatggtgactgtgtgggcatctctgaggcccgaggacggctcctggaaaggaatggggaagactacatctgcccaaattgcaccattttgcaagtgcaggacgagacaagcgccagtgccgctgatgagcaggacactgggtgcagacccttaggtgctgacggcacagactgcacgagcataggggtggtagagcagaagtctggtgaagaccaggggataaagggtagaattgaaaaggcggcaaaccccagcggaaagaaaaaactcaagatattccagcctgtcgtagaggctcctggtgctgctaagtgcattggccctgggtgttccaatgtagcacagcctgactccgtgtactgcagcaatgattgctatttcacaaacacgctgcagctaccatgagatttttaagttcaggtaaagaacaaaaaccaaaacccaaggaaaaggtcaagatgaagccagaaaaattcagtcttccaaaatgcagtgttcaggcagggattaaaatctcttctgtacacaagagactagcttcagagaaaaaggaaaacccagtgaagaaagtgatggtggctcctaggagtgaaacttgcgggaaggaggtaacctgtgaaagcaccacaccatcctgggcgagtgaccacaactacaatgccgtgaagcctgagaagcccgagaagccccagtcctctttgacccctcttcctctgcacagtgggaaggcaccacacagcctgtgcaactgtgtcccaaggactctggccctgtctcccattaccgggtgtgcagaacacgcaaggaggggagggcatggaggggagttaaaagtgaacccagtgctgggaacacttctacaatcttctgaatggatgctcaccatgtacactgagaagactgcatggcagagccgaggagccctgctgctaccccctgggtggatacaggcaggcagcaagctgtcctgcacaggaagccacacctccacatgcaggtgattcaatttcacacacagttgttcctctgatttctctttctcttctagaatatctgtacagtatccttaatttatagtaaactaattgtcatttttaaaattccaaagatcttgatattgctgtta

SEQ ID NO: 5175 - DNA, 1284 bp, Cricetulus griseus
cattgcttgattgccaacagcagtgtcctccttccttcctcaaggaacagatctgaattccaaaatatgactatactaattgtcagttataagccaaaaagacttaaaagacatgaaacagactcttggagataacattaccgtgcaaatgtattctccatcctggcctaactttgactatactatggtggttattttgtaattgctgtgttcactgtggcattaggaggatactggagtggactcattgaattggaaaacatgaagtcagtgacagatgctgacgagaaagagacgaggagaaagaaggacgagtatttgactttcagccctcttacagttgtcgcatttgtggtcatctgctgtgtaatgatcgtcttactctatttctctacaagtggcttgtttatgttatgatagcaattttctgcatagcgtcagcagtgagtctgtacaactgtcttgctgctagttggttgataggatgccatgtggacagtgcacgattcctgttcgcaaaatattaaagtgatcctgattttcctctctggactgtgcatctctgtcgctgttgtgtgggctgtggttagaaaatgaggatagatgggcttggattttacaagatatcttaggaattgctttctgtctcaacttaatcaaaacaatgaagttacccaatttcaagtcatgtgtgatactgctaggccttctcctggtctatgatgtgttttttgtcttcataacaccattcttcacaaagaacggcgagagcatcatggtggaacttgccgctgggccttttgagaatgccgaaaagctgccagtactgatcagggtgccaaagctgatctgttactcagtaatgagtgtatgcttcatgcccgtttcaatattgggttttggagatattattgtaccaggcctgttgattgcatattgtagaagatttgatgttcagactggttcttcttctatatactttatttcatctacaattgcctatgctgttggcatgataattacatttgttgtcctggtgctgatgaagaaggggcagcctgctctcctgtatttagtaccttgtacacttcttgctgcctcagtcgttgcttggagtcgtaaggagatgaaaaagttctggaaagggaacagctatcaggtaatgaaccatctggactgttcaacaaatgaagagagcccagtgactactgatgagcaggctgtgcagcagtaattatgtggacctacaatgatgtgctgttgattttttacaaatagaatttg

SEQ ID NO: 5176 - DNA, 1284 bp, Cricetulus griseus
cgtggttcctatggatcccaagtgtgaggagaatcccacagaagactcaagcaatgaagaagaccttgactccacgaaggcgcaccccggatccgtgataaccccagaagaacaattgtgctggaagcgccggccagtggcctggcgttccatcccaccccgagaccttctggcagccggggacgtagacggggacgtgttcgtctattcatactcttgtcaggagggagaaaccaaggaactttggtcctcaggacaccacctcaagtcctgcagagctgttgtcttctcagaggatgggcagaagcttgttactgtctctaaggacaaagcaatccatgtattagatgttgaacagggacagctggaaatacgaatttctaaggctcacagtgcccccattaacagtctgctgctcgtggatgagaatgttctagtcactggggatgacacaggtggtatccggctctgggaccagcggaaggagggccctctaatggacatgcggcagcatgaggagtacattgctgacatggccctggaccctgccaaaaagctgctgctgacagccagtggggatggctgccttggtgtcttcaacatcaagagacgcagatttgagttactctcagagcctcagtcaggcgatctaacttccgtcacccttatgaaatacgggaagaaggtggcctgtggatctagtgaaggtaccatctaccttttcaattggaacggttttggggctacaagtgaccgcttcgcactgagagcagagtccattgactgcatggttccagttactgagaatctgctgtgcactggctccacggatggaatcattagggctgtgaacatcctgccaaaccgagtggtaggcaccgtgggccagcatgctggggagcctgtggaggagctagccctatcccattgtggccaatttttggccagtagtggccatgaccagcgactcaaattttggaacatgactcagcttcgaactgtggttgtggatgactatcgacgccgcaagaaaaagggagggccacttcgtgccctgagcagtaaggcctggagcactgatgacttctttgcagggttgagagaagatggagaggatgccaaggctccagaggaggtggtgaaggaaagcgatgatgacagtgactgagggcatgaggagaatgtcaagacaaggaactgttttctgggacagcccctaaagaaatgtgtttttgatgctgtagattgaatctacaaccttgaatataagcttagctctaccac

SEQ ID NO: 5177 - DNA, 1284 bp, Cricetulus griseus
ggagggatccgtggcgggccgcgggggcgctccgcctcctctcaggcaggctagcggcgcgggcggcagttgctgtggtttcggtgctgaggtggccctgtgcgcgcccaggcttgcgggttcgcgtcgcgccgccgcttcccgccgtcagtggctgcagcccagcgtccttccttcggacccggcggcaccctctctccttcgccgctcggtgccgacttccagtccggcctagggcggctgcggggccgcggctgacgagatgttcaagaacacgttccagagcggcttcctctccatcctctacagcatcggcagcaagcccctgcagatctgggacaaaaaggtacggaatggccacatcaaaagaatcactgacaatgacatccagtccctggtgctagagattgaagggacaaatgtcagcaccacatacatcacatgtcctgcagaccccaagaagacactgggaatcaaactgcctttccttgtcatgatcatcaaaaacctgaagaagtattttacatttgaagtacaggtactagatgacaaaaatgttcgtcggcggtttcgagcaagtaactaccagagcaccacccgagtcaagcctttcatctgtaccatgcccatgcggctggatgatggctggaaccagattcagttcaacttatctgatttcacccggcgggcgtatggcacaaactacatcgagaccctgagagtgcagatccatgcaaattgtcgtatccgaagggtttacttctcagacagactctactcagaagatgagctcccggcagagttcaaactgtatcttccagttcagaacaaggccaaacaataactggatggcatctaagggggacagactctggacatgactcttagtttaaaaaaactacatggagacaatgcaaaaacatttaaataatccactgtgctatggctcatttactacttcgtgtctttgtcatggacaccagtgaccatgccacagttctgttacttgcattctaagttcagtggggaaagcagagctttgagtgacatacaactgctggggtttcctgtgctgcctgccctggcatgtgagagacacacgcacaacaaatgcacggatttaaagacgtcctacaaggcagattcagaccaatatttcttcctacaatttattctttcttttatatattatctaaatatatgtatatgttgtgtaatacgcataatctggaaatgaataaaatgctatattcttggtttgtaaaaaaaaaaaaaaaaaaaaaa

SEQ ID NO: 5178 - DNA, 1284 bp, Cricetulus griseus
atggctccgcggttgtgcatcatctctgcatcggcacggcggctgctggggaagccgggaccccgcgctggggacctcgctgctgcggctgctgtgcgcttctattccaaggacagtgaaggcagctggttccgctccctctttgttcacaaggtggatcctcggaaggacgcccactccactctgctgtccaagaaggagactagcaatctctacaagatccaatttcacaatgtgaagcctgaatgtctggatgcctacaacagtctgacggaggctgtgttgcccaagctgcacctggacgaggactacccctgctcgcttgtgggcaactggaacacatggtacggggagcaggaccaggcagtgcacctatggcggttctcaggtggctatccagccctcatggactgcatgaacaagctaaaaaccaacaaggagtacctggagttccggaaggaacgaagcaagatgcttctgtccaggagaaaccagttgcttctggagttcagcttctggaatgaaccacagcccagagctggccccaacatctatgagctgaggacatacaagctcaagccaggaaccatgattgagtggggaaacaactgggctcgggccatcaagtaccgtcaagagaaccaggaggcagtgggaggcttcttttcacaaataggagagctctacgtggtacaccacctatgggcctacaaagatctacagtctcgggaggagactcgaaatgcggcctggaggaagaggggctgggatgaaaatgtctactatacagtccccttggttcgacacatggagtcacggatcatgatcccgctgaagatttctcctctccagtgaggccggcattgcctctacctccttccctttctcccttggagtaacctggaacagaggaacttctgggcctgctggtgtagttttctttcagttctggaagaattctgatgggttgtgctcagcttggaaaagatgatgttttctaagcacttacagttctgtctatacctgtcccacctctctcccaggccagaagaatttctaatttccctaatgaagaatagcaacattttaagcattcccacatttccccaaggcttctcgtctccaggccaagtccccagctaacactttggacatggcttagtttcctaacagacggcatgactagttgttaagaggtggggtgtgaagagataccagaccaggtatggcctccgggaactccctggtctctgttcattaaaatgcaagtctgagccttaaaaa

SEQ ID NO: 5179 - DNA, 1284 bp, Cricetulus griseus
  modified_base (900)..(900): a, c, t, g, unknown or other
  modified_base (1244)..(1244): a, c, t, g, unknown or other
tccaccccaccctgccccagatgagggggcagtagaggagtcactgcagactgtgacggaagaggagagttgttcacccattgtagagctagagaagccactgccagccagtgtggacaataaatcagttgaagaaaaacctctagaggttagtgacagaaaaacagaatttccgagcagtggcagtaattctgtacttaataccccgcctactacaccggagtcgccttcatcagtcactgtgacagaagctagtcagcagcagtcttctgtcacagtgtcagagcccctggcctccaaaccaggaggaggttcgaagtatcaagagtgaaactgacagcacaattgaggtggacagtgttggtggggagctccaggacctccagtcagagggaaatagctcaccagcaggcttcgatgcaagtgtgagctccagcagtagcaatcaaccagaaccagactgaacatgtttacaggtttgaattaggctaaaaggtctgcagtggcttttcacgccccttgaaattgaaatgggactactgtactttgccatttttctataaatcagttattttttttttaattttgatataatacattgtgtgaaaaaagaaaatggctaataaactgtattaaatcttaaacaatgtataaagattgtacttagccagttcaaagtgtatatttattcataatgaattataacagttatatttttgtgttttcttgtaaattgtttcttttcccttaaatacagataattcatttgtattgctttattttattatgagcttacagcaaaaagacttcaggaacaaactgttagaatggttcaaggttgttcatatgacctgtctcacaaagatggttgttattttaagtataaatagctaattggtntgcctatccattaatgccttgtataaactgcaaaatgaacgccaaagttgttttcacttgttgactttatgttgtatgattccaatctgtttggcacttgtatttaattccccacctttgtaagacatttgtatattgcggatgtgttcattgaagctatttaaaacctggcactgttaatacacagtactttactgtacagactgttttactgttttaattgtggttctgtgtgctttttttgaatgaggctggcatgttttatttgttttctggcaatacatgtgagaatctcgaagcgttttgttgtagatgctaacgtgtcagaatccttaatcctttanattcaacctttctaagaaagcattttcagtcttgtaatgt

SEQ ID NO: 5180 - DNA, 1283 bp, Cricetulus griseus
ggagaagagaagacgattagaggaagcatacaagaatagcaatggcagagcttaagaagaaaccccgttttggagggcctgattatgaagaaggtccgaacagtctgattaatgaggaggagttctttgatgctgttgaagctgctcttgacagacaagataaaatagaggaacagtcacagagcgagaaggtcaggttacactggcctacaccttttgccatctggagatgccttttcttctgttgggacccatagatttgtacaaaagccctatagtcgctcttcctccatgtcttccattgatctagtcagtgcctctgacgatgttcacagattcagctcccaggttgaagagatggtacagaaccacatgacttactcattacaggatgtaggtggtgatgcgaattggcaactagttgtagaagaaggagaaatgaaggtatacagaagagaagtcgaagaaaatggaattgttctggatcctttgaaagctacccatgcagttaaaggtgttacaggacacgaagtctgcaattacttttggagtgttgatgttcgcaatgactgggaaactactatagaaaacttccatgtagtggaaacattagctgataatgcaatcatcatttatcaaacgcacaagagagtgtggcctgcttctcagagagcctgagacttggatttagtttgtaatttttctgtggatcatgacaagcgctcctctagaacaatcgatgtgtccgtgccaaaatcaatgttgctatgatttgtcaaaccttagtaagcccaccagagggaaaccaggaaataagcagagacaacaattctgtgcaagattacatatgtagctaaatgtgaacccaggaggatgggcaccagcctcggtgttaagagcagtggcaaaacgagaatatcctaaatttctaaaacgttttacttcttacgtccaagaaaaaactgacaggaaaaccaatttgtttagtatgtacagtgactgaagcaaggctgtgtgctaagagaggtgtgaggaggaaatgaaagaaaggaaacatgggctttctcatatgttcgttttcatgactaatttatacatctatacaatatcaatgtcagttgctactgagaattttagctgggctgagctggtttgcttgtgaaaattgtgctggttatctttaaagcttatcagttatttgtccgatcagacactttaccagtatttagtccaggctgtacagatgatgtatttgaattgtcgtcattgttcatctacagact

SEQ ID NO: 5181 - DNA, 1283 bp, Cricetulus griseus
ccaatgcctttttacacgatgacaacatgaattttcgagtaaacttacatagaatgcctatgagacacaggaagaaggctgctgacaagaacattccttgtcgtcccttggtgtgtgcagtcctggacctgatggtggagttcattgtaacacacatgatgaaggagttccctatggatctctatgtgcggtgtgtccaggttgtgcataaactgctgtgttaccagaagaagtgtagggttcgcctgcactatacctggcgggaactctggtcagccttgataaacttgctgaagttccttatgtcaaacgaaactgtgcttttggccaaacacaacatttttgcattggcccttatgattgtgaatctatttaatatgtttatcacgtatggtgacacattcctgccaacccccagcagctacgatgagctttactatgaaattatccgcatgcaccagagctttgacaacctctactccatggtccttaggctttctaccaacgcaggccagtggaaggaagcagctggcaaggtgacgcacgcattggttaatatcagagccatcatcaatcactttaatcccaaaattgagtcctacgctgctgtgaatcacatatctcaactctcagaagaacaggtactagaggtggtccgagccaactatgacacactcacattgaagctacaagatggcctggaccagtatgagcgctactccgagcaacacaaggaagctgccttcttcaaagagctggttcgatccattagtaccaacgtccggagaaacctggccttccacacactcagccaggaagccctcctgaaggagttctccaccatctcctgaggctgtacctcctgagagccactggctgcccttcccatgaggctcctgggctggagggcaagcagaaggagatggggctgcctccaaggttggagagacgcacagacaccgagagtcttggtgaaggccgtactgcagtgagctgggacgctagggcaagcccaggatgatcttatatagggagaaatgggcaggttttttctgttttctaaatttaaagttgacacctcagagaaactggagattggaatcgcctggtgctctgctgtctgacctctacttcctgtatttggtttggcaccaggggtccctgttcactctccattgccttccaacctttgactcatcagcacagtaggcccacaacgttagcctttcatttttagtctgttttaaactgtcttaagagagtgtgtgaaataaacattgaca

SEQ ID NO: 5182 - DNA, 1283 bp, Cricetulus griseus
gtggccggggaagaggagttgcatgtgtcgcttcggcgggcgggagcggaggcggcggggccgtgcgaccggctgggtttgtgagatggccactgacgtttctgaatccagtggggctgattgcaaaggcgatacgaggaacagtgccaagttagattcggaataccctcttcgagtcctttattgtggagtctgttcattaccaacagagtactgtgaatatatgcctgatgttgctaaatgtagacaatggctagagaagaattttccaaatgagtttgcaaaactgactgtagaaaattcacccaaaccagaaactggagttagtgaaagtcaaggaacactaggggaggaggaggaaaagaaaaacaaaagagaggtggaagaggtcaaataaaacagaagaagaagacagtaccacagaaggtcacgatagccaaaattcccagagcaaagaagaagtatgtgacaagagtatgtggccttgcaacttttgaaatagatctcaaagaagcacaaagattttttgctcagaaattctcctgcggtgcgtcagtgacgggggaggatgagatcatcattcagggagacttcacagatgacatcatcgatgtcatccaggagaagtggccagaggtggatgatgacagcattgaagaccttggagaagtgaagaagtgactctggagtcctgtgtttctgagctgacctgagagttgacatggccaacagaggagaggcctttcagaaatatatacatatgtatatatgtgtatatatatatcctacagtaaagctgtagactcctcatccttggcgttcattgttctgtacaaggctgcttggttggtttgtttgctctttttgtttgtttttttttttattgccaaagtctgatacacaagagagagagactgtcatgcttatgcatgaatctgaatttagtcaaataaaacattttggtcatttggtactgtattttttttttttcctttttttaactttttattttagagaaacactagatattcccacccacttggtgctgtcagtagatccagggccggtgcttgctgagcaagcactgaagggctggagagatggctcagaggttaagagcactgactgctcttccagaggtcctgagttcaattcccagcaaccacatggtggctcacaaccatctataatgagatctggtgccctcttctggcgtgcagatatataggcagaacactgtatacataataaataaatattaaaaaaaaaaaaaagttaattaa

SEQ ID NO: 5183 - DNA, 1283 bp, Cricetulus griseus
gtcctggcctcgttagcttactgcttccaccagcggcgggtggctctggccgagaatcggtcgtctggtagccagcatcaggtggaccgcagcctactggagctgaaaatggtgcaagttgtgtttcgacacggggcacggagtccgctcaagccgctccccggtggaggagcaggtggagtggaaccccgagcttttagaaatcccacctcaaactcagtttgagtacaccgtcaccaatctagctggtggcccgaaacctcattctccttatgactccgaataccacaaggtcactttgaagggtggtatgtttgctgggcagctgaccaaggtgggcatgcagcagatgtttgccctgggcgagagactgaggaagaattatatggaagatatccccttcctttcacctgtcttcaacccacaagaggtccttgttcgctccaccaacatttttcggaatctggaatctactcggtgtttgctggctgggcttttccaacatcagaaaggatctgtcaccatccaaactgatgaggcaatctctgaaatcctgtaccccaactatcacaactgctgggtcctgagagagaagaccagaggccggaagaagacggccattttgcagccagggattgctgaggatttggaaaaggtgaaggctagtgtgggcatcgacagtaatgataaagtggacttcttcgttctcctggacaacgtggctgctgagcaggtgcacagcctcctaagatgcccagcactgaagaggtttgccaaggtgattgagcagagagctgtggaaacagccttgtatgtgctgcatcaggaagacagggaaagtatccagatggcagtgggcccgttcctatatatgctgaagggaaacctgctcaaagctgtggaccccaggaccccacccagcaagaccagaaagctgtacctgtatgcaacacatgatgtaaccctcatgcctatcctgatggccttggggatttttgaccacaaatggcctccatttgctgttgacctgaccatggaactctaccagcatcaagaatctaaggagtggtttgtgcaactctattaccatggggaggagcaagtgccaagaggctgccccgacaagctctgtccactagacaagttcttgaacaccatgtcactttatgctgtgagcccagaaaataaccacacactctgctcccaagcacgaacaatagaacttggagagtgactcgtttacacagacaagttgatctttaaataaagtgcctttatgtaaa

SEQ ID NO: 5184 - DNA, 1283 bp, Cricetulus griseus
tagcagtgactatacgtttagttgtccaaaaacagggaagagatctgggtctttagaaacatgtagaagagaatctaccctaagacaaaagcaagaatcttctggaaatttgagacctaaattcttaagaccctctgatgaggatgaactatcatttcacagcaagaggagaaattttgaaccatccactttttcttctacattagtggctcaggctcctttgcattttgattttcgaaaacccacagagaacagtgaagaaacccaacttaaaagaggcaaatagatttaaagaaaccatgacacagatatcagcaaaaagatctggagtagagcatgaagatgaagaagtgattctcattagaacagatgagtctggaagaatgtggcctgtgaacacccccagagagaccctggatgtgaaagcaaaaaagaagaaagagacaaagagttgcaacccacgaggataaagaaaggatccgatactttcctgatgatgatcatctgagtctcaatgatttagtcaagaatgaaaaaatgggaacaggtattgatcaaaacagacttttcatgaggatggcatctaagttcatgggaaaaccagatggcgaccattatactctggatgacatgtttgtctccaaatccctctgcagcaccttcaagcagctaccatgttggatgaagatatctgggaagagattcagatgtttaggaaatccttggtaaagatgtttgaagagaaaggattggattgtgtctttttagagtctaatatgggcatgaagaagcattatcatatggtttatgagtgtatccctcttccaagggaagtgggtgatatggctcccatctattttaagaaagccataatggaatctgatgaagaatggtccctgaataagaagttgattgatttatcttcaaaagatattagaaagtctgtgcccagaggcttgccttactttgctgtagactttggccttcagggaggatttgcccatgtcattgaagatcaacacaaatttcctcgttactttggaaaggaaatcattggtggtatgctggatctagagcctagactgtggaggaagggcatcagagaaagctttgaggaccaggaggaagaaagcgttagcagtttgctcagtggtggaaaccatttgatgtcaccaaaagtaaaagctgttaagtgtatcctgcatgtgtcatttccattcaattttatgtctataatatttacaagcaactttgccttggcccggagggaaagcagcagcagc

SEQ ID NO: 5185 - DNA, 1283 bp, Cricetulus griseus
tgggtaccattggccatgtggaccacggcaagaccaccctgaccgcggccatcacgaaaattctagccgagggaggtggagctaagttcaagaagtacgaggagatagacaatgcccctgaggagcgagctcggggtatcaccatcaatgcagctcatgtggagtatagcactgctgcccgacactatgcccacacagactgccctggtcatgcagattatgttaagaatatgatcacaggcactgccccgctggatggctgcatcctggtggtggcagctaatgacggccccatgccccagacccgagagcacttactactggctaaacagattggggtagagcatgttgtggtgtacgtgaacaaggcagatgctgtccaggactcagagatggtggagctggtggagctggagatccgtgagctgctcaccgagtttggatataaaggagaggaggccccagtcatcgtaggctctgctctctgcgcccttgagcaacgtgaccctgagctaggtgtgaagtcagtacagaagctgctggatgcagtggacacttacatcccagtgcccacccgggacctggagaagccctttctgctccccatagagtcagtttattctattcctggccggggcacggtggtgacaggtacactagagcgtggcattttgaagaagggagatgagtgtgagttgctaggacataacaagaacattcgcacaatagtgacaggcattgagatgttccacaagagccttgagagggctgaggcaggggataacctgggtgctctggtccgaggcctaaagcgggaagatttgaggcgaggcttggtcatggtcaagccaggctccatccagccccaccagaaggtggaggcccaggtttacatcctcaccaaggaggagggtggccgccacaaaccatttgtatctcattttatgcctgtcatgttctccctgacttgggacatggcctgtcgtgtcatcttgcctccagggaaggagcttgccatgcctggagaggatttaaagctcagcctagttttgcggcagcccatgatcttagagaaaggccagcgtttcactttgagggatggcaacaagaccattggcactggtgttgtcattgacataccagccatgactgaagaggacaagaacatcaagtggagctgaatctggacttctcaggttgttgagcttagggctaccttggccatcgttccccctatggacacaagctgcactcaaaaaaaaaaaaaaaaaaaaaaaaaaaaa

SEQ ID NO: 5186 - DNA, 1283 bp, Cricetulus griseus
ccgggaggtcgctgaggtgggggttagtggaggacgcttcccgagggcgcgcggagccgagccggtgacagacacgcacgcgcgcgtgcgctcccgactaccgcgcggccccgcgaccccgtcgggccgctgagaggcgcgcgtcgtcctcgccgcagccgtctaggattccagtctaggggcgtccccggcgtccccagcccgagtttccgagcgccgggccgcgcccgctcctgcccgcgtcgtgtccccgctgccgtcggagactgtcccttaactcgtctctccggcaccgggggccgggtcctcgcggcccatggtggccgctggggacccacgcagcctaggtctgtctcaggccggccagccggccaccatggtggccctgaggcctgtgcagcttctccagggaggctaagagacccctaagggtgagagggtccctggccagaatcctgcgccatggctggagccatcgcttcccgcatgagcttcagctcgcttaagaggaagcagcccaagacatttacggtgcggatcgtcaccatggacgccgagatggagttcaactgcgagatgaaggcggcaccagtagcaagcacaataccattaaaaagctcactctgcagagcgccaagtcccgagtggccttctttgaagaactctagcagtgatccagccacctcaggatctgccacttctgctgctcctgacagcgacaggatgggcctggccccttgggagccatcaatagggagctggcttgtttgggaactctctctctctctcctcctctctctctctctctctctctctctctctcaaccctatgggttgcctccatgctgggcagcagatgcgtatcatgtagctcacacactccatgattggctctaccttctttgtaatgggtgtcctcctgtggccagataagcccttcaggtcctgatagagcaggtcatgtgtctcagtccatgaagagatgtatattaactgaagacagctgagttgagggtctgggagcaaaggaatgctccacagtacagtttggttttgagaaactgaggcactctaccttgttccctgactttcttcctctctgtaaattgaatctttgacaatggctgtggacacaggaccatgatgctggtttataaaaattatgccaggccttgtttttgtttttttaacttaactactgtttgtgtctcaaattttgggaatgccaagctacataaccacatgggaaccctggtatttgagcagtggtaggtgtaactatt

SEQ ID NO: 5187 - DNA, 1282 bp, Cricetulus griseus
ggcctaggagaccgctatggcgttcctgtgtcagcgcgatagctacgcacgggagttcaccaccaccgtggtctcctgcagcccggccgagctgcagacggacgcgagcggcggcaaaaaagaagtgctgagcggtttccatgtggttctggaagatacgccgcttttccccgagggcgggggccagcctgacgaccgtggtaccatcgatgacatttctgtgctgagagtgacccgtcgtggggcccaggctgaccacttcacacagacacctctgtcacctgggagccaggtccaggtccgagtggactgggagaggcgatttgaccacatgcagcagcattcagggcaacatctcatcactgcagtagctgaccatctctttgggctgaagacaacctcatgggaattagggagactccggagtgtgattgagttggacagcccttctgtgactgctgagcaggtagctgccattgaacaaagtgtcaatcagaaaatcagagatcgactgcctgtgactgtgcgagaactgagcctggatgacccagaggtggagcaggtgaggggccggggtctgccagatgatcatgctgggcccattagagttgttaccattgagggtgttgattccaacatgtgctgtgggacccacgtgagcaatctcagtgaccttcaggtcattaagattctgggcactgagaaagggaaaaagaacaaaagcaacctgatatttctggctgggaaccgagtgctgaagtggatggaaagaagtcatgggagtgaaaaagccctgactgcactactcaagtgtggggtggaggatcacgtggaggcagtgaaaaagctccagaatgccaccaagctcctgcagaagaacaacctgaatctcctcagagacctggctgtgcatactgcccacagcctccggagcagcccagactggggaggtgtggttacgctacacaggaaagagggcgattctgagttcatgaatatcatcgccaatgagattgggtctgaggagaccctcctgttcttaactgtgggggatgagaaaggtgctgggctcttcttactggcggggccagcagaggccgtggagaccctggggcccagggtggctgaagtcttagaaggcaaaggagcagggaagaaaggccgcttccagggcaaggccaccaagatgagccgacgagcagaggtgcaggcgcttctgcaggactatgttggcacacagagtgctgaggagtaaggggctggatgcccatccctgtgacca

SEQ ID NO: 5188 - DNA, 1282 bp, Cricetulus griseus
  modified_base (304)..(304): a, c, t, g, unknown or other
ctccccactcgtggctccccgcgtcccgtggcgtggacaaagacatgcagtccccgcccccagacccgctgggcgactgcctgcgtaactgggaggatctgcagcaggacttccaaggtatccaggaaacacaccgcctgtaccgcctgaagctagaggagctcaccaaactccaggacaactgtaccaactccatcacacgccagaagaaaaggctccaggagctgggccttggtgctgaaaagatgcaggccctctctctcatgcgagtctgcagaggccgcacaggaccctggaaaaaccngatgaaggagcgccaaggcctcttctttggacatggaagcctatttgcctaagaagaatgggttgtacctgagtctggttctggggaatgtcaacgtgacacttctgagcaagcaggccaagtttgcttacaaagacgagtatgagaaattcaagctctacctcacgatcatcctcattgtcatctccttctcttgtcgcttcctgctcaactccagggtgacggacgctgccttcaacttcctgctggtctggtattactgtacgctgaccatccgagagagcattctcatcaataatggttccaggatcaaaggctggtgggtgttccatcattacgtgtccacgttcctgtcgggagtcatgctgacctggccagatggtctcatgtaccagaagttccggaaccagtttctgtctttctccatgtaccagagctttgtgcagtttctgcagtattactatcagagcgggtgcctgtaccgcctgcgcgccctgggcgaacgacatactatggatctcaccgtagaaggtttccagtcttggatgtggagaggcctcaccttcctgcttcctttcctcttctttggacacttctggcagctctttaatgcattgacattgttcaacttggcccgggaccctgagtgcaaggagtggcaggtgctcatgtgcggcttccccttccttctccttttcctcggcaactttttcacgaccctccgagtggtacaccagaagttccacagccagcagcaagggagcaagaaggattaagctagatgtgatggccagccccaaaggggcttcgacctgtgtgccaggtggggtggcaggttggggcacccctgtgtgtagggggttcccttcgtgtgccccctgggcttcgtgggctctgtgggccctgaggaaggcctgggcctggagcccagcttgcaggatttgggctctgggcctcaataaaggaagagaggcatgg

SEQ ID NO: 5189 - DNA, 1282 bp, Cricetulus griseus
gcggcgctgtttaaagatggcggcggaggaacctcagcagcagaagcaggagccgctgggcagcgactccgaaggtgttaactgtctggcctatgatgaagccattatggctcagcaggaccgaattcaacaagagattgctgtgcagaatcctctggtgtcggagcggctggaactctcagtcctgtacaaggagtatgctgaggatgacaacatctatcaacagaagatcaaggaccttcacaaaaagtactcatacatccgcaagaccaggcctgatggcaactgcttctatcgagcattcggcttctcccacttggaggcgctgctggatgacagcaaggagctgcagcggttcaaggctgtgtctgccaagagtaaagaggacctggtgtcccagggcttcactgagttcacaatcgaggacttccacaacacgttcatggaccttatcgagcaggtggagaagcagacctccgtagctgagctgctggcctccttcaatgaccagagcacctcagactaccttgtggtctacctgcggctgctcacctcaggctacctgcagcgagagagcaagttcttcgagcacttcatagagggtggccggactgttaaggagttctgccagcaggaggtggaacccatgtgcaaggagagcgaccatatccacatcatcgccctggcgcaagccctcagcgtgtccatccaagtagagtacatggaccgtggtgagggcggcaccaccaacccacatgtcttccctgagggctccgagcccaaggtctaccttctctaccggcctggacactacgatatcctctacaaatagggccggctggcctgctgcgtcctgcctccctccccctgccaggcactagacatgtacagtagggtttttgttgtgttttggtttggtttttgtttttttttttttgttttttttttttgtggttgtaaatggtcatatttcactcctcccttttccctgtcacacaaccttccatgttttattaaaggggatgctggtggtgagcctgagtgtgcgtttccctgctctgctgctcttccctacatgtctactggctgctgtatgtctggctgtcccttcccccagggtgggtccctcagctttcttcctatccaccccaagtgtctctgccaagagaaatttgaaggggctaggcctctgccttctctccccacccccagcacatgtgggatctcagcccaggctgtggagctccttgggggcgaggccctcaataaatgtgaagtgctg

SEQ ID NO: 5190 - DNA, 1282 bp, Cricetulus griseus
caaacagatgtcctaggactttatgcatagcagcgagagagagtcactgttaccacggttacgtcacccattagccataaactgctgtttgtatcgaagcgcatgctgcttttcttgcactgtctccctcctgcaggggtgtttttggtgttttgctattgaatgggccgctctgcttgctgtgtagcattgttctcttggaggctgcagagattatttctgcaaaatgtattgtaaaaataattttgtggcatatttctagtccccccctttttttcaaatgaaccaattatactttatttggtctcaaatgtagcatttcagaaaacgttataactgtccccatgagcaaatattgccagaattaacctcattgcctaagaggccaacttctggaagaagtaggagtcatgacttacagtggcatatgccaaatgtgacttggtgatccgtgcctgcccaggcaggtaatgactggaagatgcttttcttggagaattgccaagttatgcaagctgagcgatcaccaagagcacttagcggccagcgttggaagaagtctggggaccttctggtctccagtacctgagctccatccgcctttcctctcttcccttgtgtcccaaggcacagcagcgccctctagctagggaacacaacttatagatgtttacgcagcactagctagaagccacccggctagatttcccaggtacccatggtagccttaggcgcgcctcttttgaagcatgaactcttgagttcagtatttataagtctaagtagacaaacctctagattctggtttaacagatttctgttgcctctgagtctctatcctaaccatacttttgaagtctatacagaaagctttaagagtttagtttgtgcccttggtttttatttttacaactgctaaaatacctctgtaagccttatcctttatcctttcatatgttgtataaaattgtatagaattcattgaccaactgatgcgttgggtatctgtaaatgagaccaaaatgtgggttgcttttttttcatacaataatttctctcaggcgttgctgtgaaatgaacagtagccagcctataactgtgaatgccttgtgtcgtcagtatttgcattacattcataaaagtgtgcaagtcctgtgactcccagcttaactaaaatactgttatgccacccaacttgagcacagcaaactggtttaagtaataatggaattggtagtaaaatgatatcccataaataaacaaattatttgtgtttggtttc

SEQ ID NO: 5191 - DNA, 1282 bp, Cricetulus griseus
  modified_base (55)..(55): a, c, t, g, unknown or other
  modified_base (91)..(91): a, c, t, g, unknown or other
  modified_base (98)..(98): a, c, t, g, unknown or other
aatttgaacagaagccacaggacttctaattttcttacaagtgttgaaggatgcncggaaactcagacttcgagtggaccttctgtgtgtnaggtttnttaaagacctttggactctatcacctaacttataatggacatcataactatgactacaaggaagttggaggaagccagactgacgaaaatgattatgacggtaatcagtgtgataacacttccagttacccttcaaaaaaaagaaaaaaatcctaactgggaaaaaactctatgtgtgtcaagagtgtgggaaagcctttaggtatcccagtgccctccagttacatgaaagaattcatactggagaaaaaccctatgagtgcaaagactgtgggaaagcctttcgaggtctcagcgcccttcatttgcatgagagaattcatacgggagaaaagccctatgaatgtaaacagtgtggcagagccttcacatatctcagtgccctccaattacatgaaagaattcatactgaggaaagaccctgtgagtgtaaacaatgtgggaaaacctttagatatagcagggccctcaagttacatgaaagaattcatactggagaaaagccctatgaatgtaaacagtgtggtaaattctttagaagtcacaggacccttaagttacataaaagaattcacactggagaaaagccctatgagtgtaaagaatgtgggaaagccttcagatggctaacttctctgaagttacatgaaaaaattcacaccggagaaaaaccctatgaatgccaggagtgtggaaaggccttcaggtgtcaggcttcttatcatagacataaaataactcatggtggagaaacattgtatgagtgtaaagagtgtggtaaatccttcatttacccctctttacttcaagtgcatgaaagaactcacacaggcgaaaagccctatgagtgtcagctgtgtaggaaagccttcagatgtcagtcttcactccgattgcatgaaagaacacacaccggagagaaaccctacgagtgtaaacactgtggcaaagccttttcaagttacaattatcttcgatttcatgaaagaagccacactggagaaaaaccctatgaatgtaaagaatgtggtaaaaccttcacacatcgctcttaccttcgatcacatgaaagacgacatactggagagaagccatatcagtgtgttcagtgtggcagatccttcagtcggcatagttcctttaagagacatcagtctgttcatggagtggaaaacccatatgaa

SEQ ID NO: 5192 - DNA, 1282 bp, Cricetulus griseus
tttggcacaaataacagtgggactagtatttttggaagtaagccagcacccgggactctgggaactggacttggtacaggatttggaacagctctgggtgctggacaggcatctttgtttggaaacaaccaacctaagattggagggcctcttggtacaggagcctttggggcccctggatttaatactacgacagccattttgggctttggcgccccccaggccccagtagctttaacagatccaaatgcttctgctgcccagcaggctgttctccagcagcaccttaatagtctgacatactcaccctttggagactcccctctcttccggaatcctatgtcagatcctaagaagaaagaagagagactgaaaccaaccaatccagcagctcagaaggctcttactacacctactcattataaacttacacctcgccctgccacaagagtcaggccaaaggcttgcaaacaactggtacagccaaatcacaaacccctgagagttctggaaacaaaaattaacagcagcagcagtgtggacgacaccattgttgctttgaacatgcgtgctgctttgcgaaatggactcgaaggaagcagtgaggaaacatctttccatgatgagtcgttgcaagatgaccgagaagaaatagaaaataatgcttaccatgtacatccagcaggaattgttctcacaaaagttggttactatactattccatctatggatgaccttgctaaaattaccaatgaaaagggagaatgcattgtttcagacttcactattggtcgtaaagggtatggctcaatctattttgaaggagatgtgaattttgacaaatctaaatttggatgacattgtacatatccgaaggaaagaagttattgtctatgtagatgataaccaaaagccacctgtgggtgaagggctaaataggaaggctgaagttacattggatggagtttggccaacagataaaacatcccggtgtttaataaagagcccagatcgacttgctgatatcaactatgagggaagattggaagcagtctcaaggaagcagggagcccaattcaaggagtaccgtcctgaaactggttcttgggtgtttaaggtgtcccatttttctaaatatggccttcaggattctgatgaagaggaagaggaacacccacccaaaactacttcaaagaagttgaagactgcacctttgccccctgcaggccaggcaactactttccagatgactcttaatggcaaacctgcacctccacctcag

SEQ ID NO: 5193 - DNA, 1282 bp, Cricetulus griseus
cttgggtttgtgcttccggtttgctgtagcttgagtttatttttacgcgatgctccgtagaatcccggcgttaatacgtcctcgccccttctcgggccttcctttgtcctctggaaactgggatgtctcggtggctgtgtgtgtgccacccacggctcggtccggaaccggcaggacagaaaataatatccaaagacattttggcactggcagctgcatctatagcaagaaagatagccagtctgttccagccaatgaaatttcccagaagacagcagagactcaaggcgacagagaggagactcaaaaaaaaaacttgttagatattcttaaggacatgaaagttgaactgagcacagtaaatgtgcaaacaacaaagcctcgtggcaaaagaccttctgctggtctgcaggctgcagttagcaggcatagaagagctccagaagaccctccaaaaaatagaaatgagttcctgagttctgagttggtagcagccgcctctgctgttgcagattctctaccgtgggacaagcagacaaccaagtcggagctgctcaggcagcttcagcaacacgaggaagagacaaggactcagaaagacagagagaagagtaagattagtttcccgcacataatatcagagatgaaaattgccagatccccttctgcaagagttagtacaagaccacagcaccagattcagtttgatgaggaaatggacaattcttcccttcacctggagaagccatctgatttcaaacaaaggaaaggcttattcaaggggaaaagacttggcatttttgacattaaggcgtttgctgatgaagcacctgaaacagaagcatccccttctctctgggagatagaatttgctaagcagctagccacagtaaatgaacagcctttggggaatggatttgaggagatgatccaatggacaaaagaggggaaactgtgggagttcccagttaacaacgaagcaggctttgatgacgatggttcagaattccatgaccatatatttttggataagcacctggagggcttccccaagcaaggaccaattcgcatcttcatggagctggtgactagtggcctttcgaaaaacccatatctgagtgttaaacagaaagtcgatcatatagagtggtttagaaattattttaatgaaaaaagggatattctcaaagaaaataaagtagagttcacttaacatcatgaagaaaattttcatttaagctgttgaagatgtatattatagctaaataaaatttaattaaaa

SEQ ID NO: 5194 - DNA, 1282 bp, Cricetulus griseus
ggctgcaactccttgccggccttcctgctgcacggcgcgcgggcggaggcacggcttggcgggaaggcgagaagagcgtgcggagcctccggtgttggcggcggcaacgagtgggatcctgggtccagccgcagcacgcggaactgatctgaaggtggcggggcccggcggagccgcgatgaagccgagcagcgaggaggaggaggcggtgtggggtgtgggcccctgggacgagtgcttcgaagtggcggtgcagttggcgctgcgggcgggacagatcatcagaaaagccctcactgaagaaaagcgtgtctcgacaaaaacttccgctgcagatcttgtgacagagacagatcaccgtgtagaagacttaatcatttctgagttgcgaaagcggtttccttcacacaggttcattgcagaagaggccacagcctccggggccaagtgtgtgctcacccacagcccaacctggatcatcgaccccatcgacggcacctgtaacttcgtgcacagattccctactgtggcagttagcatcggatttgcagttcaccaggagctggaattcggagtgatccaccactgcactgaggagcggctgtacaccggcaggaggggccagggtgccttctgcaatggccagcggctccaggtctccagggagacagatctctcgaaggccttggttctgacagaaattgggcccaaacgtgaccccgataccctgaaagtattcctgagcaacatggagcggctgctacacgccaaggctcatggggtccgggtgattggaagctccaccttggcactctgctacctggcttcaggcgccgccgatgcctattatcagtttggccttcactgctgggacctggcagccgccacagtcatcattagagaagcaggtggcattgtgatagacacctcaggtggaccccttgacctcatgtcttgtagagtcgtcgctgctggtaccagagagatggcagcgctcatagctcaggccttacaaactattaactacggacgggatgatgacaagtgagccacacacagctcggtgctgagctgatttctctgtaatctatctcatgtagcccttttcaggtcggtacaagttctttcatcagagccaaacctaaatctcttgtgaggtgtgtattagtcattcagtcttgattgtttttccagaatgtaaatctcaggtaataaagctttggaacttgctctcgggccctcccctgcccacggtaatatacaatgcaataaatcagaatta

SEQ ID NO: 5195 - DNA, 1282 bp, Cricetulus griseus
  modified_base (23)..(23): a, c, t, g, unknown or other
gagccgctcagcgccacgcagcngcggcggcgtggaggagcaccgctacaccgcggtgggagagtcgctgttcgagccgccgctgcagctttactggacctggctgctccaatggattccgctctggatggcccccaacaccatcaccctcatcggcctcgccatcaacctggtcaccactctagtgctcatcttctactgccccacggtcacagaggaggcaccatactggacatactttttatgtgccctgggactctttatctaccagtcactggatgccatcgatgggaagcaagccagaaggacaaactcttgttctcctttaggggaactgtttgatcatggctgtgactctctttccacagtatttatggccattggggctgcagttgctgttcgcttgggaacacatcctgatctgttgttcttctgctcctttgttgggatgttcttgttttactgcgctcactggcaaacttatgtctcaggggtattgagatttggaagagtggatgtaactgagattcaggtagctttaatgatcgtctttatattgtctacatttggaggtgcaacaatgtgggactatacgatacctattctagaaataaaactgaagatctttccagttcttggagtagtaggtggagcaatattttcctgttcaaattatttccatgtgatccttcatggtggtgttggcaagaatggatctactattgcaggtaccagtgttttgtcacctgggctccacataggattaattattatattggcaataatgatctataaaaagtctgcaacaaatgtgtttgaaagacacccttgcctttataccttaatgtttggatgtgtctttgctaaaattgcacaaaaattggtgatagctcacatgacaaaaagtgaactatatcttcaagacactgtgtttgttggtccgggtcttttgtttttagaccaatattttaataattttatagatgaatatgttgttctatggatagcaatggtcatttcttcatttgatatgatgacatactttagttctttgtgtctgcaaatttcaagacaccttcatctaaatatcttcaagacttcatatcaacaagcacctgaacaggttcacaagcatattgactgactagtaaccccaggaaaagaggagaagcagttaggggaacctatgtgtgaaggaaatcctcttatgcaggaggctagtatattatctataaggttatgttaaatgtaaaacataaatctagtagcttccattatgtct

SEQ ID NO: 5196 - DNA, 1282 bp, Cricetulus griseus
tgcagcttcaactatccgatccgggctggaggtgacccgggcgtggctgccggcaacacaggtggagggctcctctacccccgagagtctgcgccacctcccacggcccccttcaacctggcggacatcaatgacgtgagcccctcgggcggcttcgtggccgagctcctgcggccggagttggacccagtgtacattccgccacagcagcctcagccgccaggtggcggactgatgggcaagtttgtgctgaaggcttcgctgagcacgcctggcagcgagtacagcagcccgtcggtcatcagtgttagcaaaggcagcccggacggcagccaccctgtggtggtggcgccctacagcggtggcccgccgcgcatgtgccccaagattaagcaagaatcggtctcctcctgcacagtcggccggtccctagagacccatttgggcgctggacctcagctcagcaacgggcaccggcccagcacacacgacttccccctggggcggcagctccccaccaggactacccctaccatgagtcccgaggaactgctgaacagcagggactgtcaccctggcctgcctcttccgccaggattccatccccatccggggcccaactaccctcctttcctgccagaccagatgccgtctcaagtctcatctctccattaccaagagctcatgccaccgggttcctgcctgccagaggagcccaaaccaaagaggggaagaaggtcgtggccccggaaaagaactgccacccacacttgtgactatgcaggctgtggcaaaacctatactaagagttctcatctcaaggcacaccttcggaactcacacaggtgagaaccttaccactgtgactgggacggctgtgggtggaaatttgcccgctctgatgaactgaccaggcactaccgcaaacggaagaggaagcaattcaggtacagaacatgttctaatagcctaaacgatggtgcttgtgagtcgtggttctaaaggtaccaaatgagggagccagagttctccaactgctgcatactttgacaaggaaaaatctatttttgtcttccgatctacatttatgacctaagtcaggtaaatatacctggtttattctgtaacatttttatgcagacagtctgttatgcactgtggtttcagatgtgcaataatttgtacaatggttttttcccaagtatgcctttaagcagaacaaatgtgttttctatatagttccttgccttaataaatatgtaatataaatttaagcaaactt

SEQ ID NO: 5197 - DNA, 1282 bp, Cricetulus griseus
aacaaatactcctacaccagtcaattctgacgacaatatgttgaagaacatcgagctctttgataaactttccctgcgctttaatgggagggtcctattcataaaggacgtcatcggggatgaaatctgctgctggtccttttatggccagggccgaaagattgcggaagtctgttgcacatctatcgtctatgccaccgagaagaagcagaccaaggttgagttccccgaagcccgcatttatgaggagaccctgaacattttgctgtatgaggcccaggatggccgaggacctgacaatgcacttctggaggccacaggtggggcggctgggcgctcccatcacctggacgaggacgaggagcgggaacgggagaggatcgagcgagtacggaggatccacatcaagcgcccagacgaccgggcccacctccaccagtgagcaggccagccaaaaaagccctgcccaccaccctctgctccccctgccccctccagacccctgtgcaggcttcggggtacctcccatttcccctggagtcattgcttctgtgttgacccaggtgtgcaccccttctgaacaagcttgtctgagggctcaaactcttgtgagagcccagagctgggctttctcggctcttggaggaaaagtatgagtgagtttgacacgtatgtgagagcctttgttgtggtatttatttttatgggtgttgactacctattagggcttcttaagtgacactccttcaagggctcatttgacggttctgagaggctgtgtggttggcaagcagccaaccaagcaagaaagggagcttacaaatcatgttttatgagtttttatactgtttgtttcacacgtcagccctgccctgtgggttcagcttttttagggagtaaaagtgaatgttgagtcctggtgttttctgtaggaatgaaaaagccattgtatacactgtttaaatgttggtgtgcagaatgagttggtggcccaattgacttgcagtggcccctgcacctcatggttactgtttcggcagctctctcttccttcctctttcctcaatccttgtgcctgcagctttgcacctccgctcccagggatgggaacaggcctggcaaacattccatggtgcctgataccgccggcagctgtgtccactagggcctgacccagcgtcagtcgttccaaagctctgcttctagattttcagggctagcatgaagagcagtagtcagcatttctagttcagagccgtccagtgaatcactggtcttgagt

SEQ ID NO: 5198 - DNA, 1282 bp, Cricetulus griseus
agagacagtgaaaactgagcaacaggaactgctggacataaggaacgaactgaacaggttaaggcagcaagaacaaaaacagtaccaggactgcaaagagattgcaagtgggaaagtgagcagcccgcagggctctgcactggaagaaggcctggatgactatttgacacggctgatagaagaaagggacactttgatgagaactggtgtatataaccacgaagaccgaataataagtgaactggaccagcagatcagagaggttttggccaaaaaacattgccagtaatcaatgacatttgggaaatctttgcagatactctagatctggattttaattttatgcaaaatacctcaaaaggaaggaaaatgactattttagaattgctctttttaattttttattaagctgaattttatatgttactgtatatagtatttatttgattttacttacgctaactctcctaggctgatttcatttgtaactgtattatagatgctcatttaaaatgacttttcagtgttcttcagtttaataaaaagagcttttcacaacttgttctgggagaattggctacaataatttccagctacgtaatttttcatgttgagccaagagagtaggagttgcactttaaaaatgttgtgccctcttccctcctattgtagatatcttcaagttgaagccaattataaatgtagccatttttaaaaatcattttatataaccagtctttttcccctcactgtggtatttgcagaattctgattcccaaatacaacaaattgaagtgtatactttagggagtatgtactaataaccagtaacttcaacaaaagcaaagtaggttatgtggtaatgttcattaaatatatttcttgtttgtgaaattgaaacccctataggcatcatatgcttcttttctttaattagtgaagtctcagtcttctgaaagcaaaccaacagtaaataacagaagggtcattggatgtgagggtgatgacacagataatcatagcagggatttgaaatatgaattatggttacattgtccctgatttttttggtgacacatgaatggagcaaaagtatttttgttttggaagaaggtactgacccaatgctggttcctccacctgtgaggcctggagctttccaaacactagagggggccttagagcaaacagaaaaggactttaaaatctatgtgtgctttgccttctagaaagccatctttgagctgctgtaatttgacaaataaaaccctaactgtgtgca

SEQ ID NO: 5199 - DNA, 1281 bp, Cricetulus griseus
gggtgccgccatgctgccatcgctaagtactttggagacgcaccacctgcctgcgccaaaggctgtgaccactgccagagtcctgcagccgtaaggaagaagcttggagcatagcagtagctggagtaagacctgcatcgggcccttccaggggaacggcttcgatccagaactgtatgagggaggccgcagaggctgcggggcttcagcagatatgatgaaggttctggaggtagcggtgacgagggcagagatgaggcccgcaagcgtgaatggaatcttttctatcagaagcagatgagcctgcgcaagggcaaagaggccaagacagaagaattcaccacccccagatgaagactgtcccctgagagaggcttcaagcaggaagatccctaagctcacagtgaaggcccgtgagcactgcctgcagcttctggaggaggctttgagcagtaatcaccaggctgcaggggccactgatggagctgacctgcaggccaaagcagtggagctggagcatggggcattccggaatgccaagatggtcaacctgtacaaggccagtgttctaaagaaggtggctgagatccacaaggcctccaaggatggtcagctctatgacatggacggtggcaccaagagttgcagtgctggggttgagccctcagagcccaatgactatgactgtcccccaacctcacacctgctccaggcccaagatcaggagacgtcaccccctcctgtggaggcgagccagaagactgcacacaagttggagcccaggcacatttgagtgctcgagttcagactgagtgtcccagggaggggccaagcacctgctcactgcaagtccacagctgtcctgaaggtcagcctagcactctacaggaagcccaggcaggcaagcggcccagacctcagcaccagagagaagggctcagaagaggcttcgcccctcaaccaattcctccatcttggctgaggccaagggcagtgccttggccagtgatcacagcactgagaataaggtgactggagaacattgccagctctcagctcctggcatctctgtgaaagaggctgccgctgttgtggtcaagtacctgacccctttctacaaggagggcaggttcatatccaaggagttgtttaactctcctggaaggagtgtgaagaaagaggcccagagcctcatcaaacagtttttccatgatcgtgcccgctgtgagagtgaagctgactggcgtgacctatgtgtcccacagagatgacctgctgctg

SEQ ID NO: 5200 - DNA, 1281 bp, Cricetulus griseus
  modified_base (27)..(27): a, c, t, g, unknown or other
ccagacatggaaggaacaagaaggttnacctgatgacactgaggaactttggattaggaaagaagagcttagagcagcgcattcaggaagaagctggacatcttgtggaggccatagcagaggagggaggacagccttttgaccctcacttcaagatcaacaatgtcagtttccaatatcatttgcaccatcacctttggcgagcgctttgagtatcatgacagacaatttcaggagatgctgagactactggacaaggccatgtactcagagtcatcagtgatgggccagctctacaacatcttcccaaggataatgaaatatcttcctggatcacaccaaacacttttcagaaactggagaaaactgaaatcatatgtttctgatgttattgacaatcaccgtaaagactgggaccctaatgagccaagagacttcattgatgctttcctcaaggaaatgacaaagtacccagacaatactacaagtttcaaagaagaaaacctcatctgcagcactctggaccttttcctcgctggaacagagacaacatccaccacactgcgctgggctctgctctacatggccctctacccagaagtccaagaaaaagtacaggctgaaattgacagagtgattggccaggagaaacagcccagcctggctgaccgagactccatgccctacaccaatgctgtcgtccatgaggtacagagaatgggaaatatcatccctctgaatgttcccagggaagtgacagtagacactaaagttggctggattccacctgccgaagggagagcactttttggagaatggacaatttaagaaaagagaatcttttctgcctttctcaatgggaaagcgagcttgtcttggagaacaattggccaggtctgagctctttattttctttactgctcttgtgcaaaaatttaccttcaagcccccagccgatgagaagctgagcctgcaattcagaatgtcagttaccgtttcacctgtcagtcaccgcatttgtgcaattcctaggctgtgatgttgaagaagggaagtatgaagaaatggcatatgcttggaagacactggtgcttgctcgcacttgaggacatagaatgaaggtgactggagaaatggctctaatgacactaaagagattgaatccaactatgggttcataagtggaaagccacttactagctcagtgatagaacttttcgcctaagatcttcagagaaagatgattcctccagtaaagaagatgcttgcattgctcatgag

SEQ ID NO: 5201 - DNA, 1281 bp, Cricetulus griseus
cggaaatacagcggcaggggccgaacggcttaagcgtcctagctaaggtacgctgtgagacgctgtgatggcgagttcggcagccgcagcctccttccttgctccgactctggagcagctccggcacctggcagcggagctgcggtcacttctgcctctagtgagggtcggcgaagcccaggagacagccgaggaatttaatcgagagatgttctggagaagacttaatgaggcagcagtgaacctgtcaggggaagccacgattctgaccacacttttctcccgacttccactgccgtctccacgggaaacccagaggatctgtgagcaaattcatgttggcatcaaggaaattattgaagtatattattcacttcctaaaaatcaggggatcaccctgagaaagctggtgcggaatgctactttggacgttgtggatggcatggctcagctcctggaagtgcttatctctccatctcagagcactgagaactgtgaccttatttcctgcaatagtgtctcggtagcatgccaaaaggtgtctgagattccaaaagataacaaggctgcagcccttttgatgctgacaaagtgtgtgaattttgtgaaagatgcacatgaagaaatggagcaggctatagaagaatgtgatccttactgtggactcttgaatggttctgaggacaactctgacagccataatgatgaggatgatgtattagggcttccaagtaatcgggactcatactggtcagaggaagatcaagagctcataaacccgtgccttgcattggtgagagcatccagagcttgcctcaggaaaatccggaccttagtggctgagaatgggaagaaggatcaggtatcccagctggatgacattgtggatatttctgatgagatcagccccagtgtggatgttttggttctgagcatatatccacctgtgtgtcacctcactgtgcggatcaattctgcgaaattggtgtctgttttaataaaggcgcttgaaattacaaaagcaagtcatgtgaccccccagccagaagatagctggattcctttactcattaatgccattgatcgttgcatgaacagagttaaggaactcactcagcatgcagccaactcatgagcttccaggccattcttactcctttctcttcctctcactctcacagccaagctccagtgtctgcttttatttatttattaatttttttccagtgtccgctttagaagtagagctatgatagggtgcttgctggatagaaaggaagc

SEQ ID NO: 5202 - DNA, 1281 bp, Cricetulus griseus
ctctctgtgccaatccagcccctactcccagagtctgtggtgcagagtctgctgccaggctcaggataccagaagcagctcctggccgcccaagggcagcttcaaggcagcactgcccaacttcaggccgagctgctgcagagccagaccaagctgtctgagctggaggcccaggtgcggaagttggagctggagaggacccagcacagggtgctgctggagagtttgcagcagcggcaccaggctgacctggcgctcattgaagatgcacacagaagccgagtcaaggtgctagaggcatcctaccagcagcgggaggagctgctcctcagagagaaggaggcgctatccgctcagcatgcatcctactgccgggaagctgagcaggccagggctgagctcatagccgccttgcttgaggagcagaagtcagtcatgaacaagtgtgggaagagcgccggcgcctggcagcggagtgggccgagtacttcacacagcagaagctgagtaaggaacgggccgagcgcgaggctgagagggcgctgcatgcagactcccagcgggaggacactatcatcagcctgaccaaggagcaggcagagctaacggttagggcctgtgagctccgggccaaggaggagaagttggctgctgagagggaggcttttggagagagagcgccaggagcttcgactggagaaggacaggctccacaaagccagcctgcgcctccaggcccgcgtacaggaggtggaacatatgagcaaggtggcctccaagaagtatgaggagggtgagcaggccctgcaggaggcccagcagatgcagtccgagcagcagggccggctgcaggcagttcagcggcagcaggaatggctgcgacagcaggagcagcgtatgcacaaggagcatctgagcctggctcagcagagactgcagctggaccgtgtgcggcaggaagtgccttccagccttctcgggcagccctccacagttcagggcccagcagtgcccagcctggatgccgtccaggcccctgctcccaccagtcctcagtgtagccagactcctgctgctccggtgcccacacaccttcttgccaagctgctgctgctgaagcacacagcagcacaggaccacgacttcttggagaatgaacaattcttcctggaaacactgaagaaagcgccctacaacatggcataccactctgcctgaaagtaccagagccttctcagcaagcatctgggcctagaattctcgctcactgctgacagctcc

SEQ ID NO: 5203 - DNA, 1280 bp, Cricetulus griseus
aaatttggaccagatggctctagaaggatgctttttcccaaactttctatttctgccaacccttttgtgctcaccatccagggcagccctgctcacaggacggctgcccatccgaaatggcttctacacatccaacgggcatgcaagaaatgcttatacacctcaggagatcatgggtggcatccctaactcagagcacctcctgccagaactcctgaagaaggcaggctacaccaacaagatagtgggcaaatggcatctaggtcacagaccccagttccatcccttgaaacatggatttgatgagtggtttggatcccccaactgtcactttggaccttacgacaacaaggtcaagcccactgataatggtgcagccctcatttctgctcccaaagaaggtggcagcaatggtcccttcctgtgtgggaagcagactacatttgaaggtgggatgagagaacctgcaatcgcatggtggccggggcacattgctgcaggccaggtcagccaccagctgggaagcatcatggacctctttaccaccagcctgtccattgcaggcctgaaaccacccagtgacaggataatcgatggacttgacctactccccactatgctccagggccacgtgatggacaggcccatattttattaccgtggaaacacattgatggcagtcactcttggccagtacaaagcccacttctggacttggaccaactcctgggaagagttcagacagggcattgacttctgccccggtcagaatgtctcaggagtcacaacccatacccaggaagaacacacggagctacccctgatctttcacctgggacgtgacccaggggagagattcccactcagctttgccagtgctgaataccaggatgtcctcagcaggatcacccaggttgtccagcagcaccagaagtccttggtccctggacagccccagctcaatgtgtgtaaccaggctgtcatgaattgggcacccccaggctgtgaaaagttagggaagtgtttgacacctcctgagtctgttccagagaagtgttcctgggcccattagccagaacagaatctccagccagccctgcaagtgcctacaagacttgggactgagggatgacagagatcagctgcccttggcccaccaccactggttagatggcccctgcaaccagtagcaaggttccaagtctgcacatactggagacctaaccctgaagtccactttctagcactgcagcccatcttcccatctggctattgaaaag

SEQ ID NO: 5204 - DNA, 1280 bp, Cricetulus griseus
cgttccgtaccgcgggaagcctgtcaagagcaggatggcggcttcgggggaggcgcgccgggtgctggtgtacggcggcaggggcgcgctgggctcgcgctgtgtacaggccttccgagcccgcaactggtgggttgccagcatcgatgtggtggagaatgaagaggccagtgccagtgtcattgttaaaatgacagactcatttacggaacaggctgaccaggtcactgctgaagttggcaagctcctaggtgaccagaaggtggacgcgattctctgtgtggctggaggatgggctgggggcaatgccaagtccaagtcactctttaaaaactgtgacctgatgtggaagcagagtatgtggacatccaccatctccagccacttagccacaaagcacctgaaggaaggaggcctcttgaccctggctggggccaaagctgccttggatgggactcctgggatgatcggctacggcatggccaagggtgccgtccatcagctctgccagagccttgcaggaaagaacagtggcatgccacctggggctgccgccattgctgtgctcccggttaccctggatactccgatgaacaggaaatcaatgcctgaggcagacttcagctcttggacacccttagagttcctggttgaaaccttccatgactggatcactgggaataaacggccgaactcaggaagcctaatccaggtggtaaccactgaagggaagacagagcttactccagcatacttttaagcctcatctcagtgcctgggagagccctcccgaaacatcactaacccatgtgtggtcacatttggccctgtgttttctgtattcctgtttctggtatgaggtaaccagtcctgtttgtctcttacttgcgttcctttgctgttctggaacagtgtgttttttatgggaaatgagaagagagacctgtaggtagcactgtcagtgctgagggccctaggaggtatgtgagcagcctgcatcagagcatcctggattgctttggagacccccttggatagtcctcttatttgttggcatttggggcactttgaagtccagcctgtttttgaattccatgttggtgccatagatgtgatttttgtggcctgaaattgaactgccttgagaattctttgtgatgtaagcaaaaacacaatggactctgtcatgatgttcttttgtgtgcctgcctaggttaagtgtgcaagagaaccacttgtgagtattggagtgttcttcctaatgaacagagttcatgtct

SEQ ID NO: 5205 - DNA, 1280 bp, Cricetulus griseus
ccctgcctcccagccagcctcaggagcctgtgaacaaaccctgtagccaaccctcaggggatggacccctccaaaccaccagccctgcagatgaggtccccaagaatgacagtgactcaaaggtacctgtttccctccggaagtcccgaccattgtccatggatgccagaattcaggtagccgaagagaaagaagtcactggccaggctgaggactccagtcctgtggccagcaagtcccaaaaggcaaaccagagccgccctaacagtgtcgccctggagaccttgggtggagagaagctggccaatggtggcctggggctcccaagctctgtagttccaggccatgctaagagggcttcagactgcagcagcctgtctacctcggagagcatggactacggctcctccctgtctgccgacctgtcactgaacaaagaaacgggctcactgtctctcaagggatcaaaactgcacaacaagaccctgaagcggactcgaaggtttgtggtggatggtgtacacacacacacacacacacacacacacacacacacacacacacacactgcacatacatggaacctgcctgctgcctcctgagccttatcctgggccactgagtatgtcatgtggagcagcaggtgggaacatgctgagcgctggcaccagggcccagagaaggcacaggctgtactgccagcctgcaactcatttggccgcacacaggatcctgtgttcaggggtaaactcccctccacagccaacttctgctgcctagcacatgccaatcgcacccttgcccacttgtctacaggttccctgggaaggctgttgtcctttgccctagtcctgtcctggagtcccactgtacatttcaagcctggcgtccttggacttccttcctcctgaagaatgcttcctgccctcaggaacatgccacttagtgccacctgagccctggtagctctactgtgcctttttgagtggggtctagcctagtctcccagcctcatcatttagtatatgtgcaatgcctgctgccgacaaggcccacgcagtattcctcgtaccctgtgctaatgttttctgtatagggacaggcagaaatgttttcagctgagtaaatataactaacttatatttcccttcatgaaggatagatgtaatgtgtatgtcatttccaaccatcatgtaaatttttgtaaactggtctctgcaaacaaaaaaaatgtaaatatgcttctaataaaataacaaggtaatttgcaaaaaaaaaaa

SEQ ID NO: 5206 - DNA, 1280 bp, Cricetulus griseus
  modified_base (305)..(305): a, c, t, g, unknown or other
ggacgaggatgtcatccgctgctacctggaagaactgctgcatatcctgactgacgcagaccctggcgtttgcaaaaagatgtgcagaagggatgagtttgagtctgtcctggccctggtggcctattaccaaatggaacaccgagcgtcactgcggctgctgctcctcaagtgcttcggcgccatgtgcagcctggatgcggcgatcatctctacgctcgtgtcctctgtgctgcctgttgagctggccccgagacatgcagaccgacacacaggaccaccagaagctctgttactccgccctnaatcctggccatggtcttctccatgggagaggcagtgccctatgcacactatgagcacctgggcacaccctttgcccagttcctgctaagcgtcgttgaggatggcctccccttggacaccacagagcagctgccggacctctgcatgaacctgcttctggctctcaacctccacctgacagctcctgaccagaatgtcatcatggctgccttgagcaaacacaccaatgttaagatattttcagagaagctgcttttgcttctgaacagaggagacgatcctgtacgtatcttcaaacatgagccacagccaccacactctgtcctcaagttcctgcaggatgtgtttggcagccctgccacagcctccatcttctaccacacagacatgatggcacttattgacatcactgtgcggcaaattgcggacctgtcacctggagacaagctgcgcatggagtacctctccctgatgcatgctgtctgggagaggtccccagctagtcacttctttttttctcccttctctgcagccctggtcagggtgcagggaactcaggggattcactctaagaatgttttgcacagacattataagaggataaagaattcgaaagaatctgagccaggccccttacctgaagaagagtcagtgtaaggggccaagtgcaggattggggaccacagtctgggaactatattggggtagaggaaatgtgcaagctgaagaccctctgtttgctgataggctgcctcttcagcatgccacccccaccccccatacccatacgcatacccagagtcctgctgctgctccaggactggactgcagcatccctacccactgcctgggctgagtcttgggcctcagcaagccatgtccttagggtgaggggagctcctcccaccagctctgttctttgccttagctttgcagtgagtgttgctcatgtgcaacccttacccccttaggga

SEQ ID NO: 5207 - DNA, 1279 bp, Cricetulus griseus
agacaaacactgttagagatagagaagttcctcagtggagaggagtggaagtcaggagccttggatgatgccttaagtgatattttaatcaactttaagtggcatgattcagaagcatggaagtggcgatttgaagactcttttggagtggatccatataatgcatttgtggtactcttgtgtttgctctgcattgtgttgttggtgactacggaactatggacaattgttcgctggtacacacagttgaaacgaatttttatcatcagttttctcttcagtttgggatggaattggatttatctatataaggtagcttttgctcagcatcaggctggcattgcgaagatggcaacacaaacagatagtgtgtgtgttgagaagatggattggactggaagtctctgggaatggtttagaagttcatggacctatgaggatgacccatgccaaagtattatgagctcttattagtcaatccgatttggttcgttccaccaacaaaggctctggcaattacattcactaactttgtaacagaaccattaaagcacattggaaaagcaactggtgaattcattgaagcactcatgaaggagattccagtgttactgcagattccggtgctggtgattatggcattggctgtcctgagcttctgctatggtgctggaatgtcagttcccatgctgagatatgttggtggtcctgaaagagaacctccccgggcacttgaaccaggtgacagaagatggcagaaggaacttgactgtagactctgtggaggagcaggtgatgcagatttctcttatatgggccaagctggctccattgagcaaggcccttatgacaaaacgcatgcgtgtaaaagagatgttttgagacagagatttcacactggcaacaagagccctgaagtgctccgggcatttgatttacctgacacagaggcacaagagcatccagaagtggttcccagccataaatcatccagcatgaatacaaatctcaaagaaattggtgaactcccaggagaaagcaccccaacagaacacagctcgtctgccacggctgtctctggccaagctgcagggactgcggaaggctcccccataaagaaggtcccgctgaagctagactctgagtgcagcctacagggaggcaccacacacagcccaggagctgcagtatgtgggactgatcctgtcagcagcccgtgtggctaaggaacacaggtgtcctttgttgtaaccatatctgtactgcacattttattcag

SEQ ID NO: 5208 - DNA, 1279 bp, Cricetulus griseus
agttttgaacgctgctgtttgagtcgcctggttgtttttcttgggtgtcgccgggattgtagaacgcgatgaccgtcccctctgcagaggagttggactctttcaagtacagcgacctgcaaaatttagccaaacggctgggcctccgggctaacctgagggcagacaagttgttacgaaccttgaaagcccacctgaatgcagaaacaaggaaagagaatctaaatcaggatgagaatcattaaggggcttcatgaggctcattttaagaaaatggaatccattgatgaatatattgtgagaaaaaagaaacacttgaacgaacacaactcacttaatgaactaacgcttgagaagaaaggattagtgaccccagttccagcaagaggaagactctctgtaccctgtactcctgagcaactaaaatgaatgtcaggttctcagctgctactaaagacaatgaacataagtgctcactgaccaaaactccagccagaaagtctccacatgtgaccctacctgggagtgctgcaaaaggccaggctgtgttcaggacacccaagttaacgaccactgagagggcttgcagttattaccccattcaagttgacaactggagcaacacagactccaggctctagtaagaaaccggtatttgatctcaaggcaagcttgtctcgtcccctgaattacaagccacacaaaggaaaactgaaaccttgggggcaatctaaagagaatagttctctgaaagagggtgtaagcagagttagcatccacaggaaaacttacaaacagcctcatctccgcaccagggaagaacaacggaagaaacatgagcaagaacgaaaggagaggaaagcaaaggttttggaagctcgaagaaacctggttatgactaaagcccagtaatcctgtcgattcctttacttccaacttgttttccttttgtaaatatgtttatactttcatctactttagtcaaaagctctttttctaccatatatttccatcataatttgtggagtatctgttctgtgctatagctctggaaaatatattctcatcttaaagttcataactaaagtggttttcacctgatgtcctgtacaactctgcttttgaagagacctgtgtttgggttcttgccataggtttttcatgtcaaggtcctgctagttctaacagagacaacctgtgtcctttcctggacaagttgcttctgccatgtagagattctgagttgtgtgtaatgtttatgattttcataaataaaaat

SEQ ID NO: 5209 - DNA, 1279 bp, Cricetulus griseus
ggtgcgcaggcgcggactttctcctctcgtccggttgctccgtgtcggggctgcgtggttgtgtgactgtgcagcggtggctgtgcgtctgggacacgatgagtggcttcagcagcgaggagcgcgccgcgccctttaccctcgagtaccgcgtcttcctaaaaaatgagaaaggacagtatatttctccatttcatgatatcccaatttatgcagaaaaggatgtattccacatggtggttgaggttccacgctggtcaaatgccaaaatggagattgctacaaaggaccctttaaatccaattaagcaagacgtgaaaaaaggaaagctccgttatgttgcaaatctgttcccttataaaggatacatctggaactacggtgctatccctcagacatgggaagacccaggacacagtgacaaacacactggctgttgtggcgacaatgacccaattgatgtttgtgaaattggaagcaaggtgtgtgcaagaggtgaaataatcagggtgaaagttctgggcatattggctatgattgatgaaggcgaaaccgactggaaagtcatcgccattaacgtggatgatccagacgcagccaattataatgacatttctgatgtggaacggctgaaacctggctacttagaagctactgttgactggtttagaaggtataaggttcctgatggaaaaccagaaaatgagtttgcattcaatgcagaatttaaaggcaaggattttgcaattgacattattaacagcactcatgattattggaaagcattagtgactaagaaaacagatgggaaaggaatcagctgcatgaacaccacagtgtcggagagccccttcaaatgtgatcctgatgctgccaaggccattgtggatgctttgccgccaccctgtgaatctgcctgctcactaccgacagatgtggataaatggttccatcaccagaaaaactgagatgcccaggaatccaagctgatcctgctgcatcctgttcacctggaagcattagatgcaaaaactgtagtcacttttcacagctttacatttctataacttaccactgaagtagattctgctgtgctgctcggccagtccaatatgttcagaaggttagccatccagacacttgacatctcaaccaagacagcttttaccacattagctctcaaagccattgtgacacggaagtcatttgtgcatagatgtgcaagctgaacacatactggatgtatatgtttactgtattaggaaataaaattatttta

SEQ ID NO: 5210 - DNA, 1279 bp, Cricetulus griseus
ggctgagtgagagctgctggtgtcgcgattgaggagaactgcgagtgtgttcagcctgtccccttcgggatcccagccacgatgagtgctgcccgggagtctcacccacacggggtgaagcgttcagcctcccccgacgacgatcttggatctagcaactgggaagcagcagacttaggcaatgaagagagaaaacaaaagttcttgagacttatgggtgcaggaaagaaagaacacactggtcgtcttgttataggagatcacaaatcaacatctcacttccgaacaggggaagaagacaagaaaattaatgaagaactggagtctcagtaccagcagagcatggacagtaaactatcaggccgataccggcggcactgtggacttggcttcagtgaggtagaagatcatgatggagaaggtgatgtggctggagatgatgatgatgatgactcgccggatgccgagagtccagatgactcagacagtgattctgagtctgagaaggaggagtctgcagaagaactccatgctactgagcatcctgatgatgcagaagacccgaagagcaaaaaagatgcaaagagcaattataagatgatgtttgtcaagtccagcggctcataactattaaatacttagtctttgtattaaaagtaagccttattgttataatgcacagtggaggactgcttatagagcacagacctttgtattataatttttaaaaaggcccttttaaataactacaaagagtgtttgctttcaaatgccatggattacacttttccgggcatgactataaccatttttgtaaagagtcagagttgtataaaatgagaaataaatactgtactcagcttcctttcatattagcatcgtcagccctcttaccaccttttcacccctgcagatgcattatgggggacacttactttgcttgtggtagctctttcaactttgtgttttaggtttgttcctattttttctcttatataattcatttgatactgtgacgagcaagcacaggacactggtgggcagaggtgcagccgtcacatcatcatttagaaggttgtgaacccaaaatgtctttatataatttgatttcattgtatagtaaagttttgataaaatttggccagtttttacagaagatttgctcatttagtcctgtgtatttagacataagtaaaactggatttttttttaagtactatgtgaccaaagttcattttttcctcctaaggtctaaataaagagaaagcagtttcccata

SEQ ID NO: 5211 - DNA, 1278 bp, Cricetulus griseus
  modified_base (1174)..(1174): a, c, t, g, unknown or other
  modified_base (1221)..(1221): a, c, t, g, unknown or other
cctgtaatccatgtcctggatgcatccaagagtgtggtggtgtgttctcagctgttagatgaaaatctgaaagatgactacattgaagaaatactagaagaatatgaagatattagacaggaccactatgagtctactcaaggagagaaaatacttacccctaagtcaagccagaaaaaatggtttccacattgattggctgtctgaacctcacccagtgaagcccacatttattgggacccaggtctttgaagactataacctgcaaaagctggtagactacattgactggaaacctttctttgatgtctggcagctccgtggcaagtatccaaatcgaggcttccccaagatatttaacgacaaaacagtaggtaaagaagccagaaaggtatatgatgatgctcagaatatgttgaatatactgataagtcaaaagaaactccaggccaggggcgtggttggattctggccagcacagagtgtccaagatgatatccacttatatgcagaggatgtggtgccccaggcttcggagcccatagccaccttctatgggctgcggcagcaggctgagaaggactcttccagtacagacccctaccactgcctctcagacttcattgctccactgcattctggtgtccgagactacttgggtctgtttgctgttgcctgctttggggttgaagaactgagtaaggcctacgaggatgatggcgatgactacagcagcatcatggtgaaggcactgggggaccggctggcagaggcctttgcagaggagctccatgagagagttcgccgagaactgtgggcctactgtagtagtgagctgttgggtgtcacagacttgcgaaaactccggtatgagggcatccggccagctcctggttaccccagccagcctgaccatactgagaagctcaccatgtggagactggccaacattgagcaggccacaggcatcaggttgacagaatccttggcaatggcacctgcttcagcagtatcgggtctctacttctccaatgtaaagtccaaatattttgctgtggggaaagtttccaaggatcagattgaggattatgctttgaggaagaacatgctggtggctgaggtggagagatggcttggccccattctgggatatgatacagactgacttttttcnctcttacacactccttttcttctttttctttttccttaaaacctttntgtttgctgacctcaaggggtacaatccagagtgccttagaaataacaatagaaagc

SEQ ID NO: 5212 - DNA, 1278 bp, Cricetulus griseus
gcggtgtatgcagatgtcggcgctgcggcacgtcgtgtgtgccctatctggcggcgtggacagcgcggtggctgcgctgctgttgcggcggagaggctaccaggtgacaggggtgtttatgaagaactgggactcactggatgagcatggtgtttgtgctgctgacaaggactgtgaagatgcttataaagtttgtcagctcttagacatccctttccatcaggtatcctatgtgaaggagtattggaacgatgtgttcagtgactttctgaatgagtatgagaaaggaaggactcccaaccctgacatcatgtgcaataagcacatcaagttcagttgcttttatcattacgccgtggacaatcttggagcagatgccgttgccactggccactatgcaaggacctccctggaggatgaggaagtctttgagcagaagcacactaagagaccagatgggctgttcagaaatcgatttgaagtcagaaatcccgtaaaacttctccaagcagctgacagctataaagaccagaccttctttctcagccaggtttcccaggatgccctgagaagaaccatcttccccctgggggaattaacaaaagattttgtaaagaaaatagctgcagagaatagactccatcatgtgcttcagaagaaagagagcatgggcatctgcttcattggtaaaagaaacttcgagcatttcattcttcagtatttgcagcctcggcctggaaagtttatttctatcgaggataataaagttctgggaacacataaaggttggttcctgtatactttgggacagagagctaaaatcagtggcttgagagagccctggtacgtggtggagaaggatggcatcaagggtgacgtgcttgtggctccccaggtagaccacccagctctgtacagggacctgctcaggaccaaccgtgtacactggattgctgaggaaccacctgccaccttggtcagagacaagatgatggagtgccatttccgattccgccaccagatggcactagtcccctgtgtgctgacactcaaccaggatggcactgtatgggtgacagctgtgaaggctgtacggggccttgccctgggacagtttgctgtcttctacaagagtgatgaatgtcttggcagtgggaaaatcctacggttagggccgtctgcctacacactccagaagggcaagaacagaaccagagtggctcctgaggtctccagtgacagcccaggcctgcacccgacaccctgacaaaggccaag

SEQ ID NO: 5213 - DNA, 1278 bp, Cricetulus griseus
caggtgcaaacctgcccagccaagaacttacatgtccccagcaatgaatgcctatctacagtaaagatctcggagcccagaacccagctccctaacttgcctgtactgctctgcagccctcctgacccagaagaaagctcctcaaagcaggggcgccgataccagtgtggggagtgtggcaaggcattcctgcagctatgccacctcaagaaacatgcatttgttcacaaagaccacaagcccttcctgtgcactgagtgtggcaagagttacagctcagaagaaagcttcaaagcccacatggctgggccatcgaggggtgaggcccttcccttgttcacagtgtgacaaggcttatggtacccgcagagacctcaaagagcatcaggtggtccattcgggtgcccggccctttgtgtgtgagcagtgtggcaaagcctttgctcgccgaccttccttgcggctacaccggaagacacaccagatgccagatgccccttccccatgcctatgcccatgcccagtatgtgggcggctcctggccacccagggttcactgcagaaccacatgagacttcacactggagaaaagccattcctgtgcccacactgtgggcgagcattccgccagcggggcaacctccgaggacacttgaggctgcacacaggggagcgtccttatcaatgcccacactgtgccagtactttcccccagcttccagagctgcggcgtcatctcatttcccacactggtgaggcctacctgtgccctgtgtgtgggaaggccctccgagacccacatacacttcgtgctcatgagcgcctgcactcgggggagaggccctttctgtgcctccaatgtggccgagcttacacactggctaccaagctgcgccgtcacctcaagtcccacatgacagacaagccataccgatgccctgtctgtggcatgggctatggcttccctcaaagcctcaagcggcaccagctcagtcaccagcatggggtttcctccagcccttctctgcctcctgctgcctctgagcccaccatggtgctcctacaaagtgagccaaaattgctggacacatgcagccagcaggaagtgccctcagacgggggtattgtggaggtcaccatctctgagaaccagggaaagtgctttgtggtacctgaggagcccacccctagaccaaacctggtgctgatccataaggatatgggctttaatggctgggctgaggtggtacaggtagaagcaggcacctgacaccttca

SEQ ID NO: 5214 - DNA, 1277 bp, Cricetulus griseus
atggctgcgcccgtattaaggggcgttcggaagctgctgaagctcgtggacttcacgcctgtcccgcggagacatcgatataagaagaaatgggctaccacagaaccagaatttcccagccagtcggcttgctctgcaaaattttgacatgtcctacggtatacaatttggggatctttggccatcaattcgtgttagtcttctctcagagcagaagtatggtgcattggtcaataattttgctgcttgggataatgtgagtgctaagctggaacagctgagtgccaaggactttgtgaatgaagccatctctcgccagaaactggagcctgagagtgacctttctccaactccatccccggactgcagtccaaacctccgatgcttcactttttcccagaggggatgtcaggcgcttccctcctgctagacttggcagcctaggtctcatggattactacctgatggatgctgcctccttgctacctgtcctggctcttggtctgcagcctggagacaccgtgcttgacctgtgtgcagctcctgggggaaaacactggcattacttcaaactggctgttgccgcaatctagctgccaacgatctctccacttcccgaataggcagactgcaaaaggtccttcacagttatgtgcctcaagatatcagggaagggaaccaagttcgagttacctcatgggatggcaggaagtggggagaactggagggggacacctatgaccgagtgttggtggatgtgccgtgtaccacagaccgccactcccttcatgaggaagagaacaacatcttccagcggtcaaggaagaaggagcgacagatgttgcctatgctgcaggtgcagcttctcgcggctggactccttgccaccaaacctggaggtcacgttgtctactctacttgctctctgtcacacttacagaatgagtatgtggtgcaaggtgccattgagcttctggccaatcaatatagcatcaaggttcaagtggaagacctatctcacttccgaaagcttttcatggacacattctgtttcttcccatcctgccaggttggggagttggtaataccaaacctcatggctaattttgggcctatgtacttctgcaaaatgcataggttgccatagtgtcaccgtgtccctgaagtaggaagacaatgactcattagggatccggacagaatcagtgaattaagcccatggtttaagatgtaaacttgggaagaaacaatctaaccaataaagttgttgaagtgct

SEQ ID NO: 5215 - DNA, 1277 bp, Cricetulus griseus
gtgtgcaccaagtgaagtggaagtggggacacaccctcctgtcaccgccccagttggcggggcgggctgagcccacagcgggctgggctctagcggcaggaggatgcgtggctgacgccaggagctcgggccgggcagaaggatgctcccgagcgggctctatctgggacggtcgctgctgctgccgacgatccgagcccgtgaccgtgcgtgtctgaggctacggccacccacaccccaggttttatatatgaaactgtgtggaaattcaaaatactaccaagccctccactatggaacagtgatgccacctgatgaaataacagttaattatagacatggtcttcccttggtaacactcactctgccatccagaaaggagcgctgtcagtttgtagtcaagccaatgttgtcaacagtaggctcgttccttcaggacttacaaaatgaagataaaggcatcaaaactgcggccatcatcacagcagatggcagtgagattccagcttcaacgctgatggacactttgctaatgaaaggttttaaactggtcattaacaaactagcctatgatgttcagtgtcacaagaaagagaagccaactgaagagcacatgattgagctagagaacctgaaatccttggttcacagactatttacaatcttgcatttagaggaatttcagaagaaaagggagcgccatctgatggcaaagattgaccacctgaaggaacagctgcagcccctggagcaggtcaaagctagaatagaagctcggtcagaagccaaaaccagcggtctcctatgggctggcttagctctgctctctgttcagggaggggcactggcctggcttacttggtgggtgtactcctgggatatcatggaaccaatcacattcttccttacgtttgcaaattccatggtcttttttgcatacttcatcataactcgacagaactacacttactcgtcggttcggagcaggcagtttctgcagttcttccacaagaaatcaaagcaacagtgttttgatgtggaacaatacaacaagttaaaggaggacctcaccaaggctacagaatccctggagaacgtgcgccactccctccattttcgaatgccaggagaactcaacaagaagaattagtcttaagttttaaacattatggggctatgggccaattctgtgacttaccaaccgaacatttttaaggtcatgttcatttccatttgatggtttcagacattgtttgattaataaatatgtgtggaac

SEQ ID NO: 5216 - DNA, 1277 bp, Cricetulus griseus
tcctgaattgggctagcagagggttattaaggctggagtgggaggatgcccagggtattggggtcaggatggcattagtcctactgaagccaggctgggctgattcagcattctgcatgccccagccaacccccaaccccgacggctcttcacttccttgggcagagatgggagatggcgccggtgctgcccgtggtgctgcccctccaaccccgtatccgtctggcgcaggggctctggctcctctcctggctgctggcactggccggtggcctcaccctcctctgtagcgggcacctcctggcacagctgtggaaccttggcaccttcctggctccctcttgtccattccctgccctgccccagactgccctggcagcaggagcggtggctctaggcacaggactagggggcgcaggagccagccgggcgagtctggatgcagctcgataccctccttggcgaggggtcctgagtccactgctggcagctggcacagctgcaggcggtgggttgctggcccttgccttggggctaaccctgattttgcctgtaagtctgcaccagggactggaggaaggtctggaggctgccttggttcactacaaggacacagaggtgcctggctactgtcaggccaaacgactgatggatgagttgcagttaaggtaccactgttgcggacgtcatggctacaaggattggtttggtgtccaatgggtcagcaaccgttacctggaccccagtgaccaagatgtggttgaccggatccagagcaatgtggaagggttatacctaattgatggagtccccttctcctgttgcaaccctcactcaccccggccttgcctgcaaagccgactctcagatccctatgcccatctgctcttcgatcctcgacagcccaacctaaacctctgggcccaagggtgccatgaggtgctgctggggcacctgcagggtttgtcgggcacactgggaagcatgctggctgtcaccttcttgctgcaggctctagtgctccttggtttgcggtacttgcagacagcgctggaggggcttggaggagtcattgatggggaaggagagacccagggctatctttttcctggtgggctgcgagatatactgaaaactgcatggctacagggagggactgcccacaagccagcacctgaagaggccctaccagaagaggaacctcccaaggaggttctacctgaggcctagtaacctaaagtgtggggggcggggaagtggacaaatatggaaaactt

SEQ ID NO: 5217 - DNA, 1277 bp, Cricetulus griseus
aggttttctacttataaaacacaatgactactgatgaaggcaccagtaacaatggagaaaaccccgcagccaccgtggttgaacaaggagaagatattactaccaaaaagatagaggcgtattaaagattgtcaaaagagtggggactagtgaggaaaccccgatgattggtgacaaagtttatgtccactacaaaggaaaattgtcaaatggaaagaagttcgattccagtcgtgatagaaatgagccatttgtgtttagccttggcaaaggccaggttatcaaagcctgggacattggggtgtctaccatgaagaaaggagaggtctgccacttactgtgtaaaccagagtatgcttatggctctgctggcagcctccccaaaaattcccctccaatgcaactctcttttttgagtattgaacttcctggtatttcaaaggagaggacttatttgaagactctggcattatccgaagaatcaaacggaaaggagagggctactccaatccaaacgaaggggcgacggtggaggtccacctggaaggctgctgtggtggaaggatgtttgattgcagagatgtggtgttcattgttggtgaaggagaagaccacgacattcccattggaattgacaaagccctggagaaaatgcagagggaagagcagtgtgttttatatcttggaccacgatacggttttggagaggcagggaagcctaaatttggcattgaacccaatgctgagcttatgtatgaagtcacacttaagagcttcgaaaaggccaaagaatcctgggagatggacaccaaagaaaactggagcaggctgccattgtcaaagagaagggaacggtgtaacttcaagggaggcaagtacatgcaggctgtgattcagtacgggaagattgtgtcctggctggagatgagcgagaccgcagggtgtacgccaatatgttcaccaagttcgcggagcgggatgcaaaggaagcagccagcaaagcaatgagcaagaagactgtagaaggagaggcctgtaaaagatccgagaggcaggccatggaagaaggaaaggctgaaggccatgtatgacgccacgccaaggagggaagagagtcctaatgaactcggccctccttgctgggctcacacccaactcaggactgaacagtgtctagtgtaaggtttgttacagtctctgggattctggaagcaaatggcaaaaccaatagcttcccaaaataaccaccctgctgctgcccaggggtggggtggggg

SEQ ID NO: 5218 - DNA, 1276 bp, Cricetulus griseus
ttttgttctgtttcggtttggtttggtttggtttgagtcagtttatcgagacagggtttctctgtgtagctttggagcctgtcctggcactcgctctggacaccaggctggccttgaactcacagagatctgcctgcctctgcctcccaagtgctgggattaaaggcgtgcaccaccatggcacacacctataatctcagcactaaggaggtagaagcaggaggacctttctgagtggctctggaagctatctcagcaagtatgtgaggactcaacagagcataaggaatgagcagatggccatcgtcctggaaactgcagacgggattgtgggttgaaaaaaccattacaaataggacacatcttggaggctttcttcagaactggactagaaccaaggtttccaggctcctggctcagaagaccaagccagcgtgctttgatgaatgttagctgtttgcagagaactgggtggtggcatgtttgaaccaaatgtgagaaaagccagaagaaactgagctggctagtgtgggccaggtggccagctgtggaagatccttgacctggcagctgcttagcagagcctgcccactcaagtatattccttgtaaagccaaaatgctgaactacctgcttctgcctcatgtgttgacacccctttccaaagatgatggagtaagtgtgagccaggaagaagttgagatggtgggcaatgatttgaccctcaatctctccttccacagcccaagaggtaggtggtgcttcccactcagaccccatcttgtcaggcctccagctgcccagtgtacactgtcaatgcttataccaaatagggcatgtgcagctggtgtctgtcagggacagcccagtccctgccttgtagttgccagggagaagctgcaacaattgttccagtgaatggttgaaagggctgtttgatacaaggccttcattccactcctgtggctttccaagttcctgatgaggctgcaaaggctccatccctacagaaaaccaataatgtaaatagaaagccaagcttccaagcatggtttgcagaggttggtgatgaatgtgaagccacccacaggatacatttgaatctggttttctgtgctttgtcatttgactcaataggaacttttgttacttaactctgtgcataacttatttaatgtactgtataaatgaaccaaaacttgttaaatacgttatttagtttgttctacttaaagtagttaataaagatgatatattcctttctgactaacaaaaa

SEQ ID NO: 5219 - DNA, 1276 bp, Cricetulus griseus
gctgctgtcatggttcgaccgctgaactgcatcgtcgccgtgtcccagaatatgggcatcggcaagaacggagaccttccctggccaatgctcaggaacgaattcaagtacttccaaagaatgaccaccacctcctcagtggaaggtaaacagaacctggtgattatgggccggaaaacctggttctccattcctgagaagaatcgacctttaaaggacagaattaatatagttctcagtagagagctcaaggaaccaccacaaggagctcattttcttgccaaaagtctggacgatgccttaaaacttattgaacaaccagagttagcagataaagtggacatggtttggatagttggaggcagttccgtttacaaggaagccatgaatcagccaggccatctcagactctttgtgacaaggatcatgcaggaatttgaaagtgacacgttcttcccagaaattgatttggagaaatataaacttctcccagagtacccaggggtcctttctgaagtccaggaggaaaaaggcatcaagtataaatttgaagtctatgagaagaaaggctaacagaaagatacttccccagcccctgtataattctaaacaattagaattattttcattttcattagtctaaccaggttatattaaatatactttaagaaacaccatttgccataaagttctcaatgcccctcccatgcagcctcaagtggctccccagcagatgcatagggtagtgtgtgtacaagagaccccaaagacatagagcccctgagagcatgagctgatatgggggctcatagagataggagctagatgaataagtacaaagggcagaaatgggttttaaacagcagagctagaactcagactttaaagaaaattagatcaaagtagagactgaattattctgcacatcagactctgagcagagttctgttcactcagacagaaaatgggtaaattgagagctggctccattgtgctccttagagatgggagcaggtggaggattatataaggtctggaacatttaacttctccgtttctcatcttcagtgagattccaagggatactgcagtgacagaacaagaataggctgcttctacaaaaaaaaaaaaaaaaaaattaagtaatggcaagcataatagctactgttaagaattcagagataatgaattgagaatggatattgcttactaaactttaaaaaaataaaaaaacacacacacacacacacacacacacacacacacacacacacac

SEQ ID NO: 5220 - DNA, 1275 bp, Cricetulus griseus
cagcctaaactactgaaatttgtgattgtatgtttgtgtgaacttcagtttaatgaaagattcttaatggctctttgcattactctacttggtgttggggttttctttttttttttaatatgtggggggtgagtcagagcatgtagtcaagataccttttcttaaaattaccattctagaaactatcaatggatgtggcattccatttccctagtaccaactaggttaattggaaaatttcagttctgagtgttcacgttactttcccagtttggtatcagaactcagagcacatgctgtggctggcagtaaaatccaagtgtgccatgcctatagtctgtatataaaatgttggctaaacagttactgcactggtaccatggctactctggtaccaagtacatgactaagccaaaatcactttatcattttgtgccaagatacactgttggtgcctggacagtcctttctacctcattgcttggccctttgagcaaccttgctaaaaggtgcttgcatactgagtactgccaacttccaagtgacttggatattttgctttcaaaaccaagatgcatttatagttcattttcgagtttttcacccaaggaggattgtgcattccagcatcaaatgtgcttcatttaaaacaacagttgctggagtatacttccattctaaaatcttcatttgctagatcttcttaaccacttagtgagctttcccagttgctgctagtactttgatagggttccacccgtgtttagtttttccatcatcttaatgtatagtttcaggtctcactagacaatcctaattccactacatttctgtttggctccaacatcccacttagcttgaccagtctagttttgacatatgcttgttggaggtcaccaatattacttgtacaatgctgtcaccatgtgacatccgtatggattttggtgttgtatcacattgcattcaatcagctgtgattatgcttagaaatactatagtaactagatgcagtgtgaaccttttccattaacagtaagtcagtggcttaaatgtgattatggtcctgcaaggtgatacttgctaaaatatctaaaacatgttttgttgttgtaactgaatcatttttttaaatttataaagctggaagtgatcaaatgctgtttttcattgtcaacagtggtgtgtcattttatatatgttcctaatgcttacggaactctcccaaaataaagttattcaaaaagagaaagaaaaaaaaaaaaaaaaaaaaaa

SEQ ID NO: 5221 - DNA, 1275 bp, Cricetulus griseus
gttcattctgattcttggattaattttcgtggggattttgcaacctttttttctctcttgcttttttcttgggaagggaagtcccgccgcctccggaagactttggaagcttctgatcgcacggaaaggtgtttttccccttgggttgagtctgggctcatacttcgcccttggggacctttcgtgggggtccgctgtggagtgtgactgcatcatgacgctggaagagctggtggcgagcgacaacgcggctcagaagatgcaggcggtgaccgccgcggtggaacagctgctggtggccgcgcagcgtcaggatcgcctcaccgtgggggtgtacgaggcggccaaactgatgaatgtggaccctgacagtgtagtcctgtgcctcctagccatagacgaagaggaggaagatgacatcgccctgcagatccacttcacactgatccagtcgttctgctgtgacaatgacattgacatcgtccgggtatccggtatgcagaggctggcacagctcctgggcgagcccgcagaaaccctgggcaccactgaggcccgagacctgcattgcctcctggtcacgaactgtcacacagatacctggaaaagccaaggcttggtcgaggtggccagttactgtgaggagagcagaggcaataaccaatgggtcccttatatctctctggaggaacgctgacactctacaaacatctaaagcaactgttgagttgctgtcccgtaaaaaattaaataaaatacatatttgaccccccctcatccccaagaacaatccctcaaaagccaccctacccgtgagaccttccgggaggggcggagtcaccgcgactgagatgagaggggagtgcgcgcccgcccgccggctctctgggcggtggaaccggagcagcaccgcaggtggtcgccgagacaggaaggaggggagcccaggccggaggaggagcccggggcgttggagcccgggcctggggatcctgcagccagcctctgcacgcagccgcagcggggagcgccgagggtctgcactcgacgccgcaggcaggggcgaggcgtccggaccctgcgggacagtgaactgtgcacggcggaagaggcgaccgtagccgcgggagccgggacgaccccgggactgcgactctgacacgaatctattttgttattgcgctgagcaaggcaggtcgcttgcgttattttttaagtttctactacagagacattctaataaactcgttaagcctaccgaaaaaaaaaaaaaaa

SEQ ID NO: 5222 - DNA, 1275 bp, Cricetulus griseus
ggtgaccgccgctgaggcctgctgcagctgggctcgggctcttctgccgagctaccatgtcgcagagcggggaggagaacctgcagggctcctgggtagaactgcacttcagcaatgggaatgggagcagtgtaccagcctccgtctctatttataatggtgacatggaaaaaatactgctagatgcccagcatgaatctggacgaagtagctccaagagttctcactgtgacagtccacctcgatcccagacaccacaagatatcaacagagctgaaacagacagccacagctttggagagaaaaacagcactctgtctgaggaagattacattgaaagaagaagagaagttgaaagcatcttgaagaaaaactcagattggatatgggattggtcaagtcggccagaaaacatcccccccaaagagttcctttttaaacacccgaagcgcacaactactctcagcatgagaaacaccagcgttatgaagaaagggggtattttctcagcagactttctgaaggttttccttccgtctctgttgctgtctcatctgctggccattggattggggatctatattgggagacgcctgacaacttccactagcaccttttgacggaagaattggatctgacttttgttcacacagtgaggattcatgtctgaactgtgacagataactgaagagctagcatgatccttgggtgtctgcactacatgtgtttatttgttctgtaaatgcagtgttcctgatttagtgaaacagaatagactctaatatcatgacttctaattatacctatgggatcaattaataagcatgtcagactgatgcctactgtagcatttattagtacattttctttgaatattagatataaatagtataaataattttaatattaatctagttaagacactttacacttcaaaagaatgagtaagtgatatcaaaatcattaaagggtttggtcccaaaggaatattgtggccttataatcctattacatagtagaaactgtctattttaaaagactagaaatgagaagaaaataagtctttgccaaatcctttggagattattggatttgcatatgggttaatccatacccagagattctgtcaacccaggcatatgcccagtcttcctcttttctatagcatgttcttaaaggctgcctccttgacatgctgtatatatcctgttgtatttgtttcattgtcccacacttactcaggtgagttcaaataaaagtaacgttttaacagtc

SEQ ID NO: 5223 - DNA, 1275 bp, Cricetulus griseus
  modified_base (601)..(601): a, c, t, g, unknown or other
ttcccgggatccccgaagtcggggcatcctccactcgctcttctgctgtgtctgccgagatgatggggaggcccggcctgcccacagtggggctcccctgctggtggaggaaaatggcgccatccctaagaccccagtccagtacctgcttcccgaggccaaggcccaggactcgggacaagatctgcgtggtcatcgacctggacgagaccctggtgcacagctccttcaagcctgtgaataatgctgacttcatcatacccgtggagattgatggggtaattcatcaggtctatgtgctgaagcggcctcacgtggatgagttcctgcagcgaatgggcgagctctttgagtgtgtgctgttcactgccagccttgccaagtatgcagaccctgtagctgacctgctggacaaatggggggccttccggtgcccggctgtttcgagagtcatgtgtcttccatcgggggaactatgtaaaggacctgagcaggctgggccgagacctgcggcgggtgcgtcatcttagacaactcacccgcctcctacgtcttccatccagacaatgacaacatgagtgacactgagctacatgatctnttaccctcttcgagcaactcagccgtgtggacgacgtatactcagtgctaggcagcctaggcctgggagctagtgaggtgtctcggggccaggacctgcccctcaccaaggcccaagcctcttccccatcagactgtgggagcctgcctgtgctgttagcaaaacccatggcctatgcaatacccatggccctggggaagagggtgtctcacctgccaggctgcatcatttaagcccccagtctccccaaagcttgggggttggcaggatttcctgtggtgccgtataaatatgtatatgtgtatatagatttttaagggagggcgagaggagagggtggggatagacctcctccctcaccccttccctgggcccagaaataggggggggagggagggaaaggatttttacattttcaaaacttttctgaatggaacaagctgggctgtgaggggtcacaggccctgtctctgtctgtcccagcccttttactctagtcatccaaaaaacacttgagtaccttctgtgcccagcagtgagctaatcccaccagctgagtgggagggggccctgcctcatcactggtgcctcacccctaaaccccagactttactggtgccttcagagtatctgaagcaggtggaaccttcttatggggttcagaaggtctccaa

SEQ ID NO: 5224 - DNA, 1275 bp, Cricetulus griseus
ccacccaacccaccccttcagtccctctcttgaggcaaggtggttggggctgttgtggggacaggtgacccaagcaggctcctagttctggagagttgggcgagtgttataacctttttggcctctccatcagttcagctttcccccaaagcatggtttggtaccagtcttctcatttccttctagagcctgagaccaatgcttaagtttgggggacacagtcaccatccccctggtactgatgcttgctggattttcgggaaggcattttgctacccagtctcttttcactgcctggggatcagtcttttgtttttcattgtttgatgttcccatgttcccactgcatgctatgacttccctactcctcaaagaagagactcctttgcatgtctggagacagtagggggtgattctagccatagacaaactccaggccagaccccctccaccctggttcagcctgggcagcttggggctgagccaccaggaccaatagattttaagtcttggcatttcagtccaagaaggcttctaagtggactttaggacctgagaggaagaggggcctctgtgggtgctgggtactccagaggtgcccctggtggaagggtgggtcagtggtcctagcaggaagggagacccagcaaggccattcttgctgggttgagtcaaggagctagaacaagggaccaagtggctgtaaagtctcaagccaatgatggggcttctccactgggctcctgtagtcctcaagtccctggcctccaccttaccaggtgccacttctcagaaggccactgcccaggcccccaggccgccccttcgtggcccagagactggttaaagccccccagtgcctccttgtgcatagaacttcctctgcccccgccctcggctggtgtagaatagccaatagtgtagtgtggtgtgcttttatgtgatggcgagtgggcaacgggcggtgggctgtgccgtctgtccttgaatctcaatctgcctgcgcggcccgtgctgtgtttcgtgctgtgtccacaacgctgcgaagacccctccctgtactgactcctctataaaaagcttctcttcgcatagtcacgtagctcctgcctatcccccttctgatatctcttgcaagttttatactctaatatttatatggcttttttcttcgaaaattaaaaataaaaaaaggtttcttctagaaaaaaaaaaaaaaaaaaaaaaaaaaaaaaaaaaaaaaaaaaaaaaaaaaaaaaaaaaaaaaaaaaaaaa

SEQ ID NO: 5225 - DNA, 1275 bp, Cricetulus griseus
aagttccactttaagccatgagatgtctggtctgaactggaaaccttttgtgtatggcggccttgcctctattgttgctgagttcggcactttccctgtggaccttactaaaacccggctgcaagtacaaggccagagcatcgatgtccgtttcaaagaaataaaatatagagggatgtttcatgccttgttccgaatctataaagaagaagggattttggctctgtattcaggaattgctcctgctttactaagacaggcatcgtatggcaccatcaaaattggtatttaccaaagcttgaaacgattatttgtagagcgtttagaagatgaaactctcctaattaatatgatctgtggggtagtgtcaggagtgatttcatctactatagccaaccccactgatgttctaaagattcgaatgcaggctcaaggaagtttgttccaagggagcatgattggcagcttcattgatatataccagcaagaaggtaccaggggtctgtggagaggtgtggtcccaactgctcagcgtgctgccatcgttgtgggggtagagctgccagtttatgatattaccaagaagcatctgatactgtcaggaatgctcggagacaccattttaacacactttgtttctagctttacctgtggtttggctggggctttggcatctaacccagttgacgtggtgagaacgcgcatgatgaatcagagggcaatagtgggacatgtggacctctacaagggtactttggatggtattttaaagatgtggaaacatgaaggcttttttgccctctataaaggattttggccaaactggcttcgacttggaccctggaacatcatttttttattacatacgagcagctcaagaggcttcaaatctaagaactgaaaatctaagcccagccctgccactctttctactgttctcctgtgtgttcctaatgtattttgacaaagatgttatgtgtttacagaaccagctgaagagtagtaggatgacttaaggctgtttatgcgtttttgttacctcttcccgaagagaagtattaacattgagagtgtaaccccagattggtgtcttctgtgaagatggatactgatgggtgacattcaaaagggccttcttttcaaacgtgggttaaatgtagttggttatccccagaacaggcctcagcagatggctaccagcacagttactgttatgtatgttatagaccttggttctcattaaagtatttattggccagaaaaaaaaaaaaaaaa

SEQ ID NO: 5226 - DNA, 1274 bp, Cricetulus griseus
tttcacacacaggccccaggaaccggagctgagtgtgaatgtctgggcaggaatgcctctgggtccttcaggctggggtgaactggaggagtcaaaggcccccgatctgccccatgagccagggccctcaggcctagacctctttcacagacttctgctgctggaccattcgttggctgaccatctgaatgaagattgtctgaatggttcccagctgctggtcaattttggcctcaaccctgttgctcctctgacccctcgtcagtttgctctgctatgtccagccctgctttaccagattgacagccgtgtctgcatcaaaaccccagctccagcacctccaggagacgtactgtctgccctgcttcatagtgccctggcagtcctgctgctcagcctccctcgctcccctctccctgctgctgctgaggctcctgggacctcgtgtgttacggccggtgttaggcttcctaggggccctggccgtgggcaccctttgtggagacgcattgctacacctgctgccccacgcacaaggagggcaacacacaagacatagtgagcaaccagaggaggatctggggtccagggctatcagtgcttggtggcctcttcctgctcttcgtgctagaaaacatgctaggacttgtgcggcacagaaggctcaggcagtatcgcatggatggttctcctgggagatagccttcacaacttcactgatgggcttgcactaggtgccgccttctctgacggcttctccagtggcctcagcaccaccctagcagtcttctgccacgagctgccccatgaactgggtgactttgccatgctgcttcaggcagggctgtcattccggaggttgctgctgctaagccttgtttctggagtcctggggactggggggtggcagccctccgggtggggcgtcagcttgggccctgttcccctcactccctgggtgtttggggtcacggctggggtcttcctctatgtggcccttgtggatatgctaccagtcctgctgcgtcctccggagcccctgcctgtgctccatgtgttcctgcaggggctggggctactgctggggggcagcctcatgcttactatagccctgctggaggaacagctactgcccatggttcctgatagctgatgggggccagtggcaaaggatccaggctgcccttcccttcccccaaccacaggaacggaggcgggacacagggccagtaggagcaataggactttaattaaacagaacccgtacccaaaaa

SEQ ID NO: 5227 - DNA, 1274 bp, Cricetulus griseus
tgtcgtgaatgagaggccccggtgtgggggggtaaaggaaatgcctgatttgaatctccgaaagaacccgacggctttttaatacccgaccgctctgacgctcctatggtcgcctgagcgaccgtcgcctctgtgggacggtagtctggaggcggtggcctctggcggcaggtctcgcgtcaggcactgcggtgggcgcccccgcggcaggggtcctcgggcgccggaagattgacggggacggcagggatggcggccgggcagggaggctggctgcggcccgctctcgggctgcgcttgctgctggcgactgcgtttcaagcggtgtctgctcttggggctgagttctcatcagaggcatgcagagagttgggcttctccagcaacttgctctgcagctcttgtgatctcctcggacagtttaacctgcttcagctggaccccgtttgcagagggtgctgtcaggaagaagcacagtttgaaaccagaaagctgtatgcaggcgctatccttgaagtctgtggatgaaaattggggcggttccctcaagtccaagcttttgtcagaagcgataagcccaaactgttcaggggtctacagatcaagtatgttcgaggttcagaccctgtcctaaagcttttggacgacaacgggaacattgcagaagagctgagcatcctcaagtggaacacagacagcgtggaagagtttctcagcgagaagctgcaacgcatataaagcttgcttttctgcacttgttgataccactaatgacattgctttgtaatcggcttctggctaattatgcaaataatagcttctgataattggcccagttttataaacaacagaatcttcaataagagaagttaataaaggagacacctcctttgctgtgtgctcctttgaaagcaacagaaaaccacaaaacagtaagatgattggacctcagcaacgagcctgctccttggagaccctcacatcttttgtattgcccagctttctttttagtagaagtatttgtgccacatgaaatttttgtagccttattattatgggacagattgaaaatatacagtaagaatgtaaactcataaaggtttgcattaatgaggattacacagaaaacctttgttaaggatttgtgtagatctgataattggcagatttttatgtttttaaatattcttacagaaaagttccatttaagaatgttcacttgtaggaccaaaatacaaataaaaactttcaaaaatggtaaatttaaaaaaaaa

SEQ ID NO: 5228 - DNA, 1274 bp, Cricetulus griseus
atggtgctcccggccaagaggctgtgcatcgtgccgaccatggagggcgttcgctgggccttctcctgcggcacctggctgcccagtcgaaccgaatggctgctggcgctgcggtcgatccagcccgaggagaaggaacgcatcggccagttcgtgtttgcccgcgacgccaaggcggccctggctggtcgtctgatgataaggaagttagttgcagagaaattaaatatcccttggaataacattcgtctgcaaagaacttcaaaaggaaagccggttcttgccaaagactcgttgaatccctatcccaatttcaacttcaacatctcacatcaaggggactatgcagttcttgctgcagaacctgagctgcaagttggtattgatataatgaagactagttttccaggtcgtggttcaattccagaattctttcatattatgaaaagaaagtttaccaacaaggaatgggaaacaatcagaagttttaatgatgaatggactcaactggatatgttttaccgtcattgggcattgaaagaaagctttataaaagccattggtgttggattgggatttgaaatgcatcgacttgaatttgctatatctccattaaacttgaatataggccaggtttataaggaaacacgtttgttcttggatggggaagaagaaaaagaatgggcttttgaggaaagcaaaatagatgagcaccattttgttgcagtggctcttaggaaacctgatggatctagacatcaaagtgtttcatatcaagatgattctaaaccatcccagaggcagttcaccatccttaacttcagtgatttgatagcatcggctattcctatgacacctgaggatccttcattttgggactgtttttgcttcacagaagaaattcttattcgaaatggtaccaagtcatgatagaatccctgaataaagaaaagaaaagggggcagtcttctgtgttcactaaaataaaatgctggatgtggtcaaattttatttatcaaaatatttttaaagacccaaatgcttttaaagagcagatttccagttcagtggctcctttgaatatgtttacttcttactgtccagaattgtaattgatagaaatgatgacagaatcttccaatgataaatgtgctttatagaaagaaaaaaagtgtaaacttgctgaaggcaagcattttcacatattaagatgctaagttaccatcatattgatgagagaatctgctatatggttgtagtgcatgtcttcagga

SEQ ID NO: 5229 - DNA, 1274 bp, Cricetulus griseus
  modified_base (1126)..(1126): a, c, t, g, unknown or other
  modified_base (1135)..(1135): a, c, t, g, unknown or other
ccgtttgggctggagagaaagggacgcgggggtggccacggcagggttcacctccatttctgctcatcatgggagagatcaaagtctctccagattacaattggtttagaagtacaagttccccttaaaaagataatcgtagatgacgatgacagtaagatctggtcgctctatgacgctggtcccagaagcatcaggtgccctctcatcttcctccctcctgtcagcggaactgcagatgtgtttttccagcagatcttggctctgactggatggggttaccgggttatagctttgcagtatccagtttattgggaccatcttgaattctgtgatggattcagaaaacttttagaccacttacagttggataaagtccatctgtttggggcgtctttgggaggttttttggctcagaaatttgctgaatacactcacaagtctccaagagtccactccctcatcctctgcaatgccttcagtgacacatctatcttcaaccaaacgtggactgcaaacagcttttggctgatgccagcatttatgctcaagaaaatagttcttgggaacttttcctctggcccagtcgacccaatgatggcagatgccattgacttcatggtggacaggctagagagtttgggtcaaagtgaactggcttcaagactaactctgaattgtcaaaattcatatgtggaacctcataaaattcgggacatccctgtaaccatcatggatgtgtttgaccagagtgcattgtcaacggaagccaaggaagaaatgtacaaactgtaccctaatgcccggagagctcaccttaagaccggaggcaatttcccctacctatgcaggagtgcagaggtcaatcttttatgtgcagatcatggaaccaaatacgctgccattgacccgtcagtggtcagtgcagaggagctcgaggtgcagaaaggccgccttgccctcagccaggaggagccatagatggagctttcgacacgctgaaccagcgtcatcttgtacaatcagttcaggttcatcgggcacactggtcctcactgttttggaagtaggactgatggtcctcatgacctgcatcagctcttctaggccagtgtgactgtccctntccaggttnttgggtttgttgttttttttttaactttgtaatttgaacaacttttaaagactcccattttaagaattgtgaaaattttgctaccaaaagccttctcccctgttgtgttcatttggaaggcttgggctcctgtggcgtt

SEQ ID NO: 5230 - DNA, 1274 bp, Cricetulus griseus
  modified_base (836)..(836): a, c, t, g, unknown or other
atgatgatgaaggaccctacacgccatttgaccccccttctggcaaactggaaatcgtgaaatgggcattcacctggccactgagtttcgtcttgtacttcactgtccccaattgcaacaaaccccgctgggagaaatggtttatggtgacatttgcttcttctacactatggatcgcagccttctcctacatgatggtgtggatggtcaccatcatcggttacaccttggggatccctgatgtcatcatggggatcaccttcctggctgctggaaccagtgtgcctgactgcatggccagccttatcgtggccagacaagggatgggggatatggccgtggtccaattccatcgggagcaatgtgtttgacatcttgattgggctcggtcttccctgggctctgcagactctggctgtggattacggatcctacattcggctgaacagcagaggactcatctactcacatctacatgaatttccaagctccattttgaacagtgactgagattctagaacaaaactggctgctaactggcccaagccaggcacaacttactccaatccctcctcctttttaagttatttcacagaagacaccctaatttatgaccagagactttgaggaaacaggagagggtccgctgatggcaggaagtgtcgggattatttgttcagggtgattcctaggttactgagtttagggaattgttttacttgagggggctcttcgtttctttacttttctttagtagacgaaggagtcacctgtgtcttctctcactgggctctggcttaatcgatgatccacagattgtactgtctgctggggtnaattccaggactgttgggaatttaaccattagttgagaaaccactgagcaagaccaccaggaataagtgcatgacatgacaatgccaccaccaagctggccagtttcactcctcccctcccggagggatggccagggagggagaaagcagagaactgatgccttggaaaccacagaatgtgttaactgcagactgtctcaagggcacaagttattgtgaacatttcaccaaccaccgctcagccgccctgctagattttctagaatgctgaattattatgcagaataactccaccaagttgagacacacccatgcttgttacacttgtatttattgaaactgtggattcttgcccgccgtgctgtcccttgtatttactttaagcactgatcacttatcacccattcggtatggtttcccaatcccttgtacacatcc

SEQ ID NO: 5231 - DNA, 1274 bp, Cricetulus griseus
acagatgctgatgagtgtgtactgttcgggcctgctctctgccagaatggccgatgcctcaacacagtgcctggctacatttgcctgtgcaatcctggctaccactacgatgcctccagcaggaagtgccaggatcacaacgaatgccaggacatggcctgtgagaacggtgagtgcgtgaacacagaaggctccttccactgtttctgcagtcccccgcctcaccatggaccttagtgggcaacgctgcgtgaacagtaccagcagcacggaagacttccctgaccatgacattcacatggacatctgctggaaaaaagtctccaatgacgtgtgcagccagcccttgcgtgggcaccatactacctatacagaatgctgctgccaagatggcgaggcctggagccagcagtgtgctctctgtcctcccaggagctccgaagtctatgctcagctgtgcaatgtggctcggattgaggcagagcgggaagcaggggtccacttccggccaggctatgagtatggccccggcccagacgatctgccgtacaatctctatggcccagacggggcccctttctacaactacctgggccccgaggacgcggttcctgagcctcccttctccaacatggccggtcagctggaagataacacaccagtccttgagctccctttgcagcactatgtggctagccatcagaccctggctgccttcgaagggcttcaggctgcggaatgtggcatcctgaatggctgtgagaatggccgctgtgtacgtgtgcgggagggctacacttgtgactgttttgaaggattccagttggatgcagcccatatggcctgtgtggatgtgaatgagtgtgaagacttgaacgggcctgcggcactctgtgcgaatggtcactgtgagaacacagagggccccctatcgctgccactgctccccacggttacgtggcagagccaggcccccaacactgtgcagccaaggagtagaagtgaagggtcactgtgagcatctatctggaaatggcttcagccacaggctgggaacttatgattgctcccctggctgggaggacatcgtggctgggaagacagcatgatgacatcaggccagggctctgtagccaggttctgccagccttgcctgcttggttttcatttcttccagcttagctctggttgtgagcttccgtcactgcctctatgccattgcgttggctcagacaacacaaatatgttaatgcttcagtcactggccatgagac

SEQ ID NO: 5232 - DNA, 1274 bp, Cricetulus griseus
cctactccctgtgtgcctggcgccctccctccttatagagcgccgcagcggggccgcgcttggacgaggcgacatggcggcggcgctgctgctggccctcggcttcgcgctcctgtgcggccaaggcgcctgcgcggcggcgggcaccgtcgtaacctccatcaatgacgtcggctccaagacacaccttacctgctctttgaacagcagtggtgtcgacatcattggccaccgctggatgagaggtggcaagatactgcaggaggacacactgcctgacctgcagacgcagtacacggtggacatagatgaccgctctggggactatgcctgcatcttccttcctgagcccgtgggcaggagcaacatcgttgtggaggggccacccaggatcaaggtcgggaagaagtcagaacattccagtgagggagaaaatgtgaggctgatctgcaagtctgagtcatctcacccccctgtcactgagtggtcctggtttaagacctctgactctggggaaccagctgatcaccaacagctctgagagcaagtacgtcgtgatatccacagctgacagatcagagctgaccatcagcaaccttgacataaatagtgaccctggtacctacatgtgtaacgccaccaacacccagggcagtgtccaggagataatgacactgcgtgtgcgaagccgcctagcagccctctggcccttcctgggcatcgtggctgaggtcctggtgttggtcactatcatcttcatttatgagaagcgacggaagccggaccagaccctggacgaggatgaccctggtgccgccccactgaagggcagtggtcatcacatgaacgacaaggacaagaatgtacgccagaggaacgccacttgagtggcagagtaggcggggtgggggtaatctgggcgcctaaccccagcccagcatctacctccactcccatactgtcctatcctgtcctaacccgtatctatccaccccaacctcctatcccaacctgggtgaagacagagcctcgccttgcagagtaagcccacctggaagaagcaagccacccgcaacacccgtttctagtttaaacgaggtttctatacagagaattcgttcattaggggtttctgttgttttcgatttttccctccctttttagtagtgtcactactgccctgtagagtgggggagtggggccttgtccttgtccatgaggccaggccagggctgggtctgctgggactccacaaataaagacctaccccacca

SEQ ID NO: 5233 - DNA, 1274 bp, Cricetulus griseus
  modified_base (812)..(812): a, c, t, g, unknown or other
  modified_base (937)..(937): a, c, t, g, unknown or other
ggccccgacccagacccgcgcgggctctcactcgctgcggtatttccaaaccaccgtctcccggcccggcctcggggagccccggtacatctctgtcggctacgtggacgacacggagttcgtgcgcttcgacagcgacgccgagaatccgagatacgagccgcgggcgccgtgggtgcagcgggaggggccggagtattgggagaggaacacgcggatcgccaagggcaacgcgcagaatgaccgagtgaacctgaggaccctgctcggctactacaaccagagcgagggcggctctcacaccatccagaggatgttcggctgtgaagtggggtcggacgggcgtctcctccgcgggtacagtcaggacgcctacgacggcgacgattacatcgccctgaacgaggacctgaggacgtggacggcggcggacactgcggcgcagatcacccggcgcaagtgggagcaggctggttttgcagacagacgcagggcttacctggagggcacgtgcgtggagtggctcggcagatacctggagcacgggaaggaccagctgctgcgcacagatcccccaaaggcacatgtgacccatcatcctggacctaaaggtgatgtcaccctgaggtgctgggccctgggcttctaccctgatgtcatcaccctgacctggcagagggaggaggaagaacagactcaggacatggagctggtggagaccagaccttctggggatggaaccttccagaagtgggcatctctggtggtgccttctggggaggagcagaaatacacatgccatgtgtaccatnaggggctgcctgagcccctcaccctgagatgggagcctcctcctcctcagtccactgtccccactcatggcaagtcattgtctgctctgggtcctcattggagctgtgatcattggagctgtggngttttttgtgaggaagaggagaaactcaggtggaaaaggagggaactatgctccagctccaggcctccagcttgaagacagctgcctggcatggacggagtgacagacaatgtgttcagccctctcctgtgacatccacggttgactctgcaacagtgtctgatgttccctgtgatcctatgggctcaatgtgaagaactgaggagcccagcccagccctgcacaccaggaccctgtccctgcactgcctgtcgttcccttccatggccaacacttcctgttccagcagacaggaggggacatctccactcctgtccacctccatgctcgccctgac

SEQ ID NO: 5234 - DNA, 1274 bp, Cricetulus griseus
cagaacatggaccttctagaaaaactccaggtagctcatgctaaaatccaggccttggaatccaacctagaaactcttttgactagagagaccaaaatgaaggctttaatccggaccctggaacaagataaaatggcttatcaaaagactgtggagcagatccggaagctgctaccagcggatgcgctggccaactgtgaatcgctgctgagagacctagcttactctaataatgacaaagccaagacaggaaataagccatagctccatgtggcctcagcagagagctcccttaatgtcgaccagaaatctggtgggacacctactactggtgtggagaccatcagtaggtgatgtagctctcctcagaacactccactcctaagccatcacagacatccagactggattttcctctggttgttgccaactatgtacataaatatatatatatggacataaagagtagtgcttttcaaatctaaacagtagatgtgtatcggagctaattttcttttcagtcaaaacttcgtgaaatccataccaaatggaagttgaagtgagatatccttttggacacacatggaattcttttttgttttctagctgattaggctttgcttgagacacacagggacaaagcaggacctgtggctgagtccacccacctcaaagtgaagacgaatgttgctaattttctagcagatagaccagcattgatattcgaactggaaatatcaggcctcaaagacacaactaagctcctaaattgtctgtagtagctatttgcctttttatttaggtgacttagacagtggtaaacagttgcttggtgttatatttaccaagtgacaaggtttgctattttctcacaaaatttatgggagcctttcatgtaattcttgtgaccttcagtttagaatagggaaataaaagtatgctcgatttcccaaagatgatataccatgttgagttgctttttatcttttgctcaataaccaaacacccaagaatcattttcccctttcatgtgaaaatttagaactgtgaaatgttcaggaacaaactgtctaaagtacactggaagggaagagaaatttctctaacccagttcaaacctggacaattttgtatttggactcctggcttctgccaggtacagatagcttatgagggagtgtgcatgcattctgggtgtctggatggaaagtaactttcctagttcacgttcagtccctacaacagagatgacttgacaacagtgcctctgaaca

SEQ ID NO: 5235 - DNA, 1274 bp, Cricetulus griseus
gaggaggaagaaagctcctctgagggcttagaggctgaagactgggcacagggagtagtggaggccagtggtggctttgggggttacagtgtccaggaagaggcccagtgcccaactctccatttcctggaaggtggggaggactctgactcggacagtgatgaagaggaggaagatgaagaggaggatgaggaagatgaagaagatgacgatgacgatgaggatggtgatgaggtccctgtgcccagctttggggaggccatggcttactttgccatggtcaagaggtacctgacctcctttcccattgacgaccgcgtacagagtcacatccttcacttggaacatgatctggtccatgtgactaggaagaaccatgccaggcaggcgggagttcggggtcttggacaccaaagctgagctgctggacatatctgtgctccagcccagatgggcagcacctgcccaaggcagggagaactccgggcagctgctggagacagctggagaagtcccagggccttcagcaatgctttgccaggacaggcccaggggttgaggtctgcctcactgctattgcctctttctcagagtcctgtttcctccccattagtccctgggctcagggcactgggtgggaggggagctgtccggtgctaccacaccatgccatcagtgggctagaccacagcagcagccagggacgggtcctggaagctcttggccagagagtgcctctccccctgcctcccaaccaggtctttggtggggggatcccaaagccattctggaagggctccagaggaaggtccagcctaggctcccacaaaattagcagcccccctcctgcacctctaggttgtctaaagaagcacagtgtaacttagggcaggctcctgaacctgcctcttcctgctttccacctccctaaatccctttctctggcccagtctttggcccttggttttctttctagattggaggtttccaagaggccttcttggggagtgacagcaggcacttccaatctgggcagctgcaggccttgtgcctcatcctctgcaggtccccatcctgggcagaggggcctggggctgggcccagagtccagccatccaggtgctcccttcccagtttgaattcaataaatctgtccactccccttttgtgggagtgaatgttttaacagccaaaaaaaaaaaaaaaaaaaaaaaaaaaaaaaaaaaaaaaaaaaaaaaaaaaaaaaaaaaaaaaaaaaaaaaaaaaaaaaaaaa

SEQ ID NO: 5236 - DNA, 1273 bp, Cricetulus griseus
gaaggtcccatcgcttggttctgggctgttcgtggtactgccggttacgactagtcctgccatccgcagatcccgagccggggtgcaccatgcccgcggtgctggggttcgaaggcagcgccaacaagatcggcgtgggcgtggtgcgcgacggcaaggtgctggcgaacccgcggcgcacttacgtcacggccccgggcacagggttccttccaggtgacacagcccggcaccatcgagctgttattctagacctactgcaagaggcactgacagaagctgggttaacctcccaggacattgattgcattgcttacaccaaaggtcctggtatgggagccccattggcttctgtagctgtcgttgcccgtactgtggcccagttgtggaataagcctttggtaggtgtgaaccactgcataggccacattgaaatgggccgcctcatcactggagccattagcccaactgttttgtatgtcagcggaggaaatactcaggtgatttcctactcagaacatcgttaccgcatctttggggaaactattgatattgctgtgggaaattgtctggatcgttttgctcgagtgctgaagatttccaatgacccaagtccaggctacaacattgagcagatggcaaagcgaggcaagaagctagttgagctgccatacactgtaaaggggatggatgtctcattctcagggattctgtctttcatcgaggatgtagcgcagaaaatgctggccacaggggaatgtactcctgaagacctgtgtttctccttacaggaaactgtgtttgcaatgctagtggagatcacagagcgagccatggcacactgtggctccaaggaagccctcatcgtaggaggagttggatgtaacgtgagactgcaggagatgatggcagcaatgtgccaggagcggggagcccagctctttgccacagatgagagattctgcattgacaatggagccatgatagcccaagcaggttgggagatgtttcaagctggacataggacccctctcagagagtctggaattacacagaggtacaggacagatgaagtagaagtgacgtggagggactaacaacactaacaggaccagaatagcttgccaagtggagtgctgatgtgggagtgaatcttggtgatactatggactcttctcctctctggctagtgtatggaccccacacaaggcttagggttcctgtggaaccccaagatgactctgaaaataaagagattgtttttgtacgttga

SEQ ID NO: 5237 - DNA, 1273 bp, Cricetulus griseus
atgttggtgatcccgccaggactgagcgaggaggaggaggcgctgcagaagaaattcaacaaactcaagaaaaagaaaaaagcattgctcgctctcaagaagcaaagtagcagcggcaccaccagccagggtggcgtcaaacgctcactgtcagagcagccagtggtggacacagccacagcaacagaacaggccaagcagctggtaaagtcaggagccatcagcgccatcaaggctgaaacgaagaactcaggcttcaaacgctctcggaccctagaggggaagttaaaggaccctgagaaggggcctgcccccactttccagccgttccagaggagcgtatctgctgatgaggacctgcaggagtcatccagacgtccccaaaggaaatctctatatgaaagctttgtgtcttctagcgatcggttgcgggaactgggaccagatggagaagaatcagagggccccggggctggtgatggcccaccccgaggttttgactggagctacgaagaacatggtggtgcccgctcctcagcgtcccctccccgaagccgcagccgcgaccgaagtcatgagaggagccgagatagggaccgggacaaagaccgagacaaagaccgggatagagacagagaccgtgacagagataaagacagagaccgagaccgggatcgagacagagaccgcgaacgggaccgagagcgcgagggccctttccgcaggtcagactcattccccgaaaggagggcccctcggaaggggaacacactttatgtgtatggagaggacatgacgcccaccctcctccgaggggccttctctccctttggaaacatcattgacctctccatggacccacccagaaactgtgccttcgtcacctatgaaaagatggagtctgcagatcaggccgttgctgagctcaatgggacccaggtggaatccgtgcagctcaaagtcaacatagcccgcaaacagcccatgctggatgctgctactggcaaatctgtctggggttcccttgctgtccagaacagccctaagggctgccaccgggacaaaaggacccagattgtgtacagtgacgatctgtaggaaacctgtggatggcttttaggacacgaagctggattccttgtgcctcgtatgcccccaagctggtctcagtaaaatcctggggcagaagttccctcacccccttcagcctctagtctttcaacacttgggatcggggttaaaccttcaaaagtggctgtcagtgttgatgtta

SEQ ID NO: 5238 - DNA, 1273 bp, Cricetulus griseus
cgtccacctcacggacagacaagtgaaaatctggtttcagaatcgcaggatgaaactgaagaaaatgaaccgggaaaaccgaatccgggagctcacagccaatttaatttttcctgatgaaacttccaggcaaagccgtgttttcgcttccagagcgcctgtacccccccctctgcctccagcctctgccccagaactcgcacctgtgccggagccccatttactcccttccacactcgccatctcccaggccgtttcgtctgtgcagggctggtttgttctgacttttgtttctttgtttgtttctttgtctgtttgcttggtgttggtttacttgttttctgggggaaaaaagccatatcgctaaaattctatagagattgagattgtcctcactgtcaagtcctgactgggctgggttcgctgccccccagtactcctacatggatctggtttcctgcccagccctgggtaaacttagccggaagccctaggttccattgtcggcgctgaggtgtctggcctgaggtcaatggtgcaaggagccgccaccgggttcgccagcctggagttctgggctgtgtttaatcagggagtacaggcctgatttctcttttcttccttcttttcttccttggccaagagcagagtatcgaaacatgggcatgcaggttagctaaagggctgatttaaaaaaaaagaaaaaagaaaaaaaaataaacagaaagattattttcgtccttcctctgtaagatctcccagttcaatgaaaataaaaatggccaagagaagaaaccttctcttcccgtttgcctaaggtcttgcttgcctgactaaaacccttcatttacctttgaatttccatatcctggctgttgagaatagtataggtttgtttatacatatggaattagtggtttaattaactttttttttttgtttttgttttttattttgatgagagaagggagacattgtttggatttcctttatactgtgaagttacatgcataaaagggtcaaaacctgtaggtgcagaaaaagaaaaaaaactataagtacaaatctgtataaatgtctattattatgaaaaattgccaatcttgtttaagcaaatgcattctatcgttattataaatgttagttctagctttatttacttcaaatcttaaatcagaataaattaatattgtattgctgctgtgcgtggaaaaagatgatgtttatgttcctagagaataaaagctgtggaatgaaaaaaaaaaaaaaaaaa

SEQ ID NO: 5239 - DNA, 1273 bp, Cricetulus griseus
gagcgggccatggaggacggacccgcgggcggaaacctcccccgagaggcctcgactgaggaggctgagccgctgggtgctacgtggagcggggacagcggccacgtatcgcagagccaaagcagcgcgtcagggccgtgggaggatgatggctctgaggacgcgccgggccgcgacctgccgctgctgcgccgcgctgccttgggttacgcctccagcctgctgccggccacggggccacggcccgaggtggaggctctggacgccagcctggaagacctgctggccagggtggatgagttcgtgggcatgctggacatgattcgcggagactcgtcccacgtggtgagcgagggcgtgccgcggattcacgccaaagccgcggagatgagacgcatctacggcaggatcgacaagctcgaggcgttcgtgaggatgatcggctgcagcgtggccaggatggaggagcaggtcaccaaggccgaggccgagctggggaccttccctcgagccttccggaggctgttgcacaccatcagcgtccccgctctcttcaggtccgcaccttccgggccccagcgttccgcctacgagccgccggtcctgttccggaccgaggaccacttccctggctgcgatgacagacagcagctctgatcccgcacctttaccgcaggaggactccagtaagactcttgttccgaatgttaagagatcctgctaaactggtgtatatgatgtcggaatgtgaactgttaaaagtttattttctgcaaacgacttgacatcgtcaatattcgatgtcgagagtgtagatccctgtgtcttccagttttgatccgaaagttgtttgatggggggctggggaagccaactgattaatttatctgtgcaatatggcagagctgttatttttatggtctttattacagttaacagtgttaccttgttaagatttatatatttatatgatcaaaagtgaccaagaaattaaagctgtattcttaaatcctaacagtgaagtgattcagttttctgtagccttctaggatagatggtagattatttagtatcatattcaactttacagattgtaggccaaaggaaataagatagtttctcaagacagccaaactgggtgtttgttgcagcaagttttgaagttgtatttgataatatgattcaaaggcttagcttatcacagcaagcatattaatgtatggttatcagtgttcaattgatagcacatcaattaaaatgttaaatttcattg

SEQ ID NO: 5240 - DNA, 1272 bp, Cricetulus griseus
gggctcgctatcatggatcatcttcgggaagcaaatggcacctttgctttaaaccttttgaaaatactgggtgaagacagctcaaaaaatgtatttttctcacccatgagcatctcctcggccctggccatggtcttcatgggggcaaagggcaacactgcaagccagatgattcaggcactctctttggataaatgcagcggcaatggaggtggagatgtccacctgggcttccagtcacttctctgtgaagtgaacaagactggcacacagtacttgctcagaacagctaataagctcttcggggaaaagtcttgtgatcttttagcatcttttaaagattcctgccgcaagttctacgaagcagagttggagcagctggacttccagggtgatacagagcagtcccgacagcacatcaacacctgggtcgccaagaagacagaagataaaataaaagagttgctgtctcaaggttcggtgaattcagacactcttctagtcctcgtgaatgctatctacttcaaagggaactggaaggaacagtttaacaaggaggacacccgggagatgtatttcaaagtcaacaaggacgaggagaaacccgtgcaaatgatgtttaagaagtctacctttaaaatgacctatattggagagatattcaccaagattctgttgcttccctatgtcggcaatgagctgaacatgatcatcatgcttccagatgagcacattgacttgagaacggtggaaaaggaaataacttatgagaaattcatggagtggacaaggctggacaagatggacgaagaaaaggtggaggttttcctcccacggtttaaactggaggagaattatgacatgaaggatgtcctatgcaagctgggcatgactgatgcctttgaggacagggcagacttttctggaatgtcttccaagaaaggcctgtttctgtccaaggttgtgcacaagtccttcgtggaggtcaacgaggagggcacagaggctgcagctgccacggctgccattatcatgatgaggtgtgcgatgtccgtcccccgcttctgtgccgatcaccccttcctcttcttcattcagcatgttaagaccaatgggattctgttctgtggccggttctcctctccctgaggaaagggtgttctgtgggtcttttacccagtctccatggtttgcctgtgacccaagtgaccttatccctaagtgcaatgacaattttgaaataaagtgctttctagcatcccaccttcagaa

SEQ ID NO: 5241 - DNA, 1272 bp, Cricetulus griseus
actgtgcgcacctagttgaagcgataaagaagaagcttggggagttggacagggacagtgaaagagagtcttgatgaagtcagtaagagtgaccttggccggaagatcaaagagggggtagaagaggctgcccggacagccaagcagtcagcagagtcagtatccaagggcggggagaagctgggcaagactgcggcctttaaagccatctcccagggtgtagagtcagtgaagaaggagattgatgagagtgtactgggacacacaggtccctaccgccggcctgagcggctccggaaaaggacggagtttgctggagcaaagttcaaagaaagcaaagtgttcgaggctaacgaggaagcgttaggggttgtgctacacaaggactccaagtggtaccagcagtggaaggacttcaaagacaacaatgtggtgttcaaccgcttctttgagatgaagatgaagtatgatgagagcgacaatgttctcattcgagcatcccgggccttaactgacaaagtcactgacttgctggggggtcttttctcaaagacagaaatgtcagaggtgctcacagagatcctgagagtggacccaacctttgacaaggaccgctttcttcgacagtgtgagagtgacatcatccccaacatactagaggccatgatttctggggagcttgacattctcaaagactggtgctatgaagctacctacagtcagctggcccaccctatccagcaggccaaggctctgggcctccagttccactcccggatcctggacatcagcaatgtggacctggccatgggcaagatgatggagcagggccctgtgctgatcgtcaccttccaggcccagttggtgatggtgatcaagaaccccaaaggcgaggtggtcgagggtgacccggacaaggtgctacgcatgctgtacgtgtgggcactctgcagagaccaggaggagctcaacccttatgctgcctggcgccttctggacatctcagcctccagcacagaacagatactctgagggcaatgatggctggcatctaggctgctccagagttagagattcgcgggacagagatagagagaagctccgtgaggcactgtggcacaagactgacacaagacccaagttcctcggggcagctgtgaaaccagctggataagaaaagggctggaggtgccttgcagggttgggatgttccccagaatgccacagggggctgctggcagtgtcaaaaggccccagcccaggggctcctgt

SEQ ID NO: 5242 - DNA, 1272 bp, Cricetulus griseus
cagagaagtcacactggagagaaaccttacacgtgcaaggagtgtgggaaagccttcagtggcaaatcaaacctcactgagcatgagaagattcacattggagagaaaccctataaatgtaacgagtgcggaacgattttcaggcagaagcagtacctcatcaaacatacacaatatccacacgggtgaaaagccctatgaatgtaataaatgtgggaaagccttctcccggattacgtcactcatcgtgcatgtgcggattcatacaggcgataaaccgtacgaatgtaaaatctgtgggaaagccttctgtcagagttcatcccttacagtgcacctgaggagccacaccggtgagaagccctacggttgcagcgaatgcgggaaggccttttctcagttctcaactcttgctttgcacatgaggatccacactggcgagaagccttaccagtgcagtgagtgtggcaaagctttcagccagaagtcacaccacatcagacaccagaaaatccatattcactagaactctataaacgccttagatttaggaacgcctgagcagaatgtatggttagtaatatatcagaagattcgtcttacgttaaatttatacaagtgtaggaagtccttccgtagggactcaaagctgaaagtacaaagaaagatatttagtaagatgtattacagtatgttatacacttcccagactctcaaacagtattttaattttaggacccttctcaatgaacttaagagtccagttagcagagtcttagaaagcttatcaagtatatcaagataatatgagcaatataaaggtttgaaattaagaggcaaaaatatttttgatatatgctttgctatttggataatttgtgaaaatcattgtcccaaaaaggcattttgggacagagtctccctatgtacatagcccagggtgaccttaaactcactgtgtagcccaagctggcctcaggcttctggtgatgctcttactccgtctcccagtgctgcaattgcaagcgtacagctccatgcctgctcagaagtctttgttggtagagctgtataaagttgaggtcaggacagaatagtgaatctagaaacgtggatgaattcatgggggattggtaattgataaagtacaaaaaaaaaaaaaaaaaaaaaaaaaaaaaaaaaaaaaaaaaaaaaaaaaaaaaaaaaaaaaaaaaaaaaaaaaaaaaaaaaaaaaaaaaaaaaaaaaaaaaaaaaaaaaaaaaaaaaaaaaaa

SEQ ID NO: 5243 - DNA, 1272 bp, Cricetulus griseus
tgaggccgagcgaggcgcgggccccgcgcagccatggactggctcatggggaagtctaaagccaagccaaacggcaagaaaactgcttcagaggagaagaaagtatacctggagccagagcacaccaagtccaggatcaccgactttgagttcaaggagctggtagtgctgccccgggagatcgacctcaacgagtggctggccagcaacacaacaacattttttcaccacatcaacctgcagtatagcacaatctcagaattttgcacaggagagacgtgtcagacaatggccgtgtgcaacacacaatactactggtatgacgagcgggggaagaaggtcaagtgcactgccccccagtatgttgactttgtcatgagctctgtgcagaagctggtaactgatgaagatgtgttccccacaaaatacggcagagaattccccagctcgttcgagtccttggtgaagaagatctgcaagtatctgtttcatgtgttgggccacatctactgggcccacttcaaggagacgttggcccttgagctgcacggacacttgaacacactgtacgtgcacttcatcctcttcgccagagagttcaacctgctcgaccccaaagaaactgcagtcatggacgacctcactgaggtgctgtgcagcagcccgggtagcagtggtgccactggggatggggccagcagtggagcttctggagcacagaaccatgtgaaggagagatgagcctccagggccagatgggtgcacatgtgcaaagagacaactgtgtgtctgtgtgtgcgcacacatgccccgagcgtgctggtggcaaggtctgagggccctgggctgcgcagagtgtgggctccatggatgccgctggagtcaaggcgtgtttcctgacttccctgttggatggatgagtgctatttgtagtgaagagcctttggagtcattcattcattcaaacaaacattttaattggacttgatgtttttgatttttcttctgttgggggttttcctttcttgggtcttccatgttccctgggatagagaggcctgggggtggaccccatgggggcccacacctgctgcttgctcctgtcaccccttcttgctgcctcctcagtgcccatggaggtcccatttgtgcataggggccagggcagcaccaggacctggctgaggccctgggtggaaactgggctatcagtgaaaggcagaacctgctttagttcatctgttgagtcataataaacgaactctctcaggt

SEQ ID NO: 5244 - DNA, 1272 bp, Cricetulus griseus
ttcaggcaccctaacccatggtgcaactgacccagcctgcacgcaggtgccacttgtcatcacagacaatcctgcctaccgtcgttttagtgacttttgacagcccgtccccacatcctgaagaactagcctcagaacagcagcaggctgcacacctggaagaaggggacccttcaagcccagctgaccctcactcttcaggcccacctatgcagcaagtggaaagctggggaacagatccttcacctgagtatcttgcagcatggggcagctggccgtgcctcagcccctaccagtgacgtaccgggagtttgtgcaggcagtgaagcaaggtagcaggaccggggactgacagtgggcatggaggctacaagcccttccagaaccctgttcctaaccagtcccctagctccatgcccttattcaccttcggactggacatggagttgccatccagttctctgaactcagtcccacccagcagcaccccagaatgccttggtctggaggtaggactcaaaggaggtgacaggctaaaggtccctcctgcagatcaagtgaccaagctctttggagatgacctaggctttggcattgtctactcttccctcacctgccacctgtgtggccacctgaagcagcaccacagccaggaggaaggtggccagatccacatagttgctagcccctgctgtggctgctgttgtggggacataccaccatccccagggagcccctcaggggccttggaaacatgccctggggagatgccaccagaagccagcttcacctcagcacacgggacaccttcaaacttgtcagtggagggcaagaccgctgatcatgctatttccagccataccagcaaggtgtctgcaggcaccctgggcatggcagtttcttaggtgagtgagtttgctgttgttgttgaggtcagtaatgaggccagagttcatccaagccagggaaatgcctcccaggagacagcccagctggcaggtttcccagaaatctagagaaggctgaattgaagatgtgaactcagtctgaccctgaagcttggagctcggctgccttcccaccactggcctgggctctcctccctcacaagggattcgggggctcagtattctgtgtccaacaacagtgctgaggatcctaagcccattgctcccccagctgatgatgccctacctgctcaggcccatttttttcaccaaatttaaaataactttatcaagcaaaaaaaaaaaaaaaaaaaaaaaaaaaaaa

SEQ ID NO: 5245 - DNA, 1272 bp, Cricetulus griseus
cagcagcctggacagcgggctccgaaccccccagtgcaggatctgcttccaaggcccggagcagggggagctcctgagcccttgccgctgtgacggctcagtgcgctgtacacaccagccctgcctcatccgctggatcagtgagaggggctcctggagctgtgaactctgctacttcaagtaccaggtcctggccatcagcaccaagaacccactgcagtggcaggccatctccctgactgtgattgagaaggtccagattgctgccatagttctgggctccctgttcctcgtcgccagcatctcctggctcatctggtcctcacttagcccttcagccaagtggcagcgccaggacctgctcttccagatctgctacggcatgtacggcttcatggatgttgtctgcataggcctcatcgttcatgaaggctcttctgtctaccgcatcttcaagcgctggcaggcagtgaaccaacagtggaaggtcctgaattatgacaagaccaaggacataggaggagatgcagggggagggacagcagggaagccaggccccaggacctcacggaccagcccccctgccggggcccccagccggcccccagctgcccagcgcatgcggacgctcttgcctcagcgctgtggttatacaatcctgcatctccttggacagctacggccaccagatgcccggtccagctctcattcaggacgagaggttgtcatgagggtcaccacagtttgacctggactccagggccagggatctcaagtcagagtggcagccagagacgagctctcctggctgctggaggtacgacctagacaaagtgtttggggcacagtggccccaccactgaggatctctgtggacagcctcaagcttggagacattgtctggcctctactgcccacggggtagagacacctggatgacattccaactcccactgataccgcctcatactcatcttgaggatggccagcaggcaagcagggagaacagcttttcttcttggagagaaccatctttacctcagctctagggcctccagtcccctggctccaccatggtgacttggtaaagggagaccaatgccagaataaaaaggggctgtagacaccccccattccccaccccatggccacagggcatctggcaataagactcgtaaacattgacctcccgttccctgcatgagggcggggacctccccctgcacccacccccattgcagtgggggaagggcataaagaatcatttatatg

SEQ ID NO: 5246 - DNA, 1272 bp, Cricetulus griseus
  modified_base (1251)..(1251): a, c, t, g, unknown or other
ggagacgccagcggctagctgttggggatctgagcgggaggtgtaactggccaccgcgagagaagagaggacagtgaccgaggcgtccgagtctccataacctgggaagatggtgctgctgacaatgattgcccgcgtggccgacgggcttccgctggccgcttcgatgcaggaggacgaacagtcaggccgagaccttcagcagtatcagagtcaggctaaacaactctttcgaaaactgaatgaacagtcccctaccagatgtaccttggaagcaggagccatgacttttcactacattattgagcagggggtgtgttacttagtcttgtgtgaagctgccttccctaagaagttggcctttgcctacctggaagacctgcactcggaatttgatgaacagcatgggaagaaggtgcctactgtgtctaggccctattccttcattgagtttgataccttcattcagaaaaccaagaaactctacattgatagtcgtgctcggagaaatctaggctccatcaacactgaattgcaagatgtgcagaggatcatggtggccaatattgaagaagtcttacagcggggggaagcactctcagcattggactcaaaggctaacaatttgtccagtctgtctaagaaataccgccaggatgcgaagtacctgaacatgcgttccacttacgccaaacttgcagcagtagctgtatttttcatcatgttgatagtgtatgtgcggttttggtggctgtgagatgtagtgagcctagtcactggtaagggagaatctagaacccggcaggtgtatgttttcaggaaactgagctcacagggctgtgtattagaacccaagtggaacttctgcctctaaagaccttgcaagaaaagacctgtcctgaaaaggaaagatggcgcctcgtttaaggatgcttaacccatgtggaagtctctttgggggcagagactttctctgggtactaagccatatgtattagggaacagtagattgtttgttttgttctttccctcccagtatatttgaaagacagcagaactggggcattctgtctctctgatggagccatcagtgaaatttaaggtagccaacctgtgctagcaacatcctgaaattcccttcaaagaaggcggccttttggagaatcttaactttaatcaacattcctttggttggtgacatttgtgattgactttcaagtaagactcgaagtatgtgaaggtttttttttnttttttggttagtttgttttg

SEQ ID NO: 5247 - DNA, 1272 bp, Cricetulus griseus
cagtgccagcagaagaaccaggaaattttgctgttcgggtcattgagttatgctcttcaacaatgacatgcatgaaaggaacatatttggtgcatttgacttgcatgtcttctaaaacagcaagagaagattttagaacagtagtacagaaattaaaccatcgcgaactgaacagagtataatatgacagttaataaactataatacacactttacatgaaaatatgagggctacacattggcagcaaacctatttgctacgcctgcatttaaatttctccaagctctgttggtctactttctttgagcaatagtctggacctataactgcctgtaaataaataaacaataaataaacccagtgcttcctgccagggagtcatggctccaatgaaaagcacagagttctccctgtgcagctggttcctggcctggccaggtttcaaaggaagctcccagcacagattcttgagaaatggaaaaatccaaggaatgttgctcttgctgacccctacagattgaattgaattgagataaaaagataaacatcctagactcccaggctgctcttctcaggctgcctgcacctcccactgtacagccctctcctcctctgtaagtaccccctcaattttgtaaggtcacacaaatcagggacagaatcacattataacctactttgtcacaaagcttcagctcttaagtcagctgttgtttcctgaagcccaaccagggcatgaaccaaatgaatgccaagtacacacctgtactgtaccaggtattggtcctgcctctccatgccagcaataaggaagtttctcttacatgagaatagtaatttgaatacaatcacaattaggttgcaccaataaaaatgttatactttgttataatctagagttaaggcctgctaaatgcagcatgcacatttaatctaaggagattgctgttttacataatggaaatatttcaataatttgaaatttgaaagttgctgttatcaaagaatttttacttgtatgctcaaaatatttaaatatgcctgtttcttagtaaccaaaaatcatatcattaatttaagtgattgatataagatccagtaactaatcctaggttgcttttgtatatcttttctagttggtgtgcctgcccaagaaatcataaataatagatgtcactttatatttttctatagtaaaatggctacagtcatgggtaacttctagaatagtggacatttctaaaagaataactgcaattataaagttgatt

SEQ ID NO: 5248 - DNA, 1271 bp, Cricetulus griseus
  modified_base (94)..(94): a, c, t, g, unknown or other
  modified_base (1169)..(1169): a, c, t, g, unknown or other
  modified_base (1263)..(1263): a, c, t, g, unknown or other
ccagagaacggtcagcagcttctgcaggcactggagagtgagaacatccgtctggaggcagctttggagtggcggcgctgcgagctggtcttcnggcagtggatggatacagttctggatgcctgttcgtcggagagtcccgctgtgacctcaccagcccacagtgctgcccatgatctctggaacatgggctccgtgagctggcgctggtaaagcaagagttgcaggccctgcaggaggagctccaggaagtggctgagccccggcgggcggcatgggaagcccaaggttggaggcataggtcagcggccagagtggagcaccataaggaagaccttgcaggaagcggtcgaaagggagttggtggccctgcagggttcctgggagccatccagtaaccctgccccgccccaaagaccccatcggctggtgagaagtaaggacaagtcaccaggaccccaaggcctgcaggcagccaaggtgatcaggacactgagtgcccaggaggcctctctgaagagtgtattgcaccaactacagagtcagtgtcagcgggagctggccaggctggctggtgccctgcctggcttgatttggatcatggctcctggtcactgaaggccccaggatgtgcccacttgtgtaggggtctttatagggtctcagaggagcagactggggccggcgtgggggcagaggtccagagccctgttggctgcagttttggagtcgccatgggctagtcctcctgagaagtttggaggggacctacgcatgcatggtagagctgtctgtggggataccaggctgctgccctcttccactgttcctttaacgtcctcttgttgggacactgggatattcgtggtgcatggttgtcactgtgctggagtcacacatgccccacagtgcaggaagtattgtgcctcccctgagtggaacagctcttggatgggagccctgggggctctgcctgggagagaggaggaggggaagcttcggcgtgtacagaaggcctttgttccgaaggctgctgggccagctcaggtctcacaaagcagcctgtgtccaggatgtagccacagcctggtgggatggctctctcctagcccaggcttcctcccagccagcgggctctagcgtggtgtgtgctggagttcagatccgcngtgtgtgtgtgtgtgtgtgtgtgtgtgtgtgtgtgtgtgtgtgtgtgtgtgtgtgtgtatgtttgtttgtgttgtgtctcagtggtggaaaaanaaaaaaaa

SEQ ID NO: 5249 - DNA, 1271 bp, Cricetulus griseus
caaggctccagcaggcggtaacggcaacaagaagaagtcgggaaagaaagagaagaagtaatatggaggccaggccttgagccacagggcagcctccctccccagccagtccagcttgtccttacttgtacccaggcctcagaattttagggctcaccccaggatactggtaggagccaaggccatgctccccgttgggacacacaaaaaaaaaccataccacggtcccttagttacagctgaactcctccaccttccaactcagtcaggctcatccatctcctgcttccctctcctcacccaacccacccccttcagtccctctcttgagcaaggtggttgggctgttgtggggacaggtgacccaagcaggctcctagttctggagagttgggcgagtgttataaccttttggcctctccatcagttctagctttcccccaaagcatggtttggtaccagtcttctcatttccttctagagcctgagaccaatgcttaagtttggggaacacagtcaccatccccctggtactgatgatgcttgctggattttcgggaaggcattttgctacccagtctcttttcactgcctggggatcagtcttttgtttttcattgtttgatgttcccatgttcccactgcatgctatgacttccctactcctcaaagaagagactcctttgcatgtctggagacagtagggggtggtaagctaaagggaagtggacaaaacagctcattaacggggtcttgcaaggggctctgtatgtacccagggtactggcccaaccccccaattctagccatagacaaaactccaggccagacccctccaccctggttcagcctgggcagcttgggctgagccaccaggaccaatagatttaagctggcatttcagtccaagaaaggacttctaagtggatttaggacctgagaggaagaggggcctctgtgggtgctgggtactccagaggtgcccctggtggaagggtgggtcagtggtcctagcaggaagggagacccagcaaggccattcttgctgggttgagtcaaggagctagaacaagggaccaagtggctgtaaagtctcaagccaatgatggggcttctccactgggctcctgtagtcctcaagtccctggcctccaccttaccaggtgccacttcttctcagaaggccactgcccaggcccccaggccgccccttcgtggccagagactggttaaagccccccagtgcctccttgtgcatagaacttcctctg

SEQ ID NO: 5250 - DNA, 1271 bp, Cricetulus griseus
gccttctggtcctgtggggaccgacgcggatggaagctgggtgcccatggccgtggcagcgatggccgagcgtggccgcctgtcgcacgccgcgcccacgcctagcaccgaggggctgccgcgagcttttctccagagcttgcgcaccctcttcgacatcctggacgaccggcagcgcggctatgtgcacttgcgcgagatcgagtcccgttggcagggtgcagacgcacgcgagctgccctgcggcgtgctcgagggcctgcgccaggtggccccggccagtggctacctaaccttcgagcgcttcgtggcgggcttgcgcacctcgctgctgaacgccaacggcggcccgagggatcaggcacgtgtcgctccccggtctggggaccagccttcgctgcagcaacgcctgatgttcatgccggccgacgagccgcggactctcctggagaggaagcctctgcagccgagtgcgcgccccgcgccagctggccccagtggcacctcccggaaccctgagctactgtgtatcccggcggaggcggcaccctctcccgaggagcccgagcggcccctgagtaagacgctggagtgcagccgtctgcaagacccaggacataggcacaggtgaaacccggcaggctccacgggcccgaggtgaacgtcgaaggcataccatcaccaacggtgtggactgtggcctgttgaagcagatgaaggagttagaccaggaacaggaggtgctgctgcagggcttggagatgatggctcggggccgagaatggtaccagcaacagctgcagcgtgtgcaggagcgccagcgccgcctgagccagagcagagctggagctgactttgggactgcagggagtcccctccctctggggaggttgctgcccaaagtacaggaggtggcccggtgcctgggggagctgttgactgcagcctgttctggcagagctctgccctcgtcttctttggggcccctgggccccacctctccctcaacaccagtgtggcagcagcagaccatcctcatgctgaaagaacagaaccggcttctcactcaggaggtgactgataagagcgagcgcatcactcagctggagcaagagaagtctgcactcatcaagcagctgtttgaggcccgggctctcagccagcaggatgctgggcccctggactccactttcatctagctggtggtagctttctaggacatgcacacagacttagcctcagctccatggctgctgtgagcccgtcttctg

SEQ ID NO: 5251 - DNA, 1271 bp, Cricetulus griseus
tgtggcgttctgggtcgccatgggcaaatcggattttctgagcccaaaggccatcgcgaatagaattaagtccaaagggctccagaagcttcgctggtactgccagatgtgccaaaaacaatgccgtgacgagaatggctttaagtgtcattgtatgtctgaatctcatcaaagacaactgttgctggcttcagaaaatcctcagcagtttatggattatttttcggaggaattccgaaatgactttctggaacttctgaggagacgctttggcactaagagagtccacaacaatatagtgtacaatgaatacatcagccaccgagagcacatccatatgaacgccactcagtgggaaactctgaccgactttaccaaatggctgggcagagagggcttgtgtaaagtggatgagacaccgaaaggctggtacattcagtacatagacagagacccggaaactattcgcaggcaactggaattagaaaaaaagaagaagcaagatcttgacgatgaagaaaaaactgccaaattcattgaggaacaggtgagacgaggtctggaggggaaagagcaggagacgcctgtttttacagaattaagccgagaaaacgatgaagaaaaggtgacattcaatctgaataaaggagcaggtagctcagcggtagccacatcatcaaagtcaggctctttgggaccaagtgcactgaagactctggggagtgcatcgtcaatgagacggaaagaatcttcacagagctcagctcaacctgccaagaagaaataactaagaaactaggagagaaatatcacaagaaaaaggtgtcgttaaggaagtgattgacagatacacagctgtggtaaagatgattgactctggagacaggctgaaactggaccagactcatttagagactgtcattccagcaccagggaaaagaattctagttttaaacggtggctacagaggaaacgaaggcactctagaatccatcaatgaaaagactttttcagccactatagtcattgaaactggacctttgaaaggacgaagggtggaaggtattcagtatgaagacatatctaaaacttgcttgagcttgaaaatttgttaaccatacattgaaattgtgaagcatcaaaattgatgttagtcaaggtactatgtaactactgtgttaggggtatttgttttgttaattaaaaaaaaatctatttaaatactgttggatagttgtttgggtaaattcataatgaaatctaatgttttt

SEQ ID NO: 5252 - DNA, 1271 bp, Cricetulus griseus
tcctcatatttcttcaaaatgaatgttactgtccgattcttaagaccttttgccagattaatggtgccatttacccctcatgggaagaaaaggaatttatattcaacaactctacagagatatatgtcttccaaagtaccttctttgccctgtcataaggacagtacctctccttctaaacagctagaactagatgggtggaaaactacaatgaaatctagcattcaagaagatggtgtttcttcagtggtctcagacaaagatgaaggtgttctagctgccaccagagaaatgattgagatgcggagattgcttggcaaagaagtaccagaacatatcactgaagaacaactcaaaatcatatcggaatgtccttctaaatcagcccaaaagaaaatatttaaagtatttgttcaccaaggaaaaaatgaaaaaagctgaccaagcaaagaaggaaaagaaagtagaggccagagaagaagcaaaaaaggccaggttggtagaaaccaccacagatgaaaaacaacaggactttatgtttcttcgactctgggaccggcaaatgaattttgtgatgggttggaagggtgtccaggctatgcagtttggacagcctttggtttttgacatggattacgaaaattatatgaaaccatttgaaattcggaatgctgtttctcaacttttagaaagtgaaggatggaacagaagagatattgatcctttccacatttatttctgcaatcttaaaatagatagtgcttatcatagagagttagttaaacgttacggaggaaagtgggacaaattgctcttaacagcaacagaaaagtctcccgttgatttatttccaaaggacaatattatatacttaactgcagattctcccaatattatgactaccttcaagcacgataaaatttatataattggatcatttgttgataaaaatattcagacgggcacatccctagccaaggcaaaacggcaagatatagcaacagaacgccttccactagataagtatttacagtgggacctcggtagcaaaaatctcaccttagatcaagtgttccgtattttgctctgcatgaaaaacacaggcagctgggaagaagctttgaagtttgttcccaagagaaaacatattggctatctagagatttctcagcattctaaggagatttttagtaaacagaagactacgacaagttcatttccaaaaggctccttaaatgcacgaacacggaaaaggtgacctaaatgagaaa

SEQ ID NO: 5253 - DNA, 1270 bp, Cricetulus griseus
  modified_base (1250)..(1250): a, c, t, g, unknown or other
tgaaactctctgggaaattgcaaaagctgaagtggaaaaaaggaaaagtcacggaagtgaaggagatggagctgaaattggagaaaaatctgttttcttccttggcagtaaaaaatgggggaaagacgactattattctaaggtgtcttgacagggacgagccagcaaagccaaccttagctttggaatacacatacggaagaagaacaaagggacataacacaccaaaagacattgctcacttttgggaactgggtggaggaacctctctattggacctcataagcataccaatcacatatgataccttgaggacattttctgttgttcttgttttggatctttccaaacctaatgatctttggcccaccatggaaaatctgttgcaagcgacaaaaagccacatagacaaagtgataatgaagctggggaagacaaattccaaagcggcctctgagatgaggcagaagatgtggagtgtcatgcagaaggaccatccggatcgtgagttaatcgacccgtttccaatccccctggtcataattggaagtaaatatgacatttttcaggattttgatcccgagaagagaaaggtgatatgcaagacgctgcggtttgttgcgcattattacggagcctcactgatgtttaccagcaaatcagaagctctactactgaaaattcgtggtgttatcaaccagttggcattcggtattgacaagagcaaatcaatatgtgtggatcagaataaaccactgtttatcacagcaggattggactctttatgtcaaatagggtcccctcctgttcccgacagtgacattggaaagcttcaggcccattctccaatggagctgtggaaaaaggtgtatgaaaagctattcccaccaaagagtatcagcacactgaaggcaatccaggaccctgcccgagatccacagtatgcggagagtgaagttgatgagatgagagttcagaaggatcaggaactggaacagtacaagagaaattcttccaagacctggaaacaaatcgagctggactcttgagcctggtccactattgtgggtttatgtcttccttcccaattcaaataagattattttcttaccttctgtggcaacatgtgaagaaagttgaaatgtataatataggagaaatctatttcttatactggtacaactttgtgaatgttctggagtcttttagatagaaaatattcactatataataaaaaaataaaaaaaaanaaaaaaaaaaaaaaaaaaaa

SEQ ID NO: 5254 - DNA, 1270 bp, Cricetulus griseus
ggaaaagccaccattagaatagggttagctacaaagaaacctgggaataatgggagaaaacacgggctcagtaaagactgctatgccccagatcctctgccaccaggcgcgtcaggtttcctgccctggcgcactgcagaacgtgcaagaagaaacaggggttttccattgttcaaaactcgttgatatgcctaaccttctgaagcaatcagattttcctgtgactgtgacagtagagagtccgtcatcctcagaaactgatgattttgaggattcttcagaaagtgcccatgaagcacctcagaaaatcagcataagacaagatacattacaggagaaactgaacgaatgcctacagcagttgaaggaggaaagggtgatccggcttaaggctgacaagcgagtcagtgagctggaacatgaaaatgcccagctgagaaatataaatttctccttgtctgaagccctccatgcacaatcagtgacaaacatgatcctggacgatgaaggtgtcttgggcagcattgagaattcttttcagaagtttcacgctttcctggacctccttaaagatgccggacttgggcaacttgccacaatggctggtatagatcagtcagatttccacctagtaggtcgtccccagatgaattctactgttagtgcacctgtggaagagcagatagctctcgaggaacaaaagccagatctggaacagactgctgtgggacagatgcagaatattcaatttcagaagattagagatgatgctaggattcctttgcctctcgacacctcccaagttcccatttctacaagagaagcatcggtagcctccagagaccacctgggagacaggttcccctttagcagatggcatttctggaagcgggagtcaaagggaagaagcggtgttgtccaaacacagcagatgttcagagaaagctagtgggaagaatgaacactccagaaagagcgcccctgagaagcactccgggaaggacctgctctccgaccctggctcccctgtgaactcaaaaagcaaaggtatcggggacaaccgatccttgcttaatgagccaattaaaagtgaatctttgaaaaaacacatttctgtcaagaaagaaaacagaatagtgactgtctcatccaagacaatcaaaaagtaaacccaatcctgtagaacattctgaaaatgatactcttgggtctgattttgaatttcaggaaagcatccattcatcagcacgcacctgacgtaggtctaacc

SEQ ID NO: 5255 - DNA, 1270 bp, Cricetulus griseus
agactatttaattaaagtgcatacaaactcaacaatcctcaggatctcagtaaggtaacattaaagtcatggaggtagagagagaaatggggtgggagggaggagtgggaaaggaaggaagagatatttttgctgaacaaccagtgtttttcaggatgacaaagagaaaaatatagagtagaaatttaagtgcagacgtggaatcagctacaaatcctaaagatggtgtgtatgcctttgtgtgcctgtataaagattgtgtgttcacgaataagggtatgactctgcgtgcgtgcgtgggtgcgtgtgtgtgtgtgtgtgtatcatgacacatgggtggacagtatttcctccgtagctgtctgccagcttcaggagtgagtgacaattttcttttttatgaaaagggatataaaggcacagggctgacacagtatttctaataatgaattgacctaacatggtatttgcatgagtcacaattgtgaagctttttgaagttttgtattgataatttgacatttagaacacatcctatttattctcgtgctttgtattcatgcctcatgcactatagaagattccagctttattctttctgtcatttaaagcaatatgataagggtggtcactaatcaggtgccctgaatttctggatgagagaaatgtttcattttctggcaagggaggggaagggaggaaggggagaagacacggtgcatgtcccttcttcttacccatgcatgctgcctaccctaggcaatgacatagaaacagtatatagatcagtgtacaccacacacacacacacacacacacacacacacacacacacactatagaacaaggaacaccaaaagagtgttgattgttgtctttaaagatatttttttcacctgaagaatggacttaaaactatgtattgaaaaaaatagcctaagtaagtcttagagatggtgaatgtatccaggttcagttacaaaactaattttctgaattttaatcattcagtgagctgcctaatttttattttgtgttgctctttatccaaatggcttttccttttccttttttttttttttttaaaatttggaggaagggtgggggcaggggaagcagcaatactgtgttttaaaaattatactctgtacctggctttcctgtgttatgttaaccacttaagtgtttttattctgcttcggttttatagtgactgtgaggtattcaatgcagctatacagttattttctcaattaaaactcaacatgta

SEQ ID NO: 5256 - DNA, 1270 bp, Cricetulus griseus
  modified_base (1260)..(1260): a, c, t, g, unknown or other
cgctcctcaagcttctcaaccctaggactaaggaaagaatcttgaacaagaggaaaacacatcactgctgaggagaccgcacctttctgcctccgttctccaaaaggctttcgtccatttgggaagaaagtgaggtgtacccacataccctgtcttcgttggcctttaatctaactttttctaattccttgggtcaactttgatcacatatgccctctaatctttagtttttggcaagtgtggacatctgaccaccaccctctggagccagtgttttgggctgagggtactgagagtgtactgaggactgagcagccagggcgtgtgctgcagtcaccatgtccaccaaggtccccatttatctgaaacgtggcagccgcaaaggcaagaaagagaagcttcgggacctgctgtcctcagacatgattagcccaccacttggggacttccgtcacactattcacattggcagtggtggtggtgatgacatgtttggggacatctccttcctgcagggcaagttccacctccttccaggaacagcagtggaggaggcagaggaggatggcagctttgaccttcccttccagttcgctcgcactgccacagtgtgtgggcgagagctccctgatgggctttcacctctgctcaaaaacgccatctcccttcctgtcattggtggtccccaggccctcaccctacccacagcccaggctcccgcaggaggcaggaaatgtggacatctggaggattccagaggccagctcaccccacaatgggatgagcccagagcctgaggctgaagagcctttcctgtcccatgccagctccctgctgtctctgcacgtggacctggggccttccatcctggatgatgtcctccagatcatggatcaggacctgggccgtgtgcagatccccacataggactcttggctgagcagacaggtcacccaggctatggtgatgcctggagacatctatggacgtggccctgatctagtagtcaggatcccaggtcccacctatgggtgctggccagtgactgtcattttgagcctttcttcccttccctcctcccaatggacagagtgcatctttgctttcctctaacaacatccacaggggacacatgcaaaagttgccccagacactcctgatcctcttaggtcatttgaaccctcacttccaattcgtcccctttccctcaaggtcccatttcaggaaaacgctgctgaaatggactgctggcgaaaaaanaaaaaaaaaa

SEQ ID NO: 5257 - DNA, 1269 bp, Cricetulus griseus
gtgcaccctgatgtcaccatgaaaccgctgcccttctacgaagtctatggggagctcatccggcccaccaccctcgcatccacctccagccagaggtttgaggaagcgcactttacctttgccctcactccccagcaggtgcagcagattctcacatccagagaggttctgccaggagccaagtgtgattataccatacaagtgcagctaaggttctgtctctgtgagactagctgcccacaggaggactattttccccctaacctctttgtcaaggttaatgggaaactctgccccctgccgggttaccttcccccaaccaagaatggagcagagcccaagaggcccagccgtccaatcaacattacatccctggctcggctctcagccacagttccccaacaccattgtggttaattggtcatctgagtttggacggaattattccttgtctgtgtacctggtgaggcagttaaccgcagggacccttctgaccgtcccatgccgtgcccttacctgtgcccacctgcagagctttgatgctgccctttatctacagatgaatgagaagaagccaacatggacatgtcctgtgtgtgataagaaggctccctatgaatctcttattattgatggtttatttcatggagattcttaattcctgttctgattgtgatgagatccagttcatggaagatggatcctggtagtccgatgaaacctaagaaggaggcatctgaggtttcgccccccgccagggtatgggctggatggcctgcagtatagcccagtccaagagggaagccaatcagagaataagaagagagttgaagttattgatttgacaatcgaaagctcatcagatgaggaagatttgcctccaaccaagaagcactgccctgtcacctcggccaccattccagcccttcctggaggcaaaggtgtcctgacatctggtcaccagccatcttcggtgctgcggagccctgcaatggagtcagcactacggtccttctgtcatcacttcactagatgacgcaggacacccttggtcacttcttccagtccggggaaccccttccccacttcctgggcccactggctcccacattgggaagctctcaccgtagctccactccagcgccccctcctggccgtgtcagcagcattgtgtctcctgggagttccttgagggatgggcatggaggacccctgccttcaggtccctctctgagtggccggcggtcagatgttatttccttggattga

SEQ ID NO: 5258 - DNA, 1269 bp, Cricetulus griseus
tgtaaaatgaatgtacatattcgatgtcaggccaatgtggcccaaactgtggggtgaatgcggtggagctggccaagaccctggcagggatgggtctccaacccggaaatatttctccaacctcgaaactcatttccagatcgacattaagacggcagggaaaggagggttccaaagaaggaaatgggattggtgtcaattcttccagcagattcggcatcgataacttcgagttcatccgggtgttggggaaggggagcttcgggaaggtgatgctcgccaggataaaggaaacaggagacttgtatgctgtgaaggtgctgaagaaggacgtgatcctacaggatgacgatgtggagtgcaccatgactgagaagaggatcctgtccttagcccgcaaccaccccttcctcacccagctgttctgctgctttcagacgccggatcgtctgttctttgtcatggagtttgtgaacggaggtgacctgatgttccacatttaactccaatcgatgagggacatcttcctatgattaatcaggatgaatttaggaacttttcctatgtgtcaccagaattgcagccatagccttatgggaaatgagaatcatggctgaatgtggattttttttctgggaatttctattgtgggaattccttagagcatccgccttagaacaccaccttcaccttcaaggagcaaatgttcactagtcctcgaagggtggagcttcaagagagccactctctcaagtcccgaggagccatggtacatccctgtagtcgagactgagataagatgatacaaggatgtgcactgttcaacccttgagtctacacgtctatttcaggtttggagggaaatgacagaaaccaaaaggagagatcgtgggaagaatacagtaggtcctaaaaattatgagccaaacaggtctttttacttcaagatacaaatctagacattctgtggaccactttacactcttctttaagctaatatggcagtctgaaaaagactgcatgctagtgaagaatttaaatgtctctctagggaaatgaatggcattccaagtagaatgacttactctgaagaaacagacgatgggtgtccttcaagctcccaacctaaaacccagtgttgagaaggagattggacatcatgacaactgtcaatgtcttgagtctctcactcttcctttcagtaactagctatttattgagtgtcacacaagaaggtgccatgggcagcagtagtgtgcacagtacagt

SEQ ID NO: 5259 - DNA, 1269 bp, Cricetulus griseus
ggaggaggccgggccctggcatctgggcatcaatctccgcatgaaccccctggaggccatccagcaggaactggacactgtgaacgctcaggccgacagggccttccaacatctggaacagaagtttgggcggatgcggcgacactacctggaacggaggaactacatcattcagaacatcccaggcttctggatgactgccttccggaaccacccgcagctgtcctccatgattaggggtcaggatgcagagatgctaaggtacgtcaccaacctagaggtgaaggaactcagacacccgaagactggctgcaaattcaagttcttctttcgaaggaacccctacttccgaaacaagctgatcgtcaaggaatatgaagttcgatcatccggtcgagtggtgtccctttccactccaatcgtatggcggaggggacatgagcctcagtccttcattcgcagaaaccagaacctcatctgcagcttcttcacctggttttcagaccacagccttccagaatccgacagaattgctgagatcatcaaagaggacctgtggccaaacccactgcaatactacctgtcacgtgacggaatccgcagacccagacgtcgcccagtaagagagccagtggagattcccaggccctttggcttccagtcaggctaacctctgcctttgaaaatacagctggagcaggcctcttctcacctgtgcttgagcaaaggcaacggtatgcagtgttcttggtgtttctttccttgtggcttctgcatctgctgtttgaatagtctctcttgccctcaagatgaagactgtggacatgctgctgctgtcatatgacctctacgctgttctgtattagtgtctgctgcctcgtcgtggttcagaccctttctaagcttaacacgcgatcctgaagatcacactgcttttacagtgcttggaccctgttgttttcagtctgttagctatttgctgccaccttgatgggtaccctaagcaggaaagtgaactgaaatggattaggaccagattaagtcagataaaaattgggctgaagatgaagacaaatgttgcctagataatggttctttaaagaaatggtacaagtttgggttattttcttctttttatatgtgacctgatgtatctgaaagagtaatattgtgcccatattttaccaacatttagtaaaatgctacttgtttctatttactaggaaagttaaattactttcttttgcatttatttgaaaccatttggaa

SEQ ID NO: 5260 - DNA, 1269 bp, Cricetulus griseus
aaaactgaatatcctgatcttgcgtggccattgagattccgcatcctgcatgaaattgctcttggtgtaaattacctgcacaatatgaaccctcctctacttcatcatgacttaaagactcagaacatcttgttggataatgaatttcatgttaagattgcagattttggtttatcaaaatggcgcatgatgtcactctctcaatcacgaaacagcaaatctgcccccgaaggaggaacgatcatctatatgccacccgagaactatgaacctggacagaaatccagagccagtgtgaagcatgatatatacagctatgcaatatcatgtggaagtgttatcaagaaaacagccttttgaagaggtcaccaatcctttgcagatcatgtatagtgtgtcctaaaaaaaacaaagaattcagagtgcatccagtactattcacttatgtgataagaaagtggatttatcaatgaacatacctacaagccatcctccacaagaggaatcatgtggctcctctctgctatccagaaataccggttctcctggaacctccaggtccctgtcagctcctcaagacaaagattttttatctggaggacctcaagatggctcttcatcgaagctgcatcactgttctggaaatcacagctgggatggtgccgtttccgaatcacacaggacagccctctgtgatcacagacccaccctgtgctctttggctataataaatccactcttcgtttcgaaaagttcagagcgcctgcaacctggaatagcccagcagtggatccagagcaagagagaggacattgtgagccagatgactgaagcctgccttaaccaatcgctggatgcccttctgtcccgggacttgatcatgaaggaggactatgaactcattagcaccaaaccaacaaggacctcaaaagtcagacagttactagacaccactgacatccaaggagaagaatttgccaaagttatagtacagaagttgaaagataacaagcaaatgggacttcagccttacccggaaatgcctgtggtttccagaacaccatcttcaaatttccatcaaaataaaagcttataagtgagtcttttctgagaggaaagtcagtttacaaatggttatttatatgtctgttacctggataatatttgtataaaaacatgagtattagttgcttccctgaaggttttttggatgagataagtatgtctccttccatggcatttgcagtattttttttaaataatataagt

SEQ ID NO: 5261 - DNA, 1268 bp, Cricetulus griseus
  modified_base (1246)..(1246): a, c, t, g, unknown or other
  modified_base (1253)..(1253): a, c, t, g, unknown or other
gctgacatggcggcggacccgcagggcgacggtgcgggtggtccgcagcatccagtccctagtgcgagccacggcagcttcccggagtacgagcttccggagctgcacacccgcgcgttccacgtgggagcctttggggagctgtggcgcggccggctcgggccccgggatttgtcgctgagcgagccgcaggcagtcgcgcagcaggcggacggaggggcgtcggacaacggcttggaggatgctgctgtggcccgggatctgggctgcagtctggaggcagcggcagagctgagggtcgtgtgcggccttgataaactgagatgccttgaagaaggtgaagacccagaagtcatcccagagaacactgacctagtgactttatgtgttaggaaggggctcttggactatcgggaagaaaacatcacgatagaccgcgcctgtagacaagaaacgtttgtctatgaaatggaatctcatgcacttgggaaaaacctgaaaatccagaagacttgattggagaaggggagcttatcctatctgtgaatatcttgtacccagttatatttaataagcacagagaacacaaaccataccagacaatgttggtattgggcagtcagaagctcaccgaactgagggactcaatttgctgtgtcagtgacctccagattggtggagaattcagcagcactccagaccaagcccctgagcacatcagtaaagacctatacaaatcggctttttttattttgagggaaccttttacaatgacaaaagatacccggaatgcagagacttaagcagaactattatagagtggtcagagtcccatgatcgaggatatggaaaatttcagactgctagaatggaagatttcacatttaatgacttgaacattaaacttggctttccttacttatactgtcaccagggagactgtgaacatgtggttgttattacagacataaggcttgtacatcatgatgactgtttggatagaacactttatccccttcttatcaagaagcattggctatggacaaggaaatgttttgtttgcaaaatgtatacagctagatgggtgacaaacaacgacacctttgcaccagaagatccatgtttcttttgtgatgtttgcttcagaatgctccattatgattccgaaggcaacaagctgggggaattccttgcttatccttatgttgatccaggaaccttttaattagtaaccaaacacaaaaanaaaaaanaaaaaaaaaaaaaaa

SEQ ID NO: 5262 - DNA, 1268 bp, Cricetulus griseus
gagaccgcccttcatcatgcagtccaaggtaaagaacgtcgacctcatcgagatgctcatagagtttggaggcaacatctacgcccgggacaaccgggggaagaagccctcggactacacgtggagcagcagcgccccggccaagtgctttgagtactatgaaaagacacctcttaccctctcacagctctgcagggtgagcttgaggaaggccactggcgttcgagggctagagaaagtcgccaagttaaacatccctccacggctcatcgactacctttcctacaactgagctgcaagcaggagctggaaaggctgggtgacttgcctggctatcaccttgttgtgcctagccgtaggccctaaagagttctgcccattgctatgaaactacttttgtgctgtagatagattgatgctcctagacagttggaggtgcacaagaaatacttgggactcagggcactgatgttgattttcctatatctgggtgccatgccacagagcatcaggttctaagcacctgaccctgtggcctgggatgaccatgctgctgggatcttgccactcagacagtcttctggggcagcagtcggcactttgcaaggtctagctgcatccaggtttatcactcaggggctttacagatctgagtagttcagttcccagcacccactatcaggcagctcacaagggcctgttacttcagctccaggggatccgacacccttttctgacctcatcaagtattcacacatgtatatatgtatacacacatacacacacacacacacacacacacacaagtgcaagacttgaatcagattgggaatgtgattcttcagccaaggcaggaaagaaagaaagggcacacagcccttcctatagtaataatgaatgaatcctacattcgtgggtgaaatattaagtcttgcattcagactgagttttcctgattaaacattctatatcttaataatactgataataccccacgtacagcagggagaactaaagaattttccactagtcattctataccaagaaaagccaccttctttcagttatagtcttagttacaagttctaaataaatccatgtttctgcatgtaataataatagcaatcattataaagagtattggattctgtctggttcatgtaacagaatcttgtgtctatcaataaaatccaaaagcagctctacccagcatatcttttggtacagaataatgttccttcaccattattgcccaataaaagtggttg

SEQ ID NO: 5263 - DNA, 1268 bp, Cricetulus griseus
gatggcgctggaagctggcgacatggaagacgggcagcttttccgactcggattccgacatgacggtcgtacccagcgacaggccggtgcaaatggcgaaagtgctaggtggggacagtgttgcttgtgcaccagtgtcacattatcggactgttaaaaatgtggattccagtgaggagagtgtggattcagatgaagactgctctctttggaaacggaagcgacagaaatgtcttaaccctcctcccaaaccagagccttttccgtttggccagagcagtcagaaaacagctctcaatggagggaggaaggtgaacaatatttggggtgctgtgctccaggaacaaaatcaagatgcggtggccattgaacttggcatcctgggaatggaaggtacccttgacagaagcaggcagtctgagacctacaattatttgcttgctaagaaacttaagcgggagtctcaagagtccacaaaagaattagacaaagatctagatgaatatatgcatggtgataaaaaaccggggtcaaaggaagaagagaatgggcaaggtcatctcaaacggaaacggcctgtcaaagacagactgggcaacagagtagaaatgaactacaaaggccgctatgagatcaccgaagatgactctcaagagaaagtggctgatgaaattgctttcaggttacaggaaccaaagaaagacctgatagcccgagtagtgaggataattgggaccaaaaaagccattgaacttttgatggaaactgctgaagttgagcagaatggtggtctttttataatgaatggtagtcgaagaagaacacctggtggggttttcctgaatctcctgaaaaacactcctagcatcagtgaagaacaaattaaggacattttctacattgaaaatcaaaaggaatatgaaaataaaaaagctgctagaaaaagaagaacacagctattggggaaaaaaatgaaacaagctattaaaagtctgaattttcaagaagatgatgatacatcacgagaaacttttgcaagtgacactaatgaggccctggcctctcttgatgaagcccaggaaggacctagcgaaaccaagctggatgctgaggaagccatcgaggtggaccatcctcaggatttggacatcttttaggcatattttgaacattttgaagaatagacctttgtaaaaacaatagtttccgtttctactgaggttgctgtatgcactgaatctggagaaaggaaagctgtttttgtttct

SEQ ID NO: 5264 - DNA, 1268 bp, Cricetulus griseus
tgcggctgcctgcccaacccgggcacgttcgaggagtgccaccggaagtgcaaagagctgtttccagttcagatggagggcgtcaaacttacagtcaacaaagggttgagtaaccggttccaggtgacccacacagttgccctcggcacaattggggagtccaattaccactttggggtcacgtatgtggggacgaagcagctgagtcccacagaggccttccccgtgctggtgggcgacatggacaacagtggcagcctcaatgcacagatcatccatcagctgagcccaggcctcaggtccaagatggccatccagacccagcagtcaaagttcgtgaactggcaggtggatggggagtaccggggctccgacttcacagctgctgtcaccctaggcaacccagatgtcttggtgggttcagggatcctcgtggcccactatctccagagcatcacgccatgtctggccctgggaggagagctcgtttaccaccggcggcctggagaagagggcactgtcatgtctctagctgggaaatacacgttgaacaactggttggccacagtgacgctgggccaggcgggcatgcacgcaacgtactaccacaaagccagtgaccagctgcaggtgggcgtcgagttcgaggccagcaccaggatgcaggacaccagtgcctccttcgggtaccagctggacctgcccaaggctaacttcctcttcaaaggctctgtgagcagtaactggatcgtgggcgccacgctggagaagaagctgcctccccttcccctgacactgtccctgtgcgccttcctgaaccaccgcaagaataagttcctgtgcggctttggcctcaccatcggctgagccctgtcgcccttcctctgcagaccaccgctgggccgccgccctcccctcctctccctccctcctggggccagggcagcgggaaggaggggacccacctcatgctcgaggatccccagcgccaggggacagtgtccgggggcctggggtcccggagggagttctggaatttgaagggcactcggttatgagcgccctggtagaggtggctggacaggctcagggacgaaagacgtgacgtgacgtccctgtcctcccgagggcggcagaggagcgcccggccgcccgtcactttcccctccacccctccatagaaatcatgtttataagttatggaagaacgggacattttacagaaaaaaaaaaacttaaaaaacaaaaaatacacaaggaaaaaaaaa

SEQ ID NO: 5265 - DNA, 1268 bp, Cricetulus griseus
gagaaacctgaaaaatgagatctaaaatgacatattcaacctccagaatttccccagccacgctgagcagcgcaacaggcaaagccctggtgaaaccatgcgcgctaagaagatcccaacagaagaccaaagaaatttgccatgtctactatatgaggctccgttctggccttaccataagaaaggagacctgttactttgagaaggaacccaccgaaagttattcactaaaatcaggtagaaagcgtgaaaggaaattctttgcctactcctgcctccctgagcacatacaatgaccaatgtgttagcttcaaagttttggagaatggacgctatgtgatcaatgttgaagactctggaaaagaccaagaaaaagacaagatgctgctacgttactatgagtctccccgttcctcgaatgaatcaggtgatggtgtggatggtaagctactgatggtgaacatgagtcctatcaaagataaagacatcaggctgcatgccaatgacaagaaccactctgtgaagctggaaaagtgtcaatcccctctgccagaagaggtctttttcgtccttcacaaaaagtcctctgactatgtttctttcgaatgtaagaatcaacgtgggacatacataggtgtgaaagacaaccagcttgctctagtagaagaaaagaacaatgaaagtgaaaatatcatgtttaagatttctaaagtttaatggaataagatgcttgtatgctctgggttgaacaacttaaatgttaccactaaagaaagagtgagagaaagaaagaatccttctcaccagttcccaagagctatcactttggatgtgtgcatcaacttggatgaaatttctctatggcttgctctccttacacaaaaattcttttgttgtttgggttcacattggcactgctcactgtggaatatattagcttaacttttgctctttctttggttcttttgaccaacatatccttaacatatctcctcctccctaaacgtcattcttgttttctctgacatctatatgccaacacttttattctgctttgtttacttagcacttcagaattttatgtatacctaatggtttcaagtttgttcactaaacgtttttttgtgtgtgttttactgttactaaagtagtataatttatgttaaccatatagtaatattttaatctactaaaggaatagctttgcttacctagacaacagcaatttctactacatttttatgacttaaaaagcactgtgatgactc

SEQ ID NO: 5266 - DNA, 1267 bp, Cricetulus griseus
  modified_base (262)..(262): a, c, t, g, unknown or other
  modified_base (280)..(280): a, c, t, g, unknown or other
  modified_base (284)..(284): a, c, t, g, unknown or other
gcgatacaacctgacagcacaagatgtgggctctggcaccaccaataatagccaggcctgtgcccagttcctggaacagtatttccatgactcagatttgactgagttcatgcgcctgtttggtggcgattttgcacaccaggcatcagtagctcgaggccagtctagacgtggaatacctgatgagtgctggtgccacatctccacttgggtctacagtagccctggccggcatgaggcacaggagcccttcttgcatggntcctgcttctcagcaatnagtnaaccttgccacatgtacatactgtgagttatggagacgatgaagactccctcagcagcatctacatccagagagtcaacaccgagttcatgaaggctgctgctcggggtctcaccctacttttttgcctcaggtgacactggagctgggtgttggtctgtctctggaagacacaagttccgtcctagcttccctgcttctagcccctacgtcactacagtaggcggcacttccttcaggaatccattcctcatcacaaatgaagtagttgactatatcagtggtggaggcttcagcaatgttttcccgcagccttcataccaggaggaagcagtggcccagttcttgaagtccagctctcatctaccaccatctagttacttcaatgctagtggccgtgcctacccagacgttgctgcactttctgatggctactgggtagtcagcaacaaggtccccattccatgggtatctggaacctcggcctctactccagtgtttgggggaattttatccttgataaatgaacacagaatactcaatggccgcccccctcttggctttctcaatccaagactttatcagcagcatggagcaggactgtttgatgtaacccatggctgccatgagtcctgtctgaatgaagaagtggagggtcagggtttcattaaaaaaaaaaaaaaaaagaacacatttcatcttccagataaaggagtgtttttacttgtacaaactcttcaaagattactgagtaaaagtcagggacatcaaaacctaccttcaaaatcagggaataaacgttggtaatatctgacacttggaattaggcagctgatgttagctccctttcttccttgcactgttcctacatgtagctgggaaacaaccatacagtattgaaattgccagtttgtttgcctttccttcctcagactgttgttgctagtgagccagaatcttatactactttgtatccctaggtcc

SEQ ID NO: 5267 - DNA, 1267 bp, Cricetulus griseus
tgtcctacggggagatgattggctgtgacaatccagactgtccaattgagtggtttcactttgcctgcgtggatctcaccacaaagcccaaaggaaagtggttctgtccacgatgtgttcaggagaagaggaagaagaagtagcaagctaatatatttcttcactcatgttgcaatattatctttcattttaaaactaccttatttcaactgatatttaaaaatccagtggccagttgtcattttggatatttcccaaaataagaagccactgcaccattttgcacagaacaatctcacagggacttgccacggtgactttacatgcaggctcccctctcctgcaacctcccagcactgggaaagcaacaccacctgtggtgagtgtcacttggggctgtaggccaagtgcgtggtgcagggtgaacacggttttaacctggtgtactgccactgttttgtgacttgagggtcagccttgagtgtccatgttttccaggactgtcaacttttttttttttttttttggtctttaagaagtttcttatagaagaagcatgatgaattataaaaaactgagccctaagatctgtgaacatgctagaggtgtgatggtccaagcagtgctgaccgtctgcctgtccagcaggtgaggtcagtaggagccaggccaccggctgtgtcttccactctgcagtgaagagccatgtggtgtgagggcttgtggatggctgaggaggtggccacctgcttgctcctgtgcatatggcatcttgccttctatccctcacctgtccccagaaggccttggcagggatgcttcaagcaataacactgtccagagatcaactcctccatgctctaccgtgccagggttggccctattatgaggttaggtcttcagggtttgaaaccaaacagtgaggggcattcatttcaggctttgaacccattttctatgaacggagactggtcttcactgcctatactgagaggagctttgaagcaaggaggtctaagaagtgtcttttccctcagaatgtgctgtggtgttcgttctctgccacactccatccatcagggtgatgcagctttaacatgaatgtcactattttattttcaaggtaattattacctatgtcccctttgtaaaggagagatattattgtaaatctttttattaaataatgtaaagatgtatatctgttattttttggatcatggattatggatatattgtttaataaataaaatattttgggaagaaa

SEQ ID NO: 5268 - DNA, 1267 bp, Cricetulus griseus
ccgccacttcacctgcgccggggcccgcgttctccggcatgagcccgacgccgtttgcagcggtctgcccaggccgtcctcctgcccctgcggcctcggcgcgcggacggtcgcggacggttgtaaagaaggaagccctgttctttccattaaaatgaagtgttttaattgcaaccctgacctttctgaactgggaagtggtaaaacctgaggacagtgggagacaaggttcctacaatcctgtgtgtttggagccttcctgtaaggattgctttagaaaccaggaaaggctgtctttcattgagtcgccaactgtgggacatgataacaacaaggaaaatcaacatgtaacagaaaatcctcaatagtcccagtgaaatagaagagctagaggccagtagactgtatgaagacagtggctatttgtcatttacacatcaaagtgaccaggaggatagtacccttatcctggagaatttcagaaacagtccccagccctgcctgctgccatcacagagctcagaccagtatcccaacaaaaacctgctgcctctcttggagtttgaaagagtggtctgttcaacattaaagaagaattccaagcgaaaccctaaagtggatcgagaaatgctgaaggaatttatcgccagtggaaactttagactacaaaatataattggcaagaaaatgggtctggagcacctcgatatcctcagtgagctctcccgtaggggattcaaacaccttttagctaatattttgacgaagctgggcgacatggatttaataaatttgtctaaagtgagcaaaatttggaagaagatagtagaaagcgataaaagagcattccagctaatacagcaaagcaatgcagagagtccttgaaagcagtaagttgtcactgcactcttcaaccagaggatacgttgtgggcagaactgcactaacttctgttcagaagtcatcgacttgggctcctcccaaaaaagatgctcaagccaagttccccaggcagcgtgatcagaaaggctctgcctacagccggcacagtgagttccttgaggtggccaagacattaaaaaacaatgaaagcctgaaaagcctgtattcggtgtaatttccctgcaaaaatatgacccactatttagagcgagctacctgcaaacgggaaagctgtggattcgactattgtacaaagtgtctgtgtgattatcataataacaccaaagactgttcgaatggcaagctcctaaaagccagctgtaaa

SEQ ID NO: 5269 - DNA, 1267 bp, Cricetulus griseus
  modified_base (1162)..(1162): a, c, t, g, unknown or other
  modified_base (1224)..(1224): a, c, t, g, unknown or other
aattaacttttttttttttggtaagtttttgatgttagcacatttgcatgattaatctcagttgtcagtgtttaatttcgacattccattttatacatccgtaggtatctataaatttgtcttaaatgttaagttgaaaggaactggttttaagctttctatctaaagaaaacaaactgattttaatatttgttcacctgaaatttatttttgcataggttgaaaggaccaaggtacttgagtaatgattaaagggctattatcagtgttcatcctatacacaggaaatatagtatttaaaagtgagaacctggttggggattactttgcctaaaatacattagtcccaatttatctcgacaatcttgctgacaatagtagcttgattcagtgataaattgtcttacattaaaatgatttctagatgacttgaactaaaattaatgcattttactaagaaactgtttttgcttttaattacttatccaagtgctccaaatgaaatgtcattttgaactatgtacagtaccccaggaagaggtcagatgagtcacaagactgtaagtaccactgtgagcgctctggaggtgaacctgcacacattacagtgagtagactatcccagctataaatagatttttttagttttaatagctctgttttgaagtacttttttaatgcagataaaaatatcaggaaattaaccttatatggcacaaaccaaatacatagtagtatatggatgagtttctacatttaaagagctaagaaaataaggttacaggattgtattatagtacatgattgaaactgcaagaagagacaggtcttaaaacgttattaagaaaactgctaaatcccgccacgggatgtttagacatgtgtagaacatagctcagttttttaaaaggcaactgacctaaagggttaaagttgtaactgacacatttcaaattaaaattatgtttattttgtacagaaagcaatgttaaacacaagcaaatctgttgtatgtaataagtgacagagttttttaaaaattatttagctttattgatgttttgttttatttcttctagacctggagtatcatgtcataaacggcagtcttgcaccgaggtagcaggcccttttctttttgtacatattgattggacctttntttactgttaagtggacactttctatgttagttttgatgcataattcttggaatccttttanacaactagaatgtatgtgtaagatttcctgtccctgcaatgta

SEQ ID NO: 5270 - DNA, 1267 bp, Cricetulus griseus
ggaccggtaggggaaatgccctcggcggtttgcttcgctctgtagaggagcgatggggaggcgttgggcctggcctgaggtaggagggagcccagctgtcgctgcttgtgcctgagccgtgatgctcgtgtgggccctactctccgcggtgctctggtctgtcgcaagagttggagcgctacgttcttctttattcagcaagaaaggctttgtttacggctcgatagaaaacccagtgaaaatatatgtaaagttacatcaggattcccctatccttttttgtatggatgttaatcgtgctagtaaagaaacagtggaccccacctacttatggattgggccaaatgaaaatacattaacagagaatggccaaataaacttaacaaaggaaggagcactgatagtgaaagattttatggaatcattatctggactttacacatgtactctttcctataagaccatcaaagcagaaacccaagaagaaacaacaataaagaagagatatgactttttgatctttgcctatcgggaacctgattattcttaccacatggctgtgcgctttaccacaaagtcttgtgtaggaagatataatgacctgctctttagagtgctgaagaaaatcttggataatttaatctctgatttgttgtgccatgtcatagaaccatcatataagtgccattctgttaaaattccagagagtgacttcgtgaatgagctattcatagcctttcaagtgaacccttttgcaccaggctggaaaagtgtctgcaatgactctatagactgtgaagatgccactaaccgtaacatcctcgaggcaagagatcggatagaagaattttttcggagccaagcatacattttgtaccatcattttaataaaactataccagctatgcattttgtcgaccacagttttcaagtagtacgtatagataactgtcgaccaggctttgggaaaaatgaaggtctacacagcaattgtgctagctgttgcgtggtctgcagtcctggaacattcagtcctgatgctgatgtcacctgtcagatctgtgtttctgtccatacatacggagctaaagcttgcccataaacttcaagaccagagatgaaagcatggttacttgcccctgaaggtggggacaaagatttgttcacatctgagcacatcatagatgcctccagaaagtaagaacagtaagagcaaaactctggggatgtgcattttagaaacagcaacagaaaagagttgacatgg

SEQ ID NO: 5271 - DNA, 1267 bp, Cricetulus griseus
ccgccgccgcgctctgtatgccgcgtgcccccggcgcactcgccgccgacggtctgagcccgaggagccgccgccgccgccgcggttcatgtggttgggccggggctgagtaggccgccgagatgccgcagtccaagtcccggaagatcgccatcctgggctaccggtctgtggggaagtcctcattgacaattcagtttgttgaaggccaatttgttgactcctatgatccaaccatagaaaacactttcacaaagttgatcacagtaaatgggcaagagtatcatctccagcttgtagacacagcagggcaggatgaatattccatttttcctcagacatactccatagatattaatggttatattcttgtgtattctgttacatcaatcaaaagttttgaagtaattaaagttatccatggcaagttgctggatatggtggggaaagtgcagatacctattatgttggttggaaataagaaggacctgcatatggaaagggtgatcagttacgaagaagggaaagctttggcagaatcttggaacgcagcttttttggaatcttctgcaaaggaaaatcagactgccgttgatgtttttaaaaggataattttggaagcagaaaagattgatggggcagcttcacaaggaaagtcttcatgctcggtgatgtgatgattctttctgctgcagagcctgaagacacctgggaatttactccacctgaagaagcaaactgcccgtcatccttgaagataaaactatgcttctgttttcttctgttaacctgaaagatgtcatttgggtcagaggtcctcccctttcagattatgttaacgtctgactctgtccaaatgagttcacttccattttcaaattttaaacaatcatattttcaatttatatattgtatttcttaatattatgaccaagaattttatcggcattaatttttcagtgtagtttgttgtttaaaataatgtaatcatcaaaatgatagacatgttacactactattaactaggcttcaatatatcagtgtttatttcattgtgttaaatgtatacttgtaaataaaatagctgcaaaccttaatttgtttttgtttttgttttggtttttcgagacagggtttctctatgtagctttggagcctgtcctggaactcggctctagagaccaggctgacctcaaactcacagagaccaacctgcctctgcctcccaagtgctgggattaaaggcacgcaccaccaatgcctggct

SEQ ID NO: 5272 - DNA, 1266 bp, Cricetulus griseus
  modified_base (1254)..(1254): a, c, t, g, unknown or other
accctgcaggcatctttcttaacaaagaagttaaatattggtggaaaaagagtaaaccttgccatatgggatacagcaggtcaagagagattccatgcattgggtccaatttactaccgagattcgaatggagctattttagtttatgatataacggatgaagattcctttcagaaggtaaaaaactgggtcaaagagctacggaaaatgttgggaaatgaaatctgtttgtgtatagttggtaataaaatagacttggaaaaggagagacatgtttctatccaagaagcagagtcgtatgcagattctgtgggagcaaaacattatcatacttctgctaaacaaaacaaaggaattgaggaactcttccttgacctctgtaaaagaatgatagagacagcacaagtggatgagagggcgaaaggcaatggcgctagccaagctggacctgctcgtcgaggtgtgcagatcatcgacgatgaacctcaagctcagagcggtagtggagggtgctgttcttctggataactgctcacgtgtgaaactcaaacaaaacagaactgtggatcattgccctcaacatgaagactgccatattccaagtcacgtcattttaccaatggagttagaattaacagtattttaaattacgtttataacactgaagagaccttaagtgctaaacttagtggagtttgtgaccagagaattggcattttctacaaatgttaacaaagcaattaccaatggcctttttacatattttttctttaatgaggaataatatgcatgtagaaaagacctacttaaaggcttcatttatattcttttaaatcagatctttatttaataacttatatatgatgttggaatggtatacatttttgcagtcctttgtattttgtggtagtttgaattgtatcacttctaaacagcatactgtttttgtttttgtttttgattagcagatacctgaagttctatttttgcagggtttgcacaggcccctaactgtctactactttgatataatctataaacatcctgtatgctgagctggtaaaatacattgtaaattacatattaaatattttatctgcttttacaagcgcaaggtgcaaaaacatatacaattgtcttattggtgactgtaaagtgaattagctgttggtgacgatccctaagctttttgactctgttacagtgatcaccctctttcactttgtcttaacgtgcttctgccaaaaaaaaaanaaaaaaaaaaaa

SEQ ID NO: 5273 - DNA, 1266 bp, Cricetulus griseus
  modified_base (1259)..(1259): a, c, t, g, unknown or other
aggaaaagggccaaaaacagattgtggatcatagtcgtttggaggaagggatccgatttctccatgctgactacctttcccacattgcaactgaaatgaatcaagtgttctcaaccagagactgtgcagacctcaaatctctatggtattcagatttcaacaacccagaaagcagctgtcaaacaagggctggagttcaaagaaactcctcccagtaacagtggaaaccgagctgctgtccagggtgaccacccccagttgcagctctctcttgcaattgggctagatgatggaagtgctgaacagcagagggcccatcctgctgcccaggctgtggaggagcaccagaagcccccagtgtccatcaaacaggagcgatgtgatccagagactgtgatctcccaaggccactcctcatcctcttccgaagtgactggtccctcttttacagagaacagtatcaaagtccacttatgccattactgcggggagcgtttcgagtcccgcagtaacctgagacagcacctgcatacccatgtgtctggatctctcccgtttggtgttcctgcgtccattttggaaagtaatgaccttggtgaagttcatccacttggtgacagcagtgaggctcttgaatgcaggaggcttagctccttcattgtcaaggagaatgagcagcagccagcgccgcctgagcactctagccgaggtcctgcagagcctttacagatcagtcaagtgtctttgatctccaaagacacagagccagtagaattaaactgtaatttttctttttcaagaaaaagaaaaatcagttgtaccatctgtggccataaatttcttcgaaagagccagttactggaacacatgtatacacataaaggtaaatcttacagatacaacagatgccaaaggtttggaaattcattggcccagaggtttcagcagtattgtgacagctggtccgatgtccccctgaaaagttctcgcttgtcacaagaacatttagacttgccttgtgccttagagtcagagctcacacaaggaagtgtggacaccatccttgtcgagtagtagcttctcctttagaatttttataccagtcttggaaaagattcatgcaccattttttaattcataaattatttacttcctcatggtctgttgacttaaaataatttgtccctcgttttgaggttgtgcataccagttcttattataagacatggctattaaatgtaactttcaaattaaaaaanaaaaaaa

SEQ ID NO: 5274 - DNA, 1266 bp, Cricetulus griseus
  modified_base (46)..(46): a, c, t, g, unknown or other
cagctcggcatgcccatctaacagaagaggaacagtattgaaattncggggctcacacacggcttcgaaggcctgaggctcaaggagaggaccatgtctgcgtcggcggcagacgtggctccacggactttctcagcgggctcccagtccagtgtcttctctgacagaacaaagcaagaggagagtgaagaacaggacagtgacaggtacagccacaagaagtccctttctgatgccaccatgctgatacacagcagcgaggaggaagaggacttggatgaggaccacagcagagcacacactgtctcagctgtgtctgagccccgcctgaccgccacttactctcaggagcaacagctgagctacccctgtgcttcggtgaccacagtccccggccctctgcatatccttgagcccaagtcccattttacggagcctgagaagagggtgaaggacatcgactcgggctgctatgccactacaggtttgaagatgaagcaccttctcacagggcaggagaggacagtttggcatctccagtacacagactggcctgagcatggctgtcctgaagacctcaaaggatttttatcataccttgaagagatccagtctgttcgacgtcatacaaacagtacaagtgaaccgcaaagccccaaccctccactgctggtacactgcagtgctggcgtaggaagaactggtgtcgtcattttgtcagagatcatgattgcctgtctggagcacaacgaggtgctggatatccccagagtgctggacatgctaagacaacaaagaatgatgctggtgcagacgcttggccagtatacattcgtgtacagagttctcatccagttcctcaaaagctccaggctcatttaagctcccacatctttttatggggacccaatcatgtgaagtgtttacagcggaaagaaaaagaaaagaaaaagttttagctagaagctgaacttttatgtggggtgagccacagactgagtagttcttgagtaactatttaaaaccattattagcttttgtttaagaagaaaaactacagggaactaagtggtttattcaccaaatccaaaactaaagaaaatctaaaagtgttattttgaaacatagaaagcatttttatattcagaatgttttttatcctaaaagttctatatatttgtaccttctatattttccaaataagagctcaatttgttatgatactgagttaatgtgaagttggggataaaggcacattatttaaaa

SEQ ID NO: 5275 - DNA, 1265 bp, Cricetulus griseus
aggagctgcaaagttggttagtggctgtcgcagtatttttattgacattttatgttatttctcaagtatttgaaattaaaatggatgcaagcttaggaaatctatttgctcggtctgcactggactcaactgctcgctctacgaagcctcccaggtacaaatgtggaatctctaaagcatgccctgagaagcattttgcttttaaaatggccagtggagcagccaatgttgtggggcccaagatctgcctagaagacaatgttttgatgagtggtgttaagaacaatgttggaagaggaatcaatgttgccttggtaaatggaaaaacaggggaggtactagacaccaaatattttgacatgtggggaggagatgtggcaccattcattgagtttctgaagactatacaagatggaacagtagtgctaatggcaacatacgatgatggagcaaccaagctcaatgacgaggcacggcggctcattgctgagctggggagcacgtccatcaccacacttggctttcgagataactgggtcttctgtggtgggaagggcattaagacaaaaagcccctttgaacagcacataaagaacaataaggacacaaacaagtatgaaggatggcctgaggtggtggagatggaagggtgcatcccgcagaagcaggactgaagggaacgtgaagaccagagagaggacgcacgcactttgattctgaaggagagctgtaaagcagccgctccgtgtacatattttagtagcatgcggctggccagggtgtgcatgagcaagagcgtctctgttgatcccgggattatttattgctaacataaatggctacctttgtaaatagccctcgtactgaacaaatcaccggaccatttttaagcacatttccctaaaagtacaatgtttagacttcagtggcaataatgtacttttattctaaaagcatatattcaatgggtaaccagaaggttgtataggacactgatttacattctggttgctgtgaaactctatcatggaaaacatgccttttagggaggaaattttgttcatacatgtctctgtataaatatctggcatgtgctgacagtatcctttaaattaaagagatttttggctagttgtatgtgtaatgtgatcgtacagtctggctcctggtgtacctcttttcatagtctttatttttccttccaaagaatccaagaaataaaatatttcacataaaaattttcatcagatttgtgaaaagcacaa

SEQ ID NO: 5276 - DNA, 1265 bp, Cricetulus griseus
tgagctttgcccgagaccctcaaggtttcatcaatgattggcttcagtcccagtgccgggacctcaagactatgactgatgtggtaggtaacccagaagaggaacgccgtgctgagttctacttccagccttgggctcaggaggctgtgtgccgatacttctactccaaggtgcagcagaggcggcaagagttagagcaagccctaggaatccggaatacatagggcctctaccgccctcactggctgcaccaattctgttggggccctgtgctgcctgcctcaacatacctgtgctggttttgcttgaggcattccaggagatgctgttggttcaaggatagcatcacgatgaagagggtgtcacatttctgtttcacaggcacctattgtccgccctctggactgacctcctgtctcagtgctgtgtgaccccttagtgggtccatgtcagtattggagtgtgttttgaactgttgctccctcccacacactcccataaccgcttcccagcagaggctgttccttcctgctgttggaggagtggcttgttcattcactccaccctgccccctcccttaaatggagaaacaggcctaaaatcaaacgggtatagccctaggccatccctgtcttcctgtcccatgtctgcccagttgaaacccagtggtggcttctagggcactgaggagtgaaagcgcctagggctggagaataggtctgaaatgggtttgtgtctccccaccccctgccctcaaagcttcagacccctcaggtagcagcaggaaggtggtatcctgactccttggaacagtatctttgcatctttccaggggagcctcaggttcttccaggttttaccgcctggagttagcataccccaggctcagctcgcagacaacactgcagggtgggagacagctgggcaccggggaattccgttgagcatgggctctgaactcacagaactgacaaagcccctgcttccccaccccacctcaggctcctgcgagcaagtgttcctgccccctttccctgcctgttctgtactgggggcagcagtgttctctccgtcttccccctgtcctctacctatccccttggaaagttctccccacagcgacactggacaaccctggggcagctgagccccagcctgactcctggttggaagcgtcatgaggaaactcagcactcctgcagtgtctctgttgatgactgtttattaactgaattgtgggtttttttttgtctttgttttgtttt

SEQ ID NO: 5277 - DNA, 1265 bp, Cricetulus griseus
ggaaggtgcaaagcccgcacgcggaggcccagcgaaggaaagttgcatctcggtggtggaggcgacaacttctccggtccctcggccatggcggcttccgggagtggtatggcccagaaaacctgggaactggccaacaacatgcaggaagcgcagagtatcgatgaaatctacaaatacgacaagaaacaacagcaagaaatcctggcggcgaaaccctggactaaggatcaccattactttaaatactgcaaaatctcagcgctggccctactgaaaatggtgatgcatgcccgatcaggaggcaacttggaagtgatgggtttgatgcttgggaaagtggatggtgagaccatgatcatcatggacagtttcgctttgcctgtagaaggcactgagacccgagtaaatgctcaggctgctgcatatgagtacatggctgcgtacatagaaaatgccaaacaggttggacgccttgaaaacgcaattggctggtatcatagccaccctggttacggctgctggctctctggaattgatgttagtacacagatgcttaaccagcagttccaggaaccatttgtggctgtggtgattgacccaaccagaacaatatctgcaggaaaagtgaatcttggcgcctttaggacatatccaaagggctacaaacctcctgatgaaggaccttctgaataccagactatcccacttaataaaatagaagattttggcgtgcactgcaaacaatattatgccttagaagtctcatatttcaaatcctctttggatcgtaaactacttgagctcttgtggaataaatactgggtaaataccctgagttcctctagcttgcttactaatgcagactataccactggccaggtgtttgatttgtctgaaaagttagagcagtcagaagcccagctgggacgagggagtttcatgttgggtttagaaacacacgatcggaaatcagaagacaaacttgccaaagctactagagacagctgtaaaacaaccatagaagccatccacggattgatgtctcaggttattaaggataaactgtttaatcaaattaacgtcgcttaggtaccactgagtacttttcctgaaagcggaaatgtggaaaaaaaaaagctccagtaacacttttaaacctgttaccaagacccagactagaagactgcggtgctgtgcagagtcctgagtattattagcactgtaataaaactatcacgtgaaaaaaaaaaaaaaaaaaaaaa

SEQ ID NO: 5278 - DNA, 1264 bp, Cricetulus griseus
cgcacaatgggccatggagttcccgttcgatgtggacgcgctgttcccggagcggatcaccgtgctggaccagcacctgcggcctccggcccgccgacccggaaccacaacgccggcccgcgtggacctgcagcagcaaatcatgaccattctagatgaactgggcaaggcctctgccaaggcccagcatctccccgcgcccatcaccagcgcttccaggatgcagagtaaccgccacgttgtttacatactgaaggacactgcagcccggccggcagggaaaggagccattattggtttcctcaaagtcggatacaagaagctctttgtactggacgaccgtgaagcccacaacgaggtagaaccactgtgcatcctggacttttatatccacgagtcaatgcagcggcatggccacgggagagaactcttccagtatatgttacagaaagagcgagttgagccacaccaactggccattgatcgaccgtcaccaaagctgctgaagttcctcaacaagcactacaacctggagacgacagtcccacaggtgaacaactttgtgatctttgaaggcttcttcgcccatcagcatcggccccccactccctctctgagggcatctcgacactctcgtgccgctgaggtcgaccccacacctgctccagcacggaagctgccaccaaaaagggcagagggagacattaagccatactcctccagtgacagagaattcctgaaggtggctgtggagcctccttggcctctgaacagggcccctcgccgcgccatgcctgcagcccacccacctccacgctccagcagcctggggaactcgccggatcggggtcccctccggccctttgtgccagagcaggagttgcttcgctccctgcgtctctgcccgccacaccctactgcccgccttctgctggcctctgaccctgggggcagcccagcccagcgcagacgcaccaggggggctccccgggggctggtagcccaaagctgccactacagccgccacgggggactcagtacctcatccctgggtagaggcaatcaagaacggaagcagggggagcaggaagcagaggataggtcgtccagtgaggatcagaccttgttacaggatgggtctggggaggaacctgcgcactcagttgctccaagggtccagggttccggcagctggtgggtggggacgtaatgaacgccaggttcattcggaacctgcaggagcgccgcaacaccaggccctggt

SEQ ID NO: 5279 - DNA, 1264 bp, Cricetulus griseus
ggctcctacggtggccggagagggacgtgccgggccggaggctgcaggatgatgcgattcatgctactgttcagccggcaggggaaacttcggctgcaaaaatggtacctggccacctcggacaaggagaggaagaaaatggtccgggagctcatgcaggttgtgctggctcgaaagcccaagatgtgcagcttcctggagtggagggacctcaaagttgtctataaaaggtatgccagtctctatttctgctgcgccattgaaggtcaagacaatgagctgatcacactggagctgatccaccgatatgtagagctcttagacaagtattttggcagtgtatgtgagctggacatcatcttcaactttgagaaagcctactttatcctggatgagtttttgatgggtggggatgtccaggacacctccaagaagagtgtgcttaaggccattgagcaggctgacctgctgcaggaggaggatgagtcgccgcgcagtgtcctggaggagatgggcctggcatagccccgtcagccagccggggggccctgtggaattgggaaagccaagacaagagacagcacttggggactgtttctgccacctctcccccaggccccttctcttggtgggagcctgctgcttttcttcagccgcctcacctttggaaggagctgtggctccggcccttcattccaacattccctcttccaacattccctcactccaccctccacctttcccgttggaggctttaagagctaaaaggcagtaaaatgtgacctggatgggggtgctaagtggctctcgttcccctccatggaagaaccaatgtgaaccccagtcatcccccatccctccccttctcctttattgctgtaaatatataaatatgtcaggttaaagggaaaggtttccagggctcttttctcccctctgccccaaaacctacctctacccctccccatagccagccagggcagattctctgcctgggaggggttttccctctcctgccccccacttcctcctgggctccagtgtccagccagagccaggaaggaaccaccagtaaatatttttctaaccttgccacctggagggaagggacagttgggggaagggcctgctttctgggacactggccctatcaccccccacccccacccccaaactcccgcatcgcgtggacggtggtggagtgggccaagcggctgcctttatttcctttacttctgaaaataaaaggaaaaagtgtttctgg

SEQ ID NO: 5280 - DNA, 1264 bp, Cricetulus griseus
caagctaccccaaagacagcctcctggacagcatgtgcccgccgtctgcaacgcctgcaggtcttggctctgagcaggagttccagatgttgcccaagtctcggctcaatactgtcagtgtcaatttactgttccatcacgcaggacttccctggcagcaacttgaatttgctcaccaatggctctgggaaacccaaggaccatgactctccagagaatggtacagacagcttcgagagctccgactcgctcctgaggtcctggaacagccagtcgtccctactagatgtgcagcgggtaccttcctttgagagcttcgaggaggactgtagccagccactgtgcctcaataaaccaaccatgtccttcaaggactacatccaagagaggagtgacccagttgaacaaggcaaaccagttattcctgcggcagtactggctggcttcaccggaagcggacccatccaactgtggcagttccttctggagctgctctctgacaaatcctgtcaatcttttatcagctggacaggggatggatgggagttcaagcttgctgaccctgacgaggtggcccgccggtggggaaagaggaaaaataaaccaaagatgaactacgagaagctgagccggggtctacgatactactatgacaaaaacatcatccacaagacgtcaggcaagcgctacgtgtaccgatttgtgtgtgacctgcagaacttgctagggttcactcctgaggaactgccatcctgggcgtccagcctgacacagaagactgaggtccttgggacgaccttgagctggccccgggcccggggaccgtgagtgggaagcctgtcctgacccactgctccaaagacccttggagggcaggatggaacccctcctgggagctgccaagcagcaatggcctcctttcattccatgcctcttccacaaggccatccatttcggaagtcattttgtacatattattgtatcttataacgtcaaaatccgccaaccgttctatttaacagaaattgtatattgtatttaaaagtaattataactgtgtttgaatcaagaatgcagatacctggtagattttcttttctttttttttttcactagcacctaggaatgtcattttacacagatttaatctctcaggagctaactgagagaaatcgtaatatactgttttcatttgattttccaacaggaatggggtctgagggatgacccctggtttttactttgttttgttgttgttgttatt

SEQ ID NO: 5281 - DNA, 1264 bp, Cricetulus griseus
ctttctggaattgttcccatagggatccgtagagctcctgagccgcagctggcgcaggccactgtctccgcctgatccattcattggaagccggtcttttctccgaatccaagttccttgcgtgctgccccttagagcggcgggcagcgacatggagaagagcagcgagaccaacggctacctcgacggcacccaggcagagcctgaggccgggccccgcacgcccgagacggcggctaggaaatcgcggcgctgcgttgacttttttcggcgccaggcgctggtactgctcactgtgtctacttcggcctcaccacgctgagcgcctctgcgctcgcggtcgctttggcgttcatcatcaagccagggcgggcgcgcagaccctccagtccggcagcctggggttggaggactcggggtctcctccggtctccaaagagacggtggactctttcctcgacttactaagaaacctgtttccttccaatcttctggttgcagcgttctcttcgtctgcaaccaattacacagtggtgacccataacaccagctcgggaaacgtgacctacgagaaggtccccattgtcactgatattgagggaatgaacattttaggactggtcctttttgccctggtgttgggagtggctctaaagaagctaggccccgagggagaagagctcatccggttcttcagttcctaacatggatggcgcagccatcttccagtgtgtggccgcagtgttcatcgcccagctcaacaatgtggacctgaatgcagggcagattttcaccatcctagtgactgccactgcatccagtgttggagcagcaggcgtaccagctgggggagtcctcaccattgccattatcctagaggccattggattgtccacagattacctctctctgatcctggctgtggactggattgtggaccggactaccactgtggtgaatgtggaaggggatgccctgggagccggaatcctcaaccatctgaatcagaaggcaatgaagaaaggcgagcaggagctgcaggaagtgaaggtggaagccattcccaattgcaaatctgaggaggagacatcacctctggtgacacaccagaatccatcaggctctctggtcactgctccagaactggaatccaaggagtcggtgctgtgatggggctgggtcttggcccagcctgctagttaccagcaaccccaccctggtagcctgccgcattattggctggtcagtgtattactacagtttg

SEQ ID NO: 5282 - DNA, 1263 bp, Cricetulus griseus
tccattacttacctcacctgcagccttttggcgcaccttctgcaatccaagtcagagctgtcgcactacacctttactttgtggactacgtcggggtcagcgtctaccagtatggcagcgcgctggctcactttttctacagctcagaccaggcctggtacgagcggttctggcttttcttcctgccagcagccgctttctgtggttggctatcctgtgctggctgttgctatgccaagtatcgctaccgaaggccttatccagttatgccctaatagaacagccaccctatgctgctggtcttggtaactgaggaaactggcccatggactctgatcttactaggatttcagagcgtctagggtggaaatgtcagaattttcaagaagatccattgaaacccttagacagaatggagtattcaatttatctgatatctggtctcatccactgagacactggcccctttctcaggataaccaactagctggctgatttgcctgaagtactattcccatccctagtctgcatggtaatataaagaattccaaagctattacacttccaggaaatgcttggagccatatgaacattcaggaagctgatttttcaggtcatacagaaacatcagaaaatgcaacagtgccaagagctaccaggagacccagccagcaaacatggatacactgtctgtcttttgcccatggggaccttctagtttgtctgtgtgcagtgcagtattaactgtgagctattttagggttgtcttgcaggcagattatctgaaggtttgaacagactcttctaaaatcttggctctaaagttgctcgaaggatctgtattatttcaagaggaacctaagacccaaggttcaaatttctgttagatgctggcccatgaaggaccaacacagctaccccaatctggggtccacaaacaggtagttctgcctcaagttggagaagaaaccttaaacaggtcctaggacagataaatatgtgctcactgtggttggcccctgaaggtcctttgagtaagaatgaggcacctgatggccaaatgcactgtttgtaatattgctctgtgcagcccctgtgagatgggcggtgcttgcagctgataggttctggccacacagctctctctgaggattgatttctgcattaatccagtgaaggaggctgtggtccaggaagagctgagatgccctctcctacacaggctgtgtttcctctcagtataaggtctctccgtaactaaaa

SEQ ID NO: 5283 - DNA, 1263 bp, Cricetulus griseus
ggtgtcagttcgaggcgccgccgccgctgcagccgccggagccgcgatgcctaaaggaggtagaaagggaggccacaaaggccgggtgaggcagtatacaagcccggaggagattgatgcccagctgcaggctgagaagcagaaggccaacgaagaagatgaacaagaagaaggtggagatggtgcttcgggtgaccccaaaaaggagaagaagtctctagactcagatgagagtgaagatgaagatgatgactaccagcaaaaacgaaaaggggtggaaggactcattgacattgagaatcccaaccgggtggcacaaacaaccaagaaggtcacacaactggatctggatgggccaaaggagctttcaaggagagaacgagaagaaatagagaagcagaaagcaaaagagcgctacatgaagatgcacttggctgggaagacagagcaggccaaggctgatcttgcccggctggcaatcatccggaaacagcgggaggaggcagcaagaaagaaagaagaggagaggaaagcaaaagatgatgcaactttgtcaggaaaacgaatgcagtcactctccctgaataagtaagctggcctgtgggaggagatgccggggaactgggccgtgccgccaggacctctgctgtgtctcacccaccctgtgccctggcgcctctgcagcagcccctcatggccaggagcccctacggcctggggcctcctcttcatcttggcacagaaatcgttcaggggatgtggggggggctgggggaggggcagctgctatctttgagacagaaagatgcaggacagcatttcatacatagccatttgaatgtttttgctgtttttagaatttggaaccctggttggggggggtgcctgggaagtggggtaaagagattccatttgtccagtagattgcacgttgtgggggaggggggtagtgccagcaggcagctgctgtgggagttgatgacaaccagcccagattgttgtctgggtgctcactcagaggggctgtcgggaagcctgtgcccctaagggtccaaggtttgtgcctggccagttccatccaatgatgcctctcccctgaccttctctgcccccttcccatccacctggtcagggctagtggccatttttaaccctacccattgatcatttcaagaaacctctggttactgtgcaccacccagacatgttcctcaaattcaacttgtatatttggcagattaaacgacattatcataatacctt

SEQ ID NO: 5284 - DNA, 1263 bp, Cricetulus griseus
gtttcctaggccgtgtccataggcccgggccaccccttacgttcaacaccgctccccggtgtcggccgggtctgccatggacgactatgctgttttatccgacactgagctggccgccgtgctacgccagtacaacatcccgcatgggcctatcgtgggctccactcgcaagctctacgaaaagaaaatcttcgagtacgagacccagagacggaggctctcgccccccaactcgtcatcctcttcattctcttacaggttctcagacttggattcagcctccgtggactcagacatgtatgatctgcccaaaaaagaggatgccttactttaccagagcaaggaatataatgacgactactatgaggagagttatttgaccaccaggacatatggggagcccgagtctgtgggtatgtccaagagctttcgccagccagggacctcacttgcagatacccacaccttccatcaccaggttcgtgatgatattttctcttcttcagaagaggagggcaaggatagggaacgccccatctatggccgagacagtgtctaccagagcattgcacactaccgtcccatttccaacgtctccaggagctccctgggcttgtcctattatcctacatcctccacctcttctgtgtcctcttcttcatcttctccctcttcatggcttacccgacgtgccatcaggccagaaaagcaggctcctattgctgctctgggccaggatcgtcaggtcccactctggggccagctattgctcttcctggtctttgctgcctttctgctctttgtttactactccatacaagctgaagaaggcaaccctttctggatggatccctgagagtattggtttctgagcagctcttaacaagagttttggctgattgccttatcagtgtttgctgggggtagggtgggtgagggctttttatgtgttctttaaggggttcagggcctagcctagggcagtgcttatctcccacctcctcctgccaagaaggcagcaaatgctggccttccacaacccattgggcccatatgtaccttcctctggagcctcctagtcctattgcttctgacccttagggctccaggagataagaccccacttctttagaggaaaacttggtggaggtgatggtagttgtcatgcatgcctgtttgttgtcacccctttttagggtgtattaaccaaaggccaccctggctttgttttgtggacacaataaaaaacacaatttaatttta

SEQ ID NO: 5285 - DNA, 1263 bp, Cricetulus griseus
gactcgggtgaagatggcggcagccgaggccgcgaactgcatcatggagaattttgtagccaccttggctaatgggatgagcctccagccgcctcttgaagaagtttcctgtgctcaagcagaaagcagtgagaagcccaatgctgaggacatgacatccaaagactactactttgactcctatgcccactttggcatccatgaggagatgctgaaggatgaggtgcgtacccttacataccgcaactccatgtttcacaatcggcacctcttcaaagacaaggtggtgttggatgtgggttcaggcactggcatcctctgcatgtttgcagccaaggcaggggcccgcaaggtcattgggattgagtgttcgagcatatctgattatgcagtgaagattgttaaagccaacaagttagaccacgtggtgaccatcatcaagggcaaggtggaggaggtggagctgcctgtggacaaggttgacatcatcatcagcgagtggatgggctactgcctcttctacgagtccatgctcaacaccgtgctgcatgcccgcgacaagtggctggcacccgatgggctcatctttccagaccgggctaccctttatgtgacagccattgaggaccgacagtataaagactacaagatccactggtgggagaatgtatatggttttgatatgtcctgcatcaaagacgtggccatcaaagagcccttggtggacgtggtggatccgaagcagctggtcactaatgcctgcctcataaaggaggtggacatttatacagtcaaggtagaggacctgaccttcacctcccccttctgcctacaagtgaagaggaatgactacgtgcacgcattggtggcctacttcaacatcgagttcacccgatgccacaagaggaccggcttttccaccagtcctgagtccccatacacacactggaagcagactgtgttctacatggaggactacctcacagtgaagactggcgaggagatctttggcaccattggcatgaggcccaacgccaaaaacaatcgcgacttggacttcaccatcgacctggacttcaagggccagctatgtgagctctcttgctccactgactaccggatgcgctgaggcgctgccaggctgaccacctgcagaaggggctcgggatgggcttgggggatgggagggtacatcgtgactgtgtttttcataacttatgtttttatatggttgcgtttgcgccaataaatcctcagctgacc

SEQ ID NO: 5286 - DNA, 1263 bp, Cricetulus griseus
ggtggacaccatgtccttgaagatttcagaccagcaatgtaaccaataagaatagaccccaagttccatcaattctcgggtcttcattggaaacctaaacacagctgtggtaaaaaagtcagatgtggaaaccatcttttccaagtatggccgtgtggccggatgttctgtgcacaaaggctatgcctttgtccaatatgccaacgaacgccatgcccgggcagctgtactaggagagaatggacgggtgctggctggacagactctggacatcaacatggctggagagcccaagcccaatagacccaaggggctaaagagagcagcaactgctatatacaggctgtttgattatagaggccgcctttctccagtgcctgtgcccagggcagtcccagtgaagagaccccgtgtcacagtccctttggttcgccgtgtcaaaactacaatacctgtcaagctctttgcccgttctacagccatcactactggctcagccaagatcaagttgaagagcagcgaactacagaccatcaaaacagagctgacacagatcaagtccaacatcgatgccctgttgggtcgattggaacagatcgctgaggaacaaaaggccaacccagatggcaagaagaagggtgacagcagcagtggtggaggaggcggcggcagtggtggtggcggcggcagtggcaatgctggtggtggcagcagtggtggtggcagtggcagctgcagcagcagccggcctctggccccccaggaagacacggcttctgaggcaggcacaccccaaggagaagtccaaactcgagatgatggcgatgaggaaggactgttaacacatagtgaggaggaactggaccacagccaggacacagatgcagaagatggggccttgcagtaagcaggaaaaatggccaccagcagaagaagggcatcactgtctcaggcctcaagtcaggcacccatctctggatgccagtttgtagtgggtaccagaggaaagctgccagcaggcactctttccccgtgcatcccagccagtgagtgctacgtcctttgcaagtggagttactggcctacccttaccccatgcactcttcctgtctgcactgcctgggccaaggggcagaacacattctgcccttcttccccagggaattccccaggcttggatttttctataggtttgaggggggtgggggtgggggtggggttggtgggtgaggggaacctgacaataaagagattggatccaaa

SEQ ID NO: 5287 - DNA, 1263 bp, Cricetulus griseus
gtctgttctgaggagcagtaggcagtttcctccgtccgatatctcgcataccgaagtgcgcgtctccacctcatggaagactcgatggacatggacatgagccctcttaggccacagaactaccttttcggttgtgaactaaaagctgacaaagattatcactttaaggtggataatgatgagaatgaacaccagttgtcactaagaacggttagtttaggggcaggggcaaaagatgaattacacatcgtagaggcagaagcaatgaattatgaaggcagtccaattaaagtaacgctggcaacattgaaaatgtccgtacaaccaacagtttcccttggtggctttgaaattacaccacctgtggtgttacggttgaggtgtggttcagggcctgtgcacattagtggacagcatctagtagctgtagaggaagatgcagagtcagaggatgaagatgaggaggatgtgaaactcttaagtatgtctggcaagcgatctgctcctggaggtggtagcaaagttccacagaaaaaagtaaaaatcgatgaagatgaggatgatgatgatgaagatgatgaagacgatgaagatgatgatgatgatgattttgatgatgaagaaactgaagaaaaagttccagtgaagaaatctgtacgagataccccagccaaaaatgcacaaaaatcaaaccaaaatggaaaagacttaaaaccatcaacaccaagatcaaaaggtcaagagtccttcaaaaaacaggaaaaaactcctaaaaccccaaaaggacctagttctgtagaagacattaaggcaaaaatgcaagcaagtatagaaaaaggtggttctcttcccaaagtggaagccaagttcattaattatgtgaagaattgcttccggatgactgaccaggaggctattcaagatctctggcagtggaggaagtctctttaagaaaatgatttaacagtttgaaatactccgtcttacttaatttctgtaacagttgatatatctggctgtcctttttataatgcaaagtgaaaactttccctactttgtttgataaatgttgtccaggttctattgccaagaatgtgttgtctaaaatgcctgtttagttttcagggatggaactccaccctttacttggttttaagtatgtatggaatgttatgatagaacatagtaatagtggtggtcagatgtggaaatggtagggagacaaaagatacatgtgaaataaactcagtattttaataaagt

SEQ ID NO: 5288 - DNA, 1262 bp, Cricetulus griseus
tcgggttctccgatcgctgccaatgtcacgtcctgccattgctgcagcagccacgtctgtgtttcgtggcccgtcccatcgccagcttcatcatgctgtcatacctcatgggaaaggtggccgctcgtctgtcagtggagttgtggccactgtgtttggagcaacaggattcctgggtcgatatgttgtcaaccatcttggacgaatggggtcacaagtaatcataccctatcggtgcgatacatatgacaccatgcaccttcgccccatgggtgacctgggccagcttatcttcctggagtgggacgcaagagacaaagattctatccggagagcagtgcagcacagcaacgtggtcatcaatcttattgggcgggactgggaaaccagaaactttgattttgaggatatttttgtgaagattcctcaagcaatagctcaggcatccaaggaagctggggttgagagactcattcatgtctcacacctgaatgccagtatgaagagctcttctaggtacctgagaaacaaggcggtgggagagaaggaagtgagaaggttgtttcctgaagccaccatcatacggccatctgacatctttggaagggaggacaggttcctcaatcactttgcaaatattcgttggtttatcggtgtgcctcttatttctttgggctttaagacagtgaaacaaccagtatatgttgtagatgtttccaaagggattattaacgcagttaaagatccagatgccagaggaaaaacctttgccttcgccggacccaatcggtacctgctctttcacctggtacagtacgtctatggcatggcccacaggaccttcatcccctacccgttgcctcattttgcctataggtggattggcaaattctttggaatgagcccatttgagccctggacaacggaggacaaagtggagcggatgcatatctcagatgtggtagtgcctgatctgcctggcctggaagatcttggcattgaggccacaccactggaactcaaagccatcgaggtgctgcggcggcatcgcacttaccgctggctgtcttctgagatcgaggaaacaaagcccgccaagacagtcaactattagtgaaatccaagccacctgtgttctttagaggtcactgctattaaatatctgagggttcagtctgcatgtttctttcttgattaatcagaggagaactctcagccattcagaactgagcctagtttctttaaataactatattataata

SEQ ID NO: 5289 - DNA, 1262 bp, Cricetulus griseus
ccagaagaacagcatcacagcatccgggagcaggcaacgtggttctgctgcagcgggagctggccaggaggacagcctcaacaagctggctctccaatatggctgcaaagtcgcagatatcaagaaagtgaacaacttcctcagagaacaagacctgtatgctttgaaatcgatcaagattccggtgagaaaacatgggatcctcacagagacccaccaagaactgacccccctggggggcccatcctctgagaccagagtgaccctggtagaactgcctgaagatgaagatgccactggggcacctgctcagagtaaccaactgatggatttctttaagggaattgatgagaacattgagcgggctgtgcagtctgacgtcttccacagtgacagctgctgtgtggaggccgtagatcagccactgctccccacaacccagaagccaccagccgatggtgcagactgcgggattcagtggtggaatgctgtcttcctcatgcttctcattgggattgtgttgccggtgttttatctcgtctactttaaaatccaagccaccggggaagcctcaagtagcttgaatgcaactgttgtccccaatggctcaatgacactgagcccaattccaggacaagcccccaatttggcaattccagtgcacaccctccccccttcagacagccaggtcagctcaaccacccaggtaggggcctaagctcatttattctagaattggcaatgcctttggcaattggctcttgatgtatgtagctgtcactggctgtttgcttgatcatgttaagtgatttctatctggatgctcatgaccattgtggctgtgaagtttctcttaaatgttgtcaccagtaacttcagcaggcagggctcagagtcccagggaagaaccacttttgccagacaaacaatgtcgcattttttttctgtattctgtctcaagtgttggggactgtctatgactgcctgtgcacagtcctgtgtaggctccgaagtagaacatgacaagggatccgcaatgtcagtggccctggggttggatggtgtcagatgactgtcacagtgaccctgcctgctaagagttagggtgggcttggctcagagatgcgttctgtgtctgagtagaccaaggtgctctgcaatagtatcagtatgtcactgtagtttttagacgaagttactagttttaacttgttattttctgttatttttctcaagtggaaataaaattattttcttctgtg

SEQ ID NO: 5290 - DNA, 1262 bp, Cricetulus griseus
aactggttttgttagtgtccagccgggggcctggcgattgccgggccgctctgcctgcattctccgtaggcttcttgcggccgaaaggcccgagcggccgggggagtctggcctagacgtccgtgtcgcccggtgcgggcgggatggctgcggaagaagaggacgaggtggaatgggtggtggagagcatcgctgggttcctgcggggcccggattggtccatccccatcttggactttgtggagcagaaatgcgaagtttttgatgatgaagaagaaagcaagttgacctatacagaaattcatcaagagtacaaagagctggttgaaaagctgttagaaagttacctcaaagaaattggaattaatgaagatcagtttcaagaagcatgcacctctcctctggcaaagacacgaacatcacaggccattttgcagcccgtactggcagcagaggactttactatctttaaagcaatgatggtccagaagaacattgagatgcagcttcaagctatccggataatccaggagaggaatggtgtgttaccagactgcttaactgatggtgccgatgtagtcagtgaccttgaacaggaagagatgaaaatcctgagggaggtcctcagaaaatcaaaagaagaatatgaccaggaggaagaaaggaaacgaaaaaagcagtcatcagaggctaaaatggaagaaccaccagtgtatactcatgaagctgcaaaaatgagtaattcccaaggagatggtgaaccttttgtacagccacccacagaagttaaagtgcattttgctaatcagtcagtacaacccatggcaagaaagatggagctgttgcctgaaacttcctccctcccacaaaaaagtctgaagatccctggtttagaacattcaagcatggaaggaccaatagcaaatttgtcagcacttggaacagaagagttacggcaacgagagcactatctcaagcagaagagagacaagctgatgtccatgagaaaggacatgagggcaaaacagatccagaatactgagcaaaaaggaaagccttccagggaggtggaggaaatgacagagaagccagaaatgacagcagaggagaaacaaacattactaaagaggcgattgcttgcagagaaacttaaagaagaagttattaataagtaatatgaagagatagcaaaacagaagcccacattttcttaaaaataaattatttaatccttaaacaaagactgttagtttcaagcaaat

SEQ ID NO: 5291 - DNA, 1261 bp, Cricetulus griseus
gcagcgccactcggctctttgccccagctcctgagtgcagcgtccctccagttgtctcttgggggtcatccccaaggctgtcaggatggtgtcctggatgatctgtcgtctggtggtgctcgtatttgggatgctgtatcctgcatatgcttcctacaaggctgtgaagagcaaaaacattcgagaatatgtccggtggatgatgtactggattgtctttgcaatcttcatggccgcagagaccttcacagatgtcttcatttcctggttccctttttactatgagatcaagatggccttcgtgctatggctgctctcaccttacaccaagggagctagcctgctttaccgaaagtttgtccacccgtccctatcccgccatgagaaggagatcgatgcatgcattgtgcaggcaaaggagcgcagctatgagaccatgctcagtttcgggaagcggagcctcaacatcgcggcctcagctgctgtgcaggctgctaccaagagtcagggtgctctagctggaagactacggagcttctccatgcaagacctccgctctatccctgacacccctgctcccacctaccaagatcccctctacctggaagatcagataccccgacgcagacccccgattgggtaccggccaggcggcctgcaagatagtgacacagaggatgagtgttggtcagacaatgagataaccccccagccaactgtccggccccgagagaagcctctgggccgcagccagagccttcgggtggtcaagaggaagccattgattcgagagggcacctcacggtccctgaaggtccgaacccggaaaaagacaatgccctcggacatggacagctagattctgcagaatcaggccatcttacctctccagccatcaggggaccttttgctgctacaccagctgcctgggctccgccccttctgacttctgcctaaggggcacacggtgtggtcccccctgtggggatacacctacagtataccaaagcaggccaggcccaggggcctatttattgccttcctcagccttttccctttccatatatgggaccagagccttactagtccctctagatgaaatcaaaagttcaaccagttgtgttcattccttcttgtccttcaaaatacttgacagccttctctaaggtctggtgtatatatgtgtgtgtgtgtgtgtgaatgtttttattaaataaaatacctaatggtgtttggcttcaaaaaaaaaaaaaaaaaaaaa

SEQ ID NO: 5292 - DNA, 1260 bp, Cricetulus griseus
gatcatggcctccaagcctgagaagagggtggcctcttctgtgtttatcaccctggcacccccacgacgtgatgtagctgtgactgaagaagtgggtcaggaagcttgtgaagccagacgtgcccggccctgggagacccctgctcccacgaagacccctggggctggcttgagcaggaaacctaacacctggacaccctctggcagaatttctgcctcgatccctgcagccccaccccagctggccaatggagggtgctgtcccccacctccttccctgagtgatgaggatctagacctcctaccacctcctccaccgcccccttcggcctacctggcctctcccagaagccacaggctccaccgaagggatcttctgtccggcctctgaccagtcacctcaaacccacagaagaggagctaccccctcctccagaagagcctgtcacctttcctagagaaagaggcatccacagatgtctgcggcttctgtcacaagcctgtgtctcctcgagagctggctgttgaggccatgaagaggcagtaccatgcccagtgcttcacctgtcgcacctgccgccgtcagctggctgggcagagattctatcagaaggatgggcgccccctgtgcgagccctgctaccaggacactctggagaagtgtggcaagtgtggagaggtggtccgagaccatgtcattcgggccctgggcaaggccttccacccaccctgcttcacctgcgtgacctgtgcccggtgcatcggagatgagagattcgcgctggacgaccagaaccaggtgtactgcctggatgacttctacaggaaatttgcccccatgtgcagcatttgtgagaaccccatcatcccccgagatgggaaggataccttcaagattgagtgcatgggaaggaacttccatgaaaactgttaccgatgtgaggattgcagtgtcctcctgtctgtggagcccaccgaccaaggctgctacccgctgaatgaccgcctcttctgcaagccctgccatatgaagaggagtgctgcagggtgctgctgagaaccccctggccagccctcccgtgacttggtttccccacctaaccccccctccatacatactttccttttgagcctcactggacaccaacgcattgctcagtgcacagtgtctagacacaagggcctgagacacgggggctcacccctggtacacagcacccctgaacctccttcctacagccttcactggggctgaggcct

SEQ ID NO: 5293 - DNA, 1260 bp, Cricetulus griseus
gccgagtcccgctgggccgcagccggtggccggctcgcagtgggcctgtacccggccctccacgctcggttccccctcgctctgcggacaccagaggactgaccggaccacgcggaactgtagcgacagaatggcgcagaccgccatgtccgagacttacgtattttctttagtttaaatttttggtcatcggaaatgcgggaaccggcaaattcttgcttgcttcatcagttcaattagaaaaaaaaattcaaagatgactcaaatcataccataggagtggaatttggctcaaaaataataaatgttggtggtaaatatgtaaagttacagatatgggacacagccggacaggaacgattcaggtctgtgacaagaagctactacagaggtgcagcaggggcactcctcgtctacgacatcaccagccgagaaacctacaatgcgcttactaattggttaacagatgccagaatgctggcgagtcagaacattgtcatcatcctctgcgggaacaagaaggacctagatgccgaccgggaagtcaccttccttgaagcctccaggttcgcacaagagaatgagttgatgttcttggaaacaagtgcactgactggtgagaacgttgaagaggctttcatgcagtgtgcaaggaaaatacttaacaaaattgaatcaggtgagctggacccagagagaatgggctctggcatccagtatggagacgctgccctgaggcagctacggtcaccacggcgtacacaggccccaaatgcacaggaatgtggctgttaggcatgccagcaacacaggttcagtggtggtttctggagcacagctgctggagcttgaagagtctgaagtttttacaaccatcttttctactctgcacagaagtagatcttcatgggggaaacatcagcgcacactggcagacagggctcagcagccatactgcaaactaactcagcggacaatacctttagatgccacatgtatgcaaagatccctgccccacatctacccaactcacaggaaatgcagtttgtgaatgtgagcgtgcttttctcattgtgttggttacacatatgactcagtatcaaaggactctggcgctaacagtcagtgcgtttcttatttaatccctcttgtcctttttacactgtttctgtgatccacacctgaaatgctaaacctacaggacgcactaacatctggaaataaagtggaaccaagtttctcgtgaaaaaaaaaaaaaaa

SEQ ID NO: 5294 - DNA, 1260 bp, Cricetulus griseus
gggcaccatggtgcgccctacccgaaataaaaaaccagtcaattactcacagtttgaggactctggtggtgactctgatgatgattttattgcggcaaccatgcctagaaacaaaaagtccaaaaccatgccaaaggagttaaagcaagacaaaccaaaacctaacttgaagaatctccaaaacgaagaaatcctaccagcaaaagtccctaaaaaaaggatggctttagatgacaaggtcttccagcgaggcctagaagttgccctggctttatctgtgaaggagcttccagcagtcaccaaccaagtgcagaattctcaagagaaaagcactgacagccaaggtgataggaaaacagaaatatcggataagtctcctcctatctccaactgcagtgtaaccagtgttaattcagaagatttggacaagattgtggaggaggaggatgccagcagtgttgaaggggagaaaaaaataacatctgaagctgaggctccgcagaggagggtgctctctgaagacagtgatggcagcagtgctaatgacaccgagccggacagtgcaactggtgaggattcagaaaatgattctaattttgatgagagtgaagaaagtgatgaagacttttcagtgagaaaaaattaaagaaacaaagaagaaaaagaagaaagcagtgcagagaaaacccgcagtggaaaaagaaaagaaatcaaaacacaaatatgaggcatcagttgatgtggctccagctgccatcaagtcaggatctctatccttaccccaggcagttggacttccttctgagtccacaaggaaaccagcaaaaatgtgcagcccttcagctgaaggcaagagacccaagtggatcccaccagccgcctctggaagcagaagctctagcagtagcccgctggcagcagcatccaccaagtccccgagtcagagcctccgcctgggcctctcccgactagcaccagttaagcgtttacacccaaatgtcacaagtagccaagtgcggtagcaggaaaggacctgtgggaccctcagtcctgcaagttagttgtattcagcttgcacatggaggaccctttaatgagtcacgtgaaggatctctgcctgttgtgtgattctggtctcacagaacttttctgtccttcagcaaagggttcttgaaggttctcctcatgccactcctgaaggacatgttgtgttttcctgtttcattaagtcactgtcacttagggctctggcacatctgt

SEQ ID NO: 5295 - DNA, 1259 bp, Cricetulus griseus
  modified_base (348)..(348): a, c, t, g, unknown or other
tctttaagcgcacggtgcaaaaaacgcaaaatacgtgtgtttagcaaataaaaactgcccagtggacaagcgccgccgaaatcgttgtcaatactgtcgatttcagaagtgcctggctgttgggatggttaaagaagtggttcgcacggacagtttaaaaggccggagaggtcgtttaccctcgaagccgaagagtccacaggatccctctcccccctcacctccggtgagtctgatcagtgccctcgtcagagcccatgtcgactccaatccggctatgaccagcctggactattccaggttccaggcaaaccctgactatcagatgagtggagatgaccacccaanatataacagcaattctacgatctcctgactggctctatggagaattatttgttcttcgattagcgtacaggtccaacccagtggagggtaaactcatcttttgcaatgggtggtcttgcacaggttgcaatgcgtgcgtggctttggggaatggattgattccattgttgaattctcctccaacttgcagaatatgaacatcgacatttctgccttctcctgcatcgctgccctggctatggtcacagagagacatgggctcaaggaacccaagagagtggaagagctacaaaacaaaattgtaaattgtcttaaagaccatgtgactttcaataatgggggtttgaaccgacccaactatctgtccaaactcttggggaagctcccagaactccgcaccctttgcacgcaggggctccagcgcattttctacctgaaactggaagacttagtaccaccaccagcaataattgacaaacttttcctggacaccttacctttctaagaacaaacaaaaactgtcgctatttcctaacctgcaggcagaacctgaaagggcattttggctccggggcatcctggatttagaaaacggacaacacacagtacagtggtataaactttttattatcagttcaaaatcagtttattgttcagaagaaagattgctaatatacgatgagaaatgtttggccatgcttgcttgttgcagttaagacaaatgtaacacacacacacacacacacacacacacacacacacacacacctatgtagtctgttagatttataagtattggtagttatctgagcttaaacattttctcaattgtataataggtgggcacaagtatcaatacattggaaaatcctgacaaaagggacacatagtgtttgtaacaccgtccaaca

SEQ ID NO: 5296 - DNA, 1259 bp, Cricetulus griseus
cgcacatcaccattaaccagtacctacagcaggtgtatgaagccattgacactagagatggagcatcctgtgcagagctggtgtctttcaagcaccctcatgttgccaacccacggctccagatggcctctccagaagagaaatgccagcaagttctggagcccccctatgatgaaatgtttgcggctcatttaaggtgtacctatgccgtggggaatcacgacttcatagaggcgtacaagtgccagacagtgatagtccaatcatttctgagggcattccaggctcataaagaagaaaactgggctctgcctgtcatgtatgcagtagcacttgaccttcgcatatttgccaataatgcagatcagcagttggtaaagaaggggaagagtaaagtaggagacatgctggaaaaagctgctgagctcctgatgagctgcttccgagtctgtgccagtgacactcgtgctggcatagaggactctaagaagtgggggatgctgttcctggtgaaccagctatttaaaatctactttaagatcaacaaactccatttgtgtaaacctcttatcagagccattgacagctcaaatttgaaagatgactatagtactgcacagagggtcacatacaaatactatgttgggcgtaaggcaatgtttgacagtgacttcaagcaagctgaggagtacctgtcatttgcctttgagcactgccatcgctccagccagaagaacaagaggatgattctgatctacctgctgccagtgaaaatgctgctcggtcacatgccgaccatcgagctcctgaggaaataccaccttatgcagttttcggaagtgaccaaggccgtcagtgagggcaatctgctgctgctcaacgaggcgctggcaaagcacgagactttcttcatccgctgtggcattttcctcatcctggagaagctgaagatcatcacttacaggaacctcttcaagaaagtgtatttgttactcaaaactcatcagctatctctagatgcctttctggtggccttgaaattcatgcatgtggaagatgtggacattgatgaagtccagtgcatactggccaacttgatatacatgggtcacattaaaggctacatctcccatcagcatcagaaactggttgtcagcaagcaaaaccctttccctccactgtctacagtgtgctgatgtcctccctccctcctctctctctctctctctctctctctctctctctctatttctctctct

SEQ ID NO: 5297 - DNA, 1259 bp, Cricetulus griseus
gccacgatggcgacgtcgggctccgcgcggaagcggctgctcaaagaggaggacatgaccaaggtggagttcgagaccagcgaggaggtggacgtgacccccacgttcgacaccatgggcctgcgggaggacctgctgcgcggcatctacgcctacggttttgagaaaccttcagcgatccagcagcgtgctatcaagcagataattaaggggagagatgtcattgcacagtctcagtctggcacaggcaagacggccaccttcagcatttcagtcctccagtgcttggatatccaggttcgagaaacccaagctttgatcttggctccaacaagagagttagctgtacagattcagaagggtctgcttgctctgggggactacatgaatgtccagtgccatgcctgcatcgggggcaccaatgttggagaggacattcggaagctggactatgggcagcatgttgtggcaggcacaccagggcgtgtctttgatatgattcgccgtagaagtttaaggacccgggctatcaagatgttggttttggatgaggctgatgaaatgttgaacaaaggtttcaaggagcagatctacgatgtgtacaggtacctgccacctgccacccaggtggttctcatcagtgccacattgcctcatgagatcctggagatgaccaacaaattcatgactgaccccatccgcatcttggtgaagcgtgatgagttgactctggaaggcatcaagcagttctttgtggcagtggagagagaggagtggaagtttgacactctgtgtgatctctacgacacgctgaccatcacccaggctgtcatcttctgcaacaccaagaggaaggttgactggctgacagagaaaatgagagaagcgaacttcaccgtgtcatccatgcacggagacatgccccagaaagagcgagagtccatcatgaaggagttccggtcgggtgccagccgagtgctcatttccacagatgtctgggcccgcggcctggatgtccctcaggtgtccctcatcattaactatgacctgcccaacaacagagaactgtacattcacagaatcgggagatcagggcgatatggccgcaaaggtgtggccatcaattttgtgaagaatgatgacatccgaatcctccgggacatagagcagtactactccacccagatagacgagatgcccatgaatgtggctgacctgatctgaagctggttttcttgtgaaaaaaaaaaaaaaaaaaa

SEQ ID NO: 5298 - DNA, 1259 bp, Cricetulus griseus
gctgagtcgagctgaggttgttgtgggccgggggcgccatgggggcgactggcgacaccgagcagccgcggggccccggcgtggcagaacgaggcggcctggagttgggcgacgcgggcgcggcggggcagccggttctcacgaacccttggaacataatgataaaacaccggcaggtgcagcgaaggggccgccgctctcagatgaccacaagtttcacagatccagccatctctatggatctcctccgtgctgtcttgcagccaagcatcaatgaggagatccagagtgtcttcaacaagtacatgaagttcttccagaaggcagcattgaatgtgcgagacaatgttggggaagaagtggacgcagagcagttgattcaggaggcctgccggagctgcctggagcaggcaaagctactcttttcagatggagaaaaagtaatacccagattgacccatgaacttccaggaatcaagcgtggccggcaagcagaagaggagtcccaccgaggaagccccattcctaaaaagaggaaaggtcggcctcctggacacgtcctgtcaaatgaccgggcagctgctggcatggtatggaaaccaaaatcttgtgaaccaattcgccgagaaggccccaagtgggacccagctcggctgaatgaatctaccacctttgttttggggtctcgagccaacaaggccttagggatgggaggcaccagagggagaatctacatcaagcacccacacctctttaagtatgcagcagatcctcaggacaagcactggctagctgagcagcatcatatgcgggcaactggtggtaagatggcctaccttctcattgaggaagacatccgagacttggctgccagtgatgattacagaggatgcttggacctgaagttggaggagctgaaatcctttgtccttcccccctggatggttgaaaagatgcggaagtatatggagacactacggacagaaaatgagcatcgtgctgctgaagcgccaccccagacctgagccaggtgttctggctactacacttggcagcctgcctccaagaccctctttccccgaccggctgaggccatcctggggactgggtctaattggatcttagcagcattaagctgtacatgagctagtttgtagtgactcactgaagagcacccagactggcatgtggttctgtgtttttaaagttgttggactaagaagcaattaaacagtttgtaataaacaacaaaaaaaaaa

SEQ ID NO: 5299 - DNA, 1259 bp, Cricetulus griseus
  modified_base (1249)..(1249): a, c, t, g, unknown or other
agaagacaccagagccgaccggcccaaacctctcgtcctgggtttgactggagggacccactggtactggaggagcagctgactgctgatgagaaactcatcagggacaccttccgcaactactgccaggagcagcttatgcctcgaattgtgctggccaatcggaatgaagtttttcaccgggacatcgtgtatgagatgggggagctgggcatgctgggacccaccatccaaagggtatggctgtgctggggtgtcatcagtggcctatgggctcctgacccgagagctggagagggtggacagcggctacaggtcaatgatgagtgttcagtcttctcttgtcatgcaccccatctacacctatgggagcgaggagcagcggcagaagtatctgccccggctggccaagggtgaacttctgggctgctttgggcttacagagcccaaccatgggagtgaccccggtggtatggagaccagagctcgccacaatccatcaaaccagagctacattctcaatgggaccaagacctggatcaccaactcacctgtggctgacctgttcgtagtgtgggctcggtgtgaggacaactgtattcggggctttctgctggagaagggaatgcggggcctctcagcccctaggattgaggggaagttctccttgcgggcttcgtctactggtatgatcatcatggacaacgtggaagtgcctgaggagaatgtgctccctaatgcgtccagcctggcgggtccttttggctgcctcaacgctgctcgatatggcatcacatggggtgtcctgggagctgctgagttctgtttgcacacagcacggcaatacgctctggacaggatccagtttggtgtccccttggccaggaaccagctgattcagaagaagctggcagacatgctcaccgagatcacattgggcctccacgcttgtttgcagcttggccgtttaaaggatcaggacaaggctaccccagaaatggtctccctgctgaagagaaataactgtgggaaagccctggacattgcccgccaggcacgagacatcctgggaggaaatgggatttctgatgagtaccatgtgatccggcatgctatgaatctggaggcagtgaacacttatgaaggtacacatgacattcacgctctgatccttgggaaagcaattactgggattcaggcattcacagttggcaagtgaacccacttcaacaggacaataaaaaaaaanaaaaaaaaaa

SEQ ID NO: 5300 - DNA, 1259 bp, Cricetulus griseus
aagaggggatgtctctacgctgcgtggatgcggcccgcagcctgggggcccgggtatttggaagatatttatgcagcccagttagagcattaagttttttgcccgataaaaaaaaggaatttttacagactggaccagaccttcaagattttgtatctggtgatcttgcggataagagtacctgggatgaatataaaggaaatttaaagcgtcagaaaggagaaaggttaagactgcctccatggttaaagacagagatacccatgggtaaaaattataataaactgaaaactacattgcggaatttaaatctccacacagtctgtgaggaagcccgctgtcccaacattggggagtgctggggaggtggagaatatgccacagccacagccacaatcatgttgatgggggacacctgtacaagaggttgcagattttgttctgttaagaccgcaagaaatccccctcctttggatgccaatgagccctacaatacggccaaagcaattgctgagtggggcctggattatgttgtcctgacttcggtggatcgagatgatgtgcctgatgggggagctgagcacattgccaagactgtgtcatgcttgaagggaaggaatccaaaaatccttgtggaatgcctcacccctgacttccgaggagatctgagagcagtagaaaaggttgctctatcaggattagatgtgtacgcacataacgtagaaacggttccggaattacagaggaaagttcgtgatccccgggccaactttgaccagtctctttgtgtattgaaacatgtcaagaaagttcagcctgatattgttaccaaaacatcaataatgctgggcctaggtgaaacagatgagcaagtccacgcaacaatgaaagcgctccgtgcagctgatgtggactgtttaactctaggacaatatatgcagccaacaaaacgccaccttaaggttgaagaatatgttactcctgagaagttcaaatactgggaaaaagtaggaaatgagcttggatttcattatactgcaagtggccctttggtgcgttcttcatataaggcaggtgaatttttcctgaaaaatctagtggctaaaagaaaacaaaaacttcagaaacttaggcaagaccttcaggatcacaggaatattaagattttgcttccagttggtgtcaggttggtgccagcctttcatgttcctgtgcatgtgcagcagtactgttgagtctgaaatgtctgatgtctgatc

SEQ ID NO: 5301 - DNA, 1259 bp, Cricetulus griseus
  modified_base (252)..(252): a, c, t, g, unknown or other
caaggctccagcaggcggtaacggcaacaagaagaagtcgggaaagaaagagaagaagtaatatggaggccaggccttgagccacagggcagcctccctccccagccagtccagcttgtccttacttgtacccaggcctcagaattttagggctcaccccaggatactggtaggagccaaggccatgctccccgttgggaaacagaaataagtgcccaagtcaacactccctctctgtgccctagggggttnaatatgcaaagagagttctgctgggaacccctatccaatcactgatcactacccccaagggtacgtagggttttgagcaaggtggttggggctggttgtggggacaggtgacccaagcaggctcctagttctggagagttgggcgagtgttataaccttttggtcctctccatcagttcagctttcccccaaagcatggtttggtaccagtcttctcatttccttctagagcgaccaatgcttaagtttgggggacacagtcaccatccccctggtactgatgcttgctggattttcgggaaggcattttgctacccagtctcttttcactgcctggggatcagtcttttgtttttcattgtttgatgttcccatgttcccactgcatgctatgacttccctactcctcaaagaagagactccttttgcatgtctggagacagtagggggtggtaagctaaagggaagtggacaaaacagctcattaacgggggcttgcaaggggctctgtatgtacccagggtactggcccaacccccaattctagccatagacaaactccaggccagacccctccaccctggttcagcctgggcagcttgggctgagccaccaggaccaatagatttaagctggcatttcagtccaagaaggcttctaagtggatttaggacctgagaggaagaggggcctctgtgggtgctgggtactccagaggtgcccctggtggaagggtgggtcagtggtcctagcaggaagggagacccagcaaggccattcttgctgggttgagtcaaggagctagaacaagggaccaagtggctgtaaagtctcaagccaatgatggggcttctccactgggctcctgtagtcctcaagtcccctggcctccaccttaccaggtgccacttctcagaaggccactgcccaggcccccaggccgccccttcgtggccagagactggttaaagccccccagtgcctccttgtgcatagaacttcctctg

SEQ ID NO: 5302 - DNA, 1258 bp, Cricetulus griseus
catggccgcgggccgagaccgcggggacttggctccccggcaactcgtgttcctacttccagaatatttaaaagatgcctcgaagaagatgaagagtggtctcctgtttgtaaaactggccaacccgcgctcaggggacggagccatttacttatttgatatgtgtcttcagcagctgtttgaaataaaagttttcaaggaaaaacaccattcatggtttataaatcaatcagttcaatcaggggggcttctccactttgcaacacccatggatcctctgtttctgctccttcactacctcataaaggctggcaaagagggaaagtatcagcccttggatcaggtggtagtggacgacctgtttccagattgcgtcttgttgctgagatttcctgagcttgagaagtcacttcggcatgtgacagaggagaaagaagtaaacagcaagaagtactacaagtatagcacagagaagaccctgaagtggctggtgaaaaaggtcagccaaactgtggcagcattgaaagccaataatgtcaatgttggagcccgggtacagtcatctgcatatttctctggtgatcaggtttccaaggacaaggaagaggattacgttcgctatgcccatggtctgatctctgattacatccctaaagaattaagtgatgacttatctaagtccttgaagcttccagaacctccatcttcaattccaaaccctccatcaaagaaactaaaggtatcagatgaacctgtagaagcaaaagaagattacactaagtttaacactaaagacttgaagactggcaagaaaaatagcaaaatgactgcagctcagaaggctttggctaaagttgacaagagtggaatgaaaagtattgatgccttttttggtgcaaaaaataaaaaagctggaaagatttgaaacaatgagaataaaatctaatgaagcagaaagagaagtttgcctcttgcttgttctgtctttcctctgcttgccactgccatcctgacccttagtcactcctctgaaaaacaggagaagtggttttcagatcctgccagtaactcgatggggtttgactttgtgtctaacaaactatgggaaagtgattgtgtgagttaccgactggggcctctggaatgtttgccataatgaaaagtcatcaagtggacagagtttcagagtcaccgcttgctcaggaagctttgagtgatggccagctagtctccgctccctcgtgcatggcttcaactg

SEQ ID NO: 5303 - DNA, 1258 bp, Cricetulus griseus
agagtccagtgcggcctccactggcatctcctactcaccatgtccccctaagaaatgcggcgctggcggcggccccgggacccgcggaagccggcatgctggagaagctggagttccaggaggaagcggaagactcagaaagtggtgtttatatgcgattcatgaggtcacacaagtgttatgacatcgttccaaccagttcaaagcttgttgtcttcgacactacattgcaagttaaaaaggccttctttgccttagtagccaacggagtccgtgcagcacctctgtgggaaagtaaaaaacagagctttgtaggaatgctcacgattacagacttcataaatatactacacagatactataagtcacctatggtacagatttatgaattagaggaacataagattgaaacatggagggagttgtacttacaagcggatatcagcactgcctgtggtggatgagtcaggaaaagttgtagatatttattccaagtttgatgtaattaatcttgctgctagagaaaacgtataataatctagacatcacggtgacccaggccctgcagcaccgctcacagtattttgagggtgtggtgaagtgcaataagctggaaacactggagaccatcgtggacaggatagtgagagccgaggtccatcggctggtggtagtgaatgaagcagatagtattgtgggtattatctccctgtcagacatcctgcaagccctgatcctcacaccagcaggtgccaagcagaaggagacagaggctgaatgaccaccgtagatgccctcacaggagaacttaaacaaagtctcggggtcacattttgcctcatgaacactggctgcaatagaagagaagattcaggcttgcgttcaaagactgtcctcagacccccgtccgagggatttcaatgctgtatgtcattaaagtgcactgtgtcctgaaattagtactacttttcatttcaaagaagtcactgggatggaacaggtgactgaaagtgagtgaatggcacgtccagatcacggtgccttatgtccaaacatgcaatatgtcaccgccgctccgctcggcccaaagtgctgctgaagagacacccagccccgaatgtgaacatcttcaaacctttacccagtctctttctttcactcaatttgttgaaaggttgtcattttaatctaggcaactgagaactggaggtgatgggtctaagtaaacctgtctaaaaaaaaaaaaaaaaaaaaaaaa

SEQ ID NO: 5304 - DNA, 1258 bp, Cricetulus griseus
  modified_base (1234)..(1234): a, c, t, g, unknown or other
tgggaaaaattacagaaaaagcagatataagtgtatatcctcattgactatggccgtaccaattacagtacttgactgtgatctcttgctgtatggtcgaggtcaccggaccttagaccgtttttaagttggatgatgtgactgatgaatatttgatgtccatgtatggatttccccgacaattcatttactatttagtggaactcttgggggcaagtctttcacgacctactcagcgatctagggctattagcccagagacacagatcctggcagcattgggcttttacacctcaggttccttccagactcggatgggagatgctattggaattagtcaagcctctatgagccgatgtgttgcccatgtcactgaagcccttgtggaaagggcctcccagtttatccactttccagctgatgaagctgccgtgcagtctctaaaggatgaattctatggattggcagggatgccaggggtgataggggtggttgactgtatccacgtggccatcaaggcacccaatgctgaagacctctcttacgtgaaccgaaagggtctgcattctttgaactgtctgatagtgtgtgacatcagaggggcactaatgactgtagagacaagctggccaggtagcctccaggactgtgctgtgctacagcagtcttctctaagcagtcagtttgaaactgggatgcacaaagacagctggcttcttggtgacagttccttctttctccgtacctggctcatgactccacttcatattgctgaaactccagcagagtatcgctataatagggcccattctgcaactcacagtgtgattgagaagactttgcgaaccctctgctctaggttccgatgcctggatggatcgaagggagcactgcagtactcaccagagaaatccagccacatcatcttggcttgttgtgtccttcacaacatttccctggaacacgggatggatgtttggtcctctccagggactggacccattgaacagccacctgagggcgagtatgagcaaatggagtccctagacttagaggctgaccgaatccggcaggagctaatgctcactcattttagttagtgtgaaaggtggaagaaggagggagactttccagaatgaagtatgagaatgttccctcttaccagcccatcgccaagttctgtcatccagtgggactgaatgtgcactattgtcataaaaaactaaaaaaaaanaactaaaaaaaaaaaaaaaaaaaa

SEQ ID NO: 5305 - DNA, 1258 bp, Cricetulus griseus
  modified_base (34)..(34): a, c, t, g, unknown or other
tatggggaaagaagagatagctcaggtccaaccngatgtcagtcgtttcctttgccgtctttcagtttccagctgtagcaacctccttccctccattagtgccctctcttccttttctctcctgctgtcctgttcagcttttctctctgttcatctggatgtacctcatcacctgttaaagtagattgtgtctgtcttcctgctgcccttaatataagagctgactgagagatgtgcagtggaaagatgtgtagcttttgccttacttgagcctgaagagctcagaaactcatgctgtgaatcctgaactttgtgctcctccaagagctgtgaaaatcatgacattttttttttttttttccacaattttgcctgaaagggtcttttgtgagggctccagagccaacctgaggtcaattttagatcccactctgtgggcatccttctctgggacatatcccctgcccactaggttaagaacagcagcaagtctgcgggactgtggcagcaggtccagggctgcagtgcagccaagtggacatggcccttgatctcccaggctggggctccacctcctctgtaccatgtgcattaagatctgtgcaagaccaacttttaggtcgtgatactttcctcctggcacctgaggggaggggagtatgcagttggtgctttctttgatccccttgttttatttctatagctttccccctggtatcatgaaaagggcctttttaatcaccacacaatgggtggctgtatccaaagcataaataattggccaacggtatggaatgtcctcacctgaggtgagagctgctttcctgaactgaacttcgatatagaactggctagggagacttagttttgttcaaatcactattaatattcccttttagcacacgttgggcagcaaaagctttttcagttgtgaagctggggtcctcatctagccaccatccagcacaacatgctgagatttcaagcatgttctgtctttacaagactgactgtctagtgttgaatttgaattctcaacaagaagcccccttgagctggtatctgggccagtaagttgctgtcccaagtgttcctatattatcatggctaatagttcagtgaaatgtgtccatctttggtaatgttggtatacataatgcccctacagttccttttctgtttgatagtttgtgactctaaatgcccactgttacatgaattaatttatgaaaataaatttttcttggaaaacctttca

SEQ ID NO: 5306 - DNA, 1258 bp, Cricetulus griseus
gaaggtggcaagatggtgttggaaagcactatggtttgtgtggacaacagtgaatacatgcggaatggagacttccttcccacccggctgcaggcccagcaggatgccgtcaatattgtatgtcactcaaagacccgaagcaaccctgagaataacgtgggcctcatcacactggccaatgactgtgaagtgctgaccacactcacccctgacactggccgcatcctctccaagctccatactgtccaacccaagggcaagatcaccttctgcaccggcattcgagtggcccatctggctctgaagcaccggcagggcaagaatcacaagatgagaatcatcgccttcgtgggtagccctgtggaggacaacgagaaggatctggtgaaactagccaaacgcctcaagaaagaaaaagtgaatgttgacatcatcaattttggggaggaggaggtgaacacagagaagctgactgcctttgtgaacacactgaatggcaaggacggaaccggatcacatctggtgacagtgcctcccgggcctagcttggctgatgccctcatcagttctcctattctggctggtgaaggtggtgccatgctgggtcttggtgccagtgacttcgagtttggagtagaccccagtgctgatcctgagttggccctagctcttcgtgtttctatggaagagcagcggcagcggcaggaggaggaggcacggcgggcagccgcagcctctgcagctgaggctggaattgccacatctgggactgaagacacggatgatgccctactgaagatgaccatcagccagcaggagtttggccgtgctgggcttcctgacctaagcagcatgactgaggaggagcagattgcctatgccatgcagatgtcactgcagggagcagagtttggccaagcagagtctgctgacattgacgccagctcagccatggacacatctgagccagtcaaggaggaggatgactacgatgtgatgcaggaccctgagttccttcagagtgtcctagagaaccttccaggtgtggatcccaacaacgaagccattcgaaatgcaatgggctctctagcctcccaggccaccaaggatggcaagaaggacaagaaagaagaggaaaagaagtgagactggagggagggtagctgcatctgcccaggggactgtaaagacggggttggacatagacttagatgtgctgtctgccgcctttacatcccgaataaagcttggcaagttt

SEQ ID NO: 5307 - DNA, 1258 bp, Cricetulus griseus
  modified_base (139)..(139): a, c, t, g, unknown or other
acaacagcagcagcagcagcataagttagttattacaaaacacagtaattagactgttgcaaccatctaaaaccttaggcttccagtctgtgctgttagtgttaagatgtaaagtgcaatcctaagctaacattatctntgcaagcaccatagaaacatttgcatatctgcatagatcttacaactgtactctttacctccttgtgataaagctttgtctacctgcaaacacagtcaaaggctacagctgcaaaccaaagccaactctaaccatggccaagagctcaaggacagaagcagccacatgctttggtcagccttctgtaacttcaattagtacaaaggaacctttgccaggaactacctgctgttttctgatgacctctgggatcttttcatttagccctaaaccaagaaacaaatatgacaaaacaagaaacaaatatgacaaaaccacaactaaaagagttcattcagtcacagagtaatcttctgaggccaaaagtccatctaaatgcaatgaagatttgctttcattaaagacagaggtgaggacaaaatctagcagtggaagttatgacatgctagaaagcaagaaatgtggatcactgaccaaaacaattatgtacttgatgcaaatgcagattgcgtattgttatatatatatatactattgttgtttttgtttagattatagcaagtgtagcccatggtatttattttcagtcaaaccaaagttacatataattctgcctcttcttatacgggatatgaacactaacacacttccttcaaagacttgtgcaggccaaattgttggaatgctgattttcttcacaactctaaaccccaaaactatgataatccattatggtgtagttgaagatagcatagtcagatgtttgcttaaaacctgagacttttacgtgttgcttttcatgtgctgtgccaagtcttgataatactttttcccccaaccaagggacctcataacctgatgatggttattgctttacaaacagttttgacagaaggtggctgctagagcttaacattatgtcccggttccatgtgatggagccggttcttgcaaagtaagctcaattgtttatcctttgctgaagtcagcaaatagagttagagagatacccagtcatctatcacacaaataaaggacaacctctccaaaaaagaaaaaagaaaaaaaaaaaaaaaaagaaaaaaaggaaaaaaaacaaaaaaaaaaaaaaagaaaaaa

SEQ ID NO: 5308 - DNA, 1257 bp, Cricetulus griseus
ccgggatctagttcctgacttcatggagccgtttgatcctgccgagctgccggagctactgaagctatattaccgacgcctctttccctacgcccagtactatcgctggctcaactatggcggagtgacaaagaattactttcaacaccgtgaattttcattcacactgaaagatgatatttacattagataccagtccttcagcaaccagagtgagctggaaaaggagatgcagaaaatgaatccatacaagattgatatcggtgctgtatattctcacagacccagtcaacacaatacagtgaagctgggagctttccaggctcaggagaaagaactggtctttgacatcgacatgacagactacgatgatgtaaggagatgctgcagttctgcagacatatgttctaagtgctggaccctcatgacgatggccatccgcatcatagaccgggcattgaaggaggactttggatttaagcaccgcctctgggtatactcgggaaggagaggcgttcactgttgggtctgtgatgaatctgttagaaaattgtcctctgctgtgcgttctgggatagtggagtacttgagtcttgtaaagggtggtcaagatgttaaaaagaaagttcatctgagtgaaaaacttcacccttttgtcaggaaatctataaacataattagaaaatactttgaagaatatgccttagttggccaagatattcttgaaaataaagaaaactgggataagattttagcccttgttcctgagaccattcacgaagagcttcagagaggcttccaaaggcttcacagttcacctcaacgctgggaatatctgaggaaagtgatcagcacaccccagaatatgaagaacgacaaatgtggtccctggctggagtgggagatcatggttcagtactgttttccacgcctggatatcaacgtgagcaaaggaatcaatcacttactgaagagccctttcagcgttcatcctaaaacaggtcgcatttctgtgccaattgattttcagaaagtggatcagtttaacccatttactgttccaaccataagcgccatctgccgagaattagatgtggtttccactaatgaaaaggacaaagaggagcacgaggctgaatctgagatcaaacacagagtcagagattataagaagaccagtctagcaccatatgtgaaagtatttgaacagtttcttgaaacctggataagtccggaagtgaacttctacaagaagag

SEQ ID NO: 5309 - DNA, 1257 bp, Cricetulus griseus
  modified_base (1111)..(1111): a, c, t, g, unknown or other
cttctggttcggaaggcacttcgagtccccgctcctgtggcagagcatagtgatgatcctgaccatgctgctgatgctgaagctctgcactgaggtccgcgtggccaacgagctgaacgttaagcgccgctccttctcagccacagacagtaaggatgaagaactcaaagcccccccaggcggccctacctggactttgatactcaccatttctggcattggagcagctttgcagactatgtgcagtgtgtcctggccttcacaggtgtggcaggctatgtcacctacctgtccattgactcagctctgtttgtggagacgctgggtttcctggctgtgctgactgaggccatgctgggtgtgccacagctgtatcgaaactaccgtcaccgctccacggagggcatgagcctcaagatggtactcatgtggacaagtggtgacaccttcaagacagtctacttcttgctcaatggtgcacctctccagttctcagtctgtggtctactgcaggtcatggtggacctggctattctggggcaggcctatgcctttgctcatcacccccagaagccagtacctcatgcagtgcaccctgtcagtgccaaggctctctgaggcatcaagggaagacaaggacatgtgaccaatcagtcatgggtgctgagccccagcctgtgcttctgcattagggaggtctggccctgcgcactccacagatccttacctccttcagaaaaacactggcccgaccgtgaaataggtccataaaactaagcaagagggcaggcccagcaacacgctgagtcccttcctcagccagtttccctcagtgagccttttgtctcctagaagaccctgtggcgctctagacagtgtgtagtcatggcttctgatggcttgtctgccctcctgctctgtcccactcccctgtgggtaccaccgggtgtgtctgctgcacctgctggagatggaaggtgctggcctgacacttgtcactctattttgcccctctctctgctcatcatgagatcatgtatgcttggcagccttgtgcagaacctggctggttcctgggtccagatgttctagatgcagtcagcacaatagntctggcagttatggtggctcatcagatggctaaagagtccacactgtgccaccctcaagcttccctcagatattctaagagtgtgagtgagatttttgcttactctctggcctgtaagatgcttgtaagatgtttatttttaaaaa

SEQ ID NO: 5310 - DNA, 1257 bp, Cricetulus griseus
ccccgcacctgccagcccgaacctgcacgctgcccgccaggccccgcctactacgcgccgcgggcgcgcgaggccagctaccccgggggcctgtaccccgcgcccgccgcctcctgtccctacgcctgccgcggcgccagcccgcgcgacccgagcagaccccggccccggcgcgcacccagcccggccccgcagcccccgcgccccctcggcactgcgctccgggccctgccaccccggctgtcgcgacggggggcagcgccccgcgtgcccgctgctactggcggaccaggggccggtgggcccgaagggcaaggagcccgtggtgtacccctggatgaagaagatccacgtgagcgccgtcaaccccagttataacggaggcgagcccaagcgctctcgaacagcctatacccggcagcaggtcttggagctggagaaggaattccactttaaccgctacctgacccggcggcgccgcatcgagatcgctcacacgctctgcttgtctgagcgccaggtcaagatctggtttcagaaccggcgcatgaagtggaagaaagatcacaaacttcccaacaccaagatgcgatcttccaaccctgcatcggcccctgccggcccgcctggaaaagcacaagcccacacgcccccacccccactcccccaccctcctcccctgctcctatcctcatccactcctccccaagaaaaccatgacagacaccaaaacaaaattcaacttggtggaaaccataaccaaaaagaagatattatccctggtaagtgtctgtgtaatccccaagaggacagatgtcctggacactgcctagtggaacaacctgctgacctggacaaccttgccaggggtggaaacctgtgaggaagcgcttatcatggaatggctttgagtcagcaggacagcacatgctgactggggacatgcacttgtatcgttgtgacaagcagaagaagcaggccctttcccagcttccagtaccttcctcttctacattaaggcagctcacatgagctttactgagtagacattgtggacctcaccagattatttaattctcaaaatgtgtagaactcgatggtaggtgtggcatgtagtttcctctccttgcatttatttaaaatattgttatagagatatgattgtcttattcttgggcacaattcttggggggagagggaaatgcatttagacccacttgctaactgtaacaaagtgatatggctgtagtaaaagga

SEQ ID NO: 5311 - DNA, 1257 bp, Cricetulus griseus
cgcggggagggggccgagcgggtggcaaagccggcgcgcgcccggctgggggcggagggcggaggcccgtgggtcggaacagccgcggcgagtggcagtggcggcggagggaaccgagacggcgacgatcggggggtctcgagtggcggcggcggcaacggcggcggcggcgggcccggaggcgggcggagagccggggcgcgatggagcggaagaggtgggagtgcccggcgctcccgcagggctgggagagggaagaagtgcccaggaggtcggggctgtcggccggccacagggatgtcttttactatagccccagcggcaagaagttccgcagcaagccacagctggcacgttacctgggcggctccatggacctcagcaccttcgatttccgcactggcaaaatgctgatgaacaagatgaataagagccgccagcgcgtgcgctatgactcctccaaccaggtcaagggcaagcctgacctgaacactgcactgcctgtgcggcagaccgcatccatcttcaagcaaccggtgaccaagatcaccaaccaccccagcaacaaggtcaagagtgacccacagaaggcagtggaccagccaaggcagctgttctgggagaagaagctgagtggcttgagcgcctttgacatcgccgaggagcttgtcagaaccatggacctgcccaagggcctgcagggggtgggcccaggctgtacagatgagacgctgctgtcggctattgccagtgcgctgcataccagcaccctgcccatcaccgggcagctctctgcagccgtggaaaagaaccctggcgtgtggctaaacaccacccagccattgtgcaaagccttcatggtgactgacgacgacatcaggaagcaggaggagctggtgcagcaggtgcgcaagcgcctggaggaggcactgatggcggatatgttggcacacgtggaggagctggcccgtgatggggaggcaccgctggacaaggcctgcactgaggacgatgaggaggaggaggaggaggacgatgagccagaatctgagcgtgtgtagcacagatgccctgcccaagtcccggttgcagactttccctcagccttgcctggaccaggtggggccaggccagcaggatgcggatctccatcctcttcccagggccttctctagctcccgggtctcagtgcagggagccccctgtgggccttggactcatttgctccttcactccctggcaagaagccccacactg

SEQ ID NO: 5312 - DNA, 1257 bp, Cricetulus griseus
gccccagactcaccgctgccccacacagaggtgctgagccctcagcaactcgaagcgctcacatacatctctgaggatggagacacgctcctccacctggcagtgattcatgaagccccatcggtgctgttgtgttgcttggctttcctgccccaggaagttctggatattcagaacaacctttaccagacagcacttcatcttgctgttcatctggaccagccagatatagttcgagcactggtgctgaagggagccagccaggtactgcaggaccaacatggtgacacagctctgcatgtagcttgccagcgccagaatctggcctgtgcctgctgcctgctggaggagcagccagagccaggcagagagccatctcaccccctggacctccaactgaagaactggcaaggtctggcctgtctccacatcgccacgctgcagaggaaccagccactcatagaattgctgcttcagaatggcgcggacatcaatgcacaggaggcgaccagtggaaagactgcactgcacctggctgtggaaacccaggaacatagcctggtgcagtttttgctccgggctggggcccaggtagatgctcgaatgctcaatggttgcacacctttgcatctggcagctggccggggccttagcagcatttcatccactctgtgtgaagctggtgccgactccctgctgctgaatgtggaagatgagacaccccaggacctggccgaggatctcctgtcttatttgccctttgatgacctgaaaatctctgggaagccactgctgtgtactgactgaagccagaacaggggtcctacttctcctacctggaagctggagccacagctgctgcagttggggcccaagcaacatgcccctctgctgaggccagagcctggggctagtgtagtcctaaatgagaggaaggattacaaatgaggaagagacagtccggaaggaagaacttcccaagtggacaggatggagagtcttgaaagacactcaaagccccaggtatcctgagtgaagcctgattgcttctgttgaagatgacatgggcagaaattgccaaacatcaggaaaaagagggatgagcaaacaggaccttgaggggtcttacctaaaatccctcctgagtgtgcttgtgactgggggttgaacctagagcctcccaatggcaggcaagcttactatcatgtagcttcctgccagcacagacacatctccttcatgtggaaatgcccaggg

SEQ ID NO: 5313 - DNA, 1256 bp, Cricetulus griseus
tggtgggaaggcagggcggtctgcggagctcgctggtccgagtgtcccgcatcggctgcgcgcgggtcccgagtggccgcagccagcgcaggcttggcgcccagttcccgtctgcgtgtggggctctcgcggctgagcctagccgctccgcctagcgccatgtccaagccacctcccaaaccggtcaaaccagggcaagttaaagtcttcagagcgctgtatacatttgaacccaggactccagatgaactgtactttgaagaaggagatattatctatatcactgacatgagtgataccagctggtggaaaggcacatgcaaaggccgaacaggactgattccgagcaactatgtggctgagcaggcagaatccattgacaatccattgcatgaggctgcaaaaagaggcaacttgagctggttgagagagtgcttggacaaccgagtgggtgtaaacggcctggacaaagctggaagcacagccctgtactgggcctgccacgggggccacaaagacatagtggaggttctgtttactcagccaaacgtggagctgaaccagcagaacaagctgggagacacagctctgcatgcagctgcctggaagggttatgcagacattgtgcagttgctactggcaaaaggtgcgaggacagacttgagaaacaatgagaagaagctggccttggacatggccaccaatgcagcctgtgcatcactcctgaaaaagaaacaggcaacagatggggtgcgaacgttaagcaacgccgaggactacattgacgaagaagactcagactgattcttccaggagctgctttgatgcctaaacttcttttgcttttgccattccaaaaccttggttgtattgccagaagagtattgataaccattctttttaaagtccatatgaacgtggcattgttgcactgtggtctgtgatgagtccggcgtggcatcagtgattctcacccgtgacttgccaataagtgatgggatactttgctgtataaatgctgtgttcaccagtgtagaacaagaaaaggttatttctatttatcaagctaaaggaattttaataacttttcttaaaaaaaataaaggttgtttttttttttttaattctttacctcaaggaatgggatgtttgagtggggttttcaagggggaaatgcttattataacagtagagcaaaactgtcaacagaatattgtcagctcttctgacaaaaataaacatttaaagagacttta

SEQ ID NO: 5314 - DNA, 1256 bp, Cricetulus griseus
gatgtttacaagctttctttagggaggtacaacttagttatgtgaactgttttaagtcaagttcatgtatccttcaatctgatttcttgagcaagaccatctaatggttgccagcatgttcgtgtacctgctacgtatgaaagttgaactagatgcttgctgagactaaggactagtgaacaagaagttgtgtgtgtgtgtgtgtgtgtgtgtgtgtgtgtgcgtgtgctcgcgcgtgctcgtggagaaatgttgctttttaagttctatggaccgataccactgttgacactagtgcaggccaaccctctgcttttgtagtgcccaatttagtcctcgtaaacacctttgtggtttctgagcagaacagaagagttgtgccatctcaaaaccagctgctatcctgttttctgtatggaagtccctccccattcctatggcctagctgatttctgataagtattgccagtgtatggacaggttttcctccagaatggtttatttatagagtatcaagtctgaaaggtgtcagagcacgcagcctctttgtgagtggaatttcttagtcatagtcttgatcatccagagccatgggctgtttaatcccaaattacccatgatatgtattattaatcctttggactcttctgtatgggttttgtgggaaaaggacagaaataaaagcagcaaggcacttgtggggcgttcgattctatcagtattgtgattctgtactagattttttaatgatgacatttgcaagactttttaaagattatcttaacatgactattacctggttgccactggtttaaaagagatatatttgtcttttgtttatatgaaaacagaaatgctagagagtaatttttaaaatacagaagatagggcttcttttattgaagaaaaatgacctggccccacctaagtgttcagtcttcgaaactatgcattgagacaggcatagagatagcaaacagtgccaatattctggtaaactgagacatgtgaaacacttggctttatttattttatactaccatttcttgttttatgtttccttctagtttttgccaaaattgttattgaatgcttccattgttctttatttaagatgaaaatagagttaagaattaatttgctcttgtgtataaatgtgtaatttatgaattaaaattattttctctattttgaataagtgaaaataaacctatattgtctgacagaaatcattttcatgcttcctggatatctta

SEQ ID NO: 5315 - DNA, 1255 bp, Cricetulus griseus
ggctcctgcagctgcggtgcctgcccgtggcccgatgccgatcacctctgacaatgcgtaccttccacacttctgtgggcttcagggcttcggaagagcagaagcagcagcctccccaatctttttctcatcggcattctgagacacaggggccgagtttcctcgtcagccccccaggtacacagaccaaagtggagaggaggaagaggacggtgagagtgaggagcagttgcagcatcgcatcttgacagcggccttagagtttgtgcctgcccatggctggactgcagaggccattgctgaaggagccaagtccttgggtctgtccagcgcagcagccggcatgtttgggaatgatggcagtgagctgattctgcactttgttacccagtgcaatgctcgcctcacccatgtactggaagaggagcagaagctggtacaactgggccaggcagagaagaggaagacagaccagttcctgagggatgcagtggaaaccagactgagaatgctgatcccctacattgagcactggccccgggccctcagcatcctcctgcttcctcacaacatcccgcccagcctgagcttgctcaccagcatggtggatgacatgtggcattatgctggggaccagtccactgattttaattggtacacccgccgtgcggtgctggctggcatctacaacacaacagagttggtgatgatgcaggactcttccccagactttgaagatacttggcgtttcctggaaaaccggattaatgatgccatgaacatgggccatacagctaagcaggtgaagtccactggagaagcactggtacaaggcctgatgggagcagcagtcacgctcaagaacctgacaggtctaaaccagcgccggtgagagaaagggggagcccatgtacctggaaggagcgaaggagctttgacaacatgcaccgtccatcgaacagcatgttaatgagaacaccgtgaagaagaagttggagttactatgacagccatgaggctggaaaccacaatgcacttgctacttttctgatctcaaattgggccacttcttcagttcctcataccaggcctgacctcctgatgcctttctgcattgcagctgtgtgactgaaaaatgagacttacatccaagctttcaagccacaggaacttggcatgactgccatggtctcacgggaatcttgatcatgtcttgaccttagaactactctctgggagctaggcatggtaacct

SEQ ID NO: 5316 - DNA, 1255 bp, Cricetulus griseus
gtgagttggtgtgctgggcagttgggtatggtggtcgttggtactgctccctgccgggacggggagacgggtgaacaagggaggcttggaggccgcgacagcagggctgtctggcctttagatcttcattcttggttaaggaaatgaccaaccagtacagtattctcttcaagcaagaacaagcccatgatgatgccatttggtcagttgcctgggggacaaacaaaaagcaaaacactgaaactgtggtcactggatccctggatgacctagtgaaggtttggaaatggcatgatgagaagctggagctacagtggagcctggagggacatcagctgggggtggtgtcagtggacatcagccacacccttcccattgctgcatccagctctctggatgctcatattcgtctctgggacttggaaaatggcaagcagatcaagtctatagatgcaggaccagtggacgcctggactttggccttctctcctgactcccagtatctggccacaggaactcacgtggggaaagtgaacatttttggtgtggaaagtgggaaaaaagaatattctttggacactagaggaaaattcatccttagtattgcatatagtcctgatgggaaatacctggccagcggagccatagatgggatcatcaatatttttgatattgcaactggaaagcttctgcatacgctggaaggccatgcgatgcccattcgctccttgaccttttcccctgactcccagctcctcgtcacagcttcagatgacggctacatcaagatctatgatgtacaacatgccaacttggctggcacactgagtggccacgcatcctgggtgctgaacgtcgcgttctgtcctgatgacactcactttgtctccagttcatctgacaaaagtgtaaaggtttgggatgttggaacaaggacctgtgttcacaccttctttgatcaccaggatcaggtttggggagtaaaatataatggaaatggatcaaaaattgtgtctgttggagatgaccaggaaattcatgtctatgactgcccaatttaaacaccagcatcttccgggccatgccacagagtatgcagggttgatcatgacattccttaccctcctaagcacacttaaaatacagcatatattgtagtaaattttgtagatacactataataagtgtttcctgttttattggaaatgctgctcctattttaatgtaaataaagcattcttaatgcaagcacctg

SEQ ID NO: 5317 - DNA, 1255 bp, Cricetulus griseus
cagaacactccacaggtataacccatcttcctcctcaggtaatgctgtccattttcaggttatcttaatcctcaagaattgtgtcgatgcagtcaagtcagtactaagtggtctcagctggcaaaaacaggatctttgtggaaacatctttaccctgttcattgggccagaggtgactggtatagtggtcccgccactgaacttgatactgagcctgatgaggagtgggtgagaagtaggaaagatgaaagtcgtgcttttcaggaatgggatgaagatgctgatatagatgaatctgaagagtctgcagaggaatcgattgctatcagcattgcacaaatggaaaaacgtttactccatggcttaattcataatgttctgccatatgttggtacctctgtaaaaactttagtgttagcatacagctctgcagtctccagcaaaatggttaggcagattttagagctttgtcctaacctggaacatctggatcttacccagactgatatttctgattctgcatttgacagttggtcttggcttggttgctgccagaatcttcggcatcttgatctgtctggatgtgaaaaaatcacagacatggctctagagaagatttctagagctcttggagtgctgacatctcatcagagtggctttttgaaaagtgcaggcaaggccaattcagctccatggataaataaagacattaccatgcaatcctccaagcagtatgcctgcttgcacaatttaactgacaaaggtgttggtagaaaaaatagacaatgatcactcttggactaaacctgtatcttctgaaagttttacttctccttacgtgtggatgctagatgctgaagatttggctgatatcgaagatgctgtagagtggagacacagaaatgttgaaagtctctgtgtaatggaaacagcctccaactttggttgttcttcatctggttgttacaatagggactttgtgggattaaggaccagagtttgttggcagcagcattgtgcttctccagcctttgcatattgtggtcattcattctgctgcacagggacagctctaaggactatgtctgcactcccagcgacttctacaatgtgtaggaaagcattaaggactacattgcctagggcaaaagacttaatttattttgggagtgaaaagtctgaccaagagactggacgagtacttttgttcctcagtctatctggatgttatcagatcacagaccatggtctcagg

SEQ ID NO: 5318 - DNA, 1255 bp, Cricetulus griseus
agccctgcaatgtgtgctgtgctccgcaaacccaagagcgtcaagttgcgagccctccacagcgagtgcaagttcggcgtggcggcacggagctgccaggagctgctgcacaagggctgcgtccgcttccagctcccggtgtccggctcccggctgtgcttgtacgaagatggcacggaggtgaccgacgactacttcccgggtctccccaacgacgccgaactcctgctgctcgctgctggccagacctggccagggctatgtgagtgacatcagtcgcttcctcagtgtgtttaatgagccacatgccggctgagatataactgcgagagccgtatccggggcgtacctgagagaggtgagtgcttacacctctgtggtggatgcagcggcccgaggagaattcgagcgggtccttagttccatgagccagaagctcaaatctgtgaagtacaacggcagctactttgacaggggtgcagaagccagcagccgtctctgcactccagaaggctggttttcctgccagggcccctttgacatggatagctgtctttccaagcactccatcaacccctatggcaacagggagagccggatcctcttcagcacctggaacctggatcatataatagagaagaggcgcaccgtggtgcccacgctggctgaagcaatccaggacgggagggaggtgaactgggagtacttctacagcctgcttttcactgctgagaacctgaagctggtgcacatcgcctgccacaagaagaccacacacaggcttcagtgtgaccacagcaggatctaccggccccagaaacggtccaagaagaagtggcctgctcggaaggtgctcacggtgtccctgtggcagcatcttcatgctcatggctcctgggctgaacttggccactgtggtatgagggatggtatgtattagtttgtgcctcagcttttatggccttcatttccactgcaaatggcagctctgactacattcctctgagagaaatggtgcttctggggtaaatgtttgcatttctaaggaaaatggagaatgttctctgctgaactgttttaaatggcagaaggtgagaagtcttccagatgtctcctggtgagaacagctgactggggcattatcttgaatcatgggaaattgctgtatttcatgggttaaaatgaatgcctgtcatgaatctcatgagtcagcactgatatttctaaaataaaaaaaaaaaaaaaaaaaaaaaaa

SEQ ID NO: 5319 - DNA, 1255 bp, Cricetulus griseus
gggagcggacctccttgagccggtgtccctgctgcttgccgggcccactccgccgaagccgcacgaccctgtccaacatggagaaacacttgttcaacctgaagttcgcggccaaagatctgaacaggaatgccaaaaaatagacgacaaggaggaaaaggaccgaaaaggacaaaattaaaaaggccattcagaagggcaacatggaagttgcaaggatacacgccgaaaatgccatccgccagaagaaccaagcggtgaatttcttgagaatgagtgcgcgggtggatgcggtggctgccagagtccagaccgcggtgacgatgggcaaagtgaccaagtccatggccggtgtggttaagtcgatggatgcgacattgaaaaccatgaatctggagaagatctctgctttgatggacaagttcgagcaccagtttgagaccctggacgtccagacgcagcaaatggaagacacgatgagcagtacgacgaccctgaccactccccagagccaagtggatatgctactccaggaaatggcagacgaggcgggcctcgacctcaacatggagctgccgcagggccagaccggttcagtgggaacgagcgtggcttcggctgagcaggatgaactgtcccagagactggcccgccttcgggatcaagtctgactgcagaaccagcccgaggtttcctttcgacgcgctctctgttttagagaggtgccctagaattgtgccagaataccgaacagtcgtcttacagcctactccagataggataagaaattccagttttcctccacttctaactggattttaaagttcttttttgcttatgatgaggtgtattttttacagctgttttttaacagaactggttaatttgctctctatgaatctagaaaaattggcagaactctagccctcatgtattccgttttcactaagaattccaggttgaagtttatttttagtgttgttgatgatacatagagtgacaagtgatgcaaaacattaaatgaggaggaatgggtactagtttatttacaactctgtgaacactgtgtttgatttattcggtggaaaatactctttctgtacatcatttggttttcttttgcttttgtctatcaaagaaagactataattgataatttattctcataacctatactaaagttaccttagaagatttttgtcaaaataagtcctgttacatgcctagcattgccaaagaactgctgatttggtcc

SEQ ID NO: 5320 - DNA, 1254 bp, Cricetulus griseus
aggaagcctgccgcaggctggcagaggtgtcaaaacccccaaagcagcggtgctgtgtgaccagtcagcagagggacaggaaccactcggccactggtcaggcaggagccacaaccttctctaacccaagcctggctccagcagatcacaaaggagccaaagaagctggcaagtgtccacacgctccaggccagtgagttggttgtcacttactttttctgcggagaagaaatcccatacaggagggtgctgaaggcccagagcttgaccctgggccactttaaggagcagctcagcaaaaagggaattataggtattacttcaaaaaagcgagtgatgagtttgcctgtggagcagtgttcgaggaggtctgggacgacgagacggtgctccccatgtatgaaggcaggatcctggggaaagtggagcggatcgactgagcctcacctccgtgtgcgccatggaccgaaagcagacctgtctcagacctacgagacagccacaaagtatttcgaaggaaaatgaaaccaattaagaagacaaagtctagggaggaaccagcccctgggtcttcaggaagggcgggtggttgctcttcagtgccagtgagctgggtaccgagatcagaaaaacctgaactatttattcaaaacgtgaccactctgggctattgaggaggctgactgtgtttgagagactgccatacataatatatgacttcctagggatctgaaattcatagactaagagaaaactgtagtatagcttgcccaaacatcagtctctggaccacggccaccaggaatccacccttacccacccaaccctgagaggacacgggcacttagcagcacctctcctccattcccttccccttggcgctcgggtttgtgttaagttaacctgtatgtcctgtttgccatccttactgtactataggcctgtgtatagtgtagggcagagtgttaaccaactggctagtgcttgacttgggaaatcggtacagtacctgtacaggcacggggacccactccgtgcaccgccctatattcagggctcaagctctcccttggtttttgaaaggggtttatgtataaatatattttatgcctttttattacaagtcttgttactcagtgacttttgtcatggcattttgttcttacttagactgtaaattatgctattaataaagtagttcattttaaagaaaattacttaggtactaataattattgtaattaagagatgtag

SEQ ID NO: 5321 - DNA, 1254 bp, Cricetulus griseus
aggctggacgaaaaagtcaaagggctactggtggtgattgacgccaggaaagggcccccgagtcctgctctggtcagcgccctgcagagcacacgggctgtggctccagcctccatcagtaaagtgctcctcctgggagagaaggcatccgttctccagccacctgcactacctgtccaggtggaggtactgacctcgctgaaggccctcagaaaccacgtggaccctagccagctgcccgaggctctgggacgggcccccttcccccagaagctgagcccgttcctcactgaccttcgccaggcctcatccctgctgcaggcttccattcaagagttgagaagggtgacccccctggcggggtgcaggaggctgccaggtgcctgaataagtccaaggatctgatggaggctgtgctgagggacccaggtctgctggctctccagagggaaggtggagctactctggccaggttgcagcaggaagcgagcagactgaatgccaaccctgatgtcaggagccatctgactgaagccgcagccctgtacaaccttgtggacgaccagcttcatgtcctggtcactgcgtccaatcacctcctccgaaggctggagctccgtgtccgcctgggccacctggaagctgccatccagcaggtcaatgactggatggagcgagaaggaagccagtatctccaggatcttgcccctgtgcggcccagtaccgccagggcctggaactgtgcaagcaggcggcacagttgggagctgcagaggaaggggcaggtgacacggggttcccagacctggtagccttcgccgccacccagcaggccttccaagccaggctgacacacttctacatggcggccgagaggcagcgcactgacctggagaccctgctccacctccaccgcttcagaaagaagatgtccgggttccacgtggactgtcaggacctgctgacccagctcagactgggcaagacatcaaggaccagccctggggagcagctccacctccgcctccactgttacctgaagcgcctggcatctgaattccagacagagaagctcctggccatgaagctccaggtggcctccctgagctgggctggcctgggccgggagttgtggaaagaggcccaggggcaacgaccagggagatccgagggccttggttgaggaaggcactggcctactacccatgcccagaggtcactgctgcccacttggcacacacggatcgaaacagg

SEQ ID NO: 5322 - DNA, 1254 bp, Cricetulus griseus
gggaacccgccctccgtgtgtggagtactctgagctcattagcctgctcactgcacctgtttataaccaggctgaggatggaggacccggcctgcacaagcaagtgttccactcactggcccggtgtgtggctgccctctcagctgcctgtcctcaggaggcagcaggaactgccagccgcctggtctgtgatgccaggtccccccactcaagcacaggagtcaaagtcttggcattcctatcactggctgaggtgggccaggtggctgggccaggcccccagagagagctgaagacccgtgccttctggaagccttggggtcgcccagtgaggatgtgagggctgcacgccgcccatatgccttgggccgtgtgggtgctggcaacctgtctgacttcctgcccttcctgctggcacagatcgaggccgaaccccggcgacaatacctgctgctgcatgcacttagggaccgggccacactcactttcttcaactcagctgtgcacaataaaccatcactggtccgggacctgttggatgacatcctacccctcctctacaaggagaccaagatccgcagggacctcatccgagaggtggagatggggcccttcaagcatacagtagatgatgggctggatgtaaggaaggcagcctttgagtgcatgtactcgatgctggagagctgcctgggccagctggacgtctgcgagtttctgaaccacgtggaggatgggctgaaggaccactatgacatccgaatgctgaccttcatcatgctggccaggctggccaccctttgtcctgcacctgtcctacagagagtggaccggctcatggagccactcaaagccacctgtactgccaaggtgaaagccggttctgtgaagcaggagctggaaaagcaggatgagttgaagcgctcagcaatgcgggcagtggctgccctaatgaccaaccctgaggtacggaagagccccagtgtggctgacttctctgcccagatccgatccaacccagaactcaccatcctcttcgagagcatccaaaaagactcggcctctggtcccagcatggattctatggaactcagctagctgtccccaacacaagccctcccctcccaccccacgggctttggccaccactgtccttccgagtcagcctcagtgccttcctactctcagcccctgtaccagtcattccctctagtcatgtctcgaaaaacaaaaaaaaaaaaaaaaaaaaaaagt

SEQ ID NO: 5323 - DNA, 1254 bp, Cricetulus griseus
cccgggatggcgcctgaggaccacgagggggccacgtctctgctgcagagtttcgagcgccgcttcctggcggctcgtgcgcttccctcctttccctggcagagcctagaagagaaattgagggagccctcaggttctgagctgcttctggctattctgcagaagaccgtgaagcaccctgtatgtgcacagcacctgccatctgtgaagtacgcccgctgctttctctcaaagctcatcaaaaagcatgaggctgtgcccacagagcctttggatgcactgtacgaggcactggcagaggttctgatggccaaagagtccacccagtgccaccggagctacttactgccttcaggagactcagtcacactctctgagagcacagccattgtgtcccatggcaccacaggcttggttacatgggatgctgcactctacctggcagagtgggccatcgagaacccagcagccttcactgacaggactgtcctggagctaggcagtggagctggcctcacaggtctggccatttgcaaggcatgctaccccagagcattcatcttcagcgactgtcatggtcaagtgcttgagcagctccgtagaaacgtgctcctcaacggcttccccttagagccacacactcccattgacccaagcagcccaaaggtgacagtggccgagctggactgggacaaggtgacagcttctcagctctctgccttccaagcagacgttgtcattgcagcagatgtgctatactgtggggaagtgacactgtcactggtcagggtcctgaagatgctcagcgactgccagaggaagaatgctcctgatgtctatgtggcctataccatccgcagccaagacaccggcaagctgttcatcacagagctggaccgagcagggatctactgggaagaggtgcctcctcacgccagcaaactgttcccttacgaagagtattcagccatcgtaatcctgaagcttgtgctgaacggttgtcacagtgtttgaaggtgactggaaaatgagatcactaggcaggtggatctccatgagttcaaggccagcctggtctacagagtgagttccaggacagccagagctacacagagaaatcctgtcttaaaaagcgaaaaaaagtacagtaagcacaggctttgagtgctggtccctgtcctcatcagatcatctagagtggacactggctcagagcaaacatttccattgtactaaataaaaacatgaaattta

SEQ ID NO: 5324 - DNA, 1253 bp, Cricetulus griseus
tattgtcctcatcatcgtcacctttcatccccttctgcctatggagggcctggtcgaaacagtaaactatacgacagatctgggttttcctcgaagtgccattttgtacttacaatacctagaccaaataacacgaatggtgccattgggaggacttccgggtcaccaggccaatggtcagccctacctcagtggcatcaatgggcgggcctgtgccagccaactgctcggaagcagggcatgttccgcagctgcagtgggctgcccaggcaggaaacctcagcagcactgcctaggggagcttgcacagcaggaagacaccaacagcccactgaggcagaccatggttggcaatggatatgacccccagagccagcaggttgccagaggtcccaagtctagctcggaggaaggctctttcttatacacactgtctgatgactcaactcaccagctgctccaaaactcaagattgctgtcacctccagaagcaacctgtcaccacatgccagacagcaacgaggagggcacctgagggtcccgggccggaagcttcatgggatcctccatatcactcagggccccggtgctgtttgggccttgtaccagttgaagaagtagacagttttgactcctgccaagtgggtggagaagactggtgtcctcagcacctggcctacacaggacaggaactaggggtgcaactctctccaagcccatcagttcacgtttcctttgaaacaccacctcccacaatttaggctaaagccaatatcccagaaagactatatattgtttttgttttcaaagagacagagaaaattggtatttatttttctattatagccatatttatatatttatgcacttgtaaataaatgtatatgtgtttctatagttctggagagacagggaatcctcccctttatggcacaaggaggaaaataagcagcaaggtaacagagttcagtaggaatgattagcacaggttggcaggcttcagatggcccatggaacctgcagctgcctggggctgcaggaggccctcgggcaaagggtggcaagaaggactctaagctcactgtttatgaagagcacacatgaggcaaacagcaaaggccatgctgctatagactggagccacccagaagccactcggacttggtggcacagtacacatttccaagatgccatgagaaaagccccagatgtgtacagcactctaagcattaacgaccatccagagtcaataa

SEQ ID NO: 5325 - DNA, 1253 bp, Cricetulus griseus
aagaggccctgaatgcccgggacattgccaagagccagttgcaatatctggaggagactgcaatccgagaccgaaagaagcgtgaattctacataactgactgcaagaaacgggcagaagagaagaaacttcagacagagcgcatggagcgcaagactcacagagagcatgtactgcttcagtcagaagatacagtccatgaccaccaacgccacaaagaggaggagctgaagcgtcgctggggcatgtaccagatggaaatgatgtttgacaaggtcaaggatgccactggagtggctgaatcacatgctgtgtttcgaaggttcctggcccaggatgagaccttcacgcagttggagactctcaagagggacaacgagcagatgctggtgaagatgaaggaggagaaagagcggctccagagggagctggagaacctcaagtactcaggggatgccacactagttagccagcggaagctccgcgacacgatgcaggagacattcaagactgaggagcggcggcgcaacgacatccaccagcaactggaacgcgccttgcgaaccctccaggtggccaaggacggcctggagcatctggccaacaaactgagccacgtgatagtggatgatagcgttctgtcaggaaagaagttagaccccgactcagagaactacttgtccgatctgctggaggttgtccaggaaaagctgctgagactacaagggcaactagagagccacgacatatcagagatgatgcgacacatcacagagcgagagttcctgagctcattagaaggaaaactgcctctcttcaacacccgcatccttctgccccttgcccctgtcaaggacaagttctttgatgaagaggaaagtgaggaggatgatcgcgatgtggtgacccgtgctgccttcaagctccgttcccagaagttaattgaagcccgcagcaagaagcgcagtaggtcgcgcaggtcctagactcgcagttgcgtcccatcggatgcctccgggcctctagggaaccctgcgacccgctgggcccacctaccggtgtgggcggagccctggaggctccttcgagggctgaaggaggctccagtagggagcaccgcaggtcagcagcacccggaggaggggaacgtcggagccagaagttcccacagtaaatctctcgaggcgggttaagcccccccccagaatcacgcaataaagttcactgaacaaccaaaaaaaaaaaaaaaaaaa

SEQ ID NO: 5326 - DNA, 1253 bp, Cricetulus griseus
gtaactgctgaccaaagccaccgaaagcagcgagcgtgtcaaagccgcccgagcgcagcgacactgagacctcccccccttcacctgcctcccgggcagaggggaagtgtggagggccggaaggatggtgcagtcctgttccgcctacggctgcaagaaccgatacgataaggacaagcctgtctctttccacaagtttcctctgactcgccccggtctttgtaaacagtgggaggcagctgttagaagaaaaaacttcaagcctactaaatacagcagtatttgttcagagtactttaccccagactgctttaagagagagtgcaacaacaaattactgaaggagaatgctgtacccacaatatttctttgtattgagccacatgacaagaaggaagatctggaaccccaagaacagcttccctctcctccttcaccccctacttcccaggtcgatgctgctattgggctgctaatgcctcccctccagacccctgataacctgtcggtgttctgtgaccacaattacactgtggaggacacaatgcaccaaaggaagcggattcaccagctggagcagcaggtcgaaaagctcaggaagaaactcaagaccgcccagcagcggtgccgcaggcaggagagacagctggagaagctaaaggaagcagtgcacttccagagagagagagatgatgcgtcagaaaagggggctaatgtgattctcccacatgactgctttgaaattgttgaagtaccagcctgagaaaatgagatgtactagtgggacaagactacatgctctcttgtagctgacacacaggatttcatttagaaaaacagtacttgattacttagtaaataaaaaaatttaacaaaatattttaaaaaatccttagaccgccaatataatgttgtatattggtttcaagatggtggattgtttttcatttgagtatttatagaaataatgtaaaaatgaaaagtagagaggataacggtgcagtaaagatgatttaagtttaaaagttaaaattaatgccctttattgagagaacttataatttaaatcagaagtataaatgagatcataggacagcctctcagaatatagagatgtacatacacatttgttatttatagtcagagcttcatttatttttctcaatcacttgtcaaaataaactgtcaagtcaatatttgaggaaaataatattttgctgtcttcagaagagaaaagtcattccatatttaat

SEQ ID NO: 5327 - DNA, 1253 bp, Cricetulus griseus
atccatccataccattcagctttctcagtgaaacagtgtggatcaagccagaagatcaactgccatgttacttgactcataccaaccccagagtggatgagattgtccttgagaacctgcacctgaatagccatgttaaggaaactacaagaggaccccgatactgtccctccattgaatcaaaagttttacgctttccaaatcgtgtacatcaggtttggttggaaccggaaggaatggattctgaccttatctacccccaagggttgtctgttacactaccagctgagttacaagagaaaatgataacgtgcatcagaggcttggagaaagccaaaatggttcatccaggctatggtgttcagtatgattatttagacccccgtcagatcagtccttcccttgagacacatttggttcaacggctattctttgctggacagataaatggaaccactggttatgaggaagctgcagctcagggtgtgatagctggaatcaacgccagtcttcgagtcagtggaaagccaccctttattgtaagtcgcacagaaggctacataggagtcttgattgatgatctgaccacactgggcaccagtgaaccataccgcatgtttaccagcagggtagagttccgtttgtcacttcgcccagataatgctgacagccgcctcacattccgagcccataaggatgctggctgtgtgtccccacagcgatatgaaagagcttcgtggatgaaatcttctttagaagaaggcatttctgtgttgaaatccattgagctttcaagctccaagtggaaaaagttaattccacaagctcctataagtgttaatagaagccttcctgtcagcgctctagatgttcttaagtgtgaagaagttgacatggacttactagccaatgctgttcctgagcccttgaagaagtatactgctgatagagagctggctagaagactgaaaatagaagctgcttatgagtctgtattgatgtttcaactacaagaaataaaggaggttcagcgagatgaagctttacaactgccacaagacctcgattatttaacaatcagggatgtgtcattgtcccaggaagttcgagagaagctacacatgagtcgcccacagactattggggctgctagtcgtatacctggagtgacaccagctgccatcgtcaatctgctcagatttgtgaagaccactcagcaaagacaggcagcagtaacggaacaccaaaccaat

SEQ ID NO: 5328 - DNA, 1252 bp, Cricetulus griseus
gggaagcgtgtcagggcatcactggacagtgctggggctccgggaacagtcccaatcctgctgcctaccccacgctgtgggaggccccccggtactcacctcttggcccacaccactctcaccctagcagcagtgcaagatgggttccgcacacatgatctcacccttgccagtcacgaggagaaccctgcctggctgcccctgtatggtagcgtgtgctgccggctggccgctcagcctctctgcatgacacagcccaccgcaagtggtaccctcagggtgcagcaagccggggagctacagaatgggacactcgtgcacggagtcctgaaaggcacaaacctcttttgttactggagatctgaaggtgcagacactgggcaagaacccctgtttactattgccatcaacaaggagactagggtccgggcaggggagctggagcaggccccagagtggcctttcaccctcagcatcagcaaccggtatggaggtgatgaggtgacaaacaccctccgggtggagagcagagaagccctgcagaactggatggaggctctgtggcagctcttctttgacatgagccagtggaagcactgctgtgatgaagtcatgaaaatcgaaacccctgcaccccggaaacccccacaagccctggccaagcaggggtccttataccatgagatggcaattgagccgctagacgacatcgcagctgtgacagacatcctggcccagcgggagggcacaaggctggagacgcccccaccctggctagcaatgtttacagaccagcctgccttgcctagctcctcctgctcgcctgcctcagtggccccagtcccaacctggacgcaacccctgccttgggcgcgaccccgaaccttttccctggatgctgcccccccagaccactcccttggggcttctcgctcggttgcacccctccccccacagcgatccccacaatccagaggcttctacagcaaaagtcagctccgcacatggctccagtccccagtgtgagagaggcaccagcaacaggatctggccaagaaagaaaacgacccaagggcaactgggccctaggtccagcgctgtggggaggctggagaggggtaacagaagcccctcttaagttgtggttagcatggtactgaggggaccattgctggagttggttgggatcccctaagctcttcctgggagaaaactggaacaagtctgccctgcctccctgcactaaccagcc

SEQ ID NO: 5329 - DNA, 1252 bp, Cricetulus griseus
ggaagtggttgcgccaaccgggccgtggcaatgcagagggaggagaagcagcttgaggcatccttagatgcactgctgaatcaagtggccgatctgaagaattcactggggagtttcatttacaagttggaaaacgagtatgaccggctgacttggccctctgtcctggatagctttgcattgctctctggacagttgaacactctgaacaaggtcttaaagcatgagaagacaccactgttccgtaaccaggtcatcatccctttggtgctgtccccagatcgagatgaagacctcatgcgtcagactgaaggacgagtgcctgttttcagccatgaggtcgtccctgaccatttgagaaccaagcctgaccctgaagttgaagagcaggagaagcagctgacaacagatgctgccagaattggtgctgatgcagctcagaagcagatccagagcttgaataaaatgtgctcaaaccttttggagaaaattagcaaagaggaacgagaatcagagagtggaggtctccggccaaacaagcagactttcaaccctgcagacaccaatgccttagtggcagctgttgcctttgggaaggggctgtctaattggagaccttcaggtagcagtggtcctggccaacccggccagccaggagctggtacaatccttgcaggagcctcaggattacagcaagttcagatggcaggtgctccgaaccagcagcagacaatgctcagtggagtccagatggctcaagcaggtcaaccagggaaaatgccaagtggaataaaaacgaacatcaagtcagcttcaatgcatccctatcagcggtgaatgtggacagcagcctccactctcaggtgatctgtgctgagttgaggaatgaaattatcttttgctcagacttacctagatgggtacaataaaaagaacacaggctttcagcaagagacaaatctcagctccactgtgaatagctatgcgacctggggaaagtgacctaatttttctgagcctgtgttctcatttgtaaatggtgataatacctacctcatagggttgttgtgaggattaaaatgagaaaatgaatgtaaaacacttagcatggtatatgaattactgggccttgaataaatgatagtttcttacttttccaccctgctattctctgtcctgcaaacagaacttgctgtgatttacacagctccatgacattggcgagctaatggatgcaggatcaagtaatcca

SEQ ID NO: 5330 - DNA, 1252 bp, Cricetulus griseus
ggaaagctgactgacatagctcgccacatccgagcaaaagagaccgttgtggtgccctggagctggaaggtaggtagaggttcggagtccagactgaatgacaagaagaacattcatgacctcatccccaagcagcccctggaggttcatgagacagtggccgaatgcatgatcctagccaaccactgggtggctaagaagatttgggagagtttcccccaccaggctttgctgcgccaacaccctcctccacaccaggagtttttctcagagctccgagaatgtgctaaagcaaaaggcttcttcatagacacacggtccaataaaaccctggctgactctctggatagtgcaaatgaccccagcgaccctatggtgaacaagctgctgcgctccatggccacccaggccatgtccaatgcactctacttctccaccggatcctgtgcagaggaagagttccatcattatggtcttgcattagataaatatactcactttacttctccaataagaagatattcagatattgttgtacaccgactattaatggcagccatttcaaaagacaagaagatggaaatgaaagaaagtttgttcagcaacaaagatcttgaggaattatgcagacacatcaacaacagaaacagagcagcccagcattctcagaagcagtccaccgagctcttccagtgcatgtactttaaagacagagacccagaaacagaggagcgatgcatggccgatggagtgatttattcaattagaacaaatggtgtgcttgtattcataccaaggtttggaattaaaggtgctgcttatctgaagaataaagatggcttagtgatctcatgtggcccagaaggcagctcagaatggaagccaggatccctgcaacgatctcagaacaagatcacctctaccacagctggagggcagtcagttacatttcatctgtttgaccatgtaacagtaagaatatctgtccaggtcttgcgttgccattctgatacaatcaggcttgaaataataagcaacaaaccatatatgacaccaaacccagaactgtgtcatcagagttccctcttgctgaaaagtgagttagtgaaagaagtaacccgatctgtggaagaagctcagcttgcccaagaagtcaaaggcaaggtgcttcaggaggagtatcaagaattctgccaaacaaagggaagaagtctgtacacacttctggaggagataagggaccttgctcttc

SEQ ID NO: 5331 - DNA, 1252 bp, Cricetulus griseus
caaaataggacgctctttggagggggttttaagatatcttatgagtgggctgtacgtttcatgctgcggcaccacctcactcctcatgcccggcgagctgtagcccacacattaccgaaggatgtagcagaaaatgcaggactcttcattgagtttgttcagcggcagattcacaatcaggacttacctttgtctatgattgtggcaattgatgaggtctctttgttcctggacacagaagtactgagcagtgatgaccggaaggagaatgctttgcagacagtgggcacaggggaaccttggtgtgatgtagtactggctatcctggcagatggcactgtcctcccaccctggttttctaccgaggacaaatgaatcggcttgctaatgtgccagactctatattgctagaggccaaagagagtggctacagtgatgatgagatcatggagctttggtcaaagcaaaggcatgctggtgatggactgtcatcgcactcacttgtcagaagaggtactggccctgcttagtgcctctagcactttgcctgcagtggtccctgcaggctgtagctctaaaatccagccattagatgtatgcatcaaacgaactgttaagaacttcttgcacaaaaagtggaaggagcaggctcgggaaatggcagatactgcgtgtgattctgatgtcctgcttcagctggtgctggcctggctgagtgaggtgctgggtgtcattgggggctccccagagctagttcagcggtccttccttgtggctagtgttctgccaggtcctgatggcaacattaactcacctacacgcaatgctgacatgcaggaggagctcatttcctccctagaggagcagctgaagctgagtggagatcggtctgaggaaccctcggcttctaccccccgacccagatcctctcctgaagagacagttgagcctgaaagcctgcaccagctctttgaaggggaaagtgagacggagtccttctatggctttgaggaagctgacctagatctgatggagatctaggtgctgaggctatgagagcatatggagttgggtgggaaagctgaggagggtagagggcttagagaaaggggagtaaccagtgggggtacttggttatattttaattttatgccactattcccctgacattgacacttctgtgaattggtgggttattaggaaagccagtagtgatcacttctgagccgaggagctggtccattggttactc

SEQ ID NO: 5332 - DNA, 1251 bp, Cricetulus griseus
gactgctggtgtctggcggcggcagcatggcggcgggggcggcagaagcggctgaggtggccgtggcagtggtggaggttggctcgacccggcaatttgaggagctactgcgcctcaaagccaagtcgctcctcgtggttcatttctgggcaccatgggctccgcagtgtgtacagatgaacgatgtcatggcagagttagctaaagaacaccctcatgtttcattcgtgaagctggaagccgaagccgttcctgaagtatctgaaaaatatgaaattagttctgtccccaccttcctgttcttcaagaattctcagagagtcgaccggttagatggtgcacatgccccagagttgaccaaaaaagtccagcgacacgtgtctagtggatcctttcctcctagtgctactgagcatattaaagaagatctcaacgttcgcctgaaaaagttgactcacgctgccccctgcatgctgtttatgaagggaacacctcaagaaccacgctgtggtttcagcaagcagatggtggaaatccttcacaaacacaatattcagttcagcagttttgatatcttctcagatgaggaagttcgacaggggctcaaaacatactctaattggcctacctatcctcagctttatgtttctggagagctcataggaggacttgacataattaaggagctggaagcatcagaagagctagatacaatttgtcccaaagctcccaagttagaggaaaggctcaaagtgctgaccaataaagcttctgtgatgctctttatgaaaggaaacaaacaggaagcaaaatgtggattcagcaaacaaattctggaaatactgaataataccggggttgactatgaaacttttgacatactggaggatgaagaagtgcggcagggattaaaaacgttctcgaactggccaacctaccctcagctgtatgtgagaggggagcttgtaggaggattggatattgttaaggaactgaaagacaacggtgaattgctgcctatattgaaaggagaaaattagttattgttaagcatggtgtccaaggattgcaagaagtatttaattacagtggaacagttgatgatttggtcctgagaagtggactaggagtagaaatgcgtctcatccagttatgctctgtgcgtttcacacagttgtactgaagaaacgtatgttacattttccatgaaacataagacggcaataaacttcagattcagactaaaaatga

SEQ ID NO: 5333 - DNA, 1251 bp, Cricetulus griseus
cgagactggagcctatctgattgacagagaccccacctactttggtcctatcctaaactacctccgacatggaaaacttatcattaccaaggagctggcagaagaaggtgtgctggaagaagcagagttttacaatatcgcatctctcgtgcggctggttaaggaaaggatacgagacaatgagaacagaacttcacaaggccccgtgaagcgacgtgtaccgagtcctgcagtgtcaagaggaagagctcactcagatggtctccaccatgtctgacggctggaaattcgaacagctcatcagcattggctcctcctataactatggaaatgaagaccaggcagaattcctttgtgttgtctccagagaactaaataattctaccaatggcatcgtcatagagccaagtgaaaaagccaagattcttcaggagagaggctctcggatgtaaacagggaatttgaagttccagaaccctgaaggcaagagagtgatcggctgagcagctgtgaaggggacccctgcacctgtacagtaactgagctgctgcaaagcgaagcgaagctacacctggtcctagagaagtggtgtctgcgcaaaccggaggagccccgcccgcctcggacgaagacagcgcgcctctggccccacggcccctttccagaaccctgtttttgttttctagccagttatgacagaccttcataacagcatctgggatgggtccctggctggagccttacggggagctgggggaaaaggaggagggtctagctccctgaaaaccgtctagatgggtacagactagagttgccagaggacccacaatcctatgaacagagcctcagaggcaggaggatgaggtgtcctgtgctgtgcttaagagtgtggtggctgctgctcctggttctgagccccgccctgttcccatgcgtggcttcaccccgaggtgccccaggtggccccagcctcgagcaggaggttagaggttgtggtacccttagcagggctggacggacgacggtactaagcagttgctgtaactgcgtcttcatttcttacctggttggccccgtcctcctccccagcttcttgtactggaccaaagagaacggactttgtggaccctatttaatggcttggggtgaggaaggctaattccgtggaagctgccaaatgtgccgtgttgtcacaactaaaagtggtggtagtgtttctgtgattgtcttcttgaacatgcactgataggt

SEQ ID NO: 5334 - DNA, 1251 bp, Cricetulus griseus
  modified_base (359)..(359): a, c, t, g, unknown or other
  modified_base (530)..(530): a, c, t, g, unknown or other
aatctgcgaatagttcactccgtcccgtccctgcaggaattatttgtagagtagtaagtatgctaatattaagtaagatagcaggagttttccccagatcaccgaagagtaacgttcatggatttttaagaagttctagtgttggccctggaacactttttcctcataaactggtactgggaattgaaaccagctgtgatgatacagcagctgctgtggtggatgacgctggacatgtgttgggagaagcaatgcattcccagaccgaagttcatttaaaaacaggtgggattgttcctccagtagctcaacagcttcacagagaaaatattaaacgaatagtagaagaaactctttcngccagcagcatctctccacgtgatctctcagcgattgcaactaccgtcaaaccaggactggctctaagcttaggtgtaggcttatcatttagcttacagctagtaaatcagtttaaaagccattcattcctattcatcatatggaggcacacgttggcgttagtccgaggngtttcagattttctgcttcttgggaagctttggacatagcaccaggtgacatgctcgacaaggtggcaagaagactttctttaatcaaacatccagaatgttctacgatgagtggtgggaaggctatagaacatttggccaaacaaggaaatagattccattttactatcaatcctcccatgcagaatgttaagaattgcgattttcttttacgggacttcagcacgttatcgataggctgataaagcacaaggagaaagaagaaggtgttgagaagggacaaatcctgtcttcagctgcagacattgctgctgcggtgcagcatacaacagcgtgccaccttgcgaaaagaacacatcgtgccattctgttctgcaagcagaaaaatttgttatctccagctgatgcagtattagttgtatctggaggtgttgcaagtaacttgtatatccgaagagctctggaaattgtagcaaatgcaacacaatgcactttgttgtgtcctcctccaagattgtgcactgataatggcattatgattgcatggaatgggattgaaagattacatgctggcttgggcattttacatgatgtagaaggcatccgatatgaaccaaaatgtcctcttggagtagacatatccaaagaagtcgcagaagctgccataaaagtaccacaattaaaaatacaatttgattgtgattcttaaagctctctacag

SEQ ID NO: 5335 - DNA, 1251 bp, Cricetulus griseus
agctgagcctggatcctacctataggcaagagctgcctctgagccctggcccagccaagctgacccctaccttagacccccgtgcaccggatggaggtgatcctgagtaccagcccagcaaagctgactctagatcctgcatgccagccagaattgaccctgagattcaacctgaccaagctaaccctggatcctgcactccagccagagctgtcactgagtcccaggatagctgagctgaccctggattccacatgccacccagagatgaccctcagtcctggcccagctgagtttactctggatcctgaacaccaggcagaggagaccccagcccccaacccggctgagttgaccctggagcctgtgcactgccgaccggagctcctgggtgcttgtgctgacctcatcaatgaccagtggccccgcagtcgcgcctcccgactgcactccctgggccagtcctcagatgccttccccctctgcttgatgctgctgagtcctcatcccacacccggagcgtcccctattgtggttggccatgcccgcttatcacgggtgttagaccagccccacagcctcttagtggagacagtggtggtagcccgggctctgaggggccgtggctttggccgccgcctcatggagggcttagaggcttttgcccaagcccggggcttccgccggctgcacctcactactcatgatcagttgtacttctatgcccatctgggctaccacctgggcgaacctgtgcagggtttggtcttcagcaaccgtcggctgcccaataccctactacgtagcttttctaagacacgcagcccccagcaaccctgcaagggatctgtcctagctgcccaagctgtcccaaggcgctccaagggaccccaattgccaccaccacctcctcccctaccccagtctctgaccacctcaccccctccttcaccagggccgcctcctcaaagcctgctagagacacgacacagagatctgaagggatgccctatattctggatggaaaaagacatctgaaggctaggcactgtctttctgggacattgaattgcccagaacagtcccagcctcagcccactggccatactttagccccctagcccttgggggcaaccttagcctgtgtatgtttcctgggtaccaatgggccaggaggtggcttcagggcttcggctcagagctgtaagtgtggctgaaataaaggcttccattaaggtaaaaaaaaaaaaa

SEQ ID NO: 5336 - DNA, 1251 bp, Cricetulus griseus
atggcggcgctgggcggggacgggctgcgtctactgtcggtgtcgcggccggagcggcagcccgagtcagccgcgctgagcggcccgggcccggggctgtgctgctgggtgtccgtgttctcctgcttcagtctcgcctgctcctatgtgggcagcctctacgtgtggaagagcgagctgcccagggaccaccctgctgtcatcaagcggcgtttcaccagcgtcctggtggtctccagcctgtcccctctctgcgtgctgctctggagggaactcactggcatccagccaggcacatcactgctcaccctgatgggcttcaggctggagggcattttcccagcagctctgctgcccctgctgctaactatgatcctattcctgggtccactgatgcagctctctatggattgcccgtgtgacctgacagatgggctgaaggttgtcctggcccctcgttcttgggcccgctgcctcacagacatgcgctggctacgaaaccaagttattgcacccttgacagaggagctggtgttccgggcttgtatgctgcccatgttagcaccatgcacaggtctgggccctgctgtgttcacctgcccactcttttttggagttgcccactttcatcacattattgagcagctacgtttccgccaaagcagcgtgggaaatatcttcttgtctgcagcgttccagttctcctacaccgctgtctttggtgcttacacggctttcctcttcatccgcacaggacacctgatagggccagttctctgccactccttctgcaactacatgggcttccctgccgtgtgcgcagccctggagcatccacagaggtggccactgctggcaggctatgctcttggtgtgggactcttcctgcttttgcttcaacccctgacggaccccaagctctatggcagccttcccctttgcgtgcttttggaacgaacaggagcctcagagaccctactgtgctcctgaccatcactcttgtgtataccccagtgaactctgatgggctctgcagcccctccttatcatggaatactgcaagggaggggctggctggggtccccgagatctcaggaatttttggtagggggattgaagccagagctagttgaaccccagggaccaagaggaaggagcagatatccaaagggtgcagcctctcacaaagaacggttgaggagcagctggacgtggaggggacaaggacaaaatccgtaggagctgtgcact

SEQ ID NO: 5337 - DNA, 1250 bp, Cricetulus griseus
agagatttccctgaggaggtgccctttgtggttacccggtgcacggctgagatagagcaccgtgcccttggcctgcagggcatctatcgggtcagtgggtctcgagtgcgtgtggaacggctgtgccaggcctttgagaatggccgagcactggttgaactgtcaggaaactctcctcatgacatcaccagtgtccttaagcgatttttgcaggagctcactgatcccgtggtccctttccacttctacgacgccttcatctctctggcaaagaccctgcatgcagaccctggggacgaccctgggacccccagccccagccctgagattattcgctcgctgaagaccctcttggtgcagctgcctgactctaactacagcaccctgcggcacctggtggcccatctgttcagggtggctgctcgatttgaagaaaacaagaatgtctgccaacaacttgggaattgtatttggtggcctgcctgctggactccggtcaccaggctcagcttgttgagttcctcattgtgaactatgagcagatctttggaatggatgagctcctctggcctctgagcccctgacccaagacattggcctggctcctgcactcctcgaatctagtccccagcacccagcgagaaggaggtggaaaacaccagagacggggcaggggaagggtccagccacaatcctgaggacttgctactgggaacacaatcccggggccatttcagccgccagccagtgaagtattcccggggaggtgtacgaccagtcactcatcaactgtccagcttggctctggtggcttacaagctgtgtgaggagactcctgtcactgtctcaacagtgcacggaggtagtttgaggggacgaagtctgggccctgcttctgcctcctctgaaggcagccccctgcgccggaaccctctgcccaagcactttgagatcacccaggagacagcacggctactctcaaagctggacagtgagactgtgtccagggccaccagttgtgctgacactgagcctgaggaatctgaggagcatctctgaccactcccatcctgagggacccaggactgagttgattgatgtctccctgcctgctctacctggtagccaaaccaattcagtagggtatggggagagacggggttaccggaaagttgggaaaggaagaccactcatcttggagaagtcctaacacacgtggttacagtgtctctccctgcctgccagaggag

SEQ ID NO: 5338 - DNA, 1250 bp, Cricetulus griseus
  modified_base (48)..(48): a, c, t, g, unknown or other
aacatgaacatcctgcagtactgcccttcctcctgacctctggacgcngtttgagacctgcagcgtccatatccgcaaacagcagatgctgtccatcgaggaggaccatctacatcgttggggggtggtctccatgagctgggggccaaccgcaggagcagccagggtgaggacatgctcaccgtgcaggcctacaacaccgtcactcggcagtggtactacctgaaggagaacacgtccaagtcgggcctgaacctgacgtgtgcacttcacaacgacggcatctatatcatgagcagagatgtcactctgtccaccagcttggagcaccgcgtgttcctcaagtacaacatcttcgctgacagctgggaagccttccggcggttcccagcctttggacataacctactggtttcttctctctatctacccaacaaagcagagacctgaatgattcaacactgtttaaaagacaggtctggttcaaggggggaaaaaggcaaccctttgaaatcctgaatcctgaagagacaaagtagactaacgtaggtcacatatgtaggaggctcggctgtaagtaagctttcttgaactaattacttgaaaacttgggggaaagaaaccaaaagttaattacttttaaataatccttgcacttcacagtttgtgaaaacacagaaatgatgtggaatcggtttttgttagaattcactcagcactgtagccccacagatgtgtttgcttttcaatttcttttgtgagtttgggaacacaacaggaaatatatagcaactgccatgttgacagggccatgttcatccattcctacagggagcctgtgaaatgtcaccgagggtccattctgaagagccccggggtgctttgtgtttccgtagggcctgttggtgcttcatatagtttgtcactggcaaagcaaagcaaaatgtaatttgtagtctgtgtcacttcagagtgggcatgtccctgtccctctgttgttttcttatctagttgtcgtttttatggtaaagaataatcttcaagttatgttctgttatgaccgacacttccttcgtttgaaaggttgtactgagtccgtagtttggagtgtggaataaacacacacgcatgtcaacattgtcacacaaccgcagcagtgattatgtgtctgacacttgtgaaacacagactgtattcatttttgtttctttggaccatggaaggaaatgtattcaaataaaatagttctc

SEQ ID NO: 5339 - DNA, 1250 bp, Cricetulus griseus
gatgaggctgcactgtgaggtggaagtcctgagccggcacttgccagtcttggggctcaagagccgaggcaagggtgtgcgagcggtggtgagcctgtgtcagccaccgcggaggagtgggctgcagcccctagcaggggccgagcccggccgcggcgcctgcctgctggtctccaccatgaaggacaagcacggaactcgctaccaactgaaaagaaaacattgaacagctcttcaccagatttgtggatgaagggaaagccactgttcggttaaaggagcctcctgtggacatccatctgagtaaggccagtcctggcaattttaaagaggtttcctttcagctgtgaggatggctcacagaggctgtgacatcagcataccactttcaacactcacaccagtagaagacttcagaatttgaaaagtttaaaaccaaaatggttatcacatccaaaaaggattatcctctaagcaggagctttccatattcctctggaacatcttcagacttctcattgtaggcttgcccgagttgacatgcgtatgctctgcttaaaaaacccttagaaagttagacctgagtcacaattgtataaaaaagcttccagctacaattggagacctcacccaccttcaagaacttaaccttaatgacaatcacctggagtcatttgctgcgctttttgtcagtccacactccagaagacacttcagagtttggatctcagcaagaacaaaatcaaggcactccctgtgcagttttgccaactccgggaacttagaaatttaaaccttagtgataatgaattgattcatcttcctttcaagataggacaactaacaaaccttcgttttctatcagcagctcgaaataaaattacaaatctaccttgtgaatttaaagtgctatccctagagtacttggatctttttggaaatgcttttgaaaaaccaggagcccttccgattataaagcttcaagtaccattaactttactggagtcttgtgcacaaaccatactatccaacaggattccatatggccctcatatcattcctttccatgtttgtcgagatttggatactgccaaaacctgtgtttgtggaagattgtgtctagagtctttcattcaaggaactacaacaattaatctgcactccattgcccacacggtggtcttagtagataatgtggatagaatggaagctcctattatctcttacttttgttctctaacttgttatgt

SEQ ID NO: 5340 - DNA, 1250 bp, Cricetulus griseus
tgtgtaccggaaacagattgcctcgaatctcggtactttgtactcagcccaggcccagagctatggaggtgtcctcctcaacttcctgggagctgcccctggtggctgtgtgccaggtaacatcaacaccaaacaagcaagagaactttaaaacatgtgctgagctggttctagaggcggccagactgggtgcttgcctggcttttctgcctgaggcatttgacttcattgcacgaaatcctgccgagacattacagctgtctgaaccactggatggggaccttctgggacgatatagccagcttgccagggaatgtggaatctggctgtccttgggtggtttccatgagcgtggccaagactgggagcagactcagaaaatctacaattgtcatgtgcttctgaacaacaagggactagtagtggccacttacaggaagacacatctatgcgatgtagagatcccaggtcaggggcctatgcgggaaagcaactctaccatgcctggaaccattcttgagccaccaatcagcacaccagcagggaaggttggtctagcaatctgttatgacatgcggttccctgaactttctctgaaattggctcaagctggggcagaaatactgacttatccttcagcctttggatccgttacaggtcctgcccactgggaggtgttgctgcgggcccgtgccattgaatctcagtgctacgtgatagcagcagcacagtgtggacgccaccacgagacaagaacaagttacgggcacagcatggtggtggacccctggggtacagtggtggccagctgctctgagggaccaggcctctgccttgccagaattgatctcaactttctacaacagatacgacaacacctgcctgtgttccagcatcgcagacctgacctgtatggcaatctgggtcaaccactgtcttaagccttttaacttatgcgggttgagacatacacacagcacagctgtgaggtgatgcctactgtgacttgtaggcaggacccaagcacagttccctccacttgcagaaccttaaactactcttaatggaacacaggttcaagttcatgggaaagaaataacttttgacctgacctcagatttcagtttcagaaaagtaaaattttatatagtcagtgtttttatttcatgaaaactgaagttatgctgagggctgagcagcactggcattgaaaaataaaataataataatgtcaaaaaaaaaaaaaaaaa

SEQ ID NO: 5341 - DNA, 1250 bp, Cricetulus griseus
  modified_base (200)..(200): a, c, t, g, unknown or other
tgtggtcaagaccccatgagcgcggcgcccctggtggggtacagcagcagcggctccgaggatgaaaccgagggatggaggagttccatctcagcctgtctcagagcgtggttctccgtcaccactggatcctccccttcgtgcaggcactcaaagaccacatgggaggtcacttcagggcatgcccagttcctggaccnggtttcagaggtggacagagtcatggaggaatttgacctcactaccttctaccagaacccttcatttcatgtcagtctggcctggtgtgtgggtgatgcatgtctccagctggagggacagtgcctgcaggaactacaggaaatcgtggatgagtttgaagactctgagatgctgttgcgtgtgctggcggagcaggtccgctgcaagtccgggaacaaattcttctcgatgcctttgaagtgagccttgtcccatgcctctctatagaccagctgagttggaggagcctgctgccatctgtgggatgcctccagcaggaagtcctaatcacacactgagcactgttctagtgggctcctctcctggttcttttgggtggtaggttggtaggctgctgctgtcgtgtggtcatttccagaaatcaccagtagagggcagccggacctctaattcttctcttcctctaggaaaagcaaatgagccctgctggggagtccacccaccctcagtggcgtccccacctaggtctctccacttcatgatctatattgatgccactggccatcacaccagttcttaaagtccttgtgccctgactcacctctgtcaaactgggggcttcagtgaacctgtcactctccttttaatctcctttatttatccctttttcccttcatcccatcctgtgccaggagaggtcatttcagggccagggcacagggtgctaatttgtggtcagcagcagttttcttcattccatcctcccacttacccagccaggtgcctggggagcccagcagatgtttcattttggcctggccatggctgccagccaggcctccaaaacctgtgacccctgctttccccatcagctttcccaaagaagcacagaggcaccttcccaccaggcaaaacactcctgcccctgtggctgagctttcttcaggtgtggggcagggtgggaggtggagagaggcgggaggcacaggagattttattttccatcaagctcttatcagggcaaagaaccagtcctctccagttgtcat

SEQ ID NO: 5342 - DNA, 1250 bp, Cricetulus griseus
  modified_base (1231)..(1231): a, c, t, g, unknown or other
gtggtggataatcagcttcgaatcaaaccaatccatacaaaatccgtgtttccatcagtcctctgaagaaagaagtcaagctcttgccaatgaagacacatgtgtggtgctggttgaatcctggggatatcttttccttgttactcaacaagtactctttccgtgttttctctacacaaactgaagaggaagtggttagttgttactttacggaacagtcaaataatttgatgaagatgatgtattgagtgagatgcagaagtcccctgtgattaatttacctgataagacaactgggacttcacagctgcaaggaagaccccgaaataaccaaggccaagtgtactgccatagagcccatgtcctctgcaggtgcatgtggagacatccgagagcacaagctgcaccctgcccagaggaaaagaatcctcccagcttggatgttagcagaaagttcaagtggtcagaacctttcagcacctgttaagggtggagataaggatggtatccagagaagtggaaaagaaggaacctgcaaagataaaaccccagtaaacgtaacacagcatggaagaaagcgattaatttcaccaggaaatttggacagtaagtcagcagaacaggatcctgggaaaaaatgtaaaagttctgatcaagaaggactggttgtttcatccaaggaagttccagaatcattgtcttcaatcacattaagtgacacagatgtagatagtgtgaagataaatgaaccgagcaatgcagttccaatagaggaacttggtgaggtctaagtcactgcttgagacatcacaaggattccatcctaagtccagctctgctccctccagtcccgatgcttcgcacacaatggctgattcagttctaggctcttcagaagaaagcaaggtccagagggtgtcctgcatgtatggggctaactgctacaggaagaatcctctccattttcaacacttcagccaccctggtgatagtgattatggagacatacaagtcacagatgaaggtgaaactggtgacaggcctgagtgtccctatggggcatcttgttacaggaagaacccccagcacaagatggaatacagacacagtgcacttcctctaatgcattagatgtggctttgtgatttcatttactgcccttgtctgttgaatcctggggaaattattaacaaccagatgctgaaaatgatcctgttaagctgtggggaancaacactcaccttgcaagg

SEQ ID NO: 5343 - DNA, 1249 bp, Cricetulus griseus
gtttggcaaccagctgattcctcccaatgcccaagtgaaaaaagccacggtctttctcaatcctgcagcttgcaaaggtaaagccagaactctatttgaaaaaaatgctgccccaattttacacctatctggcatggatgtgactgttgtcaagacagattatgagggacaagccaagaagctcctggagttgatggacaacacggatgtgatcatcgttgctggaggggatgggacgctgcaggaggttgttactggagtacttcgaagaacagatgaggctaccttcagtaagattccaattggatttatcccgctgggacagaccagtagtttgagtcacaccctctttgccgaaagtggaaaccaagtccaaaatatcacagatgccacgcttgccattgtgaaaggagagaccatcccgcttgacgtcttgcagatcaagggcgaaaaggagcaacctgtatttgcaatgactggcctccgatggggatccttcagagatgctggcgtgaacgttagcaagtactggtatcttggtccactaaaaatcaaagcagcccattttttcagcactcttcaggagtggcctcagactcatcaggcctccatctcttacacgggacctaaagaaagatctgctagtgaacccgaagagacccctccccgaccttggctgtataggagaatactacgaaggcttgcctcattctgggcacagccacaggatgccttctcccgagaggtgagcccagaggtctggaaagatgtacaactgtccaccattgagctgtctatcacaacccgaaacagccaacttgacctgatgagcaaagaagactttatgaacatttgcattgaacctgatactgtcagcaaaggagattttataatcataggaagtaagaagatgagagaccctaacctgagagcagatggtaccgagtgtctccaagccagccactgcactctgctacttcctgagggaactgagggctccttcagcatcgacagcgaggagtatgaagccatgcctgtggaggtgaagctgctgcccaggaaactgcagttcttctgtgacccaaggaagagacagcaggtgctgcagagcacgtcccagtgagctcatggcaacatggtgctcgatcgcaggctgcgcttccagccaccagtgggaccacaaagggaagggtgtgcttctattcccagagcgttatcacaggagcccaagggaattttcttggcaagt

SEQ ID NO: 5344 - DNA, 1249 bp, Cricetulus griseus
gagccaggtcctttccactatggcccggcgtccacggagtagcagggcttggcactttgttctgagtgcagcccgccgagacgcagatgcccgagctgtggctttggcaggcaccactaactggggctatgactctgatgggcagcacagcgactcagactctgaccctgagtactcttccctgccaccatccatccccagtgctgtgcctgtgacaggagagtccttttgtgactgtgagggccagaatgaggctaccttctgcaacagtctacatacaacacaccgtggcagggactgccgttgtggtgaggaggatgaggattttgattgggtctgggatgacctgaacaagtcctcagctgccttgctgagctgtgacaaccgtaaggtcagctttcacgtggagtacagctgcggcactgcggccattcggggcactaaggagctaggggatggccagcacttctgggaaatcaagatgacctctcctgtgtatggcactgacatgatggtgggcattgggacatcagatgtagacctggacaagtaccaccacacattctgcagcctgcttggcagggatgaagacagctggggcctctcctatactgggctcctccatcacaaaggtgacaagacaagcttctcttcacgcttcggccagggctctattattggcgtacacttggatacctggcatgggacactgaccttcttcaagaacaggaagtgcataggagtggctgccactcggctgcaaaacagaaggttttacccgatggtgtgctccacagctgccaagagcagcatgaaagtcatccgctcctgtgccagctccacctccctgcaatacctgtgctgctatcgcctgcgtcagttgcggccaaactcaggggacacccttgagggcctgcccttgccccctggcctcaagcaagtgctacataacaagctgggctgggtcctgagcatgaactgcagtcgctggaagtcccccggacctccctctggcacagccacaactggtgccacgagcccagaaaccaggccctgtcagaggaagcgctgcagaagaagctgacttctccagctggagcgcagctgccttcttctgtgccttccagggcagcagcagagcgagaactgaggtctgtctaggcttgtccccatctccctgaagccaggacgatcttcctgttggccatggagcgtggaagccattctgcatgtgctggtgggaaagccg

SEQ ID NO: 5345 - DNA, 1249 bp, Cricetulus griseus
tgctgaagaacaggacttctgaggagtggataaatgaattggatgatcttttagggtcacagtaatggagagatatgtggtgtcttcgatgtttagacatcttatatttttgttctcagattcaagaaagagcaactactttggaccaaaagcccatggcccagagaactgggccagtagaacttaagcaacagctaaggccagcagcggtcagtatctgctggtccgttgggctggcccagcccattggcatcactacctggggttgggatagcagcacttgtccttgtcacaagcaagatggtgtgcacagagcgagaccttgaagaggatggtggagggaaagggctttgctggagtgacttgcctgcagagtggtctgtagaggaaccacagctccacccactgtcctgggtcccagaacacttgatccagtgtaaagaactgagccaaggaaatgacagagcagcctgtgcacttggagggtcagagggtgtacacactgctaaactagtttgcaccagcagtgcctttttcactgagggcacctgtgctctcgggtccttgtctcatagccatttctcctgccaccccagaaactcagttcagctctcagagaagcaggtgaatcataaagccagtgaagacgccaccctctgatagttccccaactgtaggggggagagggtgacttctgcaggttcgctaccaaaaatatggccgagaagctggagccagatcgtggttcctcctccagcctcctgcgacagcctgcccacctcctgcccccattgcccagcccagagctgcccgcggctttatttatgaatctggctttggggagttgggaagaggtgaccccacttcctcgcacatcccatcttctcagagccatgactcaagaagaaaagggtgctcggacttttcttatacacatgtgctttgtgtaaataaatgtttacaattttatattgaagatgaaataagtgttagagcgtccaactgtatattttttacttttatagtattttaaaactgatcctttatatgtgtttggagctatgataagttttatggcaagcagttggtattgttaacttttttacggtcatcaaaaatgcataaaagtcctattaatccccttattctgcttcccttagctctggtatacaccaaaaagaagtctctactttccttgtgttataaaaataataaaaattattttactagtatggaaaaaaaaaaaaaa

SEQ ID NO: 5346 - DNA, 1248 bp, Cricetulus griseus
gcggcggcggtggcggcgaggagggcgaggccgcaggatccagcagccaagcgccaggaccagacaccccagcaatgaccagctctcctgtctccagggtcgtctacaacggcaagagaaacagcagcccacgctctcccaccaacagcagtgagattttcacgccggcacacgaggagaacgtgcgtttcatttatgaagcttggcagggtgttgagcgggacctgcgcagccagctgtctggtggtgagcggggcctagtggaggagtatgtggagaaggttcccaaccccagcctcaagaccttcaagcccatcgacctgagtgacctgaagcgccggaacacgcaggatgccaagaagtcctagagtgcctggcgcccctcccctggcctccagaagatcagggtgcacttgatgttggtctcctctgttccggtggctctgcttctggaggggggaggagagtgtgctctagcaggccacaatccccagagccagcaggattgatggccaaggcccttcctttcctctccagggtctcaagttgcccctgtcactgggggaacaggggtctggccatgtcagctcctgtcctttcccctggccagctgcatcttgggtagcacctggccctgccgacccaaccctctctgctgttacctgccatgcctctcctctcgccttcctggctacttaaggtcagaaaggaaaaaagggacctctgttctgttggaaccttgaatgaccagaaattaggacatgtgcagtcccacctgcatccagtctgggtctctccatggatacttgctgttcttctggcctggacatttggggagcccccccccccatccccactgtccacttgcccctttcttgcctcagtttcagagtggaatcagctctgagcctaggacagttctggctccctgaaggggcctctagcaaccaggcctggtctcctggtacctgtagccctgtggtcacagcagtgcccttgagcaggggcactaaggctgaccttgaaggagtggtgctgccaggcctgtcctggctttcgtggggtgtacgtgggaggatcaccaaggccccctttccttgtgccctcttgaatccaagtgtctgtgttggagactgagggtctgtgaataaaggcgggtggcactggaaaaaaaaaaaaaaaaaaaaaaaaaaaaaaaaaaaaaaaaaaaaaaaaaaaaaaaaaaaaaaaaaaaaaaaaaaaaaaaaa

SEQ ID NO: 5347 - DNA, 1248 bp, Cricetulus griseus
gacaagaaccatgcgcctggtgccacggaagcttttaaagccatcggcacggcatatgctgtactcagcaatccagagaaaaggaaacagtacgaccagtttggtgacgacaagagccaggctgcccgacatggccacagccacggggacttccaccgaggctttgaagctgacatctcccccgaagacctctttaacatgttctttggtggtggttttccttccagtaacgtccatgtctacagcaatggccgaatgcgatacacctaccagcagaggcaggaccgcagggagaaccagggtgatggcgggctaggagtatttgtccaactgatgcccatcctcattcttatcctcgtgtcagcgctcagccagctcatggtgtccagcccaccctacagtctgagcccgagaccgtcagtgggccatgtccacaagcgagtcactgaccacctgagcgtcgtgtactatgtggcagacaccttctctgacgaatacacaggctccagcctcaaaacagttgaacggaatgtggaagatgactatatcgccaacctccgaaacaactgctggaaagaaaagcagcagaaggaaggcttgctgtaccgggcccgctactttggtgacacagacatgtaccacagagcacagaagatgggcaccccgagctgcagtcggctgtcagaggtgcaggcctccctgcatggatagttctgggccagccacaccacccaggtccaaactatgaaatccctggagaattttggtgacacacactgagccaaggtgatggactgtatatttaagaaaagacatacacagaaaaaatgaaaatggacctgaaggctgaatactacacagctgccctctctcaaccagtgaatgcagaaagctctgaggacggacagaaagcctgctgcagggttgcttcctcccctcccggggctggcaagaagctccacatcacgggctcctaggatacagaaaccatggcaacgaaagtagaatgtaaaacttgcagcaaatgtctgtggggaaggactgggggaggggacaccccactgtctgtcctcctcctcccaggagccagcaccagtcacctctccttacaggagaagccaggcagaggcatgggccaaggaatagagaagagagaattccagagaatgtaacttagaaatgcatatgtatgtatatatatctatttatatgtaaatagacatatataaagatatatatatatatata

SEQ ID NO: 5348 - DNA, 1247 bp, Cricetulus griseus
cagaaactgttccggcggggcgtgcggggcggtgtggagtctctcccgccctccacagaacgtgcccaggcaaggccagaaagtctctagccatgtcatttgcggaggcggggatgttttccacagagcccggggcaggaccctggacgcgttttcctcagaaaaggaaaaggaatggaaaggcccattctactttatccaaggcgcagacccccaatttggggctgatgaaggcctggtccactggggattgtgacaatggcggtgatgagtgggagcaggagatccgtctcactgagaaagctgttgaggccatcaacaagctgagccccaaacccaaattctttgttctttgtggcgacctcatccatgccatgccaggaactccctggcagaaagaacagaccaaggacctgcagcaagtactaaaggcggttcacaaagacattccactggtgttcgtcagtggcaaccatgacttaggcaacgtccccacagctgagaccgtgaaggacttctgccagacgtggggagatgactacttcagcttctgggtgggaggcgtcctgttcctggtactcaattcccagttcttctacgatgcctccaagtgccctgcactgaagcaggcccaggacccgctggctggaccaacaactgagcatcgcagggcagcagaggtgccagcatgccattgtcttccagcacatcccgctgttcctgcagagcatagacgaagaagatgactacttcaacctcaccaaggctgtgcggaaggagctggcagacaagttcactagagcaggtatcaaagctgtgttctcgggccactaccacaggaatgctgggggaacctaccaggatcttgacatggtggtttcatctgctatcgggtgccagctaggcaaagacacccatgggctccgcgtggtggtcatcactgctgagaaaatcattcaccgttactacagcttagatgagctgaacaagagaggaattgacgacgacctgaaggagctgatgaaggagtgattcccccacataatccatccagttttcatgcccaggaccttttatcttgccataatgtttacagcccttcatagcaatatttgagtagacaggcgggtttgtgaatggatgtcgttttatataaatcaaagtgctgggtcctatcctgaatcctgaaccaactttaaaaactcaccggttataaatgaacagcaaagcccattaaatttaaaaaa

SEQ ID NO: 5349 - DNA, 1247 bp, Cricetulus griseus
ccgtgctcccaccaggcctgagccttaccacagctgctcccacctctcaggatgccagccagtgccagcccagccctgacttcagtcatgatcggcagctcaggctgttgctgagccagcctatccagcccatgatgcccgggtcctgtgatgccaggcagccctcagaagtcagcaggactggacggcaagtcaagtacgcacagagccaggccactgtttccaagtccagactcgcaccctggccagcagcagtgcctccacccctcgtcctgctgatggggcaggcggtgctccaccccacgcttccccacgtcccagccatcaccactgcagccagcgcaggcgcagcagcagacaccacactacttgcaggcaccaacatctctgcacagtgagcagccggactcgctccttctctccaccttctctcagcagcccgggaccctgggctatgcaacaacccagcccacacagccacagccccaacgcccttcccgcagggtcagccggctgtcagagtcctcaggtctccagcagccaccccgatagtgccctgacactggagtccagaggcaaccagctttaaccaatggaagaggtgggggtggccgtgggaaacggaaagaaaggtttacatggctttggcacaccctgtatacatttcagaactccctatggtaacgtgtctggagtgcggccctggcagaatggggagagagcaggaatactggccatgattcccttgccctgaggttctcgggcatccgctacagccataccggacaggaaccaagtgcccccgtatgggcatcgtttcctggtctatctgcagaggcggtatctctcgctgcctccgggagagagcacaccgggtactctaccgactgacaaaggtcccaagccctagctggccttcactctcttgatggtctttcctttacagtcaaggactaagttagaggtctttggggagagatagagagagcaggctgcagtcctccgggaaaccagtcatgtgctggccatcctggtaaggcctctgctgcgtctttccataaatcttccctgacgattctgaagattcgattttcctttcaaaatgcactttgctttttttttgtattgttttgtatgcatggttagaagtattgtttctaaagagaagattttatgtaattataagaggaagtgtagtgaattgtacagctgttgtaataatgacctatttctaataaaaaaataaa

SEQ ID NO: 5350 - DNA, 1247 bp, Cricetulus griseus
ccggaaagtggcagctgaggagggggcgcgctagctgtctcggcggcccggcaagagacccgggcgtgaggcggcctctcagggccggaagggctggtcagcagacgcagcggcacgggaggctgagagtgcgggaccaggcgacaccatggccccgcagaacctaagcaccttctgcctgttgctgctgtacctcatcggggctgtgatggccgggcgagatttctataagatcttgggtgtgcctcggagtgcctccgtaaaggacatcaaaaaggcctacaggaaactagccctacagcttcatcctgaccggaaccctgacgatccccaagcccaggagaaattccaggatctgggtgctgcttatgaggttctgtcagacagtgagaaacggaagcagtatgatacttacggggaagaaggcttgaaagatggtcatcagagctcccatggggacattttttcacacttctttggagattttggcttcatgtttggaggagcccctcgtcagcaggacagaaatattccaagaggaagtgatatcatcgtagatctagaagtcactttagaagaagtatatgcaggaaattttgtggaagtagttagaaacaagcctgtggccaggcaggctcctggcaaacggaaatgcaactgtcggcaggagatgagaaccacacagctgggcccagggcgcttccagatgacccaggaggtggtttgtgacgagtgccctaatgtcaagctagtgaatgaagaacgaacactagaagtagaaatagaacctggtgtgagagatggcatggagtatccctttattggagaaggtgaacctcatgtggatggagaacctggagacttacgattccgaatcaaagttgtcaagcaccgtatatttgagaggagaggggatgatttgtacacaaatgtgacagtctcactagttgaggctctggttggctttgagatggacataactcacttggatggtcacaaggtacatatttcccgggacaaggttaccaggccaggagccaagctgtggaagaaaggggaagggcttcccaactttgacaacaataacatcaagggctctttgataatcacttttgatgtggattttccaaaagaacagctgacagaggaagcaaaagaaggtgtcaagcagctactcaaacaaggatcagtgcagaaggtatacaatggactgcagggctactaggagtgagagaaattggactttg

SEQ ID NO: 5351 - DNA, 1247 bp, Cricetulus griseus
ctcctcccccgtcccccgctccggccaagatgtctgacatggaggatgatttcatgtgcgatgatgaggaggactacgacctggagtactccgaagatagtaactctgagcccaacgtggatttggaaaatcagtactataattccaaagcattgaaagaagatgacccaaaagcagcactaagcagtttccaaaaggttttggaactcgaaggtgagaagggagaatgggggttcaaagcactgaaacagatgatcaagattaacttcaaattgatttactgcaggaattttatgaaacaacactggaagctttgaaagatgctaagaatgatagactgtggtttaagacaaacacaaagcttggaaaattatatttagagcgagaagaatatggaaagcttcaaaaaattttgcgccagttacatcagtcttgtcagactgatgatggagaagatgacctgaaaaaaggtacccagttattagaaatctatgctttggagattcaaatgtacacagcacagaagaacaacaaaaaagcttaaaagcaactctatgagcaaatcacttcacatcaagtctgcccatcccctcacccactgatcatgggtgtcatcagagaatgtggtggtaaaaacttgagagaaggcgaaatttgaaaaaggcacatactgattttttgtaagactttctaagaagataacactattcatggccgaattgatcaagtcaaccaactccttgaactggatcatcagaagaggggtggtgcccgatacactgcactagataaatggaccaaccaactaaattctctgaaccaagctgtggtcagtaaactggcttaatggagaacaagctttgcaggcgtgcttaaggcatcagtgcagagatgtgatccttaaggactggaaaggcaaaactcctgtgggttggtgtgtcatgagagtgattggagttatggcagaagtgctttttttgatcaactggtttgtgttttgctgctgcatttatcccaagaaaaacagctttaatctccagaagaaaaccaaaacaccatgggatttatgctgtgttgacatcttgccctaaacatacaacaccgtaataatctatcatgggcaacatgaccagaatgaagaattttgtcatgattttaaacacactgacacactaccgttggttaaatttaaacatgttgttcctgcagaaattctctcacaaataacctgcaataacttgaaattc

SEQ ID NO: 5352 - DNA, 1246 bp, Cricetulus griseus
  modified_base (781)..(781): a, c, t, g, unknown or other
gtgatttactaccttcgccaagatgatgtacaggaagcttataatttaatcaaggatctggagcctacgacccctcaggagtatatactcaagggagttgttaacgcagcccttggccaggaaatgggttcgagggatcatatgaaaattgcccagcagtttttccagttggtaggaggatcagctagtgaatgtgatacgataccagggaggcagtgcatggcttcctgtttcttcctgcttaagcaatttgatgatgtcttgatttacctcaacttctttttaagagtttacttctacaatgatgacatctttaactttaattatgcccaagccaaagcttctggcgagtccttcagcctcttacagcctcattgctaatgactgttacaagatgggccagttctactattcagccaaggcttttgatgtcctagagaggctggatcccaaccccgaatactgggaaggcaaaagaggtgcctgtgtgggcattttccagatgattctagctgggagagacttttttcttgttattgttttgtgtgttttcccaagacaaggtttctctgtagaacagtgcagcctgtccagggaactcactctgtagaccaggctggactcaaactcagagatccacctgcctctgcctccggagtgctgggattaaagacatgcaccaccaatgcccggcagccttggctgtcatggaatctcactctatagaccaggctggccatgaactcagagatccacatgcctctgcctcccaacttttttntttttactacaaagtattttcctgaaagacactcatttacactgatgtactttcctatgaggttttttgagtttactacccagaaccctgacattttcatgtcttgagggaaggatgtctattcccccacagcagagttttagatttactttttaaagttttaatctacaggattgagacggaaacatgaaggctagttaaagttaagcgcatgcagttctgtaaggagggataattgcttctgattgacttgacagggcttcaggcttcgtagctgtgttctcttacagatgacaacccaggggagaaaggcccaggcgtgggaatgtgtaatgtgtacagtctatagcatcaatgtactatttaaatctgtagtgtatacttaagaaataagtaaaaaaaaacttttaaaattaaaaatttaaatttatttgtatttgtcaaaaaaaaaaaaaaaaaaaaaaa

SEQ ID NO: 5353 - DNA, 1246 bp, Cricetulus griseus
ctgaattgaaacacagatcctcaaagaaagatttgttagagatagacaggttcacaatctgtgggaaccggattgactgagtttgtggctgatgaggtgaagatgccaggctcccagaccacaaatgctggtctgccaggacacacttgctaaaaatggcacttaaatatttatttaaaaacttaaattattaatggcaagcaaatcttagtatctttcttccagtaatgtggcctggcagaaaggcagatctcgggacagcgccggcctctggccttaactctgggatgctgatgggtgatgaacattttcctcctgcttggccaacagcagtggcacttccagcacccagccagagcactgcaagagctcctttgctttgcctgggcttccagaacgttggattttcctcaaggcctcttcagtataaggacatacctgggaaactgtgaagcttttccataattgattacctttccagtctcatacagttttcacaaactctttccaaacttgactccatctgccaaagcattaacaaaattattaaatataagtccagataaatgttcttaccaccagaatcatccttggcaatacatctgaactatttctgatttctgaactgtccagaagatggtactcttaacagcatttcctttgctgtctcccttgtgaaactcaactctcatgcaaaggttttgggcacagatggcaagttttagatggtttgcctggataaatatgaaactagtcttgatgctttggcttaggcatttgaaatacaggagggtttctaatgatttgcactaacagaatctaaagatagctattggagatgttatacatgccttgtaaaaaccaggacacagtttttaagtttaaaattaacattttatttcttttgcgtatgtttgtttcagtggggccccacttttaaactataatttttaccaacaagaaagtgtccattgcaactaggaacagtgtggagaaagccttgccaaacacagccctaatcagaacaagaacatggcctagatgtctctttcagttctgcttgaatttcctgtttctgtgttgttttctgaagaatgcatttcttctacagatgctgttgggagtgtgaatgatactcacttctgtcataatggcattcaatactaattttataagtgcatcttgtgtgaaactcaataaattcaattttagtaaataaaactttttaaaaaaaaaaaaaaaaaaa

SEQ ID NO: 5354 - DNA, 1246 bp, Cricetulus griseus
catcccaagaataacatgggccagccatggacgaggtcaccttcaaaagtgacactgtgctatctgatgtccacctcgtacacccccaaccagagacacctcatggtgcggctgaatggcatggggcaaccagtcttcctgtcccagttcaagctcctgtggagtcgggactcttggacacactcaggggctgaggacagtggtcccagagatgtcgccacacaggagacctctcctgctgggtcagaaagtggccacagtcatgaggatttgtccctccaggctggggatgacatcaccatccaggaacggttgaatgttcccctggatgaggatggggacctggatgtggtacgaagaccacgagctgcttctgatcccaacccagcagagcctgcaagaaacaaggtacatcccatgattctagcacaggaagaagatgacctcctgggagatgaggagcaagagaactgcccccacagcatcatcaaaatagagcataccatggccacacctctggaggatggtaggcaaaacaggtgtggccgggcgccctcttcctggcagactatatcctgtttcgaagggacctcttccaaggatgcactgtgctggagcttggtgcaggcacaggacttgccagcattgtggcagccacgcacagacctcctgaccatgtgtcctaacgaaatgttgccctcaacagccacctggctgccactggagatggcgtgattaaggtcaaggagctggactggctgaaagacgacctctgcacagatcccaaagtccccttcagctggtcagaggaagatgtcagggacatgtatgatcacaccacagtgctgtttgcagctgaagtgttctacgatgatgacttaaccgacgccctgtttaacacgctctcccgactcgtccacagactgaaaaatgcctgcacggctatactgtcggtggaaaaaaggttcaacttcacactgcgacacttggatgtcacctgtgaagcctacgatcacttccgtgcctccttggactcgctggagaagctggctgatggcaggctgcgcttcatggtggaacctgtggaggcctccttcccgcagctgctcatctatgagcgcatccggcagctggagctctggaagatcagagtggaaccaacagcatgagtcacctctgatgtgacctcttgactaataaagacctacccaccaaaaaaaaaaaaaaaaaaaaaaaaaaaaaaaaa

SEQ ID NO: 5355 - DNA, 1245 bp, Cricetulus griseus
ttctaaaatggcgaaccgtacggtcaaggatgcccacagcatccatggcaccaaccctcagtatctggtggagaagatcattcggactcgaatctatgaatcaaagtactggaaagaggaatgctttggacttacggctgaacttgtagtcgacaaagccatggaattaaggtttgtgggtggtgtctatggtggaaacataaagccaactcctttcctgtgtttaaccttgaagatgcttcaaattcaacctgagaaagatatcattgttgagttcataaaaaatgaagatttcaagtatgtccgcatgttgggggcactttacatgaggctgacaggaactgcaattgattgctacaagtacttggaacctttgtacaatgactatcgaaaaatcaagagccagaaccgaaatggggagtttgaattgatgcatgtagatgagttcattgatgaacttctgcacagtgagagagtctgtgatatcattttgccccggctacagaaacgctatgtgctggaggaagcggaacagctggagcctcgagttagtgctttggaagaagatatggatgatgtggagtctagtgaagaagaggaagaggaagatgaaaagctggaaagagtgccatcacctgatcaccgaagaagaagctaccgagacttggacaagccacgacgctcccctgcactacgctacaggaggagtcggagtcggtctcccaggaggcgaagtagatcccccaaaagaagaagcccttctccccgccgagaaaggcataggagcaagagtccacgacgccatcgaagcaggtcccgagacagaagacacagatcccgctctaaatccccaggtcaccaccgtagtcacagacataggagtcactcaaagtctcctgaaaggtctaagaaaagccacaagaagagccggagaggaaatgagtaatggattgatttatattttagtccagatggcctcctgtaaatatgagaatatctgtctaagtgaaatgatcaagatctctttaggcagctatgagtatttgggggttttaaaaaatcaagttattgtttggttggtttttttttttgtttttatattaacatgacagagctgcaaaatttgttatctctttgaattataatcaacatctttgaagggtgtttttgaccaagtcaaggtcaggtttttgacctaaccaactatggttatgtatacttaacaagggccaagaggacctggga

SEQ ID NO: 5356 - DNA, 1245 bp, Cricetulus griseus
aaaaggagctgctggaagtgatcggggaaaggtaccgtccaagaagctggaacactgttatctagtaagaatgttcatgtcaactgtttggatgagaatggcatgactcctttaatgcatgcagcatataaaggaaaacttgacatgtgcaagttacttctgcgccatggagctgatgtcaattgccatcaacatgagcatggatacacagccctcatgtttgctgcactttctggcaataaagacatcacgtgggtgatgttggaggcaggcgcagagacggatgttgtgaactcagtcggaagaaccgccgcccagatggcagcctttgtaggtcagcatgattgtgtggctataatcaacaatttcttccctcgagagagactggattattacagccttcaaagttggcaggaccactgcacaaaatcattaccacaacgaatctccaccctgtcaagattgtgatgcttgtgaatgagaaccctctgctggcagaagcagccgctctcagtaaatgctacaaggtgatggatttgatctgtgagaagtgcatgaagcagagagacatgaatgaagtgctggctatgaaaatgcactacatcagctgcatctttcagaaatgcattaacttcctcaaagaaggagagaataaactggataccctgatcaaaagcttgttaaaaggcagggcatctgatggcttcccagtgtaccaggaaaagatcatcagagaaagcatcaggaaatttccatactgtgaagccaccctcctccagcagctggtgcgaagcattgctccagttgaaatcggatcggatccaactgcgttctctgtacttacccaagccatcacaggacaagtggggtttgtggatgttgagttttgcaccacctgtggagaaaagggagcaagtaaaagatgttcggtttgcaaaatggtaatatattgtgaccagacctgccagaagacacactggttcgcacataagaagatgtgtaagagtctgaaagacatttatgagaagcaacagtctgaagctgccaaacataagagccaggaggaaaagaatggaaagctcgatgtcaactctaaccatgttaatgaagatcaaccagaggctacagtggacatctcccaagaaaattccactcctgctgattctgtggaaggagagagagaacctggaggtgaagctgggctggccagcacacaggatgctcctgcagagccacggctgtccg

SEQ ID NO: 5357 - DNA, 1245 bp, Cricetulus griseus
ggggcgccgcctctcccatgccgccctcggggctgcggctcctgccgcttctgctcccgctgccgtggctcctggtgctgacgccggggaggccagccgtggggctctccacctgcaagaccatcgacatggagctggtgaaacgcaaacgcatcgaagccatccgtggccagatcctgtccaaactccggctcgccagccccccgagccagggggaggtgccgcccggcccgctgcccgaggccgtgctcgccctgtacaacagcacccgcgaccgggtagcgggcgagagcgccgatccggagccggagcccgaggcggactactacgccaaagaggtcacccgcgtgctgatggtggaccgcagcaacccaatctatgataaaaccaaagacatcccacacagtgtctatatgttcttcaatacgtcagacattagggaagcagtgcctgaacccccattgctgtcccgggcagagctgcgtctgcagagattcaagtcaagtgtagaacaacacgtggaactctaccagaaattcagcaacaattcctggcgttaccttggtaaccgactgctgtcccccaccgatacgccggagtggttgtcttttgatgtcactgcggttgtacggcagtggctgaaccaaggagacgggatacagggctttcgcttcagtgctcactgctcttgtgacagcaaagacaacgtactccacgtggaaatcaacgggatcagtcccaaacgtcgaggtgacctgggcaccattcatgacatgaacagacccttcctgctcctcatggccaccccgctggagagggcccagcacctgcacagctcaaggcatcgcagagccctggacaccaactactgcttcagctccacggagaagaactgctgtgtgcgacagctgtacattgactttcggaaggacctgggctggaagtggatccacgaacccaagggctaccatgccaacttctgtctggggccctgtccctacatttggagcctggacacacagtacagtaaggtcctcgccctctacaaccaacacaacccgggtgcttcggcgtcaccatgctgtgtgccacaggcgctggagccgctgcccatcgtgtactacgtgggtcgcaagcccaaggtggagcagttgtccaacatgatcgtccgctcctgcaaatgcagctgaggccccgccccgccccgcccctcccggcaggcccggccccgcccccagccccgcc

SEQ ID NO: 5358 - DNA, 1245 bp, Cricetulus griseus
gaagccctacaagtgccaggtgtgtttgggttaaggtcgttccgagtgagctcccacctggtgcagcaccacagcgtccacagtggagagaggccctatgggtgtaatgagtgtgggaagagcttcggtcgacactcccacctgatcgagcacctgaaacgccacttccgagagaaatcccaaagttgcagtgacaaacgaagtaagaacactaaactgaacattaagaaattccagaatttcagaagcagacatggaactatcagaagaaatccaaactaatgcttctcaggtacaaggttatagtgaagactatgaacaccacctcttcgaagagcatgaattgcaatgacttcagctatgtccacaaaaaatcttcctcagagaggccacataaatgtaatgagtgtgggaaaagcttcattcagagtgcacacctcatacagcatcgacgaatccacactggggagaaaccattcaggtgtgaggaatgtgggaaaagctacaatcaacgtgtccacctcactcagcatcatcgagttcacacgggtgaaaaaccctacacctgtcatttatgtgggaaagccttccgagtgaggtcgcatcttgttcagcaccagagtgtgcacagcagggagaggcccttcaagtgtaatgaatgtgggaagggttttgggaggcgttcacatctcgctggccacctccgactccactctagagagaagtcccaccagtgccatgagtgtggagaaatcttcttccagtatgtcagcctccttgaacaccaagtgctccatgtgggccagaaaagcgagaagaacagtgtctgtgatgaagcctatagctggaacttgacagtaatagaagataagaagctggagttacaggagcagccttaccagtgtgatacctgcgggaaagcctttagttacagttccgacctcattcagcattacagaactcacactgcagagaaaccccagaaatgtgatgcatgcagagacagtgctggccagtgtccccacacaaaacaacatcagaaaatctgcaccagtgggaaatcccatcagtgcaatgaatgtggaagaggcttcagtctcaagtctcatctcagtcaacaccagagaatacacactggtgagaagcccttccagtgcaaagaatgcggaatgagcttcagttggagctgtagcctctttaaacatctgcgaagccatgagaggacagattcctaaacacctgaag

SEQ ID NO: 5359 - DNA, 1245 bp, Cricetulus griseus
gcttctcagactgcagaagatgccatgcagatcatggaacagatgaccaaggagaagacagaaacgctggcctccttggaggacaccaagcaaacaaacgcaaaactacagactgaactggacacacttaaagaaaacaacttgaaaaatgtacaagagctgaacaaatcaaaagaacttctgaatgtagagaatcagaaaatggaagaattcaagaaagaaatagaaaccctaaagcaggcagcagctcagaagtcccagcagctttcagcactgcaagaagagaacgtcaaacttgccgaggagctagggaaaacacgggacgaagtcacaagtcatcaaaagctggaagaagaaagatctgtactcaataatcagttgttagaaatgaaaaagagagaattcgaatacataaaagactctgatgaagagaaagcttctttgcagaaatccatcagtctcaccagtgccttactcacagagaaggacgccgagctggagaagctgaggaatgaggtcacggtgctccggggagagaacgcctctgccaagtccctgcattcagttgtgcagacactggagtctgataaggtgaagcttgagctcaaggtcaagaacttggagcttcaacttaaggaaaacaagaggcagctcaacagctcctcaggtaatactgatgcccaggcagaagaggatgagagagcccaggagagtcagattgatttcctcaattcagtaatagtggaccttcaaagaaagaatcaagacctcaagatgaaggtggagatgatgtctgaagctgcgctgaatggcaacggggatgacctgaatagttatgacagtgatgaccaggagaaacaatccaagaagaaaccccgcctcttctgtgacatttgtgactgctttgatcttcatgatacagaggactgccccacgcaggcacagatatcagaagatcctccacattctacacatcacggcagccggagcgaggagaggccatactgtgagatctgtgagatgtttgggcactgggcaaccaactgcaatgacgatgagaccttctgagggagcttcaagggcgggactgggcttcctcaaactccgacatctaagcagctttccaccagcatcgtgagtgcaactaaagaagaacttattttttgaccccgtcagcaaatctaagaaaatattttgatcttcagcacattatcccttcatttcccctcataagctaaaataata

SEQ ID NO: 5360 - DNA, 1245 bp, Cricetulus griseus
gcagtttacatggctgaaacagagggcagcagctgcacgtccttgctggagtatcagatgctggtctctgcctggaggatgcttctcatcattgccaccagtcatgcagacatcatgcacttgactgatgtggctgtgcggcgccagctttttcttgatgtgcttgatgggaccaaagcattactccttgtttcaacatcagtgaactgcctccgactcggctccatgatgtgtactctgctgctcatcctccttcggcagtggaagcgagagttgggtgccgtggataaaatccttgggcccttgacagaggtcctggaaggtgtgctacaggcagaccagcagctcatggagaagaccaaggccaaggtgttctctgcctttattacggtattacagatgaaggagatgggagtaacctgcattttactgaggctgcactgcacctgctcctcaccctggctcgcacccagcagggagccacagcagtggctggagctggcatcacccagagcatctgtttgcccctcctgagtgtgtaccagcttagcagcaatggcacaggacaggcacccagcacttctcgaaagtccctggatgctccgtcctggccaggggtctaccgcctgtccatgtccttgatggagcggttgctcaagactctacgctacaatttcctgactgaggctctagactttgtgggtgtccatcaggaacggaccttacagtgtcttaatgcagtgaggacggtacagagtctggcgtgcctggaggaagcagatcacactgtgggcttcatcctacaactgtcccacttcaggaaggagtggcacttccacctgcctcagcttatgcgtgatgttcaggtgaaccccaccaccaccaccaccaccaccaccacacacagctcaggctggagaactgcttctacctgctcatctcccaggcagtccgctacctcagggatccggctgtgcaccccgggaccaagcagcggatgaagcaggaactgagttcagagctgagcacgctgctttccagcctctcacgttacttcagaagaggaacccctagctcccctgctgctggagtcctgccctcaccgcaaggcaaggccacctctctctccaaagccagcccagaatctcaggagcccctgatccaacttgtgcacgcctttgttcggtgcagagatagggagtggagtgctgtctacctgctgctccctaccaacctgcactgcag

SEQ ID NO: 5361 - DNA, 1245 bp, Cricetulus griseus
gagggacgggccgtccttacacaacataagatccgcacatcagaagggaaggagaagaccttgaccctcatcaatgtgtactgtccacatgcggatcctgggaaacctgagcggttgtcctttaagatgcgtttctatcgcctgctgcagatccgagcagaagccctcctggcagctggcagtcatgtgataatcctggggaatctgaatacggcccatcgacccattgaccactgtgatgcaggcagtatggagtgctttgaagaggacccagggcgtaagtggatggatggcttgctcagtaacccagggatggaggctgggtcccaaacagggctcttcatggatagctatcgctgcttccatccaaaacaggagaaggccttcacctgctggtcagtagtcagtggtgcacgccatctcaactatggctctcgacttgactatgtacttggagataggaccttagtcatagataccttccagacctccttcctgctccctgaagtgatgggctctgatcactgccctgtgggagcggtcttgaatgtatcctgtatgccagcaaaaacagtgcccagctctgtgtacccgcttcctcccggagtttgcgggaacccagctcaagattcttcgcttcctagttcctcttgaacaagaacctgtgcgagttcagccagtcctgcagcccagccatcaaactcaggtacagaaacatcctaggaaagctcgaatgcattcaaccaggcctcggaaaagtcaaggtggcttcaaaaaaacccagaaaaacctgatgagttacttcgcgccttcctcaaaccttctgcaaccttctcctgatgtggaactgcctagcctgcctctggtgggcactcttacaatcccaaagactccagaagaggtgacagtggacacagtggtggaagagaaggccaaggtttcagaggccaaagatgagaaagaagtacggacctccttctggaagtctatgctgagtggaccctcacccatgcccctctgtggcggccatagggagccatgtgtgatgcgtactgtgaaaaaagcagggcccaacttgggccgccatttctacatgtgtgctaggccacggggccctcccagtgacccctcctcccgctgtaactttttcctctggagcaggcccagctgaaacaactgaggcctaaggatgtctggcatggttaccccatgcactgggtctgatgccaggtccctgcctctgaa

SEQ ID NO: 5362 - DNA, 1245 bp, Cricetulus griseus
gggaagatggcgcttgatgggccggagcagatggaactggaagaggggaaggcaggcagtggactccgccaatattatctgtctaagattgaagaactccagctgattgtaaatgataagagccagaatctccgaaggctgcaggcacagaggaacgagctaaatgcaaaagttcgcctactgcgggaagagctgcagctgctacaggaacagggctcctatgttggagaagtagttcgggccatggataagaaaaaggtgttggtcaaggtccatcctgagggcaaatttgttgttgatgtggacaagaacatcgacatcaatgatgtgacgcccaattgccgagttgctctaaggaatgacagctacactctgcataagatcctacctaataaggtggaccctctggtgtcactaatgatggtggaaaaggtgccagactcaacttatgagatgattggtgggctggacaagcagattaaagagattaaagaagtaatcgagctgccggtgaagcaccctgaactctttgaagcactgggcattgcacagccaaagggagtgcttctgtatggacctccaggcactgggaagacattgttggcccgcgctgtagctcatcatacggactgtacctttattcgtgtctctggctctgaactggtacagaaatttatcggggaaggggctaggatggtgagggagctgttcgtcatggcacgagaacatgctccatccatcatcttcatggacgagatcgactccatcggctcctcgaggttggaggggggctctggaggggacagcgaggtgcagcgcaccatgctggagctgctcaaccagctggatggctttgaggccaccaagaacatcaaggttatcatggctactaacaggatcgacatcctggactccgccctgcttcgtcctgggaggattgacagaaaaattgaattcccgcctcccaatgaggaggcccggctggacattttgaaaatccactctcggaaaatgaacttgaccaggggaatcaacctgagaaagattgctgaattgatgccaggagcttcaggggctgaagtgaagggtgtgtgtacagaggccggcatgtatgccttgcgagaacggcgtgtccacgttactcaggaggactttgagatggcagtggccaaggtcatgcaaaaggacagtgagaaaaatatgtccatcaagaaactatggaagtgagggtatgtcctttgtgtg

SEQ ID NO: 5363 - DNA, 1245 bp, Cricetulus griseus
ggctggtcatttcctgtctaggcagctccctctaaaggcctttccagcagcagcttcatttttggcagcaaagacaactctcagctacggctctttgtcaccaaggggaacaaaaaccaaccactgtctgagcagcttgagccatgcgttgcagacacagtgctgcattgcctctcccgtcaactgcatgggccagcagaacaggccttacagcttcttcaccaaactgactgcagaagaactctggaagggtgccttagcagagactggtgctggagcaaggaaaggcagaggcaaaagaacaaagaggaggaagaaaaaggatttgaacaagggacagatcattggtgaagggcgttctggtttcctgtggcctggtctgaatgtccctcttacaaaaagtggagtagtccagaccattggccaaagaagcaaacaagagcaggagaaggtggaggctgacatgatccagcagagagaagactgggaacggaaaaggaagattaaagttaaacgggagcgtggctggagcggaagcacatggggaggtgtcagtattggccccccaagccagggacccaatggagaaacatatgaagactttgataccagggttctcgaggtaagaaatgttttcaatatgacagcaaaagagggaagaaagaagtcggtccgtgtcctggttgttgtggggaatggaaatggagctgcaggttttgctgttgggaaagccgctgaccgggcagatgctttaaggaaggcaaagaacagagcaattcattatttgcattatatagaactatatgaaggccatacaatataccatgatatttcattaagatttaagaggacgcagatcaggatgaagaaacaacccagaggttatggcctccgatgccacagggccattatcaccatctgccgcctcattggcattaaggatatgtatgccaaggtcactgggtctatgaacatgctcaacctcacccggggcctcttccgtggacttgctcaccaggaaacccaccaacatctagccgataagaagggtctccatgtggtggagttccgggaagaatgtggccctctgcctattgtggtcgcctccccacggggggccttaagtaaggaaccagagcctgagcctgaggtccctgacattaaactggactggcaagaagtaaaggccatgcagggaatgaagcgctcggtgtggtctgatttaaagagatctgccacctgaag

SEQ ID NO: 5364 - DNA, 1244 bp, Cricetulus griseus
acatggcgtcgcgcaaggaaggcaccggccccagcgccgcctcggcgggctccgcgggctccgcggtggggaagggcaaaggcaaaggcggctcgggggactcggccgtgaagcaggtgcagatcgacggcctggtggtattaaagatcatcaaacactatcaagaggaaggacaaggaacggaggttgttcaaggagtgctcctgggtctggttgtagaagaccgactggagattaccaactgcttcccgttccctcagcacacggaagacgacgctgactttgatgaagtccagtatcagatggagatgatgcgaagcctgcgccatgtcaacatcgaccacctgcacgtgggctggtatcagtccacgtactacggctcgttcgtgacccgggcgcttctggattctcaatttagttaccagcacgccattgaagagtccgtcgttctcatttacgatcccataaaaactgcccaaggttctctctcactgaaggcatacagactgactcctaaactgatggaagtttgtaaagagaaggatttttcccccgaagcattgaaaaaggcaagcatcacctttgagcacatgtttgaggaagtgccgatcgtaattaagaattcccatctcatcaatgtcctaatgtgggagcttgagaagaagtcagccgtggcggataaacatgagctgctcagccttgcaagcagcaatcacttggggaagaatctccagttgctgatggaccgggtggatgagatgagccaggacataatcaaatacaacacgtacatgagaaacaccagcaagcagcagcagcagaaacatcagtatcagcagcgtcgccagcaggagaatatgcagcgccagagtcgaggggagcccccgctccctgaagaagacctctccaaactcttcaagccccaccaggcccctgccaggatggattcgctgctcattgcaggccagattaacacttactgccagaacatcaaggagttcactgcccaaaacctaggcaagctcttcatggcccaggctcttcaggaatacaataactgagaaaagggagcttgcaggagaagctgagaagaccatggagacgccaccagagtgactcttggaaaaacatttctttgctgcaaagcggagagggatttctggtgtcactgctgcagtagtttttctagccagtaataaaacattaattcattgttcaaaaaaaaaaaaaaaaaaaaaaaaaaa

SEQ ID NO: 5365 - DNA, 1244 bp, Cricetulus griseus
ggctgtatgtgccgctgttggggaccttactggggctgggtcccctgtgccccaaccccatggctccttttgagtcttgtgtgtgcagctccatttggcctactgggagaagaaactcgccagatatccatgaaggttatttccagctggccaaatccccagaacctgcttcatatccgggcagtgggcaccaactccaccctgcactatgtatggagcaccctgggacctccagctgtggttctggtggccaccaacaccactcagagtgccctgagtgtcaactggagtctcctgatgtctcctgatccttatgggggtctgatggtgctccccaaagacagcatccagttttcttctgctcttgtcttcaccaggctgcttgagtttgacagcaccaaggtgtccaagggggcaacccagccctcaggaaaaccgtatcctccctactccttggctgaattctcctggaacaatatcaccaactcattggatcttgccactctgagcgccatttttcaaggccatcctgtagacgagcctactggagcatttgccaatggcagcctggccttcaaggtccaggccttctctggatctggccggtctgcccagccccctcgcctcctgcacactgcagattcctgtcaggtagaagtctccctggatggagcttctcctcgtggaaaccactccgtgtttgggctagaggtcgccaccgtgggtaccggccctgactgcccatcagtgaaagagctgcactctattgatgacgagtatgcacctgctgtattccaggttaatcagttgctgtggggctcttcaccatctggcttcatgcaatggcgaccagtggctttctctcagaagcagcggaaccgagaatcagctgtcccctgccaggcttcctctcttcaccctaccttggcttattctcttccttcctcaccagttgtccaagccttctttgggtcccagaacctctgtgccttcaatctgacatttggggctcccacaggccctggctactgggaccaacactacctctcctggtcaatgcttctgggaatgggcttccctccagtggatgccttgtctccactagtgctcggaatcatggcagtggccctgggaactccggggctcatgttgctgggaggaggcctgtttctgctgcttcgccacaagcagtattctgagtaccagtctataaactgaaacccactctccagaggaaagggcag

SEQ ID NO: 5366 - DNA, 1243 bp, Cricetulus griseus
aatgaagactgagatggaaatcgccatgaagttactagagaaggacacccatgagaagcaggacacgctggtcgccctccgccagcagctggaggaagtcaaagcaattaatttacagatgtttcacaaagttcagaatgctgagaacagtttacagcagaagaatgaagccatcgcatcttttgaaggaaaaaccaatcaaattatgtccagcatgaaacaaatggaagaaaggttgcaacaggcagaaagggccagacagggggccgaagaccggagccacaagctgcaacaggagttcagcggaagggtcagtgccctacagctacagctgtcccagctgcgtgaccaatgctcgggtctagagaaagaactgaaatcagaaaaagaacaaagacaagctctccagagagaattacagcatgagagagatacctcctgtctgcttcagacagagctgcagcaagtggaaggactaaagaaggagctacgggaactccaagatgagaaggcggagttacagaaggtctgtgaggagcaggagcaagccctccaggaaatgggactgcacctcagccagtccaaactcaagatggaagacataaaggaagtaaataaggcgctgaagggccacacatggttgaaagatgatgaagcaacatactgtaagcagtgtgagaaggagttctccatttcccgaagaaagcaccactgccgaaactgtggccacattttctgcaatacctgctccagcaatgagctggccctgccctcctaccctaagccagtgcgtgtttgtgacagctgtcacaccctgctcctgcagcgctgctcctccacagcctcctgaggccatcagccccaccagaagggacattagcctgttgacctccatcctcaagagtggtggaaagcctcggtacagtgccaaactctgggcctccagagacctgcaatgacccaagagaatcaaagaaaagaatgaaatcctcaccagactgtcagcctctgaagacagcgccaagtgacagctgagcatttttccatggtttgtatggagccagctctagtccgacatttctgtgtcctcggttatatcctggctttggtacaggtgtaacttcatgattttggtactgtcactttcacttttcaaaaaattaacctattttgcagcagttgcactaatatagaatcctacccacatcccacagaaaccttgatttctgctgtgtctttgaac

SEQ ID NO: 5367 - DNA, 1243 bp, Cricetulus griseus
tggtggactgccggtggtcatgttaccggctatgaatactgtggaggcggaagaggagtacgcggaggattgtcctgaactggtccccattgagaccaacaaacaagaggaggaaaatcttgacttcatcgttaagattccagtcacaattatcaccgggtatttaggtgctggaaagacaacacttctgaactatattttgactgaacagcataatagaaaaattgcagttattttaaatgaatttggagaagggagtgcagtagagaaatccttatctatcagtcaaggtggagaactctatgaagagtggctggaacttagaaacggttgcctctgctgttctgtgaaggacaatggccttagagctatagagaatctgatgcaaaagaaggggaaatttgattacatactcttagagaccactggactagcagatcctggtgcagtggcttctatgttttgggttgatgctgaattaggaagtgatatttatcttgatggtatcataactgttgtagattcaaaatatggattaaaacatttaactgaagaaaaacccgatggccttgtcaatgaagctacgaggcaagttgctttggcagacatgattcttatcaataaaacagacttggtttcagaagaggagctaaacaaattagctgcaactatcagatcaataaatggactgggaaaaattttagaaactcaaagatcaagagttcatctctcaaatatattagatctccatgcctatgatactctcactggaataagtttacagaaaaaacttcagcatgtaccaacagcaccccaccttgatcagagtattgttacagtcacatttgaagtaccaggaagtgcgaaggaagagagtctaaatgtatttatccagaatctcctgtgggaaaagaacatacaaaacaaggacggccactgcatggaggtcatacggctgaagggcctggtgtccatcaaagacaaaccacagcaaatgattctgcaaggcatccatgagctgtacgagctggaagagagcctagtaagctggaaggatgatgctgagagatcaagtcagctggtctttattggcaagaatttagataaggatattcttaaagaactcttcctctctgctgtggtagaaacagaagagttgaggacagcacctggcaaagaccaagtttgtccatcacactagataccatttcttaccaaaagaactgataagaaaaacaaggat

SEQ ID NO: 5368 - DNA, 1243 bp, Cricetulus griseus
tcggatgactttgagctgtcgggctctggagatctggatgacacagaggagaccaagaccttccctgaagtgattcagcccttgatgcctgtagataaccacattcctgagcgggcacaacctgggatccgtgtcccctcagaacctaaggaagtggagcagaatgaagtcattcccaaaagggtctcaccctccgaagtggataacgatatatccaacaaagtgtccatgtccagcactgcccaggacggcaacatttttgagagaaccgaggtcctggcagctttgattgtgggcggcgtggtgggcatcctcttcgctgtcttcctgatcctgctgctggtgtaccgcatgaagaagaaggatgagggcagttacgacttgggcaagaaacccatctacaaaaaagcccccaccaacgagttctacgcgtgaagttttccttgagtgccgcttggacttgatggggaggggagtcacaggattggatggtgggcctttgtagaggaagggcaccttaatactgacttgtcagtgtctccatctctggtcacctttctggggtcagaagaaagatcatcttcttgtctcggttgcccaggtagaaaaaaggggctgttaaacttgccctttctaaaggcaagcctgggtttgagtcatttttttttcccctccaaatttccagaatagaatctaggaccagtttagagcctaagtttgttgtggtcttggtttttttatgttgtgtttgttttttgaaaatgagagaagagttggagataatgatttttatgatttttttttattttttactatttatagcttcagacagggctgcttcttcatcttttgtttcccccaccatttaaaaagatactctgcaacctttttttttttttttttgaccttggccctttctgaagttgctttgtcttaagaagtagctataatgttctagcagattccagaatataacttaggggatagtgggatatttgtgtacatgttcttgtaatatattatccttacttggctatagaagaatagaagaatatatttttttaggatatagaatggttttttaccagtttcatgttggctcaggtggctgcgtgagtaaatttttgtgtggctgagtaggctttgcccccttctcttgccctgttcctggtgccttcttgtgcttgagctggagtagtagagggtagctgactcttaaccctcgtcctgccttctgctgggg

SEQ ID NO: 5369 - DNA, 1243 bp, Cricetulus griseus
gggccgggcagggaccatggcggtggcggctagaggttggcaggggcggggcagctggcggtagaggaggctgtggtcttcaggggtctgtaggtggaggcatggctcgggccagcagcaggaacagcagcgaagaggcctgggggggcacaccgggcgccgcagcagcagagtccggcagcgtcttctcttgagggagcaatttggaaacgagctggaacccagactcgcgccctggatgccatcctttatcatccacagcaatcccatctgcttcaagagctgtgcccgggagtgaatacgcaaccctacctctgtgagagtggtcactgctgtggggagactggctgctgcacctactactatgaactctggtggttctggctgctctggacagtcctcatcctttttagctgttgttgcgccttccgtcaccggagagctaaactcaggctgcagcagcagcagcggcagcgtgagatcaacttgttggcttaccatggggcatgccatggggctggccctgttcctactggttcactgcttgatcttcgactcctcagcgccttcaaacccccagcctatgaggatgtggtccaccaccctggcacaccaccgcctccttacactctgaccctgggccacccctcatctgcttccagtgaacacatctgctgctcatccgcatccagctgctctgcccacttggaggggacaaatgtggaaggtgtttcctcccaccagagtgccctccctcatcaggagggtgagcccagagcagggttgagcccagttcacacacccccttcctgccggtatcgtcgcctgactggtgactcaggtattgagctctgcccttgtcctgactccagagaaggtgagccagtcaaggagatgagggctagtgctactcaaccagatctgggagaccattccccttgtgtactgtccccagattctatgtcccagacccctcccttggggctggcttccagttatggggacatcccataagtagtttcaagagggaggctgggtgttacttggccaccaggaacaaccctggtttcaactgcagtcctcctccatgtgggcccctcccctccccactagaatatgcctggaagggctggagccctgaagaggggcagtactaaggactgtgctatctttactcacccccaaaacatacacaggagcctttaatctcattaaagagacatgaaccagaaaaaaaaaaaaa

SEQ ID NO: 5370 - DNA, 1243 bp, Cricetulus griseus
tctggtgacagctactacgaagatgtgtgtgatgaccgcgtcgtcaaggcggctgtggaggtgtttgagaagctgaagggtgtaaagtgccccttcctcgacggtctgtatattacagagccaaagacaattctggaactgctgtgtaggccctcaaagtaccggttggacatactggaatggatgtgtatatgggtttgcccctccttgcaggacaagttcagttcactgaaaggaactgcagtggatgtgaagatacaggagatggtgaaactaggccatgacctgatgttgtgtacaccagatgaccaggatcttctgatgggccgtgagtgtccccagaagcagctgcagttcatggaccagttgctggatatgatgcggagcctggccactggatgctccactagttctagcctgaaggaacaccttgaggacactacagagaagaatgaggccttgttgggggagctcttgtctagccccaacctgtgggcaatcttgaagcctgagaatgaaccatggcccctggacatgcagtcctctctcaataagcaatgtgatgacctgccaaaagctggcccctctgcccagtcagagggagagaaggtggcagatctggccaggcagcttcaggagagcgctactaagcttcagacacttcgagaccagtgctttgcacagcataaagcagggactgacaccagtaccatagaccagaagcttcgtctggttatctctgacttctaccagctcatcttggccttcctgcaagtctatgatgatgagctgggcaagtgctgccagcgtccactacccagcctgcacccaagtggccccatcatccaagctgtctatcagactctgacttcctgtggccaattgttaagagcagtcatggagattgcagatacatctgctgaagctatggaagcagcgaggaggcagcaaggagagccaaactgttggggcagcaacaactctgggataagcctagccaccaggattgatgaagtaacacagaagtacaagatcctcactgacacattgcacagagaaacaagataatgtgggatagaagaccctccctggatctgtcaggaggggtagttccagtcctgctcatggcctgcatggattcttcttgattggtgtctacattttggaggaaaggaggaagaaggaggtagattaggcaggcagagatgcgtaggacagggagctggaaataaaagaaacctca

SEQ ID NO: 5371 - DNA, 1243 bp, Cricetulus griseus
cccgcccgccctacgtgctcgttcgcctcggtgtgctgcgcgcgagcccggagtccccgcggcgggcggcggcggcggcgttagcagaaggcggaggcggtggagagagcccgcggctgccgcggctacagcgaaatggcggagaccgtagcggacacccggcggctgatcaccaagccgcagaacctgaatgacgcctacgggccgcccagcaacttcctcgagatcgacgtgagcaacccgcagacggtgggggtcggccggggccgcttcaccacctacgagatcagggtcaagacaaatcttcctatcttcaagctgaaggaatctactgttagaagaagatacagtgattttgaatggcttcgaagtgaactagaaagagagagcaaggttgtagttcccccactccctgggaaggcgtttttgaggcagcttccttttagaggagacgatggaatatttgacgacaatttcatcgaggaaaggaagcaagggctggaacagtttataaacaaggtcgctggtcatcctctggcccagaatgaacgttgtcttcacatgtttttacaggatgaaataatagataaaagctatactccatctaaaataagacatgcctgagtttggaaagaagaggcaaacacgagaccattaacaattgatccacaccaatgaagaagttgtaactaacgtagcatgctgcacagacactggcctaacatgccctgggtatactaacactcaacgctccctccctttcatttccttttcttttggcagttgacaagaagttcatttgctttagtgaaaactccctcgttgagcctctctcactcgctcttccttgctgtgtctgtgtacacactatagcctcacaagccccatagacctgcgctgttctaactaaagttgctgacttggtcttatttgcagtttctgtgtcatgtttgcttcttgagtctgactgactagagtatttctccttcccgttagtgtgtgatgtcaccacatggtcctcatttctgcgcaggattaaaggtgcacgacaccatttgtcttcagtgccacacatatgtggtgtactttgtgtgcagagtgtctttcttctggcctgtaatttccttcacatggaagattaatgagggaaatctttatattctgtataaaaacaaaatcaaatttatatactaaaatcatttgtctaaaaatttaagttgttttcaaataaaagttgaaatgc

SEQ ID NO: 5372 - DNA, 1242 bp, Cricetulus griseus
  modified_base (1203)..(1203): a, c, t, g, unknown or other
  modified_base (1225)..(1225): a, c, t, g, unknown or other
actggagaattttggctgaggacaaccttctctggagagagaaatgtaaagaagagggaattgatgaaccattgcacatcaagagaagaaaataataaagccaggttttatacacagcccgtggaagagtgcatacatcagacaacacagaattgataccaactggaggcgaggagagctcaaatctcccaaggtgctgaaagggcatgatgatcatgtgatcacatgcctacagttttgtggtaaccgcatagttagtggttctgatgacaacactttaaaagtttggtcagcagtcacgggcaaatgtctaagaacattagtgggacacacaggtggagtatggtcatcacagatgagagacaatatcatcattagtggatccactgaccggactctcaaagtatggaatgctgagactggagagtgtatacatactttatatgggcacacttccactgtacgctgtatgcatctccatgaaaaaagagttgttaagcggttctcgagatgccactcttagggtttgggatattgagactggccagtgtttacatgtcttgatgggtcatgtagcagcggtccgctgtgtacaatatgatggcaggagggttgttagtggagcatatgattttatggtgaaggtgtgggacccagagactgagacctgtctacacacgttgcagggacacactaatagagtctattcattacagtttgatggcatccatgtggtgagtggatctctagatacatcaatccgagtctgggatgtggagacagggaattgtattcacacattaacaggacaccagtccttaacaagtggaatggaactcaaagacaatattcttgtctctgggaatgcagattctacagttaaaatctgggatatcaaaaacaggacagtgtttacaaacattgcaaggtcccaacaagcatcagagtgctgtgacctgtttacagttcaacaagaactttgtaattaccagctcagatgatggaactgtaaaactctgggacttgaaaacgggtgaatttattcgaaacctagtaacattggagagtgggggaagcgggggagttgtgtggcggatcagagcctctaacaccaaagctggtatgtgcagttgggagtaggaatggcactgaagaaaccaagctgttggtgctggacttcgatgtggacatgaaatgaagagnaaacaagatgaaaaacaaacanaacaaaaaaaaaaaaaa

SEQ ID NO: 5373 - DNA, 1242 bp, Cricetulus griseus
gttgctctctgctttctacctcgtatacgatgtcgggtcgcggtaaaaccggaggcaaggcccgcgccaaggcgaaatcgcgctcctcgcgcgccggtctacaattcccggtaggccgcgtgcatcggctgctgaggaaaggccactatgccgagcgcgtgggagccggcgccccggtgtacttggcggccgtgctcgagtacctcaccgctgagattctggagctggcgggcaacgcggcgcgggacaacaagaagacgcgcatcatcccgcgccacctgcagctggccatccgcaacgacgaggagctcaacaagcttctgggcggcgtgacgatcgctcagggcggcgtcctgcccaacatccaggccgtgctgctgcccaagaagacgagcgccaccgtggggcccaaggcgccggcgagcggcaagaaggccacccaggcctctcaggagtactgagggagcccgcgccgtggccgcccagccctccccacacctccacaaaggcccttttaagggccaccacctccctcacggaaagagctgagccacttagggctgcgggccgggccgccgcgttcccattctcttcccctttcccttccagaagtgtcggccttttgctgtgacgtacggctgaggtgggcctgaaggtgagttactctgcagctgcaacccgggcgtcctttcttcagcttggtgctttagccctcgcctggaccttccagaagtgacttgattaccaggctttggtgaagagaaatggatcatattgtttggtcctgtgttttccccttcgttggcctcataccagtttaccccatcttcgttcatcggccggtgtgtggtgtggccgggacaaaatcactgtaatatgagctggttttctccaggatgcctcctggaaagggtttgggagaagcttacaggcctgtggacagaagagctgtgttcttgccgcaggagactggcagccgggcctagctatccccttttcttcccagcgactcaattcacaacccaaacacctagataccagcacaagtcggtgaatccctatctggactgagcctctactggcttctgaactggaattttgcatctatcccaagtttagaaccttaggtagtggggagtttcaatgggctaattttattaaatgattgtttggttttgtttttttaaaaaaaaaaaaaaaaaaaaaaaaaaaaaaaaaaaaaaaaaaaaaaaaaaaaaaaaa

SEQ ID NO: 5374 - DNA, 1242 bp, Cricetulus griseus
agagacagccgcatctttccgtgcagtgccagcctcgctccggagacgcaatggtgaaggtcggcgtgaacggatttggccgtattggacgcctggttaccagggctgccttcacttctggcaaagtggaagttgttgccatcaatgaccccttcattgacctcaactacatggtctacatgttccagtatgactctacccatggcaagttcaaaggcacagtcaaggctgagaatggaaagcttgtcatcaacgggaaggccatcaccatcttccaggagcgagatcccgccaacatcaaatggggtgatgctggcgccgagtatgttgtggaatctactggcgtcttcaccaccatggagaaggctggggcccacttgaagggcggggccaagagggtcatcatctccgccccttctgctgatgcccccatgtttgtgatgggtgtgaaccaagacaagtatgacaactccctcaagattgtcagcaatgcgtcctgcaccaccaactgcttagcccccctggccaaggtcatccatgacaactttggcattgtggaaggactcatgaccacggtccatgccatcactgccacccagaagactgtggatggcccctccgggaagctgtggcgtgatggccgtggggctgcccagaacatcatccctgcatccactggcgctgccaaggctgtgggcaaagtcatcccagagctgaacgggaagctgactggcatggccttccgtgttcctacccccaacgtgtccgttgtggatctgacatgtcgcctggagaaacctgccaagtatgaggacatcaagaaggtggtgaagcaggcatctgagggcccactgaagggcatcctgggctacaccgaggaccaggttgtctcctgcgacttcaacagtgactcccactcttccacctttgatgctggggctggcattgctctcaatgacaactttgtaaagctcatttcctggtatgacaatgaatttggctacagcaacagagtggtggacctcatggcctacatggcctccaaggagtaagaagcccaccctggaccatccaccccagcaaggactcgagcaagagggaggccctaccccccacaccgatcatctccctcacagtttccatcccagacccccagaataaggaggggcttagggagccctactctcttgaataccatcaataaagttcactgcacccacaaaaaaaaaaaaaaaaaaaaaa

SEQ ID NO: 5375 - DNA, 1242 bp, Cricetulus griseus
gaaagcttcactggggcagtctccgcatatcatggggagatagacgctgctgcctctgattggccttggtcctcacagctccaaaaagaagcaggatcttgataaactctatgagctgaagtccaaagctcggcagattatgaaccagtttggcccctcagccctaatcaacctctccaatttctcatctataaagccagagccagccagcacccctccacaaggctccatggccaatagcaccactgtagtaaagataccaggcactcctgggacaggcggtcgtcttagccctgaaaacaatcaggtattgaccaagaagaaattacaagatttagtcagagaggtggatcctaacgagcagctggatgaagatgtggaggagatgctgctgcagatagctgatgattttatcgaaagtgtggtgacagctgcctgccagctcgcccggcatcgcaagtccagcaccctggaggttaaagacgtccagctgcatctagagcgccagtggaacatgtggatcccaggatttggctctgaggaaatccgaccctacaaaaaagcttgcaccacagaagctcacaaacagagaatggcattgatccggaaaacaaccaagaaataacacaggggacagttaaggaatggacgacatgtatttggagatacttgagctgagacctcagccatctcatccttggattttttttttaaatgctttacagagaagcatatattttttattaacagtgcagcaatatctataatgactgagaagatctgccaaaagaataaagcctcctaccccaacttctggtcccttttccctgccgtctcaaagagaagcagtgtatcttccggagaagactttacctgtggtttatcttataaatgattgactgtaggcagagcggtatggtcatgctgggtgagacagtgttagcaggtttgtagagggtttgtctcctcctttcccttgtcctgtactttgtaatgtcagtgtttatatgaatatgaacttgatttgcttttccagaataaagaacttataaattgaagacacagggtgcctagctgaggcctttgaaatgccagtcaggatcagcaaggctggagggctgcagtcagcaggtggcagcacaggggcccatctgtgcatttaagaaacgggttttccactggtttactccaaagggacaaaccagcagtaggagttggagtccggttctctgctaccagaca

SEQ ID NO: 5376 - DNA, 1242 bp, Cricetulus griseus
gaagggagaaaaagtcatggccgcttgctaccgccaggagcccatcacaaaagacaaggaggtcaaggctataccccaagaacaacaaaccctctccagtgtaagcacagagcaagaggtgccccagcctgtgcaagcccctgccagcttgctgcccaaggccaccccaatggagtccccagagaagtcatcgcctcccgctgcccagcaggatgaagaagacgatgctctgttctcagagcctgtggttttcacagatcagctcaagtaacaccctcttgaagacggggctttgattttctggacaactggtaaacagtgctacctggaaagacagccaagagcccccagtgtggcccaagtggtgttcagaggagaaggcagctccgcctatgtattttcctgttttctctgctcttttcttagtacttttgggaactaggaaatattgccagggtttcgtaaataaaacttctgttcccagctccatcccacttatccttccaagaaggttctcggaccaaccacccttctctcccctaggaaaacatgccaaagctgtacttagccaatattgatgtgatacctgccaattagcttatgtcctaaacctccctttgtcccttggtcccttgggtttggatttgccttcctctagcaacatttgaccagtcatctttccataatgttgtagagcagttgatagtccttgcacctgggcagggtccacaccaagctggcttcttggtctcccccaaggactctgtggcagtgcccaggagattggccaggtgtttaccaccttctcttcctccggcatcctgatgaagtacattcatcatttctcttacagtacattctttggctgaagcctgtgtatgattttggactccaccacacacccaggctcagcaactgggaggcagctccagggctctgtgtcttgctcttggtggctgtatttgacaaaagctctcaggaaccaagactgtgcctgtttgggctgtccctaaatcccaggccctcaaggcttggatgtgctcccattaggaacaggggagcggcctcctggccaggtgtgtccctcatgctagggccagaagtggccttctgttcttcacaccaccctctcctttgatacatgttttcaaaatggtaaattcttattgacagattataacttggtcctattttgtactattagcctttaataaagccattttaaaatgaaaaaaaaaaaaa

SEQ ID NO: 5377 - DNA, 1241 bp, Cricetulus griseus
  modified_base (1229)..(1229): a, c, t, g, unknown or other
ctgaagaagatgatgatgaagaagaagaggaggaggaggaaggaaccaatgtatgacccagatacattagcccaggatgcaaatgccgcacagcaggaactgaagttactgcttcatcgttctactctattattttcacaaggcaaaatgtatggttatctggataccttactgaccatgctagccatgcttttaaaggttgcgatgaatagagcccaagtttgtttgatctccagttccaagtctggagaaaggcacctctaccttattaaagtgtcaagagacaaaatatcagacaacaatgagcaggaaacatcaaattatgatgcaaaagcaatatttgctgtactcacaagtgtcttgccaaaagatgactggtggaaccttctcttgaaggccatatatactttgagtgacttatcccgcttccaagaagctgaattgcttgtagattcttcactggaatattattcattttatgatgacagacaaaaacgcaaagaactaagaatacttcggtctatctgctgcaattctggacaaaattacagaaaggcatatgactatatcaggtgatggtaataatcaagttaccatgcattctcaagatgtgagacatcatcgcttctgtctccgcctgatgctgaaaaccccgaaaatcatgcactgtgcgttctaaatggacacaatgcttttgtatctgggagcttcaaacacgcacttggacagtatgtgcaagccttccgtgcctatccccgatacctcagcatacgtggacctttgccaggaatcgttctacaatttgggccgtggccttcatcaactgggactgactcaccttgcaatccactactaccagaaggctctggcactccctccgcttgtggtagaggggatagaagttgaccagttagaccttcgaagagatattgcctacaacatgtctctcatttatcagagcagcgggaacactgcaatggctcaaaagcttttgtatacctattgtgtcatataagcgcagaactgagaaaggggctgcgtggaccagtgtcttctgagacaactatgcttgatgataaaaatggtgctgtcttcactgctagctgtgttacaactgcacctttgaaagctgggggtgtggcttggctgtagagtgcctacctgctttgtatgcataaggcccagattcaagccacaggcctttaggaaaactgaaacactgcttttanctctggaatata

SEQ ID NO: 5378 - DNA, 1241 bp, Cricetulus griseus
gggggagacgctggcatctcagccagagaatgagctgtaatttcattcctttggatataaaattagacctttgggaagacttgccagcaagctttcaactaaaacagaatcgatcactgtattttggaggtttgtccgagagtggaatagtctgactgccatgaagcagaggctgatcaaggaaaagtgggcagctgttctgcagcccaatcctggccttggaagagatcacgaaacaacaggccaaagaaaacagtgctaaaagatatatcactaaagaagatgttgccacggcgtccatgaataaggtgaaagctgatggtggccacatccgtctgatcaccagggagtccaggccacgggacccttctacaaaaaagcttgacaaagcctgtgtcccatctctgaatccctgccaagctgacctaactgttgagccatcctcatccaaaggctacattcaggctgtggataaggaaggaaagccactctgtctccgctgccagcatcccacttgccagcctgtgcaagggtccaagaccagcacctgggactcacggttctgctccctgaagtgccaggaagaattctggatccgatccaataacagttacctgagggcccgaggtgtttgtcaacagagcatggtgtgtgtcagcagctaaatgaaatgctgagaaacccagcagaaggtcacttctggcaggtggatcacatcaagccagtgtatgagggagggggacagtgctccctggacaacctgcagactctctgcacggtgtgccacaaggagagaaccgcccaacaagccaaggaaaggatgcaggcgagacgacgctccctggcattgaagcatgggtcagacatcactccggtttctggtgaagaagcagacagaggtgtaaacagagcaaatgacttgcaggtagagggacttgacatttcatgtttgtctagtgttttaagagagtgcaaagtctttaaacataatcaagaactgagatttagattttgtgctaaagtactctttgtgttaagcacccggcaggaactgaggtgtgaaagggaagcatttctgtggtcttgtgggcttcatgcagattgccaattatgtttcagcaagattttgttcggcctcagtttcccctgcacaccttcaccacttcattgtacatagataatatgcgataaatatattcaaaccttgtaattttaaaaaaaataaaaaaaaaaaaaaaaaa

SEQ ID NO: 5379 - DNA, 1240 bp, Cricetulus griseus
  modified_base (33)..(33): a, c, t, g, unknown or other
ctggagatgacccctgggtagaacatgccaaanggtttccaaggtgtgagttcttgatacggatgaaggggcaggagtttgttgatgaaattcaggctagataccctcatcttcttgaacagctgttgtccacttcagacaccccaggagaagaaaatggcaaccctccaattatgcatttcggacttggtgaaagttcagaagatgtggtcatgatgaacacgcctgtagttaaagcagctttggaaatgggcttcagtaggagcctggtaagacagacagttcagagtcaactcctggccactggcgaaaactacaagacggtcagtgatattgtctcagcacttcttaatgctgagggtgaaagaagagacgaggaggaggacagacagactgaagaaccggcctcaggtgacttgtcattaatacggaagaatagaatggctctctttcagcagttgacctgtgtccttcctatcctggataatcttcttgaggccagtgtaattactaaacaggaacatgatattattagacagaaaacacagatacccttacaagcaagagagctgattgacaccgttttagtcaaaggaaatgctgcagccaacatcttcaaaaactgtctaaaggaaatcgactccacattatatgaaaacttatttgtggaaaagaatatgaagtatattccaacagaagatgtttcaggcttgtcgctggaagagcagttgcggaggttgcaagaggaacgaacttgcaaagtgtgtatggacagagaggtttctattgtgttcattccctgtggtcatttggtagtctgccaggaatgtgccccttctctgagaaagtgccccatctgccggggtacaatcaaggggactgtacgtacttttctctcataaatgaagaatggttttaaagtattattggacaccagaagccatctgaacaaagaatggattactgattcaaccagtacattcatgtttgctcttcttcagaattactcatcttgcttcatgaaaggtggtattgtgtatttaatcttgatctgtttagttgaaagggaatgtctatgctgataagctaagggagtgtgtatgtataaggagtagtagtgtttgctgtgtgtcattcaggagtcactggatttggaatttctagtaaaactttaggttcaggtgatgtagagctcagagactctggaaaccagtagtcctggcactcagcaggttagggt

SEQ ID NO: 5380 - DNA, 1240 bp, Cricetulus griseus
agtgggtgctgtacctgctcctggtgaagtgtttgatcaccctgtccactgtcttcctgctctgccttattgtggccttccactccaaggaggtccagctgttcatgaccgacaacgggctccgggactggcgggtggcgctgacccggcggcaggtggcgcagatcctgttggagctgctggtgtgcggggtgcacccggtgcccctgcggagcccgcactgcatccgggcgggggaggccgccgaagcgcagccctggccgagcttcctgggcgagggcgaggctctgctgtccctggccatgctgctgcgtctctacctcgtgccccgcgccgtgctgctgcgcagcggcgtcctgctcaacgcgtcctaccgcagcatcggagcgctcaaccaagtccgcttccgccactggttcgtggccaagctctacatgaacacgcacccggggcgcctgctgctgggcctcacgctcggcctctggctcaccacagcatgggtgctgtctgtggctgagaggcaggccgtcaatgccaccgggcacctcacagacacactgtggttgatccctatcacgttcctgacaatcggctacggggacgtggtacccggcaccatatggggcaagattgtctgcctgtgcaccggagtcatgggagtctgttgcacggccctgcttgtggccgtggtggcccggaaactggagtttaacaaggcggagaaacatgtacacaactttatgatggacatccattatgccaaagagatgaaggagtcggctgcacggctcctgcaggaagcctggatgtactacaagcacactcgcaggaaggactctcgagctgcccgaaggcatcaacgcaagttgctggccgccatctacacgttccgccaggtacggctgaaacacaggaagctccgggaacaagtgaactccatggtggacatctccaagatgcatatgatactgtgtgacctgcagctgggtctcagcacctcccaccgggccctggagaagagaatcgacgggctggcgggaaagctggacgccctgaccgagctgctgggcaccgccctgcagcagcaaccgctaccagaacccagccaggaagccacgtagctggacccactgcagaagaatcgggcaatgcaccccaggactcagctcaaggaatcctccccgccacttgtgacctagccccatgaataaagcgcctcgagctgcgaggcccgaggtgg

SEQ ID NO: 5381 - DNA, 1240 bp, Cricetulus griseus
cagacttctccgagactggccagtgggatgttgtcatagagacagagggcaaacaggacagagccgtatttgatgctgtcatggtttgtactgggcaattcctgaaccctcatttacctctggagtccttccctggaatccataagtttaaaggacaggtcatacacagccaagagtacaggattccagacgcctttcagggcaagcgcatcgtggtggttggtcttgggaacactggaggagacatcgcagtggagctcagtagaacagcagctcaggtgtttctcagcactagaaccggcacctgggttataagccgctcttcaggtggtggctaccctttcaatatgatgattacaagaagatggtgtaattttgttgcacaagttctgtccttcaatcctctatcatttttgaagatgggacaatagaagccaacatcgatgtggtgatcttcgctacaggatattgaatttttcttttcccttttttttgtaagaaccactcaaaagcctttgtgcaaataagatcatgctatacaagcgagtcttcccaccaggtttggagagaacaacattagccatcattggcctgatcagccttacaggatctatcttagcaggcacagagctccaagcacgatgggctacaagagtattcaaaggactctgtactatacctccaccccagaaactgatggctgaagccactaaaaagaaggagctcattaaaaggggtgtgattaaagaaaccagtcaagacaaactcaatttcatttcctacatggatgagattgctcagtgcataggctcaaaacccaacattccacttctcttcatcaaggatccaaggctagcttgggaagttttttggaccatgttccccttaccaattatcgcctaatgggccctggaaaatgggatggagccagaaatgccatcctgacccagtgggacaggaccataaaaccaatgaaaactcgaattgttcctgagtcctctgagcctgcctccctgtcacattatctaaaaagtttgggggacacctcttctactcacctctcttatacttttctataaatcttcacttttgcttaaactggtgcaaaataaactacaaggaagagttttccctaaccatatactatggttcattccccagaacccatgagttgatctccagtgtggtgatggaagaagcatctggggcacccttgtaaatacattggttctgttctcaa

SEQ ID NO: 5382 - DNA, 1240 bp, Cricetulus griseus
gttttccgttcccgcgtcggcccgcctggtccgggagagctaggcacgctgtgctgcggcgcggcgccggggcgccctcgccggcaccatggcccgaaatgcagaaaaggccatgactgccctggcaagatttcgtcaagctcagctagaagagggaaaagtcaaggaacgaagaccctttcttgcttctgaatgtactgagttgcccaaagctgagaaatggagacgacagatcattggagagatctcaaaaaaagttgctcagattcagaatgctggcttaggggaattccgaattcgagacctcaacgatgaaattaacaagctgctaagagagaaaggccactgggaggtccggatcaaggaactgggtggtcctgattatggaaaagttggccctaagatgctggatcatgagggtaaagaagtcccaggaaaccgtggttacaagtactttggagcagcaaaagacttgcctggtgtcagagaactgttcgagaaagaacccctccctcctcccagaaagacacgtgctgagctcatgaaggcgatcgactttgaatattatggttacctggatgaagatgatggagttattgtgcctttggaacaagattatgaaaagaaactcagagctgaactggtaggaaaatggaaagcagagagagaggctcggctggcaaggggagaaaaggaagaggaggaggaagaggaagaggaggtcaacatctatgctgtcaccgaggaggagtctgatgaggaaggcagccaggagaaggcaggggaagatggtcagcagaagttcattgctcatgttccggtgccgtcgcagcaggagatcgaggaggcgcttgtacggaggaagaaaatggaactgctccagaaatatgccagtgagaccctgcaggcacagagtgaagaagccaagcggctcctggggtactaggatgagtcagagcccttcttggactctgggagatctggtgggtgtgcttgtgacccccctgggcctaccatcctcatagctaccctgggctggctagtgctgggaggctctgtgcctttctcatccttcatctgtctctctccttttctggagatgtgagctggcttgatggtaaggccctgtccctttctccctctcctatcttgtggacaggaattctaagtttgcaactttacttttataacttgtttcagagaaagcttcttttattaaaatttttaataagaaaggaaa

SEQ ID NO: 5383 - DNA, 1240 bp, Cricetulus griseus
agctgttggcggagccgcgaggatggcgtcgaccagccgtttggatgctctcccaagagtcacatgtccaaatcatccagatgcaattttagtagaggactacagagcgggtgatatgatctgtcctgaatgtggcctagttgtaggggaccgggttatcgatgtgggatctgaatggagaactttcagcaatgataaagctacaaaagacccatctcgagttggagattctcagaatcctcttttgagtgatggagatttgtctaccatgattggcaagggtacaggagctgcaagttttgatgagtttggcaattctaagtatcagaatcggagaacaatgagtagttctgatagagcaatgatgaatgccttcaaggaaatcacgaccatggctgacagaatcaacctccctcgaaatatagttgatcgaacaaataatttattcaagcaagtgtatgagcagaagagcctgaagggaagagctaatgatgcgatagcttcggcatgtctgtatattgcctgtaggcaagaaggcgttcccaggacatttaaagaaatatgtgctgtatctcggatttctaagaaagaaattggccgctgttttaaattgattttgaaagctttggaaaccagtgtggatctgatcacaactggggattttatgtccaggttctgctccaacctttgcctccccaagcaagtacagatggcagctacgcacatagcccgaaaggctgtggagctagacttggttcctggccggagccccatctctgtggcagcagcagctatttacatggcttctcaggcatcggctgagaagcggacacagaaagaaattggagatattgctggtgttgctgatgttacaatcagacagtcctacagactgatctaccctcgggctccagatctcttcccttcggacttcaagtttgacaccccagtggacaaattaccccagctctaagctgaggcaactaagtgtcacactctcatgtacatggaactttatacatagcttacattgtgctggttgagcctttaatagatggtacgcattccagactaaatattatttagcattctgtatgtatatattagtgcaacatatttaatgatttaaatttcttactgaatctgctttcttttttagtgattaggaaacagtattttggaagatactaaatatgtaattctcaaataaaacatttttcaaaactaaaaaaaaaaaaaa

SEQ ID NO: 5384 - DNA, 1240 bp, Cricetulus griseus
tgtggcgtgagcagacccggccgccaaaggagcgcgcggcccacggcggctgcggaccgtaatggctatgcagatgcagcttgaagcaaatgcagatacttcagtggaagaagaaagctttggtccacaacctatttcacggttagagcaatgtggcataagtgccaatgatgtgaagaaattagaagaagctggtttccatacggtggaggctgttgcttatgcaccaaagaaggaactcataaatattaagggaattagtgaagccaaagcagacaaaattctggctgaggccgctaaattagttccaatgggtttcaccactgcaactgaatttcaccaaaggcgttcagaaatcatacagattactactggctccaaagagcttgacaaactgcttcaaggtggaattgagactggatctatcacagagatgtttggagaattccgaactgggaagacacagatctgtcatacattggctgtaacatgccagcttcccattgatcgtggtggaggtgaaggaaaggccatgtacattgacaccgagggtacgtttaggccagaacggctgctagcagtggctgagaggtatggtctgtctggcagcgatgtcctagataatgtagcatatgctcgagggttcaacacagaccaccaaacccagctcctttatcaagcatcagccatgatggtagaatccagatatgcactgcttattgtagacagtgctactgccctctacagaacagactactcaggtcgaggagagctttcagccaggcaaatgcatttggccagatttctgaggatgctgctgcgacttgctgatgagtttggtgtagcagtggtaatcaccaaccaggtagtagcccaagtggatggagcagccatgttcactgcagatcccaaaaaacccattggaggaaacatcattgcccatgcatcaacaaccaggctgtacctgaggaaaggaagaggggagaccagaatctgcaaagtctatgactctccctgtctccctgaagctgaagccatgtttgccattaatgcagatggagtaggagatgccaaggactgaatcatcagggccttttttctgtgattaatcttttaaatgctaaatagcctaatgaagaggactgctctctgggcttcttcagggctcttcctgatgtgactaccggaacatggcttccaggaaaaccattattgtatcagctttctggtggcagaaaca

SEQ ID NO: 5385 - DNA, 1240 bp, Cricetulus griseus
ctctagatggcggctgtgccttagagagagcgcgctttgctccctgcttcggttcactttacgcaactttccctaactttcgggcagcctcagggggcccccgcagccccctgcctcttctagtgacttactggggtcgattcgaatctttttttggaagaaaagcagcttttaggagcttttttttttcgtgccttgttggaagaagctgccgtattgagagcccaggtcgttgtttttccagcttagaagccatggcgcacctccatttttgtgcgctctcctaatgaggctttttttttcccctcggacctgttttagtattaattattgctttattttttgacaagccaacacatttgaggactaattcattaactttttgttttttattgctgaagctgcttaggaaggggggttgtgggggttgatgggtttgcatcattgaatggcttttctcagtatatggataactgggtcaggcctttggtttactcactttcagtatagcttgccagtattgttaggctatccaaagcctttctagatggagtaagagttcagactcgttctgagtttgatgaaaagtcttgttttggatatacacagaatttggctctctgaatctcccttggggatggtgtgggcagtaccaataatgactttcccatgacaagtttgagttgtgtccttgagtgcatcattgggtcatggcatggctgtgatgggccattgcttctgctacttagagcatggtctttccttggactctgtgtagtcattccttaagccccgcaaagggaacacaaacatttctcactgtgctgctggtgttctgacctggtgtggctgcagctgcatcaggctttgcaggttcacacacagcaacactgaaatcctatagaccaaaacccacttgtcagcaggaaccgtgtctgggcccagcacctgtggtcttctagctcacctttgaccagctgtgttgggtgaagagagccatgccaagggtccaggctgctttagtccatctgtgccctacccatttggggacaggtggttttcttgtaacttgtggactttgaaacctgttgactaaacagtaattaatttatatttgtgaaaaatgccactgtcctagtgatttctgatgtaaataatgttgtttatatagtatgtattaaattttcctacattgtaaaactgctgcacttttgattcttgtatattaaaaagcgttact

SEQ ID NO: 5386 - DNA, 1240 bp, Cricetulus griseus
tcattgttcctgaaagagaaactcaaacaagagaaacaacaagaaatggctaattctacaggaaatacatcacagggtctgttgacattcagggaagtgactgtggacttctcccaggaggagtgggaactcatggactctgctcagagggctctgtacattgatgtgatgctggagaattataacaaccttgtctttgtggggaactattgcaaatccgatcctgtccatcagcatgtgaagactgaaaaggagtcttgtcagtgtaatgagcttggcaaagtccttcatgacccctcacatgtgcactttactttcatcacggtagaaaccactacagactccatactggagagaaaccttacaaatgcaatgaccgtgacagacacttcacccactatgaagcattaagaaggcataaataaaaaatcattctctagagatagtgtcacaaatgcaaagaacatggtaagtcctttcattaaattatcacatcttaaaaggcattacagaacccatactggagagaagccttaaaaatgtgaggtatgtgacaaatcctttaccacgaaatcaactctgaaaacacatcaagagaaattcacactggaaagaaaccttacaaatgcaaagaatgtgacaaatcctatacccagcattcgatagtcttagaacacatcagagaattcatactggagagaagccttacaaatgtcaggaatgtgacaaatattttacccgggttctcaactcttagaagacatcagaaagattcacactggggataaaacatcagagagttcatactggagagagaccttacagttgtaaggactgtggcaaatcctataccagctgctcaaatcttaaaagcacaccagaaaattacacactggagaaaaaccttactaaatgtatagaatgtgacaaatcctttacccaggactcacatcttagaacacatcagagagttcatactggagagagaccttacagttgtaaagaatgtgacaaatcctttaccaactcttcaaaccttagaaaacatcagaaaatccatactggagagaaaccttacaaatgtaaggaatgtaacaaatcctttacccagaatctcatatcttagaacacatcagaaagttcacactggagaaaaaccatataaatgcaaaagaatgtgacaagtcctttacacaggactcacatcttagaagacatcagagagtacatacgggagaga

SEQ ID NO: 5387 - DNA, 1240 bp, Cricetulus griseus
ttccatggcctccgcctcccgccggcaacgccgggagcgccgcttccggcgctacttgtctgcagggcggctggtgcgagcccaggctctcctccagcgacacccaggcctcgacgtggacgccgggcagccgcctcccctgcacagggcctgcgcccgccacgatgccccagccctgtgcctgctgctgcgcctcggggctgaccctgcccacccaggacccgccaccggagacacggcgctgcacgctgctgcccgccagggccccgacgcttacacggacttcttcctgccactgctgagtcgctgcccctccgccatggggataaagaataaggatggggagactcccgggcagattctgggctggggacccccctgggattctgctgaagaggaagaggatgaagaggtctccaaggagcaggagtggcggcagaagctgcagggcgagttggaggatgagtggcaggaggtcatcgggaggtttgaagaggatgcttctcatgagatgcaggaacccgagtccttctcagcctggtcagaccgcctggctcgagagcacgcccagaaacggcggcggcagctggaggcagagacatcccgccgacccccaagggctgagggctccagtcacagctggcggcagcacgaggaggagcagcggcttttccgagagcgagcacgggccaaggaggaggaactgcgtgagagccgagccaggagggctcaagaggctcaaggggaccgagggacagagcctcccaggcctgggcccagggcagaacacccacgaggggcaggaaggggcagcctctggcgctttggtgatgtgccctggccatgccctggtgggggggacccagaggccatggctgcagccttggtggccagaggcccccctctggaggaacagggggctctgagaaggtacttgagagtccagcaggtccgatggcaccctgaccgcttcctgcagagattccgaagccagattgagacctgggagctgggccgtgtgatgggaactgtgacagccctttctcaggccctgaaccgccatgcagaagccctcaagtgaccctaggggatgagcaagaacctgtggggatgtcgccaaggacagatgggagacgcggaaggtcgtggatggggatggatgagcagcagcttagctactgcgcagagaggatagtggggcaggctcacggtaagtggggggccgggggtggggtggggg

SEQ ID NO: 5388 - DNA, 1240 bp, Cricetulus griseus
taggccaggctctgtaggaaaaagacctgtatatgacatgcttatgtgcatataaggtattctatgatgtatagataggacagcagtagagcccattaactgtaagtgtaaataacatgtacagtgtgcttgtaaatctatagctagttgttgcccatggaacacttttgactggcattttgttgaagtgtggaatacatcatctgcctgtggttgtaattcaaataccatgtgagggagatgcattttatcagtttgtcttagttttgtatggcttccaaaacattacttcaaacatgagagtttaaggcaacagaattagctgggtgtggtgttgcatgcttataattccagcagaggctgaggcaaaaggatcaaaaagttcagtgccagcctgggctcttgcagcttggggtagttctaaccagtcaagatgcaggtactctagatccatagtcacataacctcttttgtatgctacatccttctcagtgcctctctgccctctcccccagtgtgtgtgtgtgtgtgtgtgtgtgtgtgtgtgtgtgtgtgtgtgtgtgtgtgtgtgtatagaacctttttttttttttttttttttttttttttttttttttttttgacagtgccagggatagaacccagtgcctctccagtgctaggcaaggactctaccactgatccacaccctaaccccgactccttataaaagtaagtgtatgacttccagagggtagaacccgagagccttgggggccactgtgcagctagcttaccacactgctattcaaaaattgttacaaaatctatgacttactggttcctcaaagaaattgtattaattggattgaaatttctcagcctcagcactgtcttaaaaatttaaatctggatcataatatttactccattgcttgcttgtatttttttctttagtgctgggcatcaaacctagggccttgtgagttctaggccttataagtgttagctatgcccccagcagctcattgctttcttaggattagaagacccatgctgtccaatctggaaccactggactctgccttttgagcacttgaaatgtggctagtttcaattgagatatgctttatacacaccagaatttgaagttagtatgaaaaagaatgtaaaatatataattgataactttatattgattacatgttgaaattactattttggacatactgagttaaataaaatacattatttaaattaa

SEQ ID NO: 5389 - DNA, 1239 bp, Cricetulus griseus
ccgggatgtcggggcctgcgcggggcgggggcggcggggcgcggggcgcggcctccggacccgatctcgcaacaaaaggatctcggggcagcctgcccgaggacctcccggcctcgggatccgccttccccacccgggcgtccggggcactggcctggggttcccatcggggtggcgggcaggatccctgacctctgccggcctctgttccaggtcccgcccagaaaggccatgtcccacggcccccgacagccaggcggggccgccgcgcctgcaggaggcaagaccccgggccagcacggggccttcgtagtgactgtcaaacaggagcgcagcgagggtccccgtgtgggagagaaagggtcccaggaggaggagccggtgaagaagagaggctggcccaaaggcaagaagagaaagaagattctccctaatgggcccaaggcccctgtcacgggctatgttcgctttctgaacgagcgtcgggagcaaattcgcactcgccacccggacctgccctttccggagatcaccaagatgctgggcgccgagtggagcaagctgcagccgtcagagaagcagcggtacctggatgaggcagagaaggagaaacagcagtacttgaaggagctgtgggcatatcagcagtcggaggcctataaggtctgcacagagaagatccaagaaaacaaaattaaaaaggaggactccggctctgggctcatgaacacgctcctgaatgggcacaagggtgtggactgtgatggcttttccaccttcgatgtccccatcttcactgaagagtttttggaccaaaacaaagcacgcgaggcagagttgcggcgcctgcggaagatgaacgtggccttcgaggagcagaacgcggtgctgcagcgccacacgcagagtatgagctgcgcgcgcgagcgtctggagcaggagctggcgctggaggagcggcgcacgctggcgctgcagcagcaactgcaggcagtgaggcaggcgctcacctccagcttcgcctcgctgccggtgcccggcaccggagagacgcctactctcgggacgctggacttctacatggcgcggctgcacggggccatcgagcgcgaccccgcgcagcatgagaggctgattgcgcgtgtcaaggagatcctggcgcgggtggccagcgagcacctgtgacaaacaggcttctagaacgggagatgaccctccccacccgcccaggaagaagct

SEQ ID NO: 5390 - DNA, 1239 bp, Cricetulus griseus
gagcgatggcggtgcgggtggccggcttcctgatgctgctggggctggcggcgcgcgggcccgtgccggcatgtgccgggaagatgaaggtggtggaagaacccaacacattcgggctgaataacccgttcctgccccaggcaaatcgccttcagcctaagagagagccttcgcctgtgtcggggcccctgcatctcttcagacttgctggcaagtgcttcagcctagtggagtcaacgtacaagtatgagttctgccctttccacaacgtgacccagcatgagcagaccttccgctggaacgcatacagtggtatccttggcatctggcatgaatgggaaatcaccaacaataccttcaaaggcatgtggatgactgatggggactcctgccactcccggagcaggcagagcaaggtggagctcacctgtggaaagatcaaccgactggcccatgtgtctgagccaagcacctgtgtctatgcattgacatttgagacccccctcgtctgccatccccactctttgttagtgtatccaaccctgccagaggccctacagcagcgctgggaccagatggaacaggacctggcagatgagctaatcacactgcagggctatgggaagttgctgagggtgctttttgaggatgctggctacttaaaggccccaggagaaactcatcccacccagcagcaggcaggaggttcccagggcctggggcttgagaccctggacaactgtagaaaggcacattcagagctgtcccaggaggtacaaagactgaccagtctgctggaccagcatggaatccctcacagtcagcccacagagaccacccactctgagcacctgggtcagcggctccctataggtgtgacctcagagcagttgcggggtgacccaggactacgtgggaacatcctatgatccaggtggccaagaaagaagaacagaaacatcctcagcctcaagtgtcttttcacagagtgcacaaaactggtgtggtggagacatggcttcttttggcatcttttaggccaggcagggtccctgacacacagtgacctgctggccaacctttgttgtgcccagagacccagacagaataaatttcaaagttttaattaatctcatactgataaaaaataactccatgaattctgtaaaccattgcataaatgctataagtaaaaaatttaaacaaatagttaaacaaactttaaacaattacaactaa

SEQ ID NO: 5391 - DNA, 1239 bp, Cricetulus griseus
cctggctcggcgtcgccgcgctgggactggccgcggtggcgctggggaccgtggcctggcgtcgcacgcgttcccggcggcgcaggcggctgcagcaggtggggacggtggcgcagctctggatctacccgatcaagtcctgcaagggggtgtcggtgagcgaggccgagtgcaccgacatggggctgcgctgcggccacctgcgtgacaggttttggcttgtgatcaatgaagatgggaacatggtcactgcccggcaggaacctcgattggtcttgatttccctgaccctgtgacaatgacaccttgaccctcagtgctgcctacacaaaggacctgctgctgcctgtcaccccaccagcacaaacccactagtccagtgcagagtgcacggtctggaggtgcagggcagggattgtggggaggcagccgctcagtggataacggacttcctgaagaagcagccctgtcgcctggtacatttcgagccccacatgcgccccaggcgttcccagctgatgaggtctcgattcgggcccaaccaccaggtggcctactcggatgcaagcccattcttggtcctttctgaggcatccttggaagatctcaactccaggatagagaagagagtgaaagcgactaacttccgacccaacatcgtcatttcagggtgcagtgctcatgcagaggattcttggaacgagctcctcattggggaagtggcactgaaacgagtgatggcttgcaccaggtgccttttaacaacggtggatccggacaccggtatcatggacgggaaagagcctctggaaacactgaggagttaccgcctgtgtgacccttcggaacaatcagtatatggaaagctacccctctttggacagtattttactctggaaagttcagggacagtcaaagtgggagaccctgtgtaccttctgagccagtaatgggaactgcatgttctggaccagcagctgtttcttagaaacatcttggatgctgatatcactggaaatggttcttcgcctcttctttgggtctgtgatttccaagttttcctcttttcagatttctttctgtctcggtgtttcctgggtccagcacacaaagcagaggaatccagttttgcaagcttagcaggactctgtcaagttccttgaaggatgaagggattatcagaatgctctgtttataattacctagtaatttttctactttctgcattcgctggccaag

SEQ ID NO: 5392 - DNA, 1239 bp, Cricetulus griseus
ggcatgtttgtggagcggagacctgctgggttccacctgggtggggcacgaggtgggtcccaagattctgggttccgactctggtcctgcccagcccacagactacaagaggatcctggcgtctgggcctccggggtcatcaccatgaggccacttcttgccctgctgcttctggggctggtgtcaggctctcctccactggatgacaacaagatccccagcctgtgtcccgggcagcccggccttccaggcacaccaggccaccacggcagccaaggcctgcctggccgcgacggtcgtgatggccgcgacggtgcgcccggagctccgggcgagaaaggcgagggcgggaggccgggactgcctgggccgcgtggggagcccggaccgcgtggagaggcaggtcccgtgggggctaccggacctgcgggggagtgctccgtgcccccgcgatcagccttcagtgccaagcgctctgagagccgagtgcctccaccagcggacgcaccgctacccttcgaccgcgtgctgctgaatgagcagggacactacgatgccactacgggcaagttcacctgccaagtgcctggtgtctactactttgccgtccacgccaccgtctaccgggccagcttgcagttcgatcttgtcaaaaatggcgagtccatcgcctctttcttccagtttttcgggggtggcccaagccagcctcactctcagggggtgctatggtaaggctggaacctgaggaccaggtgtgggtgcaggtgggcgtgggtgattacattggcatctatgccagcatcaagacagacagcaccttctctggatttctcgtctattctgactggcacagctccccagtcttcgcctaatgtacagtgaaccaggagctggcacttgctcctagagaagggtgtgacacttgacaggcacataccaggagggctggccccctggaatattgtgaatgactagggaagacagagagccacctcctgtcccactgctggcaaggaatggagacagaggctgtctgaggtcaagacaggcagcctgaaacagtggctgggttactgcccaggactttagagtgtgctgtgctggcggctgtgggttcctggcccaggactccaaggtgggatgctccttcttagtcctgtgccccctctaggtccttgacgccatctctcctgctcctagggctggtctttttctcagaggtcactcaataaacct

SEQ ID NO: 5393 - DNA, 1238 bp, Cricetulus griseus
cacccttcagattaagcatcagattcctgtgttatgggtttcttgtcttttcaagatgcttaagaagtctagaagattggaagatctgtctctggaaaacagaaatgaaaactgcaggcttgctcagccaggatctgagttctgtgacactcagtagtccagagatggtcaggaaccacagaactcaccaaacttgcatataagggacacacagggatttttgaaaatgctgcacatcctgtactagtcactgcgtagataatactggtaaacattttgtattcagacgccaaagttaactaatttcaaagttgatttactttttattaagttctgtagagctgctgttttattgtatttgttttgtttgtttgttgtttttatttgttagtttgtttggtttgttttgttttttagtttgggtactttttttattttcccaacataatgtctctgcattcacctattcttaacttgaaaaccacccaatttagttcttacaaactcttcaatgtgaaaccaagaaatgtaatcaaagcagttataatattctgtgaatggagagagtataatctcaagttcttccaatataaaaatgccatccaaagagtaaatcaagttacataattacattttagttaattaaatgtagaactgtctactgaattgcagtttctgaaatacattgtttcttctgaaataaaactgcgcaatagcttgttagcagtgaccatcctgcagctatgcaactttgaaaagtccagatttgcaggtcttcgtgctggggccgcagtgactgtcctaacagggatctttccttcttttcatgtaactacttcattgtgctttgcatttccaggcagttttcccatgtttggttaaatgtttagcaagctgtaaacttaataccttatgaaaagggtgaaataaacacgtctgcagtgggacttgtagtaatttgagggacattttatatacttttaaaaatcagaatttaattgggatgccagatttctagcaacttgcatctttagttttccagatagtctggaagttagcatttgataaatgatttttaagcaaatataaagattttgttaatttataatttattaatgtgttgttactgtaattgaaaatgttgtggtatacttttaaattcagtctttgtagaaagaactgtattaagcaaaattatgtgaataaatattccccaaaaatgcaaaaaaaaaaaaaaa

SEQ ID NO: 5394 - DNA, 1238 bp, Cricetulus griseus
tggccgcgctcccgtgagcgggtctggggtccagccgtcggcccgaaggtgcggcgccatgaagctgtacagcctcagcgtcctttacaaaagcgagcccaaagcggtgctgctcaaagccgcgtacgacgtgtcttccttcagtttcttccagaggtccagtgttcaggaattcatgacctttacaagtcaactgattgtggaacgatcagcaaaaggcagcagagcctctgtcaaggaacaagagtatctttgccatgtctacgtccggagtgacagtcttgcaggtgtggtcattgctgacagcgaatatccttccagagtggcctttaccttgctggagaaggtactagatgaattctccaaacaggtggataggatagactggccagtaggatcacctgctacaatcgagtacacagccctggatggtcaccttagtagataccgttctgatgttgggagggtcagctgggagtgtccatcttcaggggcagaagcagacacaggtgccctcagctgtccagtgtggaggcacacttaccttgacttgcagtcagactttggacatcaagatcaaagtagtggatgccatcatctctcaaagctggttttatttgtccctgtctacaaggctgtcttggcaactgcttagggcctgcatgtttgaacaagtcattttgaaccagagttggtttactctgatggtccctgccctgagcctgttgagctaccctcagagtgcccatatagggagggggatgtctactgtggcttccaaaatccttactcattgtatatctgcctgtttctctgggtattgctagccaaagggctcaggctccccctggagtggactgcccatataattttcctgctgccacagacctctccatcccagggctcctggacagcacccatccagtctgttgctggcacttcaggtggaatcaatagcctggagtgcagcctgtttttcttcttgctctggagggtgctggggaagagggggggtgtgtggaggtggacatttgtgggaaagagataacctttgcccacacatgactgtcctacagggtatcactcgccctgcaatggattgagttgccatgtgtttcccgtccctcctccattatattctaatgttaaatcacttggcaaaagtgtattttaataatgcctaatttctctgttctgtttgaaggtttctgtctagataaaattgccttttgaaattc

SEQ ID NO: 5395 - DNA, 1238 bp, Cricetulus griseus
aggctggttgggttggtgaggcctgaggaatagcttctggatttctgagaagccctgtacaatacaagatggatcctgtagtcttgagttatatggacagtctactgcgacagtcggatgtctcactattggaccctccaagctggctcaatgaccatattattgggtttgcctttgaatactttgccaacagtcagtttcatgattactcggaccatgtctgctttatcagccctgaagtcgcccaattcattaagtgcaccagcagccctgcggagattgccatgttccttgaacccctggatcttgcccacaagagagttgtatttttagccatcaatgataattctaaccaagcagctgggggtacccactggagtttgttggtttatctccaggatgaaaatagcttctttcattatgattcccatagcagaagcaactcaatccatgcaaaacaggtagcagagaaactgaaggctttcttagggagcaaggaagacaaactggtctttggtggaagagaaagccccagctcaacaaaacagctatgactgtgggatgtacgtgatatgtaacactgaagccttgtgtcagaacttctttagacaacagccagagtccctactgcagctactcaccccagcatacatcactggtgacagcctcagtgcctaaaggaaaaccactagtagatgaaagtttactagtcctacttctttgttttcttgaaaaacaaatgtcatcctcggcattatctgaatgggaagcttcactttaaccctgaggagagcagtgtattctgtgaaaatgtcttgaacttatgtaccaaaaccttgagaaaaaaatcactatacagtttcaagtaagattctttttttcttgttgctataaaattaacttccttttggtttccccatttccccccattggcttattctaaaggaaatctaaagcaaaccaatgacataagggatctaaaagacatgcatgaagaaaaacagaagtagaaccaaaaaggttgttaacacagccatagtgagaagtgtctggctggaagtggatttggcctaactccacttggggccttcatattctaaaaataaggcattctctaatgcaaaggctttctgtctgcaaatatttaataaagatgactttagaacccaaaaaaaaaaaaaaaaaaaaaaaaaaaaaaaaaaaaaaaaaaaaaaaaaaaaaaaaaaaaaaaaaaaaaa

SEQ ID NO: 5396 - DNA, 1238 bp, Cricetulus griseus
gtggtggatgtagtagcaaatgaggtcatacttgggtttaaagcgtaatttggccgaaaggactgaagcactgcataacatctggctgggcaggggccagttatggtgacaaaagcatcattgagcaggctgaagacttcctccaggccagtcaccaacaaccagtgcaatatagcaaccctcacattgtatttgcattttacaacagtgtctctagtcccatggcagaaaagctgaaagatatgggcatatctgtaagaggagacattgtagccgtcaactctctgttaaatcaccctgaagagttagagctgagcgagagcgagttggatgatgagggccaagaacttctgcaggtaacaagagtagaccgagaaaatgtcctggctcatgttgcatttccaacagagatcaaggttgatgtatgcaaaagagtaaatctggacattactactttaatcacatatgtatctgccatgagttatggaggctgccactttatcttcaaagagaaagtactcacagaacaagcagagcaggagaggaaggagcaggttttacctcagctggaagcgttcatgaaggacaaggagttaattgcctgtgaatctgctgtcaaggattttcagtctattctagacaccttaggagggccaggagagagagagagggccactctactaattaaacgtatcagtgtggtgccagaccagccttctgagcgtgccttgagactggtggccagttcaaaaattaatagccgctcattaacgatttttgggacaggagataatctaaaagccatcaccatgactgccaatagtggctttgtcagagctgccaacaaccagggtgttaaattcagtgtgtttattcatcagcccagagcacttactgagagtaaagaggctttagctgtgcccttaccaaaagacttcaccaatgagagtgcacattagtggtatcctttaagtattgtcatggaaatacattatttataccaaaggctggccttcccatccatgttgggagaaaaaaagtttatagtaaaaataataatttaattacatcacaaactacattatagcaggtaagaacagaaatacatctgtataaggctttcattgatcttgcaatgcttttgtttgcttcagtagggctacagcctccactacaggtaattgcatatcatggaatatggctacatgattcttgatgtcaattaaatatctggagaa

SEQ ID NO: 5397 - DNA, 1238 bp, Cricetulus griseus
aaaccaccaccctctgggccacagcccaccagccaggccaatgatttattggatttgttgggaggaaatgacattacacctgttattccaactgtacccaccagcaaaccagcttctgctggtggaatcactccaggcatcccctccatcacagcatacagtaagaacggcttgaagatagaattcacctttgaacggtcaaacaccaaccccagtgtaacagtgataacgatacaggcctccaacagcacagagctagacatgacggactttgttttccaggctgcagtaccaaagacattccagctgcagcttctgtctcctagcagcagcgttgtcccagcatttaacacagggaccatcacgcaagtcattaaggttctgaacccacagaagcaacagctgcgaatgcggatcaagctcacatataatcacaagggctcagcaatgcaagatctagcagaagtgaacaatttcccccctcagtcctggcaatgagggtccagcaccattctcattcttatcccactcaatcaaaggaattctgggaaggaggttatgattgctggcaagaccccccaactgtaccatgggcacgaggagctgagagaactgtcgaggagggttttcctcaagttactgctgacattgaagcatcggtaaagactaatgtcctctcctctgctgttgaggctggctgcttctggaggctactttgcactcttccttctcttctcccttttccacactttacccctcccacatatgcagccagaatcaacattctctgggccactgaggcaatcagcaactggtctggaggagaggactggaattcatggcaagaaaacactcactctgtctctgcagcaaagagtggccctttctttctactgttgtatctctgtggactgggcaaggtgggtgtttgttcctcactagctggttaccatcataagtggaatggaattgtaacaatggacataagggagccctgcccttttctgctggttctcccaatgtttgaaagaggcattaggctcctgggagccttttctgtgcattgctgtatacacacagacacacatgtatgtatgtatgtttgttataaaagaaaactggttagaccttgaggttgtttgtaaacactggacagatggagttcaaagagcttttgttgagatttggcatgaaggttatggtgctctatttgtattagaaacttccaaggctcttcc

SEQ ID NO: 5398 - DNA, 1238 bp, Cricetulus griseus
gagtgctcggagagaaacggggtgttagttggtccggtgcggaaacgttgcttaggctaacacgagatgaccggttcaaacgagttcaagctcaaccagccacccgaggatggcatctcctcggtcaagttcagccccaacacctctcagttcctactggtctcctcctgggatacgtctgtgcgcctctacgatgtgcccgccaactccatgcgactcaaataccagcacactggtgctgtcttggactgcgctttctacgatccaacgcatgcctggagtggaggattagatcatcaactgaaaatgcacgatttgaacactgatcaagaaaatctggttggaactcacgatgcccctatcagatgtgtggagtactgtccggaagtgaatgtgatggttactggaagttgggatcagacagttaaactgtgggatcccagaactccttgtaatgctgggaccttctctcagcccgaaaaggtatacaccctgtcagtgtccggggacaggctgattgtgggtacagcaggccgccgagtgctggtgtgggacttgaggaatatgggctatgtgcagcagcgcagggagtccagcctgaagtaccagactcgctgcatccgtgccttcccaaacaagcagggttatgtgttgagctccattgaaggccgagtggcagttgaatacttggacccaagccctgaggttcagaagaagaagtatgccttcaagtgtcacaggctaaaggaaaacaacattgagcagatttacccagtcaacgccatttcctttcacaatatccacaatacatttgccacaggtggttctgatggatttgtaaatatttgggacccatttaacaaaaagcggctgtgccagttccatagataccccactagcattgcgtctcttgccttcagtaatgacggaactacgcttgcaatagcatcgtcatatatgtatgaaatggatgacacggagcatcctgaagatggtatcttcattcgccaagtgacagatgcagaaacaaagcccaagtccacgtaatcatatggtggaagttgtttctctgtggaaagctttgcttcctacaaacacttgcttctcccaagggctgctgtagtcattggagactccgtctagtgtgtggatctctgtttcctgtcataacagaaatgtctcttgtctactctgtaattgtttggggtggggaggcttcatgcccttgtacagtagtc

SEQ ID NO: 5399 - DNA, 1238 bp, Cricetulus griseus
cggcgtccgctgcgtctccggcatttgaatcccgcttccgccatctttccagcttcagtcggacgggcgcggagagtcttctggaaggatcgccgcgatggccgcccagggagagccgcaggtccaattcaagctcgtcctggtgggcgacggtggcaccgggaagacgacgttcgtgaagcgccacttgacgggcgagttcgagaagaagtatgtagccaccctgggcgtggaggtgcacccgctcgtcttccataccaacagaggacccattaaattcaacgtgtgggacacagccggccaggagaagtttgggggcctgcgcgatggctactacatccaagcccaatgtgccattataatgtttgatgtaacatcaagagtcacctacaagaatgtacctaactggcatagagatctggtacgggtgtgtgaaaacatccccattgtattgtgtggcaataaagtggatattaaggacagaaaagtgaaggcaaaatctattgtcttccaccgaaagaagaatcttcagtactatgacatttctgccaaaagtaactacaactttgaaaagcctttcctctggcttgccagaaagctcattggagaccctaacttggagtttgttgccatgcctgctcttgccccacctgaggtggtcatggacccagctttggcagcacagtacgagcatgatttagaggttgctcaaacgactgccctcccggatgaggatgatgacctgtgagacagtgaagctggagccctgcgtcagaagtctagttttataggcaactgtcctgtgatgtcagcggtgcagcgtgtgtgccaccttatttagctaagcagatcgtgtacttcattggatgctgaaggagatgaatgggcttcggagtgaatgtggcagttaaaacataccttctattttttggacttgcatatttagctgtttggaacacagttgtttccttcctgaatttcaaaaataagactgctacagtcacctcacactattcagtcagtggtgaaatcttgtttgttactgtcattcccattctttttgtttagaatcagaataaagttgtatttcaaataatctaaataagtgaatcatcccttgtttataagcattttaaaaccaacataaggaagcttgtgccatattatagttaacaatgcctttgcttattacctgaggtcaattcagttatgttctccttgtgcctaccttcacaaac

SEQ ID NO: 5400 - DNA, 1237 bp, Cricetulus griseus
gtacgagcgctacagcttccgcagcttcccgcgggacgagctgatgccgctcgagtcggcctaccgccacgcgctcgaccagtacggcggcgagcactgggcggagagcgtgagctacctggaggtgagcctgcggctgcaccgtctgctgcgcgacagcgaggccttctgccaccgcaactgcagcgcggccccgcccgcgcccgcgcccgccggccccgccagccacgccgagctgcgcctcttcggcggcgtgctgcgccgcgcgcagtgtctcaagcgctgcaagcagggcctgcccgccttccgccagtcgcagcccagccgcgcggtgctggccgactttcagcagcgcgagccctacaagttcctgcagttcgcatactttaaggccaatgacctcccgaaggccatcgctgcggctcatacctatctgctgaagcatcccgacgatgaaatgatgaagagaaacatggcatattacaagagcttgcctggagctgaggaccacattaaagacctggaaaccaagtcatatgagaacctgtttgtccgtgcagtgcgggcctacaatggtgagaactggaggacgtccgttatggacatggaactggccctccctgacttcttcaaagccttttatgaatgcctggcttcctgcgagggctccagggagattaaggacttcaaggacttctacctgtccatagcagatcattatgtagaagttctggaatgcaagattcagtgtgaggagaacctcaccccagtcataggaggctatcgcgtggagaaattcgtggctaccatgtaccactatttgcagtttgcttattataagttgaatgacctgaagaacgcggccccctgtgccgtcagctacctgctgttcgacaaggatgacaaggtcatgcagcagaacctggtctactatcagtaccacagggacaagtggggcctctcagacgagcatttccagcccagacccgaagcagttcagttcgttaatgtgactatgctgcagaaggaactgtacagctttgctcaggaacacctaatggatgacgatgagggagaggttgtggagtatgtggatgacctgttagagatggaagaggctggctagcctgcagcaactgaagagacttctcgtcagtgttcctttttcctcgagtgcctgggttgctgatacctcaaagtcttcccttttaaaggaagaaggaagccaccatctctc

SEQ ID NO: 5401 - DNA, 1237 bp, Cricetulus griseus
cgggagagcagtgctcgggtcgccttctgtgccttggtttcgtgacatacaatagaaggctatttggttcttacaactgctcaagttttgagatacacgatgaagcaagatgctacaagaaatgctgcctacactgtggactgtgaagattatgtacatgtggtagaatttaatccctttgagagtggggattcaggaaatctaattgcatatggtggcagtaattatgtggttattggcatgtgtacatttcaggaggaagaagcagacattgaaggaattcagtacaaaacactacggacatttcaccacggagtccgagttgatggcatagcctggagcccagagaccaaactcgattcactgcctccagtaatcaaattttgtacctcagctgctgatatgaagattagactatttacttcagatcttcaagataaaaatgaatataaggttttggagggtcattcagatttcattaatgacttggtgttccatcccaaggaaggccatgaaattgcaagtgtaagtgatgaccacacctgcaggatttggagcttggaaggaaagcagacggctcattttcttcttcattctcctggaatgagtgtgtgctggcaccctgaggaaactttcaagctgatggttgcagagaagaatggaatgatccggttttatgatctaatggcccaacaagcaattttatctcttcaatcagaacagacaccgttaatgtcagcacactggtgcttgaaaaacaccttcaaagttggtgctgtggccggaaatgattggattatttgggatatcactcggtccagttatcctcaagagacaagacctgttcacatggatcgagcacacttatttaggtggtctgcaattagtgaaaacttattcgcaaccactggctatcctggcaaaatggcaagtcagtttcaaattcatcatttaggacattctcagcccatcctcactggttctgtagctgtcggatctggtctttcctggcatagaacactcccactgtgtgcagttggaggagaccacaagctcttgttttgggtgacagaaatatgattttcctcagtatttttgatcttatactttgtatttttaatatatattttggagaaatccttatttttgtatccagtatactgtaaatctagaaatgtctcagttgtcttttctggtaaataaaatgatgaaaaacttagaaaaaaaaaaaaaaaaa

SEQ ID NO: 5402 - DNA, 1237 bp, Cricetulus griseus
tttttttttactacttctttttacaagttttgaatcagaaggaaagaggaaaaaaataaaaacaccaatacccagatttaaaaaaaagatcatagtcttaggagttcatctaaaccataataggaacttctcgcttatctcctattagctgtaccagtcagtgattaagtagaattacaagttgtataggctttattgtttattgctggtttatgaccttaataaagtgtaattatgtattaccagcagggtgtttttaactgtgactattgtataaaaaacaaatcttgatatccttcagaagcacatgaagtttgcaactctccaccctgcccatttttgtaaaactgcagtcatcctggaccttttgtgtagcatctcgtctatcgtgttttgtaattttctgtgagcacactaagagcaaaaaataaatgtgaataaaatgtacaaatttgtggtgttttttattgttctgaggctgacttctaggttaatttttaggaagaccttgcatgccatcagaagtacatgtggttgtggtttctgagatgccattttcaagctctgaagttcacaaatccgcagtgtcagactacatatgtaggaaggtcttgtactgtgtcagttgttaccatttatctacttttagttttttggaagattgaagtcaaacctggtaaccaaaggactgatttgtgggtctttcccactttaaccgacttgttcgaaaatccctagttggccaagtatggtgcctggtatgtagtaggactcaattgaaatggattctgaaaaataactcctgaagttagtagttgaaaatactgtgtagaaaatgattctatattgctgggtttgttcttttatcagctggggttattaagatgcattattttgattttaatcactgcctaaaacactctgggtggtattgatggagtggcggattttcctccaagtgactaaatacaatttgacatacttttcatccaaagttttgtacatcctgttgttttctaatggaaaaaatgttaatatggcttttttgtactactaaaaatagctttgagattaaggaaaataaataactcttgtacagttcagaatcgtgttattaaatctgtattggcagtgtgtacagtggcatttgctgtggttataaaacactcactctggattatcataatcatttggtccaattcctattgcttgtataataaagttttaccaactgata

SEQ ID NO: 5403 - DNA, 1237 bp, Cricetulus griseus
cgggatggcgtgcgggtgttggtggggtgtgtgttctgctcgttgagactacgcgcgtccgtaacgatggcggagggggataaccgcagcagcaacctgctggctgtggagactgcaggtctggaagagcagctgcaaggatggggagaagtgatgctgatggctgacaaagtccttcgatgggaaagagcctggtttccacctgccatcatgggtgttgtatccctgctgttcctgattatctattatctcgatccatctgtgctgtcaggtgtttcctgttttgttatgtttttgtgcctggctgactaccttgttcccattctagcaccaaggatttttggctctaataaatggaccactgaacaacagcaaagatttcatgaaatctgcagtaatctagtaaaaactcgacgcagagctgtgggctggtggaaacgcctcttttctctaaaggaagagaagcctaaaatgtacttcatgaccatgattgtttctcttgctgcggttgcttgggtggggcagcaagtccacaacttgcttcttacctaccttattgtgacttttatgctgttgcttcctggactaaaccaacacggaatcattttgaagtacattggaatggccaaaagggagataaacaagcttctcaagcaaaaagaaaagaaaaatgaataatgcagcttcggtggagtgcgccctgcccctgggaagtggtgaactttgctctttcgtacagtgaactatgacttagggtaatagttgatgtttgctttagctatattcaaggtagtggtctgtggctacaggaagctggttctactgtctgctttgcagggttgtagctgagagcagactgctgacgggtgactgctctgtgtagcgtctgtaactccttacttaagcttactgtgatcacatgccctttcagtaggtagacttttagagcagttgaaatctgcaggactgaacctctgagggccaaaataggacacattggggaacaagtctttagcccatgaactagctataacatagtttgtggatccattgcactgatgctgtgaagcctgcaccttgggtctgcctctgttttctcacctccccagcactgtaaacagtggcacctgttgtagcatgtttggttttttcttaatgtttcatgacatccaccttaattatacatgtcttcttgtaaataagcctgtcttcctacctggagttttgtgtgtgtgtg

SEQ ID NO: 5404 - DNA, 1236 bp, Cricetulus griseus
  modified_base (1218)..(1218): a, c, t, g, unknown or other
  modified_base (1228)..(1228): a, c, t, g, unknown or other
cttcactgatgtcgtggcgctcagaggcaaaaagttggttctctaagaggccctgggactgaagccgcggtccggcgaccctggccctttcctacccactcctcctcgcccgcctttccccctcccggcaggatgaggcgtgcaggcctgggtgaaggaggacctcctggcaactatgggaactatggctatgctggtagtggctataatgcctgtgaagaagaaaacgacagactcactgaaagtctgagaagcaaagtgactgccatcaaatctctttccattgaaataggccatgaagttaaaaatcaaaacaaactactagctgaaatggattcacagtttgattctacaactggatttctaggtaaaaccatgggaagactgaagattttgtccagaggaagccaaacaaaattgctatgctatatgatgttgttttcattgtttgtcttttttgtcatttactggattattaaactgaggtgatttgcaagttagtgtggtcttggaatctgttgcagttaatgtcttggggttccactttgatagccagcatcccaacattcttaatgacctttttcattgaagattactggagctttcctctttcagaaatcatactataccatataatgtttttgactactgttccctattgactcattttgatccctgttttcaggggtattgaagtagcctgaagtcattgtgactgtacctgaatccttcgtataaagacttccttgagttaaagctgttgacatatttctatgggagcctactatatatacatgtgtatcaacttaggtattttttattttaatgataaattccattgacctgctttagaatagttttctggtgtctagctgcttaggtggaacatttgatgattatttgtgtcagaataatgtgaagctcagtgattgttaaaccctgtgtagaaatgaaatgttcaggaaaatcaatcgcctttgttttcccatgtgctcaaacagggactgaaaatatgcaggcatcgaatccagacttcagaggattgttgttctgctccattttacttgcttacagaaatcaaaacgcaaggtggatttaagtaaaaataaatattcaaatattataaaccattctgtattgctcctactttagacatttgcctatttctaagttcaaataaacttttatgaaaataaaaataaaaaaaaaaaaaaaaanaaaaaaaaanaaaaaaaa

SEQ ID NO: 5405 - DNA, 1236 bp, Cricetulus griseus
ctggagacgctgtttctttacaaagggaaagctaagttcatttcaaggcattcgaaatgggaaagactattattacattttgggaattgaaaaaggagctacagatgaagacattaaaaaggcttaccgaaagcaagccctcagattccacccggacaagaacaaatccccgcaagcagaggagaaaatttaaagaggtcgcagaagcctatgaagtactgagtgatcctaaaaagagagagatatatgatcagtttgggggaaggaaggggccggaaaggaggagcggggaggtactgatggacaaggcggtaccttcaggtacacctttcacggagaccctcatgccacgtttgcagccttttttggaggttccaacccctttgaaattttctttggaagacggatgggtggaggtcgagacaatgaagaaatggaaatagatggtgacccctttagtgcctttggattcagcatgaacggatatcccagagacaggaattctgtgggaccctcccgtctcaaacaagaccctcctgttatccatgaacttagagtatcacttgaagaaatatttagtggctgtaccaaacgcatgaagatttctcgtaaaagattaaaccctgacggaaggagttacagatctgaggacaaaattctcaccatcgatattaaaaaagggtggaaagaaggcaccaaaatcacttttccaagggaaggtgatgaaacaccaaatagtattccagcagacattgtttttattattaaagacaaagaacaccccaaatttaaaagagacggatcaaatatagtttacaccgctaagatcagtttgcgggaggcattgtgtggctgctcaattaatgtgccaacgatggatggaagaaatatacctatgtcaatcagtgatattgtgaaacctgggatgaggaggagaattattggatatgggctgccgtttccaaagaaccctgaccaacgcggtgacctgctggtagagtttgaagtgtctttccctgatgccatatcctcctcctccaaagagatccttaggaagcacctccctgcctcgtaggatgagaagaaccctgctactcatattttgataagacactgaaaatataagaggactggcacggcagtggacggatgtgaattctgtatagagatgtgtaaactgctgagggttcattaaattgcatggctagagacggctcagatgggcaaagtggattt

SEQ ID NO: 5406 - DNA, 1236 bp, Cricetulus griseus
ggaggcttgggtgtgtgtggcgcgctgtcttcccgcccgcgtcagggacctgcccgactcagcggctgccatggcatcagatgaaggcaagcttttcgtgggagggctgagcttcgacaccaatgagcaggcgctggagcaggtcttctccaagtacgggcagatctctgaagtggtggtggtaaaggacagagagacccagcgatccagaggctttgggtttgttacctttgagaacatcgatgatgctaaagacgccatgatggctatgaatgggaagtctgtggatgggcggcagatccgagtcgaccaggctggcaagtcttctgacaaccggtcccgcggatatcgcggtggctccgctggaggccgaggcttcttccgcgggggtcgcagccggggccgtgggttctccagaggtggaggagaccggggctatggaggtggccgctttgagtcccggagtgggggttacggaggctccagagactactatgccagccggagtcagggtggcagctatggttatcggagctcgggcgggtcctacagagacagctatgacagttatgctacacacaacgagtaaaagccctccgcgtccagatcgtccttccatggctgtaattaagatgggggagcttcgctgaacgttgtgtagtgagcaccttgtccccacttttgtagtcctttcggttctgacccatcaacagcctgcttctgaccaagatggcctcgtgaccagacttttctttttaaggaagcactgtctttttaagcgttataaaaaaacgttttggaaagcacttcagattttactttttttaccatgagccatgggtttttgttttctctaaattgtcggggttgtgtgggttttggttacttgtttttgttttttcgggtttttcagttgtggtgttgttttccttttgtgtggtcgcccattaagtctggcggcccatacttcctgagatgaaatggactcaatttgagcaagccatggctctctagccccccagctcttctgcagagcgcagcaggtcccgcccatcgggcacaggtcctggcccgtggggacgtgcagcagtccgggaggctgtggaagtgtttatttatattgtccttttttaccgaagatatgcatactccatcgatgttgtattcacagtggctgaggaattcttgtacccagtttctttggcttcacgaagccgattaaaagaccgtgtgaaa

SEQ ID NO: 5407 - DNA, 1236 bp, Cricetulus griseus
  modified_base (541)..(541): a, c, t, g, unknown or other
gctctcagtcctttggctattccaaatgctgctgcagcagctgctgcagctgccgctggccgagtgggtatgcctggagtctcagctggtggcaatacagtcctgttggttagcaatttaaatgaagagatggttacgccccaaagtctgtttaccctcttcggtgtttatggagatgtgcagcgcgtgaagattttgtacaataagaaagacagtgctctgatacagatggctgatgggaaccagtcacagctcgccatgaatcatcttaatgggcagaaaatgtatggaaaattatacgtgttactctctctaaacatcagactgtgcaactacctcgagagggacttgatgatcaagggctaacaaaagattttggtaattccccattgcaccgttttaaaaaacctggatccaaaaattttcaaaacatttttcctccttctgccaccctgcacctgtctaatatccctccttctgtagcagatggaagattatgggcaaatcacattgtttggtgtcatcacctattgactgttcngaaaaagtggggaccagagtttgatttttttttcatgctgttatcattccttggttataaaatgaaatggcatatgtaaaggcagagttactaactgctatgtttcatctgttctataggggagccatttttattgtctgttttattatttttagttttgattttgcttttttttttttttaactttagttgacatacgtgccttacaaaggaaaactagtgttgctgttgtgcatttactaggacaaaagaattgggccttttgtatctcacaaatctggtctagattcagttatgaatgtaggcattagttaaaattaacaagatgcagagtattaatttcttaagacaacaagtgatttctgtaagtttgagccctatgtggaaagcgttgtggaaccttaacctttttgtacacactcttgtgggacgtatcatataaatgtcagcactaagtaatgtcttgtttgtggctgaatatttttcgtagatgtttttgaagttgacatgacttatgtgcatttaaatatatattgccatccttagtttgtaattaaggaattttggaaaatggttgtggatttctgagcatgtgcagactggtctagctagttcaggaactggtgcatgtatttttcaaagacaaagaaagtgtactgcgaaaacttgcaggaagattaattttgtggcagttt

SEQ ID NO: 5408 - DNA, 1235 bp, Cricetulus griseus
gaataagttgtctaattcagcttttgaattcttctggtgaagaagctcaatcaggacttacagtcttgctttgtgaaattctcactgcagtgtatcttagtctgttcattcatgggctggcaacacattctagtaatgaactatttcggattgtagcccatcccctaaatgaaaatatgtggtctgcagtatttggtggaggagtacatgtctgcgggtcctgcaatactccgtcacaaagctttactagaacctacaaacactcctttcaaatccaaaaatcatctggcactgtctgtgaagaggctttggcagtacttggtgaaacaggaagaaattcaagaaacttttatcagaaatatgttcacaaagaaacgatgtctaaacgagatagaggcagacttgggatatcctggaggtaaagcaagaattattcataaggaatctgatatcattactgcctttgctgttaataaagcaaatagaaattgcatagcaattgcctccagccatgatgtacaagaactggatgtttctggaattctggccacacagatctatacatgggtggatgatgatgcagaaacagaaactaaaggatcagaagacttcttggtgatactcgtgatgatttagcagctgtccaaggttcaaccccatacacgcacagcaaccctggtatctggcttggcagtgtcataacaagacagccaatgattttgtcttcgttagttcttcctctctgatagctacagctggtctttcaactgacaatagaaacatatgtctatgggatactctagtagcacctaccaatagtttagtccatgcttttacctgccatgatagtggagccacagttttagcatatgctcccaaaccatcaactactaatatcaggtggcagaaaaggtttcacatgtatatttgaccttcgacaacgcatacttttatcagtgaacatgctcgacagtctatttttagaaatattggaactggagtcaagttgagacaggaccagcaaatcacattttctcttgtggagctgatggaacaatgaaaatgaggatactgccggatcagtttagccctttaaacgaggtgttaaaaaatgatgtaaaattgatgctgtaacattttcacaagagggtgtgtgatttattacctgctttgtggaagtggccaacagatacagtatgcagtaatcccctgtactaagggtaagctaatgcttt

SEQ ID NO: 5409 - DNA, 1235 bp, Cricetulus griseus
ggctggcgccgaccgtcttccgctcatcgcagagcaggaccggtggggacagcaatgagctgggagttgctgctctggctgctggcactgtgtgcgctgatcctgcccctggtgcagttcctgcgcttcctgcgggccgatgccgacctgacgttgttatgggccgagtggcaagggcgacgcccagaatgggagctgactgacatggtggtgtgggtgactggagcatccagtggcattggcgaggagctggctctccagttatctaaacttggagtctctctggtactgtcagcccgaagggtgcaggagctggagcgggtgaagagaaggtgcctggagactggcaatttaaaagaaaaagatatactggttttgccccttgacctgaccgacacagattcccatgaggcagctaccaaagccgttctgcaggagtttggtaaaattgacattttggtcaacaatggtggaagatcccagcgttccttagttctagaaaccaacctggatgtcttcaaggagctgataaatttgaactacttagggacggtgtccttgaccaagtgcgttctgcctcacatggtagagaggaaacaagggaagattgttactgtgaacagcgctgcggggattgcatctgtggccctttccagtgggtactgtgccagcaaacatgctctccggggctttttcaatgctctccaatgtgagcttatccaatatccaggaataacattttgcaacgtttacccagggcctgtgcagtctgacattgtgaagaatgccctaactgaagaagtaactaagcccatgaggaatggtatagatcagtcttacaagatgccaacgagtcgctgtgtccggctaatgctaatctccatggccaatgatttgaaggaagtttggatctccgatcaccctgtcttgatggggacatacatgtggcagtatatgccaacctgggccttatggctgacctccaagttggggaagaaaagaatacaaaactttaagaatggtttggatccagacacatcttataacatctggaagacaaagagggattgaaacaacccctctggatgtcggagccacttgttgagaatgacaaacagcattagtaagcttacacacagaagacgggtccgtgactgctttctgctgtaatttttgatacaaatttctattcaatatgtaatgaataataaataaaaccttgccctgtatcctgc

SEQ ID NO: 5410 - DNA, 1235 bp, Cricetulus griseus
ggcggcggcgggcagcccggcttcgctcgagtccgctccgcgcatcatgcggctggtggccgaatgcagtggctccagagcccgggcgggcgagctgcggctgccgcacggcactgtggccaccccggtgttcatgcctgtggggacacaggccaccatgaagggcatcacggcggagcagctgcacggcctgggttgccgcctctgcctgggcaacacctaccacctggggctgaggccgggcccggagctgatccagaaggcccgcggcctccacggcttcatggactggccgcacaacctcctcacggacagtggcggcttccagatggtgtccctgttctccctgtccgaggtgacggaggagggcgtccgcttccgctcgccctacgacggccaagagatgctgttgagcccggagaggtccgtgcagatccagaacgccctgggctctgacatcatcatgcagttggatgacgtggtgagcagcacagtgacaggcccccgagtggaggaggccatgcacaggtcagtccgctggctagacaccagggtggactgaatgccgatctgcggaccacttgcctgaaagagatgaccaagagggatgtgccaggctttgccatcggaggtctgagtgggggagagagcaaggaacagttctggaagatggtggcgttaagcacctccatgctgcctaaggacaagcccagatacctgatgggggttggctatgccactgacatggtagtctgcgtggctcttggatgtgacatgttcgactgtgtataccccacacggacagcgcgctttggctctgctcttgtgcccactgggaacctgcagttgaagaagaagcagtatgccaaggatttcagtcccataaactctgagtgtccctgtcccacctgccaaaagcacagccgcgccttcctgcatgccctactgcacagtgacaacaccgcggcactgcaccatctcactgtgcacaacattgcctatcagctgcagctcctgagcaaccttcgaagcagcatcttggagcagcgctttcctgactttgtgcggaacttcatgcgcaccatgtatggtgaccacagcctttgtcctgcctgggccgttgaagcactggcctccgtgggaatcacactcacatgacctggttgcctgggagggacactggggtagtgggggaatactgaaggattcttactttttaaaaatttttgttacta

SEQ ID NO: 5411 - DNA, 1234 bp, Cricetulus griseus
tccatcatgatcgagaggcccgtaaacgagaaactagctccggcagatggataaaaatgaaaagtaccacgagtggcgctttcagcggcaacacagaagtctcttgacaggaagaagttcatgaaagttgctgaaatgggaatgccaaataagaagtttctgcttaagcaaaacccttacagaaacaagagtccttcagccaaaccaaggacagaatgcacctgttcataggctactttgtagacaaggaacccctaagacatcagtgaagggggttgtgcaaaatagacagaagccttcacagagcagagtgcctaacagagcgcctgtgtcaggagtatatgcaggaaaaatccaaagaaagcggccaaatgttgcgacaatttaagaagacagcattcactgggatgaagcaggggaggagggcatgttgttacccacattccattccttggccaggacttttgttttagccttggactctgtttgttcaggcaaagggacagcaagggctgagcattgtatgtaaaatctggtcagtttggggaattcctgcctcattttcctataaatattagtttgggtgttgatgattagcatttagtaattgcctcatctctgagcttagcatgtataaacatactatatgtgaccaagagaatatgattttatgaaagagaatgttacttttcatataattctaaaaagggctttgtgcttcttacataacattgggattgtgtatatttgatccttataacttgaattttaaagatattagtattttgaaaacgcctatatatattaataaccttttaggaatatggagataaatactgtttttctgatttcctcccatctgagatttgacttttatacccagccatgattacaaagtaataacccactctgggtatgaactttgtttctttattgagacttaaccatttattgcatagaagaagatgtgtatattactatgaattagctaaagaaaagtgcgtttggaaagctacaactacttttagattaaggatgagaaactggagtatgtttttaatttcaaggtaaaagtttgtttgttttacatttgaatgttaacaattttctctcagaaaagtgccaggcactgttttgtgcttttgaagttttatttatatgtgttatgcttattgtaatttttactttgactggaatgtctattaatgtaaattgtatttattttatactttga

SEQ ID NO: 5412 - DNA, 1234 bp, Cricetulus griseus
agctccgcgctgctctccgcccgcccgctggcacccgcgtgccgcccatccccggcccatggccaagcggcgtgcggctgagccgctcacgttccgcgtgccttggaagcggctcttgctcagcgacttccccgaggagccgccgctctgggtcccgccgtctggggcggctcggtcccgcaaacgccagggggacgcggggatcatggcggagcctgcgcctgctccccgcaagcgacgaggctgcggggacggcggccaggagcgagagggcccccggcctggagcccggagagccacctcccggcgagcaggaggaaacccgggcgggcggcggcggacgcggtggggagtgcggacagcccgcggggagccgacggggcgcccatccagcccagtgaagagttttggcagtataatacattccagtactggaggaaccctctgccacctattgatctagcagctcttgaagacttgtgtgcaaatgcggatggcctgacagaaacacttcaggacaagaatgaagtagttgaaattgacatggagccctgacaggaggagctgaagaagcaggattctttgaatttgagacaactaaaggaaatgttattttccatacttgacatgatactgttatcaaacctgaaaaatgaggaagagttttgaggctaaataactaattactactgaatatcctaatggagatttttgttaaggatatagtatagctgggggcaaaatactttgtggatgcatttttaatgaatagatttttttgttcatgctctaacttggaaggtgcttatcttggaaaagggggtgttggcagctttagaggaagcactcagctctttcattcgtgctctggccaatgtccctctgcaccagaaagcttatctgtggtactccgaatgaattcatttatatgactgatgctaagaaaatactttctagtacattttattggctcctcttggttgaacaaatagacttgagtatctatgcaaaattaaaatatgagattgtttcttaaagctaatattgttttaaaagagtgtaaatttaaattaatgagactttccatttgggtaattagttttaaccttcagtatttgctgtttattaaaatgctatcggcaatggatgcagccaaaagctgtataaagaacagtaagaagtagatgcctgtccctcctccccttttctgagataaaagaaaggatatggtcag

SEQ ID NO: 5413 - DNA, 1234 bp, Cricetulus griseus
gatgtcgctgatcaagaaaagaaagcttgagtcggggggcggcggcggcgcaggaggggagggagccgaggaggaagatggcggggagcaggaggcagccccgccacgaccccggaggaccaagcgcgagcgggaccagctgtactacgagtgctactccgacgtctcggtccacgaggagatgatcgccgaccgcgtccgcaccgacgcctaccgcctgggcatcctgcggaactgggccgcgctgcgaggcaagaccgtgctggacgtgggcgcgggcaccggcattctaagcatcttctgcgcccaggccggcgcccggcgcgtgtacgccgtggaggccagcgccatctggcaacaggcccgggaggtagtgcggctcaacgggttggaagaccgcgtgcacgtcctgccgggccccgtggagacggtggagctgccggagcaggtggacgccatcgtgagcgagtggatgggctacgggctcctgcacgagtccatgctgagctccgtgctccacgcgcggaccaagtggctgaaggaaggcggtctcctcctgccggcttccgcggagcttttcgtggccccgattagcgaccagatgctggaatggcgtctgggtttctggagccaggtgaagcagcactatggcgtggacatgagctgcctggaaagcttcgccacgcgctgcctcatgggccactcggagatcgtggtgcagggtctgtccggcgaggacgtgctggcccggccgcagcgctttgcccagctcgagctggcccgcgccggcctggagcaggagctggaggccggtgtaggcgggcgcttccgctgcagctgctatggctcggcgcctctgcacggttttgccatctggttccaggtgaccttccctggaggggactcggagaaacctctggtgctgtccacctcgccttttcacccggccacgcactggaagcaggcgctcctctacctgaatgagccggtgccggtggaacaagacacggacatttctggagagatcactctgctgccctcccgggacaacccccgaacgtctgcgcgtcctcttgcgctacaaagtgggggaccaggaggaaaagaccaaagactttgccatggaggactgagccttgccttttctcccacccaccttcttcggaaggtccgaagaggaagggagatttccctcatttctgtggcaaataaaatggcattctcactttttata

SEQ ID NO: 5414 - DNA, 1234 bp, Cricetulus griseus
  modified_base (184)..(184): a, c, t, g, unknown or other
  modified_base (197)..(197): a, c, t, g, unknown or other
caacctctaaagttcaggaaaggcagaacagagtttgcactactgtagcaattgccattgttgctgaaacatgctcacccttcacagtactccctgccttaatgaatgaatacagagttcctgaacttaatgtgcagaatggagtgttaaaagtcactctccttcttgtttgagtatattggtnagattgggaaaanctacatctatgctgtaacgcacatgtcacttggtgtgtattggatttggctgtgaagattctctgaatcacttaattgaactatgtatggcctaatgtgtttgagacatctccacatgtaatccaggcagttatgggagctctggagggcctgagagttgccattggaccatgcagaatgttgcagtattgcttacagggtctgtttcacccagctcggaaagtcagagatgtgtattggaaaatttacaactccatctacattggctcccaggatgctctcatagcacattacccaagaatctacaatgatgataagaacacctatattcgttatgaacttgactatatcttgtaattttattttgtgtctaatacacagctgtttcacaccttaaacttgctttgatctgatgatataaacttgtaaaacattagcagatcagtatagagctggtcatagaggaggggtagaaatccagtagcatgaataacttttttttgtttgatgggaatgtttaattgagaaataaacattacatagttacaaaaatgctaatttgtgtgtgttttttggatataacttgtaaaatgcagaactttggtaaagtattggtttgtgtagaataagtggctttatttcattttctgtcactagtttattatggaacatagttagcagaacacagactataaagtgatggcctctttgtcaaaagtcccttgttttgttgatgaagagagtacttttggggtgctcccctcaatgtagcataatcattccatcaccatagaaaagtagcacttttactgaactgtctgaatattgttttgtgcttacatagcacctttcacctcttgatttctcaaaatgctttatgaacgggcataaaggatgtattttaaatcatgtccaactcttgatgggcctgtgtttagaaaggggaaaagctgtctatattgtatttttaaaatttgttgtatggtgccctgtgagcatcatgtaccaccagataaataaaatttattatatctaaa

SEQ ID NO: 5415 - DNA, 1234 bp, Cricetulus griseus
gaaaacgccactttaaaagccgagctgctctctctcaagttaaagtttggtttaattagctccacggcatatgcccaggaaatccagaaactcagtaattccacagctgtgtactttcaggactaccagacatccaaggctactgtggagctcgtttgtggatgagcatgaacccacgatggtagctgggagctgcatctcggtcatcaaacactctccacagagctctctgtccgatgtgtccgaggtgtcctctgtggagcacacacaggaaagccctgctcagggaggctgccggagccctgagaacaagttccctgtgatcaagcaggagccggtggagttggagagctttgccagggagtccgagggaggaacggggtgcctatgccacctccatctaccagagctacatgggcagttccttccccacctactcccactccccacccctcctgcaggtccatggctccaccagcaactccccgagaacctcagaggccgatgagggtgtcgtgggcaagtcctctgacggagaagatgaacagcaggtgcccaagggccccatccattccccagtggaactgcagcgggtgcacgccacagtggtgaaggttccagaagtgcacccttccgccttgccacacaagctccgaatcaaggccaaggccatgcagatcaaagtggaggctttggacagcgagtttgaaggcatgcagaaactctcctcacctgcagatgtgatagccaaaagacactttgacctggagaagcacagcaccccaggtatggttcattcctccctcactcctttctcagtgcaggtgacgaacattcaagattggtccctcaaaccagagcactggcaccacaaagaactgaacggcaaaactcagagtagcttcaaaacaggagtgctggaagtcaaagacagtggctataagatttccgaggctgagagtttgtatttgaagcaggggatggcaaacttgtctgcagaggtggtctcgctcaagagattcatagccacacaacccatctcagcctcagactccaggtaaatgcctgccaactgagctgtgcgtggaggagggtgctgtgggtaccatgccgaatctccactggacctctgatgtcatttcactgtagtgtgcacaacggtgtctgtctggtgtccttgtgtgcacacgctgaagtacttgatcgccctcactctgcctggtgtatagtcaga

SEQ ID NO: 5416 - DNA, 1233 bp, Cricetulus griseus
atggagcccgtagggctctgcggcttctgcccaggcggggaagctttgccggcgcgctacacctgcccgcgctgcaacgcgccctactgctcgctgcgctgctaccgggcgcatggctcctgcgccgaagacttctaccgcgaccaggtgctgcgagagctccgcggccggagtgcctctcccagccgtctggcgggagcactacgccggctacgcgaacaacgggagaccgaggatgagcccgaggaaataggcctcaggcccggcccgcggccgaacggcctttctggactctgggaaagcttgtcaccggctgagaaggcggcgttcgagcggctgctgagccgtggcgatgctggacgccttctgcccccgtggagaccctggtggtggggccgcggggtggcccgcgatttatggaggagttggatcgtgccccgggcagggatctttcggagccggagaccgccccagagagcaccgcgcccgaatctgtggatgatgccgccgcggtgcctcttgctgaagactcagctgccgccgtgccgcccgcagtgccctcccgtatcccagcgctggccagcctgagccgctgcccgccctcgccactcgtgcgattccagctgcccaatgtgctgttcgcctacgctcacactctcgccctgtatcatggaggggacgacgacgctctactctctgatttctgtgccacactgctcgatgtttctggagccctgggcgcccagcaagtctttgactctacggaggaagccctgcaggccgcagcccacgtgctggaagcgggtgaacacccacctgggcccttgggtacgcggggtgctatgcaagaggttgctcgtattctgctgggcgagggtcctatcaaccagaaaggctacacgctgacagcactggggcacctggcccaaaccctgggccgagcccggaaacaggctgtggttagcgaagaacgaaatcgcctttaccgggctcggaagaagtgccagttcctcctagcctggaccaacgaaaatgaggttgctctcacaccactggctctagactgtgccagggtccaccgagcccatgctgtcacagccgaggagatggcaacccttactggggagctggagcggctttggggaggcccggtaccacctgctccaaggactctcattgaggagctccctggctgagctgggtgtgtggtattaataaagctgtcactggtct

SEQ ID NO: 5417 - DNA, 1233 bp, Cricetulus griseus
gggacggggcggggccggcgaagtactgtgcctcgttgtcccgggacgccgggggacaccgcgcagcggctggcaccatgaagatctggacttcggagcacgtctttgaccatccatgggaaatggttaccacggctgcaatgcagaaataccccaaccccatgaatcccagtgtagtgggcgttgacgtgctggacagacatgtggatccctctggaaagctgcacagccacagactcctcagcacagagtggggcctgccttccattgtgaagtctcttattggtgccgcaagaacaaaaacgtacgtgcaggagcactctgtggtcgacccggtaaagaagacaatggagctcaagtccaccaatatctcatttacaaatatggtctcagtagacgagaggctcacatacaagccgcacccccaggacccagagaaaactgtcttgacccaggaagccatcatcaccgtgaaaggggtcagcctcagcagctaccttgaaggactcatggcaagcaccatatcttccaatgctaacaaaggccgagaagcaatggaatgggtgatccataaactgaacgctgagattgaagacttggcagcatcagcaagaggaagcatacggacgccgatggcagccgcggcagccttggtggaaaaatgacagtggagatgggtgtgcagcttcagggccccaggactctccaagctgacatcatatttatttgttatttaaaagatacggctattttaggtagagtctattatttctttttaatgagctggggtaaggctgtgacttttgatcaaagcaaaagcagggactggaacagtatctgggtatggaccaaccagaagaaaggccggccgccctcaagtccacacagttgcccgctgctgtgaactggaaccacctgcccgaggaactcaactttaaaaaaagaaactgtataatttcaaatgccattaatttgtataaaataacttgccctcttggaaaccagtgtttggatttggtacttaaatgatatttttggagtgcaaattagcactaaggtgatatatgactccagcaaaaaattttaattgtattaacgggtactgtattaatttgccaaagttttgtgacttagtaaaggcattcccttccttgaatttgtactttgtgatttcgcatgctgtactgtgggctggttatgttaactgaaaaataaagtcattacctgagtgtc

SEQ ID NO: 5418 - DNA, 1233 bp, Cricetulus griseus
aacggaagcagatatctcacaagaagcagagtctgtcctgtgattctccagatggaaatggactaccagggagggggcaggtgctgtgaggtcaggcaggatgatagcaatgtgtactacttagtgcatggagcctggatttgtgaagaccctgcctggcccaaagtcttgctgtcactccagcacctcttctaatgtgcaatggacaacttccagtatagtgtccagctcagtgatcgagagtgggccgagttctcagccactgttgatgagtgtggcctcttgcaggctggcctggcctctggtgacgagctcttgtccagtgacattggaagtgacattggaagtgacagtggaagcagcccccctgggcccccacccctcttcactgggcagctggctccccaggggaggggacaacagggctgtgagttggaggacgtggctgctcagcagctggtcagcaggtcctcaggagagccttgcccaggtcctgtccaagtccccaagaagaagaaagtacgattctccatggctatacccagccatgaagagtcaggatcaggcgaacctacaggccacccttcctaaccccagactggcccccagctctcaggacagcatcagggagccgtgggggctctgcagcctgggatgctgtggctgttgggccccgtcttccccagcctcggatccttaagcacctgcctcctcctgtatcctctgtttcagcagagcctgagcctggaagctgctatgcagtgactctcgctgctaggagccaggctggcctggtgaagcatgggacatgggagttaacccagttgacagaacaagatgttgctcttctctccatcctttgatccctgtcttctgaggcatctaggaaggagccagtatcctaggtgctgacttacttggactcggcctatgggtccagccagtggctaaggccaagtccattttccatacctgagagtgtgccctattgaaaggcaggcttggctgacaagggtcatgatccctgaggcactacagccacagctttcctaggcctggcctgagtcaatgagtctagaatagtgggtctcaaccttcctaatgttgcaaccctttaatacagttcctcatgttgtagtgacccccaaccataaaattatttttattgtgacttcatagctgtaattttgctactgttatgaatcataatataaatatttttggagctagagg

SEQ ID NO: 5419 - DNA, 1233 bp, Cricetulus griseus
  modified_base (1173)..(1173): a, c, t, g, unknown or other
cctctggaccagaacagagaaaagtagccaagaagaggacatttagtgacaacgcttctcatcaggaggacatcaagcataaatggaaagctaaggaggtagctgtcgtcttgaatcagtcctcacctactgaggaagacatctggtttgatgatgtggatccagatgatattgaggctgccataggcccagaggcagccatgctggtacggaagcggctgggacagaagagcaagagtaccatctccctggtgaaggaacaggcctttggcggcctgacaaaagccttggccctggattgtgagatggtaggcgtgggccccaagggggaagagagcatcgcagcccgtgtgtccatcgtgaaccagtatgggaaatgtgtttatgacaagtacgtcaagccaactgagccggtgacagactacaggacagcagtcagtgggatacggcctgagaacctgaagcagggagaagaatttgaagtcgtgaagaaggaagtggcagaaatgttgaagggcagaaccctggttgggcacgcgctgcacaatgatttaaaggttctgttccttgatcatccaaagaagaaaatcagggatacccaaaaattcaaacctttcagaagtcaagtaaggagtggaaagccatctctgaaacaactttctgagaaaattctggggatcagggtccagcaggcagagcattgttcggtccaggatgcccaggcagcgatgaggctttacatcatggcaaaacgggagtgggagagcattgctgcagaccggcgcccccagctcctgcacctgtgtgttgaggtagactagtcagataccaggacagaaatcagggatgtgaggttaacaggacaggaaggagagcattggaatggatgaatgttctgcagtgtctatgtttgctgaccatctgtactaccacttaacaatgaacacagctggattcagccagggcactcagcaccttcccctaaggagaccaaatgtcttctcttgtgggtaatgggacaagtactgctgcacttaagggatccaggctaagggccttcagtctgctgcaaaccaatctgtctaatacagcagctgcccagtgaggactttcttaaagctactgtgctggaggtactttctcactcctatgtcctttgcttggcaaaaaaanaaaaaaaaaaaaaaaaaaaaaaaaaaaaaaaaaaaaaaaaaaaaaaaaaaaaaaaaaaaa

SEQ ID NO: 5420 - DNA, 1232 bp, Cricetulus griseus
ccatccacgccttcccattggctttggggcaccaactgaaggacaaggaactcgagcagattcttatctgggtagaggaattcccaagtgcctgcttacagtggctctcagggagcaaggcacgagtcttgctctatgacgctgactatgtgaagatgattctgggggagatcagatccaaaggcttctggaatttatggactctttgctccctggattggttacggtttgcttctgttgaatgggaagaagtggttccagcaccggcggatgttgaccccagctttccattatgacatcctcaaaccctatgtcagaatcatggcggactctgtcaatacaatgctagacagatgggagaagcttgatggtgagaactgccctctggagatctttcactatatctcttcaatgacactggacactgttatgaagtgtgctttcagtcaccagggcagtgtccaactggatgaaaattccaggtcctacactaaggctgttgaggatctgaacagccttgctttctttcgaatgaggagtgccttctatgagaataacaccatctataaaatgtcctctgatggccgttggttctaccgtgcctgccagcttgctcatgagcacacagatggagtgatcaagatgaggaaggctcagctgcagaatgaggaagagctggagagggtcaagaagaagaggcgcttggatttcctggacatcctcttgtttgccaaaatggaggatgggagcagcttgtctgatgaggacctgcgtgcagaggtggatacattcatgtttgaaggtcatgataccacagccagtggaatatcctggattttctatgctctggccacacaccctgaataccagcagagatgcagggaagaggtgcagagcatcctgggagatggaacctctgtcacctgggatcacctggaccagatgccctacactaccatgtgcatcaaggaggccctgaggctctacccaccagtaccaattgttagtcgagagctcaacacacctatcaccttcccagatggacgctccttacctaaaggtatcacagttgcaatctccatttatggtcttcaccataatccaagtttatggccaaatcctaaggagtttgacccatctagatttgcaccagattcttctcggcacagctatgctttcctgcccttctcaggaggagcaaggaattgcattgggaaacagtttgctatgaa

SEQ ID NO: 5421 - DNA, 1232 bp, Cricetulus griseus
ccatccagccctgagaagcgtggagctggaccgtctgcccacctggcaacctgtgggcaagaacctcaccctgcgctgcctggtggatggtgggacaccacggagccaactctccgtcaagctgctccgaggtggggaggtgctgcaccaggagccagtgggtgtggactccaggaaccccaaggaggtcacagtcacggtgctggcaagcagagatgaccacggagccaatttctcatgtcgcacagaactggacctcaggccacaagggctagcactgttcccgaatgtctctgtgattaggcagctctggacttttgaccttcctgtgaccgagccgaagcttgacaccccagacctcctggaggtgggcacggtgcagaaagtgatgtgctccctcggaggcctgtttcctgccgctgaagcccggataactctggagctgggaggccacacactgacctccaagagcacaaaccacagagacttggtgtcagccaccgccttggtgactgcggagatggagggaactcagcagctgcgctgtgtcttggagctggcagaccagatcctgaaggcagagaggactttgagcatctacaatttttcagctccggtcctgaccctgagccagcaagaggtctcagaagggagccaggtgactgtgaagtgtgaagcgcaggtccagttcacgctgaatgccagctctgaggatcacgagcgaatcttcacttgctctgcggccctgagggtggctgggcaggagctgttaaaaaatcagaccctgaaactccacgtgctgtatgggccccggctggatgagaacgactgcccggggaactggacctggcccgaggggtctcagcagaatctgagttgccaggcttttgggaacccaccccccaagctaacctgcagccggaaaacagatggagccctgctgcccatcggggaagtgaagactgtcacatgggccatgaacggtacctacgtgtgccatgccgtgagctcccatggaaatatcaccagggaagtgttcctgaaagtgcttccaaaatctccgatatggcccatcatcatcattgtggtaatactggctactgtggtctttgtgggggtcctgaccatttacatttataaccgccagagaaagatcaggatatacaagctacagagggcccaggaagaggccatgaaactcaaggagttttacctgctatttattgagtacc

SEQ ID NO: 5422 - DNA, 1232 bp, Cricetulus griseus
gggatccccgcagggggtggcgcccgccgcggcgttggccgctgtgctcaagcacagctcggcgttgccgcccgagagcgcccaggtgcagggttacgacttcaaccgcggcgtggattatcacgcccttctggaggccttcggcaccaccggattccaggctaccaactttggacgcgcggtgcagcaagtcaacgccatgattgagaagaagctggagccgctggcactaggtgaagaccatcatgaggacctgacgaagagccgccgcccactcacaggctgcaccattttcttgggctacacatccaacctcatcagttcaggcatccgtgagaccattcgctaccttgtgcagcacaacatggtggatgtgttggtgaccacggctggaggtgtggaagaagacctcatcaagtgcctggcacccacatatcttggcgagttcagcctcagtgggaaggagctccgggagaatgggatcaacaggattgggaacctgctggtgccaaatgataattactgcaagtttgaagactggctcatgcccattctggaccagatggtgctggagcagaacacagagggtgtcaagtggacaccatccaagatgatctcccggcttggcaaggagatcaacaacccagaatctgtgtattattgggcccataagaaccacattcctgtgctgagccctgcgctcacagatggctcactgggtgacatgatcttcttccactcctacaaaaacccaggcttagttctggacatcgttgaagaccttcgactcatcaacatgcaggctattttcgccaagcgctctgggatgatcatccttggtggaggtatggtcaagcaccacattgccaacgctaacctcatgcggaatggggctgactatgctgtctatatcaacacagcccaggagtttgatggttcagactcgggagccaggccagatgaggctgtctcttggggcaagatccggatggatgcacagccagtaaaggtctatgctgatgcttctctggtcttccccctgctggtggctaagacattcgcccaaaaggcagacgccttcacagctgagaagaatgaggactaagaagattggagaagacccgggggttcttgtcatacctttatttattacctttacacttcagtccctcccctgggcccaccccacttcttggtcagcagcatctctagaataaattgtctttgttggg

SEQ ID NO: 5423 - DNA, 1231 bp, Cricetulus griseus
ggcatgtgggcacattctttgacagtgcaggattatcaggatcttatagaccgaggatggagaagaaagtgggaaatatgtgtacaagcctgtcatgaatcgaacatgctgtcctcagtatactataaggtgtcatcctttacagtttcagccatcaaaatctcacaagaaagttttgaaaaaaatgctgaaatttctggctaaaggggagatttcgaaaggcaattgtgaggatgagcctatggattctacaatggaggatgctgttgctggtgactttgcattaataaacaagttggatataaagtgtgatcttaagacactcagcagtgacctcaaaggaagcatagagagtgaagagaagatgaaagaaaaagcttaaagaaagaagaatctaaagaattaattcatccacaagctatagagaagttgggctctggtgaaccatcacattcagtcaaagttcgcatctcacaagttagaggtgagggtggtgagatctactccaccaagtcctcagttcaaagccacatttcaggagtcttaccaggtctataagcgttaccagatgattattcacaaggatccacctgataaaccaactgtgagccagttcacaagattcctttgcagctcaccattggaggcagagcaccctgctaatggaccagagtgtggatatggctcctttcaccagcagtactggcttgatgggaagatcattgctgtgggtgtgatagacatcctcccatactgtgtgtcttctgtgtatctgtactacgatcccgattattcatttctgtctttgggtgtctattcagcattaagagaaattgcttttactagacaactgcatgagaaaacaccgcaactcagctattactatatgggtttctacattcattcctgtcccaagatgagatacaagggtcagtatagaccttctgatttgctgtgtcctgagacatatgtctgggtgcccattgagcagtgcctgccttctcttgacatctccaagtattgtcgtttcaaccaggacccacaagcagtggatgaaggccgcagtaaggaccctgaccgagtacgggtactttacaggcgatgtgccctgccttacggtgtttataagaagaaccaccaagaagacccaagggaggaggtcgctgtgctggagtatgcagaccttgtagggcagaagtgctccgagaggatgctgctgttcagaaactga

SEQ ID NO: 5424 - DNA, 1231 bp, Cricetulus griseus
gacgcaatacgtagcggaagtccctgcagccgcggtgttgtgctgtggggaagagacagatttgtaaacctcagagtgaggttctgcctgccggaggccgctgtggtgcggagacccccgggcgaagccaccatcaccatgtctgaccaggaggcaaaaccttcaactgaggacttaggggataagaaggaaggagaatacattaaactcaaagttattggacaggatagcagtgaaatacatttcaaagtgaaaatgacaacacatctcaagaaactcaaagagtcatactgtcaaagacagggagttccaatgaattcactcaggtttctctttgaaggtcagagaattgctgataatcatactccaaaagaactgggaatggaggaagaagatgtgattgaagtttatcaaggaacaaaccgggggtcattcgagggtttagataattctttttattttttatttttcctttccctcaatccttttttattttaaaatagttcttttgtaatgtggtgttcaaaatgaagattgaatactggcactccatctctttagaccatctggtaatctgaattctagtgttcaatattcattattggttgtttttgttgtgctgatttttggtgatcagacctcagctcccttaatattgcccttcttattttaaaaaagtcatgtgtgcacagagaggccgcccttttcaggactgtgcatttcacgtttgtgatgataaaagatcaactagtgggagctttcctatgaccttccaattggccctgaagttccagcatgcagttgtttcactcctggactgtgattttcagtgggagacggaactttttcagagaactgaactgtgggaaaatgatctttcctcagcttgaagctacttttaaaatctgagggtctggaccaaaagaagaatatcacgtttgtagacaagatgacagatacagtgagagtaacaactaactccaaagatggcttcactggagagaaagaaagtgtcctaagagtaagacaggctgtctgaagatcccaggaaagctgtaattttcatcagcagttagtaacagttattcatgcagaagtgtatgcaacagacactgctccttttgattctgtttgtactttttggcctgggacatgggttttcaagggacaccgtctgtaccagcttcattaaaataaacaatatttgtaaaaaccgtaaaaaaaaaaaaaa

SEQ ID NO: 5425 - DNA, 1231 bp, Cricetulus griseus
gacgggcgaggggagttgctagccgccttttacttttctttaaaggcaaggtgctcggcttccgctaccaagacctccgacagaaaatccggcccgtggccaaagagctgcagttcaactacatccccgtggacgctgagatcgtctccatcgacaccttcaacaagtcacccccaaagcggggcctggttgtgggcatcacattcataaaggactcaggagacaagggcagtccttttcttaacatttactgtgactatgagcctggctcagagtacaacctggactccattgcagagagctgcctgaatttggaactccagttcacgcctttccagttgtgccacgcagaagtccaggttggagaccagctggagaccgtctttctcctgagtgggaatgatccagccatccatctctacaaggagaatgaggaactacatcaatttgaggagcagcccgtggaaaacctcttcccagagctcacgaacctgactagtagtgtcctctggcttgatgtccgaaacctgcctggctcatcccggcggctctcagctctgggctgccagagtggttacgtgcgcgtggctcacgtcgaccagaagaatcgagagatcttgcagacatggacagttctgcaggatgggcccatctcccgagtgatcgtgttcagcctgtccagccccgacgcaaccgagcacagcccacagcaggaaggatacagtctgcttgttgccagcatgctggagccggctgccgtgtactgggaccttctgaaccagggcctggaagaccaacttctcctgcccagcagcgaccagttcgacagtgtcctctgtggcctggtcactgacgtggacctagatggacaaccagaagtgctggtggccacctatggacaggaactgctctgctataagtaccacgagccgcctgaggccagcagaggcttccacctactgtggcgtaggacctttgccagccccctgctggccatggcccatgtggacctgactggggatgggctgcgggagctggctgtggtgtccctgaaaggggtgcacatcctccagcacagcctgatccaggcctcggagctggtcttgacccggcttcgtcggcatgtggagcagaggaaacatcggcagggccttggggacaggagtgggccccaggcctgaggagcccccagccctcctgagcactccctcttctcaggcctgggcatctc

SEQ ID NO: 5426 - DNA, 1230 bp, Cricetulus griseus
tggcggtaaccttgcgggccgagccgcggcagcggaggtgtgctctgcgcgtctgagcgttggtccagcgaggctcgttagctgcggggggtcgcgaggtcgcgcgggagggcgccgaggaccgcggagcgcaggcgcgcggtcagggcctcgcagccgacatgtccctggtggcggaagcgttcgtctcccagatcgcagccacagaaccttggcctgaaaatgcgaccttatatcagcaactaagaggggagcaaattttgctttctgacaatgcagcatctcttgctgtgcaggcctttttgcaaatgtgtaatctgcctatcagagtggagtgtagggcaaatgcagaatatatgtctccatctggaaaagtaccttttattcatgtgggaaatcaagtagtgtcagaacttggtcctatagtccagttcgttaaagccaagggccattctcttagtgatgggttggatgaagttcaaaaagcagaaatgaaagcttacatggaattagtcaacaatatgctgttgactgcagagttgtatctccagtggtgtgatgaagctacagtaggggagatcactcatgccagatatggatctccttatccttggcctttgaaccacattttggcctatcagaagcagtgggaagttaaacggaagatgaaagctattgggtggggtaacaagactctggaccaggtcttagaagatgtagaccagtgctgtcaagccctttcccaaagactgggaacacatcattacttcttcaataagcaacctactgaacttgatgctctggtgtttggccatttgtacaccattcttaccacacagttgaccagtgatgaactttctgagaaggtgaaaaactatagcaacctccttgctttctgtagaagaattgaacagtgctattttgaagatcagtgtaaaggcaggttgtcttagaattttatgtcaattagttgttactttaaaaaatctaacttttgaaatatgtattacctgaacattataatagataatagtttcagaatttcaaaaccaaaaacacttttttgaaacctcaaaaaaattgtataatttcatatacatgttctttgtgctgttatttgtgtccacctccattttgaattgtttgatttgttacattgtattctatatcttgatattttatttctttatgagcatataaaaataaaccttaagcaactatggttgtttc

SEQ ID NO: 5427 - DNA, 1230 bp, Cricetulus griseus
  modified_base (1220)..(1220): a, c, t, g, unknown or other
gagctacgagcttgggaagaacgtcgtgggtcttgcggcgtgggacatttagcctcacctccccccctgaactcagcatgggtgagaagtcagagaactgtaaggttcccgaagatctgttcaatggtttgaaagttacagattctcaggaagtagagtcagccagcccccaggtctctgatcctaaggtccagcattcccagagcaagctactaaaggatgatggagcccattcccaggaggaccatggagaagaggaatgtttcatgactgtagtgcctccttcgaggaggagcagccaggggcacagatggtgggggacaaagccactgatgagtctggttcctctgaactagatgaggaatacctaactgaactaggaaaaaacatagcctgaagaagaagaaacagaaaagaagagaagagagcactaaactaaaggagcaggggaacgaacagtttaagagaggagattacatagaagctgagagttcttacagtcaagcccttcagatgtgcccatcctgtttccagaaagatcggtctgttctgttttcaaatagagctgctgcaaggatgaaacaggacaagaaggaaatggccatcaatgactgcagcaaagcaattcagttaaaccccagctacatccgtgcaatattgaggagagcagagttgtatgagaaaacagacaaactagatgaagcactggaagattataaattgatattagaaaaagatccatcaatacatcaagcaagagaagcttgtatgagattacctaagcaaattgaagaacgtaatgaaagattaaaagaagagatgttaggtaaactaaaagatcttggcaacttagttcttcgaccttttgggctctccacagaaaatttccagatcaagcaggattcttctaccggctcctactccatcaactttgttcaaaatccaaataataataatagataacagaactaacagtagtcataaaggctggctgggaggccatgaactgttcacaagggcaagaccctgcaggtgtttaatgtttaaaaagtgtcttatctaagaaagctgtgtagtagattccgagccgcctttttgctcttgttttatgattagggtggaatgtgcctcctgatgtaatgagcctcattaatttccatttttaaggtggtatctatgcagctgctgttcttggttttggctgctgtgacaaaaaaaanaaaaaaaaaa

SEQ ID NO: 5428 - DNA, 1230 bp, Cricetulus griseus
  modified_base (168)..(168): a, c, t, g, unknown or other
cacctgcaaggaggggctggacctgcaggtccccgaggatggtggcagaggtgtgcagatccatgcaagctccagtcaggcggtgttgaccttggagggagatgatgtcggagagctcgataaggccatgcagcatgtttcctacctgaactcgaggcagttccccanacccggcatccgcaggctcaaaatcaccagcacagtcaagtgtttcaatgaggccgcttgcattgaggtgccgccagttgaaggctacgtgatggttctgcagccagaagagcccaagatcagcctgagtggggtccaccactttgcccgggctgcttctgagtttgagagcccagagggtgttttccctcttccctgaacttcgaatcatcagtaccatcaccagagaagtggagcctgagggggacgggtcagaggaccccacagttcaagagtccctggtgtcagaagaaattgtacatgacctggacacctggcgaggtcacagtggaaggggaggagctgaacccagagcaggagagcctggaggtggatatggcccgcctccagcagaagggcattgaagcgagccactctgacctgggcgtggtctttacaggtgtggacaccatggccagctatgaggaggttttgcacctcctgcgataccgtaattggcacaccaggtccctgcttgaccggaagttcaagctcatttgttcagaactaaatggtcgctacctcagcaatgaattcaaggtggaggtgaatgtgatccacacagccaaccctgtggaacacgctaaccacatggctgcccagccacagttcgtccaccctgaacatcgctcctttgttgacctgtctggtcacaatctggccagtcctcacccttttgccgttgtccccagcacagcaactgttgtgattgtggtgtgtgtcagcttcctggtcttcatgatcatcctgggggtgtttcgaatccgagctgcacaccagcgaaccatgcgggaccaggacacagggaaggagaatgagatggattgggaccgactctgccttgaccatcaccgtaaaccccatggagacatatgaggaccagcacagcagtgaggaggaggaggaggaggaggaggaggaggagagtgaagatggggaggaggaggaggagattactagtgccgagtcagagagcagcgaggaggaggaaggtggccctggggatggtcagaacgcaacccg

SEQ ID NO: 5429 - DNA, 1230 bp, Cricetulus griseus
cgccatggagcttccctcagggcggtgcgaggatcctcgctcttgtgatgatgagtcggacccggagctagacccggaccctgacgttcaggctgaggcctacgtagcccgcgtgctcaccccacccaaacctggcctgaccccgcggcgctcgtcgctgcagtccacgctctccgcgtccctggacgcgccggagcgaaaggctgtctccagagtcccgcccgtgcgcctgccgggcctgctgagccttcccccggagctgctgctggagatctgccgcctacctggatgcgcgggtcgtgcttcatgtcctgccgtgcgtgtcgccgagtacttctgcctggctgatggtcactttgcttccattgatgcagtgttgctgctccagggtggggcgactgtgtctgtcaggttcccgagatcgcaatgtcaacctgtgggacctacgacatttagggaaggagcctagccgagttctggtgaaggccttgggcacccagggcaatagcacacaccagggctgggtgtggtcgctagcagcacaggaccaccgtgtgtgctccggctcttgggacagcactgtgaagctttgggacatgcaggccgatgggcagcagtttggcgagatcaagggcaaggcggccgtgctgtgcctctcctaccaacctgacatcctggtgactggtacttatgacaagaaggtgaccatctatgatcccagagctgacttggccctagtgaagagccggaggctgcactcaagcgctgtgctagcggtgctggcagatgacaggcatatcatctcgggcagtgaggaccacagtcttgtggtatttgatcgccgagccaatagtgtcttgcagcggctgcagctggactcctatctgctctgcatgtcttaccaggacgccccagctctgggcggtgacaaccagggcctgctgcacgtcttcgccaaccgagatggttgcttccagcttgtccggtcctttgatgtgggtcaccagtctcagatcacagggatcaaacactctctggggactttgtacacaacatctactgacaagaccattcgggttcacgtgcccacagacccacctagaaccatctgtaccagaagccaccacaatgtgttgaatgggatctgtgctgagggcaacgtggtggtggctgcctctggtggcctgtcattggaggtctggaggctgctggcctaaacagctggatgga

SEQ ID NO: 5430 - DNA, 1229 bp, Cricetulus griseus
ccagagcccgggagtcaaagccggttgtcaagccagtcctgtcccgcactcatctgccttttctttttctctcaacatgacagatgccgctgtgtccttcgccaaggacttcttggcaggtggagtggctgcagccatctccaaaacggcggtagcgcccatcgagcgggtcaagctgctgctgcaggtgcagcatgccagcaagcaaatcacggcagataagcaatacaagggcattatagactgcgtggttcgtatccccaaggaacagggggtcctgtccttctggcgtggtaacctggccaatgtcatcagatacttccccacccaggctctcaactttgccttcaaagataaatacaagcagatctttttgggtggtgtggacaagaggacccagttttggcgctactttgcagggaacctggcatcaggtggtgccgcgggggccacatccttgtgctttgtgtaccctcttgattttgcccgtacccgtctagcagctgatgtgggtaaagctggagctgaaagggaattcaaaggccttggtgactgcctggttaagatctacaaatctgatgggattaggggcctgtaccaaggctttaatgtgtcagtacagggcattatcatctaccgagctgcctactttggtatctatgacactgcaaagggaatgcttccagatcccaagaatacccatatcttcatcagctggatgattgcacagtctgtcactgctgttgctggcctgacttcctatccttttgacacggttcgtcgacgtatgatgatgcagtctggacgcaaaggaactgatatcatgtatactggcacaattgactgctggaggaagattgctcgtgatgaaggaagcaaggcttttttcaagggtgcatggtccaacgttctcaggggcatgggtggtgcctttgtgcttgtcttgtatgatgagatcaagaagtacacataattatgtcttaggtttctccccaagagcaggcatgttgtacaatacaccatatcttgaacattctggacagattctctgggcttgtctgttttatcagtggcaactacttaccagttgaaaagtgcgaagcaataatattcatctgaccagttttctcttaaagccatttccataatgacaataatgatgggactcaattatattttttatttcagtcactcctgataataaattgaagaaataaaaatatctaaaa

SEQ ID NO: 5431 - DNA, 1229 bp, Cricetulus griseus
ctgggagaaggctggaagcaggctgggcgcggtgcggcccggacgatgctgctgagccccggccgggcccggcccagagcacatgatggcgatacgggagctcaaagtgtgtcttctcggggacacgggggtcgggaaatcaagcattgtgtgtcggtttgtccaggaccactttgaccacaacattagccccaccattggggcatcttttatgaccaaaactgtgccttgtggaaacgaacttcacaaattcctcatctgggatacggctggccaggagcggttccactcactggcgcccatgtactaccgaggatcggccgcagccgtcatagtgtatgacatcaccaaacaggattcatttcataccttgaaaaaatgggttaaggagctgaaagagcacggcccagaaaacattgtgatggcaattgctgggaataaatgtgacctctcagatattagggaggtgcccctgaaggatgctaaggagtatgctgagtccataggtgccatcgtggttgaaacaagtgcgaagaatgccattaacatcgaggagctcttccaaggaatcagccgccagatcccaccgttggacccccatgaaaatggaaacagtggagggatcaggcttgggacccagagcttgcaggccagccggcggtgctgctaacccaagggccatggcaaatgaagctcggaggaagaagcccgagccgtctccagtgtcaggtgcacacagaaggaccctaacctccggactaactgcctgctggagagtgagcagcattgcatgctgggagaccagtagcatgctgggctgggacattccctaaagagaggatagaaaactcgggaaaactcacctaaccaccacaacatggccttcggtttatgaaacgcacacggcaggggttgcacttactaggtaataggtatagttgtcattttttttttttttttttgttaaagactaagaaaagttttaaatttggactgggttgcagtggctgaattttgcatgaacgtgacacccagtgacccagcagtcatgccatcacacagaccatcacccttcctggtgtttctgtgaagggttcctgcttgggctggacccaggttttgcgcctagacaacccctccccagacacctaggaccttcgcatcttgtaccctgttctacgagtttccctcgcactcatgtgtatccgttgcttttgattttaacccat

SEQ ID NO: 5432 - DNA, 1229 bp, Cricetulus griseus
  modified_base (1188)..(1188): a, c, t, g, unknown or other
aaagatttgcaatgatttgagatcatccaggactcgactcctcgaattgttcactgatttgagctgtaaatccggaaacgatgaagaatgcagcagacttgtatttctcacttttacaaggtttcataaattcactgggcgattctacccaagaaagcaaattacggtatgttcagagtttcaagtggactgacacattgcaaggccatgttccaagtgcccagcaggatgctgttttgaattgatctccatgggatttaacgtagcattatggtataccaaatatgcttcaagattggctggaaaagaaaacataacggaagatgaagcaaaagaagtccatcgaagcctaaaaattgcagctgggatttttaaacatttaaaggaaagtcatatacccaaacttcttacaccagcagaaaagggccaggacttagaggctcggctcatagacgcttacgtcatccagtgccaggctgaggcgcaagaagtaacaattgcccgcgcaattgagctgcagcacgccccgggactcatcgctgctcttgcctatgaaacagccagcttctaccagagagcagatcatactttatccagtttggagcctgcgtactctgctaaatggaggaagtaccttcacttgaagatgtgcttttacacggcctatgcatattgttaccatggccagactctgttggctagtgataagtgtggagaagcgatcaggtctctccaagaagcagaaaaattgtacacagaggcagaagccctgtgcaaagagtatggggaaaccaaacaggacacttgttctttcggaagcttggaagccttgtgaagaacaccctggacaaatgtcagagagagaatgggtttatttactttcaaaaaatcccaacagaagccccacaactggaactcaaagcaaaattatgggctggtagagcctgtgccttttgaatttcctcctatgagtgctcactggacaccggaagcgttggctgcatttgatctcaccaagagacccaaggatgacagtgtcaaacccaaaccagaagaagaagtgaaacctgtaaaggaaccagatatcaaacctcagaaggacactggatgctctgtctcttaagatgtcacacgtgcttagaaatctcgctgccagtccctaagataagctgcaggacttcagttcanatttctgatttctctgaagcccataggataattattaactt

SEQ ID NO: 5433 - DNA, 1229 bp, Cricetulus griseus
cctggtttctgtatgctgtcatctgcacacctgctacctacaagtgtccgactggccccgtcctggatctgccggtcttctcgttccttcatggatctgaaggctctgctttcctccttgaatgactttgcatcgctctcatttgctgagagttgggacaatgtgggattactggtggaaccaagccctccccatactgtaaatacactcttcctgaccaacgacttgactgaggaggtcatggaggaggctctgcaaaagaaggcagatctcattctctcctaccatccaccaattttccgggccatgaagcacataacttggaaaacctggaaggagcgcctggtgatccgggcactggagaacagggtcgccatctactctccccatacggcctatgatgctgcaccccagggagtcaacaactggctggccaaagggcttggaacttgcagtaccaggcccatccacccttccagagctcctaactatcccacagagggagctcaccggctagaattcagtgtgaaccacacccaagacctggacaaagtcatgtctgcagtgaaaggaattggagatgtttctgtcacttcttttgctgctaggtgtgatgatgaggaacaaacacggattagtctgaactgtactcagaaagctttgatgcaggtgctagcttttctctcccagaacagacaactgtatcagaaaactgaaattctttcactggagaagcctttgcttctggatactggaatgggacggttgtgcacactggatgaatctgtctccctggcaacaatgatagagcgagttaaaggatacttaaagctttctcatcttcgcttagctcttggagtagggaagaccttagaatccccagtcaaagttgtggccttgtgtgctggttctgggggcagcgttctacaaggagtggaggctgacctttacctcacaggtgaaatgtcccaccatgatgttctggatgctgcttccaaaggaataaatgtcattctttgtgaacatagcaacactgaacgaggtttcctttccgatcttcaacaaatgctgggtgttcacttggagaataagatcaatattatcctgtctgagacagacagggaccctcttcatgtggtttaaaatgcacaggacatcatagtgacacttaaaaaaaggaaaaaaaaaaaaaaaaaaaaaaaaaaaaaaaaaaaaaaaaaaaaaaaaaa

SEQ ID NO: 5434 - DNA, 1229 bp, Cricetulus griseus
gagcccgaacctcgggggctcctagcaacgggccggggcgggagttccatggagacgggggagcgggcccgcctcatcatcatcctcgtcctccagcttttcctccgcgtccgacgcaaccggcagcagcgctgccgccgcgtcctctgcgaccgccccgtcttcccacggatgtgatcttcgtggtgggaaactaagtttttaaactaccccaatggatgcagacagtgatgttgcattggacattttaattacaaatgtagtctgtgtttttagaacgagatgccatttgaacttgaggaagattgctttggagggagcaaatgtaatttataagcgtgatgttggaaaagtattaatgaagcttagaaaacctagaattacagctacaatttggtcctcaggaaaaattatttgcactggagcaacaagtgaagaagaagctaaatttggtgcccgacgtttagcccgtagtctgcagaaactaggtttccaggtaatttttacagattttaaggttgtgaatgttttggcagtttgtaacatgccctttgaaatccgtttgccagaattcaccaagaacaatagacctcatgccagctatgaacctgaacttcatcctgccgtgtgctatcggataaagtctctaagagctacattacagatattttcaacaggaagtatcacagtgacagggcccaatgtaaaggctgtggccactgctgtggaacaggtgtacccatttgtgtttgaaagcaggaaggaaattttataactcacttggttggttagtctctaactgagcaccttgaaacctgctgcacattggactcaaaacacaaggaaaactggaccaacagtgactgaggaatagactcctgctcacggctacagtgtgagctccagtccctttgggtttcacttcaaactttgctgtaatataaaaaggaagtttacaagacatgacattgctgcttttacaaaaggacattctatttattttcgcagtaattctcatgtccccacaggcagagctgtcacagtgtgcactaccttaaaaaaaaattgttttattgttgtcattattttccagtttgagctaatgtgttttatttgtgaatagtcttttacattttgtatgctgaatatgggcaccaaagaacctgtaaaagttaaccttttaaattgaatgtgcacaaataaaagtttggaaaagatctctcttcata

SEQ ID NO: 5435 - DNA, 1229 bp, Cricetulus griseus
gctcgggcggctcctgtggtgggcggccaggggcgagccgggatgggctgccgacgcgagacgtgatcagcccgtaagcggaaccagtggccaagtggttcaagagtctactatttgggtgcgagctctcgccggacgcagaccgggccggagcatgcggggtgcggtgtgggcggcccggaggcgcgcggggcagcagtggcctcggtccccgggccctgggcccggcccgccccgctgctgccgccgctgctgtctgctgctgctgctgctggctgggaggcgcgagcgcgcagtactccagcgacctgtgcagctggaaggggagcgggctgacccgagaggcacacagcaaggaggtggagcaggtgtacctacgctgctcagcaggctctgtggagtggatgtacccaaccggggccctcattgtaaacctgcggcccaacaccttctcacctaccaggaacttcactgtgtgcatcaagcctttcagggactcctctggggccaatatttatttggaaaaaactggagaactgagattgttggtacgggacctcggtggtgagcctggccaggtgcagtgcttcagcctagagcggggtggtctgtttgtagaggcaacaccccaacaggacatcagcaggaggaccacaggcttccagtatgagctgatgagtgggcagaggggactggacctgcatgtgctgtctgccccatgtcgaccttgcagtgatactgaggtcctccttgccatctgcaccagtgactttgttgtccaaggcttcatccaggatgtcacccatgtgccagagcagcaagcatcagtcatctacctgcgggtgagcaggcttcaccgtcagaagatcagggtcttccagccagctcctgagggcagtggccactggctgggccatgtcacaacactgctggagtgtggtgtacggccaggacatggggaattcctcttcactggacatgtgcactttggggaggcacagcttggatgtgccccacgctttagtgactttcaaaggatgtacaggaatgcagaagagaggggcataaatccttgtgagatcaatatggagtgacttgctgggtgacatggtactgttcttcaaatgagccacaatttgagtcctcggttgctctatcaaatcccgatagaggctgcagggtggtggcatgggtccagcctggtgcttgaactgggaaggtacatgctg

SEQ ID NO: 5436 - DNA, 1229 bp, Cricetulus griseus
  modified_base (837)..(837): a, c, t, g, unknown or other
tgttgtccatgggtcagtttggatctcttaaggagtaatacaggcctttatatagaataaggagactcagaatgctggtaaaatgaaggggtccgataaccaagaaaaactaagtctaccaaatcatagaggatgcagggaataaaggaatatggagcagagatattcgatacaaaagtaacttgccattaacagaaatcaacaaaattctcaagaatttggaaagtaaaaagcttatcaaagccgtgaagtcagtagcagcctccaaaaagaagggtttataatgctctataacctgcagccagaccgatctgtgactggtggagcgtggtacagtgaccaggattttgaatctgaattttgttgaggtgcttaaccaacagtgtttccaaattcctacaaactaaggcagaaacagcaagagaaagtaaacagaatccaatgattcaaagaaacagttccttcgcttcatcacatgaagtgtggaagtacatctgtgaattgggcatctgcaaaggaaggcactgtcggcagtgtagatggacacatgaaactgtacagggcagtcaaccccaatcctcccacctacaggcttagtccgggcaccctgtggactctgccccgtttttgatgactgccatgaaggtggtgagatttcaccatctaattgtatttacatgacagagtggctcgaattttaatagagagctgtgaatttttacttacatttggcaaatgaattacttggagagcaaataattcatgatagaacatccagtttctttgaaagcatacttctctatgatggatactgacttgctgctatgaaaacgtatnttaattccgaagacagaacacaaagcagatgaagtttaataaagtttaatagggaagtctcttcgaggcctttggcccaaccataagctcaacagtgaagagaagaaaagtggttttggatttactatatggcaggtgaaggatgaatgcaaatatgtgccctgcagcagtgtggttcagtaagacagaatcttgaactccatcctgcctctacctccctcctgctgggttagaggtatgcaccataacatctggccaagtagcattttctatcatgatggaaatatttggtatttggtgtttagtacagtaacctcaagccagctggctggccagcacttgaaacaagagattaaacaactaaggtttgacttagttgcttttggatactg

SEQ ID NO: 5437 - DNA, 1229 bp, Cricetulus griseus
tctgtgtgtgtgtgtgtgtgtgtatgtgtgtgtgtgtgtgtgtgtgtgtgtgtgtgtgtgtgtgtgtgtgcattcatatatgtgtgtactttcctagtcttcttaatttgaagagcaaagttaaaattcagtatcctgggactcaagtctatgctatggaaaacacatatatcagggaaaatagcagtattggattttgctctttgcatattaatcttttttgcatgaaacatcactagcattcacaaaacaaatcagaatcacaaatagaaatctactttctgagatgaagcatgaacatttctgctccttctttccagtctgattagttggaattatcatatgaaggataaaaatttgagtgtaaagccctatagaaaaacctactttaaaaatctctgtgtctttatggatgtttctctctattgtaatcttcccaaattatagtagctgacatggggggacttgtatttctaacaaaaataacttatccagggtcagtgaggtagatcagtggatgaaggtgcttatagcataacgctggtgaccagatgccagagtaggtcgacctctcgacctccacaatttgctaagaggactccaggcatttgggaccaagccatttggttgagcttgatagaagatttatggtatttaatttatttctgcacttcactatgaattttggaaatggtgtctttctctgaaggactttgcaaattacattgacatgcataaaggaaaggagcttgccagtgtttctgcttcttcctagaatgtagctgtagagttcttcactagaatgattagatatctatgtacaggaactatgcagttattcaggttgatgcttcattttaaagaatgtacttgtaaaacgtaacaagatcagtagctaacttttttaaggctgataaaagtaagattatgtgttagacttaaaattatagtgaaatctgtcttatgctattgtgagtagcaaaggttatgcatttatgtagaaacttttacagagttttccctaaataagagaaagtagtagagataggtttcactcctaactttcagaattgtgatgctgttaatctgttttgttcttggctcctcagaaattctcgctgacatttgagcaccattttttgttgcatttggagacaagtaacagctgttctgttggttcactattacagcaactcaaattttgtcattaaatattttaattctgtggt

SEQ ID NO: 5438 - DNA, 1228 bp, Cricetulus griseus
ccatccaggatctctggtggagaaactgcctgacagccctgctctgtccaagaaggcattactcgcgctgaaccatggtctagataaggcccacagcctgatggagctgaacccttcaggcccacctggtggctccccacttttggattcttcccattctcatagtgccagttccccagacccagacacaccttcaccaattggggatagccgagctctgcagggtagccgaaacacacgaattccccacttggctggcaagaaggctgtggctgaggaggataatggttctattggtgaggagacagactctagcccaggcaggaagaagtttccactcaaaatttttaagaagcctcttaagaagtaggcaggatagggtggcagtgttgagacagcctgtccttccctgggttttctgccttctcccccttcctgtctttgcgaaatctggcccctagagtgggcgtggaggggctggcccaggggcctgggcactgtacatacctgccccactcatccttggcccttcatcattatttattaactgaccaccgtggccggcctgccctgaaacccttccaaccatggctgctgctgtcacaccctctccactccagtgcatgtcccagtgctgtcccctcacgttcccagctccactttcctagcagttgtgggaagataggagggtgatttctgatacctgtacctcagatctcttcatccaactcataatcattctgcttaccccagactgggccaaggtcctaatctctgaggtttgttctatggaagtgtgatgagctggagggaacctcatcctggagctcatttgaatctccagggcttcattcagggagtgaaccagctcccagggaacaagtcaccagagttttgaggagaggccaggcttgtattgatggggagagacttctcttagtaggaggatgagtagatgccaaagctgtgggcaataaggcacttgccatttctctcttgccctgcccacttctgccttcctcttacctcctctgttcccctatattgcaggagtgtgtctcttaagaggtgctgccctgaaactcctcaagcatcagtactactagggctcaggacaactggctcccctggctatgggagccacagtcatgacacagggctcttgtggagccctgggcaaggatgttgtatttgaaccaaaagacaaacagttttaaagtaaaataaa

SEQ ID NO: 5439 - DNA, 1228 bp, Cricetulus griseus
  modified_base (1127)..(1127): a, c, t, g, unknown or other
aaaaagtctctgaagttatgtgtcaccaaggagatgctccttctaagcgttacgactgcctacacaggtctggagctcacattcttctctggggtgtacgggacctgtattggggccataaacaaatttgggacagaagagaaaagcctgattggactctctggaattttcatcggcattggagaaattttaggtggaagcctcttcggcctgctgagcaagaataatcgcttcgggagaaatccagtggttcttctaggtaccctggtgcactttgtagccttttacttgatctttctcaacatgcctggagatgcacccattgctcctgtggaaggaactaacagcatttcatacatcaggcccagcaaagaagttgccattctctgtagctttctgctgggcctgggagacagctgcttcaacacccagctgcttagcattttgggttttctctactcggaagacagtgcaccagccttcgcagtcttcaagtttgttcagtcgatctgcgcagctgtcgcttttttctacagcaactacctcctccttcactggcagctcctggtcatggtgatatttgggttctttggaaccatttcattcttcactgtggagtgggacgctgctgccattgtggcccgaggctctgactactgaagtattcgatgaggcccatgtctccgggaaacacagctggtcatatcgcagagctggttcaagcggctgcctgtcctcgtggaacgattctgccttgaacgccatgtgtcactcaggattcttgctagctatggagtatgtttcatgacttaggaccaggaagcagatgccactccacatgtggatctgggaaggactttcaaatagtgaagatgctgagacacattgttttgagatagggtctcactgtgtagcccaggctggccttggacttgcagccctccccctgcctccagtgttgggttataaagtgtgcccaacacagggtttaaagtgcagcagtctgttttgagatagggtcttgatgtgcagccttggctggcccagactctgtactccgtacaacgcccctgcctttgtctctgcaatgctgggatggtgagaacacgccaccacacacaattttnttttattttatttattaaataaataaatatttaaaaaaaaaaaaaaaaaaaaaaaaaaaaaaaaaaaaaaaaaaaaaaaaaaaaaaaaaaaaaaaaaaaaa

SEQ ID NO: 5440 - DNA, 1228 bp, Cricetulus griseus
gcccagctgtcggagaagcactgcaacatgtgattcccaccctcagaacctgtctccagcccaccacagacccgcacatgcgcctgaagctcttctccatcctgtccacgatgctgctgaggcctaaggacactgttgactctcagggacagttccatggctacttggagatggtagtgaatgacatcctggcccccaacttgcagtggcatgcagggaggacggctgcagccatccggacagctgccatatcctgtctgtgggcactcaccagcagtgacgtcctattggccaagcaggtgcaagaggcgcaggagaccctgatgccacaggtgctggccactctagaggatgactcccagaccacacgcctggtctcctgccgcatcattagcgtatttctcaagaactcaggggataccatggagccagagaaattcctcagggtctatcctgagctcttgaagcgcctagatgatgtctccaacgacgtgaggatggcagctgcttctgccttgctcacctggctgaagtgtgtgcagagctctgacgggaaatccgcctatcagagcagtgtttcttgtacagggagctgctggtccatctggatgaccctgaaagtgccatccaggacacagtcctagaagtcctcaaggagggcagcgtcctgttcccagatgtgctggttcgggagaccgaggccgtcgtccacaaacaccgatcatctgcctactgtgagcagctgctgcagcacatgcaagccatggctgccgctcggtgaccgtgtgcagcagccactaaaggcacacacacacacacacacacacacacacacacacacacacacctcacagagatcctcctgcctctgcctcccaagtgctgggattaaaggcatgggccgctaccaactgacttctcctgactttaaatacactggaacttgcaatgtgggtgcacttctcctggcatttctgtttctcagtattagtgatgcccacagataaaggataaactaggaaaccagacctcgtccctaccgctggcttacagcagtcagtagatagtcattccccgtgtcatttccaccaagtgcctaaaacgtttttaagtggatgtttatcagcagccaatatttttgttaagacaatgggaagaatggggagaggtgtttccaacaaattttaacatttctgctttgccgtttgtggaattaaattatttatta

SEQ ID NO: 5441 - DNA, 1228 bp, Cricetulus griseus
  modified_base (193)..(193): a, c, t, g, unknown or other
agagcctggccgaggtcctgcagaagctaggggcttcccgtgagctccaggctgttctcagctacatcttccccacttacggagtaacccctagctacaccaccttttccttgcatgctctgctggttgaccactacatacaaggggcattttatccacgaggaggttccagtgagattgccttccatatcanccctttgattcagcgggccgggggcgctgtcctcactagggccactgtacagagtgtgctactggactccactgggagagcctgtggtgtcagtgtgaagaagggacaagagctggtgaatatctattgccccgtggtcatctccaatgcaggaatgttcaatacctaccagcacttagtgccggagagtgcccgctgtctgccagatgtgaagaagcagctggcaatggtacggcctggcatgagcatgctctcaattttcatttgcctgaaaggcaccaaggaggacctgaagcttcagtccaccaactactatgtttattttgactacagacatggacaaagcgatgcaacactatgtctctatgcccaaggaaaaagctaccagaacacattccccttcttttcattgcctctccatcaaccaaggacccaacctgggaggaccgattcccagaccgatccacaatgactgtgctggtgcccatggccttcgagtggtttgaggaatggcaggaggagccaaagggcaagcggagtgctgactatgagaccctgaaacatgccttcatggaagcctccatgtccgtggtcatgaaactgttcccacagctggagggcaaggtggagagtgtgactggaggatccccactgaccaaccagtactatctggctgctccccgaggtgctacctatggggctgaccatgacctggctcgtctgcatcctcgtgcagtggcttccctaagagcccaaacccccatccccaacctctacctgacaggccaagatatctttacctgtgggctgatgggggccctacaaggggccttgctgtgcagcagtgccatcctgaagcggaacttgtactcagatctgcaggctcttggctcaaaggttcagacacagaagaagaaggagtagtccattcagagatatgctggaggaatggcactttctccaacttttctcatggtgtcctcctacagtgattccttgcacatataaccaaaaccactttgtttctaacaaaaa

SEQ ID NO: 5442 - DNA, 1228 bp, Cricetulus griseus
  modified_base (128)..(128): a, c, t, g, unknown or other
caattgatgggtgcttggaagttggcgtgcatattcagaaaatgttttgccacctgaagcctttgaggaggttctgcctgaagaagatcctccctcattggcttcactactctcgagctctatcaggngcagaagccatcaatgccttgaggcctttctactttgcagttcatccggatttctttggactagcaccccaggaaagggaatcaatgaaaattctcttaagagattaagtgtctacttagaaatctccagaaccaggctttaagtctctgaaccaactcagcttacaagatatcaggtggcgagaggggcgtggggtggttgcccaccgctgcagccagctgcacagtcttagccgcctagcacagcagagtttggagccacttcagaatgcaaaagggatgcaccatcgtattcacagatcgctccgggatgagtgcactgggccacgtgatgctggggaccatggatgtccaccatcactggacaagactctttgaaagcttgccaaattattttgatcttcagaggaggatgtcagtcttagaagaccagataagcagtcttctagggggcatccaagtggtttatatcgaagagctacagccagaattcacaattgatgagtactactccctcctcaatgtgttctataatcagctgctgaaaagtagggtaccgtcccacccagaaaggagaagctaccaagtaacacagatagctgtttttacctttcttggagaaatgagaaactgttgaatttatttaaattcagtttgatatattattagtgttcacaggttagaacacagttcctgactgctgctctaaaagtggagtgagccttcctttgtggtaattttatgctaagaaacttatctttcaaaggttttatcccctagttttatgatgctgatggctaggcaaaaagatccttagaaagaaaactattttaaagatatgtaatagagagtttggtaagtcatatatttttatatgagtggatgtgtgtgtataaaaattgacctcattcagtatagctctttagtactagaactcatttttacatccaacacagttcaatgtatgtcttcatagttacatctcatagacacacacactttgtagccagtaatggacagttatgttcaaaacagatgattgatgagtagcaaaaattaaataaccagggaagtagaggcaggtggatctctgtgagttt

SEQ ID NO: 5443 - DNA, 1227 bp, Cricetulus griseus
acccaggagctctgctctattcctgaggacccagaacctgaggagcctggtcctgccccttgggctaggttatggtctcttcaggaaggattctccaatctggactgtattaacgacaactacttgtttgggagggataaaagctgtgagtattgctttgatggaccactgttaagaaggactgataagtatcggacctatagcaagaagcactttcgaattttcagggaaatgggccctaaaaattcttacatcgtgtacatagaagatcacagcgggaatggaacctttgtaaatactgagcttatagggaaaggaaaacgcctgcctttgagtaacaactctgaaattgcactttcactatgtagaaataaagtttttgtattttttgacctcactgtagatgatcagtcagtttatcctaaggaattaagagacgaatacatcatgtcaaaaactcttggaagtggtgcttgtggggaggtaaaaatggcttttgagaggagaacgtgtaagaaagtggccataaagatcatcagtaagaggaagtttgctctcggctcattgagagaagcagcagacacggcccccagtgttgaaactgaaatagaaattttgaaaaagctgaatcatccatgcattatccagattaaagatgtttttgatgcagacgattattacattgttctggaattgatggaaggaggagagcttttcgaccgtgtggtggggaacaaacgcctgaaggaagcaacctgcaagctctatttctaccagatgcttttagctgtacagtaccttcatgaaaatgggattatacaccgggacttaaagccagaaaatgttctcttgtcatctcaagaagaggactgccttatcaagatcactgattttggacagtctaagattttgggggagacttccctgatgagaactttatgtggtacgcccacatacctggcacctgaggtccttgtctccaatgggactgctgggtacagccgtgctgtggactgctggagcttaggagttattcttttcatctgcctaagtgggtatccacctttctctgagcataagactcaagtgtcactgaaggatcagatcaccagtggaaaatacaactttattcctgaagtctggacagatatttcagagaaggctctggaccttgtcaagaaactgttggtgtggacccaaaggctaggtttacaccgaagaagcctt

SEQ ID NO: 5444 - DNA, 1227 bp, Cricetulus griseus
cagcccagtgccagccaggccagggggaggtgatcactcggcagggccgagtggaggtgctcaatgatgaggactgcagggagttcccgtggcacccgaagcccgtgctggagctctcagactccaatgctgtgcagctcaatgaaggcccctgcctggtcctctttgtagattctgaggacgatggagaatctgaggcagccaaacagctgatccagccaatagctgagaaaatcattgccaagtacaaagccaaagaagaggaggcaccactgttgttctttgtggccggggaggatgacatgactgactcccttcgagattacaccaatctgccagaggccgcacctttgctcaccattctggacatgtcagcccggcaagtacgtgatggatgtagaggagatcaccccagccattgtggagtacttttgtgatgacttctagcaagaaagtgtccaacctctgtggtgccttgtttctgcattaaacaactcagctagcacccatgagtgcacatcctcacagcggcggcaggacccactgtgtctggagactgcttgggatgtgtgacaatggcctgaccagctagcaccagaactgccacattctcctggtcactagctcttggtaaaggaccttccaggtcttctgcagagtgagcaagcagggacaatggattggggctctgactctggggtcagtacacacaacccaagccagagggaactttcctgtgacgctcgtacctatgggagttacagaggaaggcccatggtctcagcggccatcagttgagagctgttggtgaaaatatgctctggaaggacatattctttcttggtctgagggaaaaacagtgcatcagtgagttcttgggcaggggacctccaaatctttaaagaaacttgtgggtgtttgttttggtgggaagatgaatagctgcgctaactgttcatagtgtgcttctgtgtgattagtttcttgatctatctttcttccttgttcttgaccatgcccgtgtctctgcccacacaaacagctccctttttgaaaacccagccatcctcccccaacaagctattgacactgttgttccttgctgaattggattgttgatttgtagttcagaggtacaacattagttggtacttagtctgttggatgttgcccgcctgaaaatgcaatcacctagaaaagaaaaataaagcaggcctctctggacct

SEQ ID NO: 5445 - DNA, 1226 bp, Cricetulus griseus
tcgccgccgggagccggtgcggctgtgagtgctgtcgcgtcctgccgccgccgctggtcgggcatggtgttgggtgccggcccgcctcgcctgactcgcggtgctcagaggaaaggtggcagtaatgctaacgctggcaagcaagctgaagcgggatgacggcctcaaaggatcccggacatcagcctccacatctgactccactcggagggtttctgtgagagacaagttgcttgttaaagaagttgcagaacttgaagctaatttaccctgtacatgtaaagtacattttcctgatccaaacaagcttcattgctttcagctgactgtaagcccagatgagggttactaccagggtggaaaatttcagtttgaaactgaagttcctgatgcctacaacatggtgcctcccagggtgaaatgcttgactaaaatctggcaccccaacatcacggaaacaggggaaatatgtctaagtttactaagagaacattcaattgatggcactggctgggctcccactaggacattgaaggatgttgtttggggattaaactcattatttactgatcttttgaattttgatgatccactgaatattgaagctgctgaacatcatttacgagacaaggaggatttccgtgacaaagtggatgaatacatcaaacgctatgccagatgataagaggagagattgcaggtctgaggactgtcacagttgtctctgatgtgaagcagctcgaggtagccctcctccccatcctcatactccctgtcagccccttgggattgtcctagtcttgcgaccatgttgtcctgaagaagaccatcctgactacacaatacagcaagaaaatgtgtctgggcctcgagagcgttgtctgcttcccttaacatgtttactgaaactctgctgtctaggctgtgggattcctccgaagttgtaatgaactcaccattgaggatagcgcttgcttcccttcccccaacaaaatcggtgtcctgcacaagtgatgtaatgacatgttcggtgtgactggcagattggcaataagaaacccgctataaactgtgattggatgcacattctcttagcttcttccacgaatgttggccctgcctagatgtgaagcttcccagaatgcatagtcattcactgtagatcttactgaaatgcgtattttatttaatgtaagtatattttggaacagatttgtaatttagta

SEQ ID NO: 5446 - DNA, 1226 bp, Cricetulus griseus
  modified_base (112)..(112): a, c, t, g, unknown or other
agaccccagagcaccagctctcccatgtcagcgctccaggacatcagctcagcacctcgctgcctctgtgcctggtgattggctcagcagagagcatggccaacctcctccncatcaggacagagcgcgaccaggccatcaaggatctacaggcagaagtgtcacagctccgcctacggctggaggacagcctacatcgaccacacccaagcagcccaactcatgtagcttctgctttcaaccactccacgaggaccgaggacaagctgttggattcctcaccctcctggagctcccactatggcagtaaatccacagagaggttgtctggggagtctgatggtacagagccagctgtgccgacaggaagacagcgagcccaggtccctctcgtgcctcgggatgtacccagactgttcttaagttcagaatcggaatctttttcttctcggctgtcatctgggaagagcaggacctttgaggagcatccccaggctgcacgggaggggacaagatcatcaggcagcatgaggcggaaggaaagagtctctttccagggccaatacacaggccaggagtaccacattctgtcccctaaggctgtcctgaaagacagtggcacagcctcctgcctccactgccagcccattaggacccaggacccaggcagtgctgtccctagagagccatcagaaccatccactgctgacaccctccgctgtcccacgtgtggtatagtaaggtccactgcagaagcggatggccccagctctctcctcggctcccatcactgccttacccaccacccactgtgtactatgcaaccccagcacctacctcagcccggacagcctcctcacagcctgcccaggggcctcggggaacccggcactctgtccatctgggtctgaatgacctggaagagctgcaggccgcactcagcgaggctgcccgggccggaatgtgcgctccaccacccgccagctgagccgttccctgtctgcagacctgcgccatgcccggagcctgcgaggctcttgccttttctgactccctggagactctgagactctgaggcaggcagtctctgttgtcccccagtcaccagtcacctggagccattgatggctggaagatggggatgtgtgtgtgtgtgtgtgtgtgtgtgtgtgtgtgtgtgtaaagacatccccaaaagtacaaaaaaaaaaaaaaaaaaaaaaaaa

SEQ ID NO: 5447 - DNA, 1226 bp, Cricetulus griseus
gaaggagaaacgcaaaagacgtaggcagaatatagctcggttgagagcccttgcagccccaccggaggaggaggaggatgtttctactgacgaccaacttacggaaagactggagatagagcgacaaaaattacatgaagaatggctgctgagggaggaaaaggcgcaagaagaattcagactaaagaagaaaaaggaagaagccgctagaaaacagagggaagagcaggagagacagataaagttggaatgggaagagcaacagaaaaaacagagagaagaagaggagcagaagctacaagagaagagaggaagagaggaagcagtgcaagaaaaatgctggaccaggctgaaaatgaatggcacttggcagaacccggaaccacccaaggaattaagactaggagaaatatcgagccaagttgtcctttctacagtaaaacaggagcgtgccgatttggtaacaggtgttcacgaagcacgacttccccacctcgagtccacccttcttgtgaagagcatgttcacaacgtttgggatggagcagtgcagaagggacgactatgactctgacgcaagcctggagtacagcgaggaggagacctaccagcagtttctggacttctaccatgatgtgctgcccgagttcaagaacgtggggaaagtgactcagttcaaggtgagctgcaacctagaacctcacctgcggggcaacgtgtatgtgcagtaccagtcggaagaagaatgccaagcggccctctctctctttaacggaagatggtacgcaggacgacagctccagtgtgagttctgcccggtgacccggtggaaaatcgcaatttgtggtttatatgaaatgcaaaagtgtccaaaaggaaagcactgcaactttcttcatgtgttcagaaaccccaacaatgaatttagagacgctaacagagatgtctacctgtctccagcttggactggcttctctggtaaaaactcctcagacaggagggaaaggaaggaccaccatgaggaatactatggcaagccaaggacctcccactccagtgcacaccactcctccaagagaaacagggagtcggagaggaagagtcctcataggcgaaagaggtctcacaagcaggaaacaaagggtcgcgagaggcacagctcaagaagaggaagagaagaggacagcagtccaggcccgcaaaagccagagccacagatcctgagcc

SEQ ID NO: 5448 - DNA, 1226 bp, Cricetulus griseus
ggctccgctcccctcagcatgaacccgatccagagtttccactgtaagctgcggggtctggccgccgtgctggaccacgagacggcccggctgctgcgagcgctggacggcgaggacagcgactttgaggattatccaatgagaatattgtgtgaccttcactcagaagttcagactctaaaggatgatgttaatactctgcttgataaagcaagattggaaagtcaagaaagcacaagattcataaaggcaacaaaagtactgatgaaaaaaaattccacagacatcatgaaactaacagagtttttccagaagtatggctatcagtcacgagacaaagaagagtcaggatgtgagcacaaagtcagtgactcagcctcggagttggatgtgtgtgaagaccttcagatgcctggtgtggagggtgatctgtccgatccatgtgttccaagcagttctgtttctgaaaatctcctactacgcagcccacagctttcagattttggacttgagcggtacatggtctcccgagtcccaaaccccctccccaggcagctgacagccttaaagaagggtccgtatctgaaactcctccctccaaagactcttcggttacagtgataaagactcccaggtgtgctctaaagatggatgatttcgagtgtacaactcctaaattagaacactttggtatatctgaatatactatgtgtttaaatgaagattatacaatggcacttaaaaataggaagaccatcaaaagctcccctctgaatagtgccagtggagaggccatagggacagagcctgtgaccaaggagaattcttttgccattcctggtttcgtagtccagcagctagaaaaaactgatactgaatgcagaaattcaccattgccacctaaactctgcactcctggtttgaaacttccttctacagtagacagtacagctttggtatataaaaattatccattgtcaaaaccaaatacttcattaagccatatggaggttaaagattatgctccgttaattttaaattcagatgaatgctacgagagttttgcagaccccccttctcctacaattacttcttgtgagaatatcagaacacccagtcctccagaagtcactgcaattccagaagacattctccagatattaacaaagcacaactcaaacctagctacttcattggaggttaaaacgatgccactcaggaaaggc

SEQ ID NO: 5449 - DNA, 1225 bp, Cricetulus griseus
ggcgaagggaggtcactgcgtgaaggtgtgtatccgctacggtcgtgctgagtgcctcccagagctgagagcgtccggaacaaccatgtcctactgccggcaggaagggaaggatcggatcatatttgtgaccaaagaagaccatgaaactccgagcagtgcagagctggtggctgatgaccccaatgatccctatgaggagcacggattgatactgcccaatggagacattaactggaattgcccatgtcttgggggaatggccagtggcccctgtggggaacagttcaagtctgccttttcctgcttccactacagcaaagaggaaatcaagggatcagactgtatagaccagttccgggccatgcaggaatgcatgcagaaatacccggacctctatccccaagatgaggaggaggaagaggaggcaaaaccaccggagcaggtggaagaaacagctgctgctaaagcctctgcagccaaagagcaggggtcaagctcctgaagccacagaccctggctgccacttgccatgggacttcatgcacaatgccttttggtcacctctgtgaaagctctttccctctgtgcactgtaatgtacaaaataacttattttaatgatcaggggtcttggctacttgccgtgtacactgaagaaaagggggtgtgtatacacctgtgtcctgcataaacctgtccttgagcgttaagccactgctggacgtactctctgattgccctggattttgccactttgaaatactgtgctgagatttctcagcaaccaaaagttgttactcaggaaagcttatcgtgagaaagccttttggtagattttacacctcaagttgggaaattacgtagatgccaaaactccttcaagggtgggtccattcctattggaagaggctgatggtcagatacttgagttggagtacatggggctgctgccttgggcctggcacccatgtttctgtatttgcagtccagactccaaggtgtctacagatgcagggtaagattggaccctgtgactcccagtccctcctaagtgaaaagaggcctggtttttggtttattgttttgctgttctgaagccctggtttggggcccactgttcactcagtctttgatattgaggtggggacctagctgcttccagggcagaagccaacagaggaaacgtctgaatgaagtactcaaattaaaaagaaacaatttct

SEQ ID NO: 5450 - DNA, 1225 bp, Cricetulus griseus
  modified_base (477)..(477): a, c, t, g, unknown or other
cagggtcctctgctcctcctcttcctagcccttcaccctcccagccctcttgcagcctccactcccagtttacaaatccctctattctggagccaacctgatccccaagactgccccacaggttcaggagagtcggggacagttgacccacatgacagatagacatagagcaatctgagtatttcttggaagaccccatggctctgtgaagccaaggtgatggagactgaaccttcttccagtgccttgggttcgtccttccattctaaacctgatgccagagagctggcatccagaatttagtgctctatctgccaggccccctgcctactgtccacagacatctgcttgagggtcctcacattatgaagatatgggaccctcaagcaggggtctgtgggaggcttgatagcctctttcctcaggattttccagatggggacataagagctcagacctgggcctatccctccctcncctttacagcgcatggcagaggtaaggaattgccaggtctgatagcacaactgcccacagccttccctacatgagggtattgtcatagcagaagtccaccggaatgtggctaccaagccaggtggcctagacgttgacctggggaaagtgacctctatttgcccttgccttgcatccagctgtgtgtccctatcatatcaggatgttccaagcctctgggccgctggagaatgtcccaccctcgactcccggccccatctcctcaccctaagtcctgggatgcccaagtccatagcccagtgtcccctttgaggagcctggttaacttatattgttatatagcgtccccgtctgtcatgtctcttaagttattgtgacctacactgggtaccggaggggatgggggatggccttgtctgctgtcccccaagccaggctcctccttctgcttgaaacagaccctcgggggcccctgatgccaccgaggcaattcgcactgtccctgggctgccaggcacctgcgcctgcattcagtcagccgcagaccttgcctaggggagagaggtggttagtggacccaggcagggtactggctgtcccaatgttgtgtgctggggtggaggtggccgggcaccacatgtccttgaagtgccctacttctgatgggctgtgttgctgcctcctctggagggaagcacttggccccaataaaagctggaatcagaaaagaaaaaaaaaaaaaaaaaaa

SEQ ID NO: 5451 - DNA, 1225 bp, Cricetulus griseus
atggcgagacctgggcgcgcagcagtggcaaaagccgggtctgcggggcttagaggccccggacagacgcacgctcgacggcaggagccgccgcggggacagcagcgctcggcagcatggccgggacggcgcagcacggaaaagaagaaagtgaattgcaagcccaagaaccaggatgagcaagaaattcctttccggctccgagagattatgcggagccgacaggagatgagaaagccgctcagtaacaagaagagaaggaaggaggcccagatggctttcaagaagacattggaaaaggaagcaaagggagaagagccagacatcgttgtccccaagttcaagcaaaggaaaggggagtctgatgtggcctacatccaacgcatggagcaggaggcccagcatgtgctgttccttaccaagaaccaggccactcggcagccagaggcgcaagcagctcccaagaaggagaagtctgaagggaagaaagccttccaaaagcggcgacttgaaaaagcccaagaagaaaaaggaggcaagagcagtggacagactggagcaggagttgctaaaagacactgtggagtttggagaagttgtgctgcagcccccagacctgacggtccagcccagaaggggcacaggcagagatgcacctggcaagaagtcgctaatgctaaagatgcttttgggtgctggtggtgtgtccctgactccatccacctcactggcccgccagcggatcctgggggaagagagggaacgggctgtgcaggcctacagagccctgaagaagcagcagcgacaggaagtgacacttacacagccacctggcagctcttctcagagaaagccccagacttgtctatgattcagagaccttggggtccagtcccctggaaactggcctgggagctgctagacctgaaaaagggacgagggcagatgcttgtccctggatgggggcctaagcacaagctttcaatatgggggtggtgtggttttctttcccttccccttttaagagtgaccaccaatgaattctatctcatacagagcaagttcccctaagacttgcctgagacacagaagggatggctggtgttttccctgagcctagctttactctgaaacaagtctcagggaagacaagccaggactactgtagaaagaactcaaccccttaatccagctgatgcctgaagctgctgatgtaggtcagcct

SEQ ID NO: 5452 - DNA, 1225 bp, Cricetulus griseus
caacggcggtggcgtttacagcctgggtccgacagctctcgtagagtctcgggcgtgaggccggaggccccagtccctacgagcccagatgcccatccagcctccaggcaaagaagcagaagagatggaggcagaaggcgactcagcagctgaggtgaatggagaggcggatgagagcgaggaggaacggagcggcagccagactgagtcagaggaggagagctcagagatggatgacgaagattatgagcggcgccgcagtgagtgtgtcagtgagatgctggacctggaaaagcagttctcagagctgaaagagaagttgttcagggaacggttgagccagctgcgtttacgactggaggaagtgggggctgagagagccccagaatatacagagcctctaggagggctgcagcagagcctaaagatccgaatccaggtggcaggaatttacaagggcttttgtctggatgtgatcaggaataaatatgagtgtgaactccagggagccaaacagcacctagagagtgagaagctgctgctgtatgacacactccttggggagctgcaggagcggatccagaggctggaggaggaccgccagagcctagacatcagctctgagtggtgggatgacaaactacacgccagaggcagctcaaagacctgggactcattgccacccagcaagaggaagaaggcacctctcgtttctggcccatacattgtatacatgctgcaggagatcgacattctggaagactggacggctatcaaaaaggccagggcagcagtgtctcctcagaagagaaaaccagatggaccctgacactgcatttccactcagagggtccttggagcagctggcaccacacacaggactaacatttttctgcaaaggcagggggttgcctggtagtcctccagtgttactgctgtcccctgaccccaacactggcctgggctcctctgctctccttgggatctgcatagccgtgaccctgaagctgacctggccaagcaagactggaactcttgagccagaacatgttgggtcttgcccctcctagctatcgctggagatggcagcttcccagactttctcagggccattcctggtgtctgcctcccagattctaaagactggaataaaactcatccttggaccttgaaaaaaaaaaaaaaaaaaaaaaaaaaaaaaaaaaaaaaaaaaaaaaaaaaaaaa

SEQ ID NO: 5453 - DNA, 1225 bp, Cricetulus griseus
  modified_base (1048)..(1048): a, c, t, g, unknown or other
  modified_base (1177)..(1177): a, c, t, g, unknown or other
  modified_base (1200)..(1200): a, c, t, g, unknown or other
  modified_base (1207)..(1207): a, c, t, g, unknown or other
ggagccactgttggggaactttcttgggcacccttcccttcttggggtgctatggagttcccagaacacagtcagcagctgcttcagagcctgcgggagcaacggtctcagggtttccttgtgactgcactgtgatggttggtagtgcccagttcttggcccatcgggctgtgctggcatcctgcagcccattctttcagcttttcacaaggaacgggaattggacaagagggatctgggagagtctgagggtggtggaaccaagggatactgtaggacctttgcaaggcttctatcctccagccccagccccgcccccagctccagccccagttctatcccaggctccagccccagctgaagctgaactggtccaggtgaaagtagaagctattgtgatctctgatgaggagactgacctttcagaggaacagcctcagggacctgaaggactgttcccatctggaggtgcaatgtatgggggacagccttcacagctagacacttttgaggagccaggggcaacaggactagaggaggtggggccaagtgaccacttcctgcctccagaatctcatctaccataccatctgcttccaggttcagggcaataccatcgaggctggtgacctcaccctgcctgcaccaccacgccctgcttgagcccactttaccctcctgctgagtacgaagcagctccggggaactttggggcttttacagaggatgtccccacctgcaagacatgtggaaagaccttctcctgttcttatacactacgacgacacgccacagtgcacacacgagagcggccctatgaatgccgctattgcctgcgcagctacacgcagtcaggggacctctaccgccacatccgaaaggctcacaatgaggacctggccaaacgaagcaaaccagacccagaagctagctccattctaggactgcagcccctctctggctcccagacaacagagagacagagcactggtggtggaggaccacccaaagattttgtacttggtcccaaaaattaatatctggggancatgaactgatgccaggcttgctcttactattgttagatggccacagagaaggctggaggcatctcgtcattcctacgggttggcagaatgaaggttcttcccaagctgaaggtgtctgtacacctttnttgtccagccagataagcagganattaagngcagagcaggtcagccag

SEQ ID NO: 5454 - DNA, 1224 bp, Cricetulus griseus
gtttgctccgccgccgctagaagcccagactcgaggcggtcccgtggccgagcttcgccctcgccatggccctcagcgatgcagacgtgcagaagcagattaagcacatgatggctttcattgaacaagaagccaatgagaaagcagaagaaattgatgcaaaggcagaagaagagttcaacattgagaaaggtcgccttgtgcaaacccaaaggctgaagattatggaatactatgaaaagaaagaaaagcaaattgagcagcagaagaaaattcaaatgtccaatctgatgaatcaagcaaggctcaaagtcctcagagcaagagatgacctcatcactgagctgctaaatgaggcaaaacagagactcagcaaggtggtaaaagatacaaccagataccaagtgctgctggatgggctggtcctccagggcttgtaccagctgttggagcctcggatgattgtgcgttgcagaaaacaagattttcctttggtgaaggctgcagtgcaaaaagcaattcctatgtataaaatcgccaccaaaaaagatgttgatgttcaaattgaccaggaggcctacctgcctgaggaaatagctggtggagttgaaatctataatggggatcgaaagataaaggtttccaacaccctggagagccggctggacctcatagcccaacagatgatgccggaagtccggggagccttgtttggtgcaaacgccaataggaagtttctggactgagcctggggaggtgcagttcacctgaggctgtactctctactcctggggcagcagatatctgtgtggcttcatctttctgttctgataatcagtggatcccctctgcaaccaatgccctcagcccaatgtcaacagaagggagggccacttggtgtgggcaagagcccagcccagctcagctcgtctgacaccacagctacattggttctgcagcaggactcaaggggtcagatggtactgcgtggccctcaccaaggacccatcctccctgctcctcctctagtctagagtgagtgtgcatgctgcccccactctctgggtgtcaagtgcatgtggggcttgcattcctccagctacactggctttactgttactccctgggtctagttttccttatctgtaaatgtgatttaaaatctaagccacaactactctttatttattaaaagaaaaggtttatgtggaaaaaaaaaaaaaa

SEQ ID NO: 5455 - DNA, 1224 bp, Cricetulus griseus
tgcagcggcagtcactcctggacatgtccctggtcaagctccagctctgccacatgctagtggagcccaacctctgccgctcagtccttattgccaacacagtccggcagatccaggaggaaatgagtcgggatggtgtgtggcatgggatggcaccccagaatgtagaacgggcaccaattgaccgcctagtctccacagagatcctgtgccgtacagccagggcagctgacgaggagcaccccactcctgaactggaagatggccccctgcaaagctcagcttctgagctcccaatagtcagcccagcacaggggcaaaggagccctcccagcagcctctgggagctggacaacccacaagaaaaccgggggagctttcagaagtcactggaccagatatttgagaccctggagaacaaaagccccagttcagtggaggagctcttctcagatgtggacagttcctactatgacctggacacggtgctaacaggaatgatgggtgggaccaagcccagtctctgcagtggcctcgagagctttgctgctgctgccccgcctcccagctccacctgcaagtctgacctggctgagctggaccatgtagtagagattctggtggagacctgagaggaggcccctggggggccaaggacaaggccacaccccacggagctcacctgtaccatgatccagggacagacaagcacttgttccaaagtcactgtggaggatggtgggccagagttgtgtttagtctattttaaattaggtaggtgaactttctaaaattaagttttatatgttttgggcaacattttgtcttaagatatattttttaaactttttatactttagattttttccagctattttcttaaaagtatattttttctacaaacgtcctctgctgctacattagaaacatttataacctaaataattacaattggtgtgtgtcatttttaaggtttaaatagagactatttttttggtaatgagtctctacactcccaaggcaacggtgtaaatgtagacggccaggtgtttccacacgaggctccacctcggtctacattcgagggagtgcctgagatgagagccacacagctccactgctcttcaccgggtctgctctgcaagtgctgtcttcctaggcttcagtgtgcagatggttttatttatgcctatttatgtgtaaatgccactgaaggctaaagtc

SEQ ID NO: 5456 - DNA, 1224 bp, Cricetulus griseus
atagagtggaaaatgcaaaacaacgaaattattaaaccggccaaatacttctcagagctggagaagagcatcttgcttgctttagtagaaaagtacaagtatgtgttggaatgtaagaaaagcgatgcacgaactattgccctcaagcagcgcacctggcaggcactggcccacgagtacaactctcagcccagcgtgtcgctgcgggatttcaagcagctgaagaagtgctgggagaacatcaaggctcggaccaaaaaaaattatggcccatgagaggagggagaaggtgaagcgcagcgggagcccacttctgagtaaccacgtcctgggcaaggaaaagatcagcaatatcgctgccggagcagctgtacttcctgcagagcccgcctgaggaggagccccgaatacccaccaggatgcagctgtccaagaatcctttcctgtttcaaatagagaactgtgcgatgacgagaaagagttcgtccattttccagtatgtgagggaacctcacaacccgaaccttcgtgttcagccgtcagagtaacagccaacaaaaactacaggagcaaaacatctcaggaaggtgctttaaaaaagatgcacgaggaagagcaccaccagcaaatgtccatccttcagctgcagctgatccaaatgaacgaggtgcacgtggccaaaatccagcagatagagcgggagtgtgagatggcagaggaggagcacagggtcaagatggaagtcctcaacaaaaagaagatgtactgggaaagaaaactgcaaacttttaccaaggagtggcctgtctcctcttttaaccggccctttcccaactcaccctaagacttggggttggcccccttgtagttaatctgtgttggcaagtttgggatgtgaccttggcggtcgctagcctgtaacagacctccaactaggagaattagagtggaagtagtcacttatttaagaatacattcagggaaacagctgcaccccatgtacccctcaagtggccaagaagctgttacagtctctgaaaatcaccactatgcgtgctataactctgaatgtaatatttcttaattagaattcatagaagaaccatgtgtgagtgtttttattttaaccaaatgcaagtgtgatgataaaggagtgtggctggtgatttctactttattttttagtcttaaaattttaaaaaaaaaaaaaaaaaaaaaaaaaaa

SEQ ID NO: 5457 - DNA, 1224 bp, Cricetulus griseus
  modified_base (1188)..(1188): a, c, t, g, unknown or other
gagacagcatggagccggtgacggtgtccgccgacggcggcgacaggcccgccgcgccctcgggcctgtcggcctcccagcgccgagcggagctgcggaggagaaagctgctcatgaactccgagcagcgcatcaaccgcatcatgggctttcacaggcccgggagcggcgcggaagaagaaaatcaaacaaaatcaaagccccaggacagtgacaaactgaactcccttggtgttccttcagtttcaaagagggtagtgctcggtgattcagtcagcggtggaacatctgaccagcccagtggtgtggcagaagttaagggtacccagctgggagacaaattggactcattcattcagccaccagagtgcagtagtaacgatggtgtggagctccggcagcggagcagaggtgacccgacagcaggctcggcccagagggcttctcaccatggcctagaacagtacctgtccagatttgaggaagcgatgaaactgcgcaagcagctgatcagtgagaagcccagccaggaagatggaagtacaacagaggaattcgactcttttcgaatattccgattggtggggtgtgctcttcttgctcttggcgtcagagctttcgtctgcaaatatttgtctatattcgctccatttcttactttgcaacttgcgtacatgggactatacaaatattttcccaagggtgagaagaagataaagaccacagtgctgacagctgcgctgttgctatctggaattcctgctgaagtgataaatcggtccatggagacctatagcaaaatgggtgaagtcttcactgatctctgtgtctactttttcacttttattttttgtcatgaactgcttgattattggggttcagaagtaccctgaaacctgaagaactgagaacaagtttacaaagtgaaaacaatttcgcttctacattgcagtgtctctaaaagggacaaattggtttataccttttctttcacttttacagaaaaccaatttattagtttccctgatttaaaagggttgaatttgtatcagttctggtatgtgtaaccaaatagaggaacaatgttattaacaatttttcttgtttaattagagatccagtcttaccttcccctaacttctgagatttgtaaccctcctgtgggacctgggtcgtccttgtaagggngtagataaacatgatctcagcctgcctgaaggactg

SEQ ID NO: 5458 - DNA, 1224 bp, Cricetulus griseus
cacttaagggattcctgaagtggccgggcctgagagtgagaccccagtcctaggctggggttctttccaaatagaggaaacggatccagaggggctacagaccaaaattgttgagaaccagacttacgatgagcgtctagagattaacgactcggaagaggttgccagtattagcactccaaccccaggacatcaagtccctcctctttctgccagtcttcctagcaagcctatggctgataacagcagtgatgagtatgaagaagaaaacaacaaggagaagaagaagccctcacagttgacaccgcagcgaggtttcagtgaaaacgatgatgacgatgatgatgactcgtctgagactgattctgatgacgacgatgatgatgaagagcatggagcacctctggaaggggcctatgatcctgcagactatgagcatctgccagtctcagctgagatcaaggagctctttgaatacatcagccggtacacacctcagctgatcgatctggaccacaaactgaaacctttcattcctgattttatcccagctgttggggatattgatgcatttttaaaggtgccgcgtcctgatgggaagcctgaccaccttggcctcttggtgttagatgaaccatctacaaagcagtcagaccctactgtgctctcgctatggttaacagagaattccaagcagcacaacatcacgcaacatatgaaagtgaagagcctggaagatgcagaaaagaatcccaaagccattgacacctggattgaaagcatctctgagttacaccgctctaagccccctgcgactgtgcactacaccaggcccatgcctgacattgacacactgatgcaggagtggtccccagagtttgaagagctcttgggaaaggtgagtctgcccacggttgagattgattgcagcctggccgactacattgacatgatctgtgctatcttggacattcctttctacaagagtcggattcagtccctccacctactcttttccctctactcagaattcaagaactcccagcattttaaagctctcgctgaaggcaagaaagcattcactcctccgtccaactctgcctcccaggctggcgatgcagagacactaaccttcatctgagccgcctcctagggctgtgtttcaaagtctgatgacgacatggtctttgctggcagcttaacatcggcctgctccacagctgg

SEQ ID NO: 5459 - DNA, 1223 bp, Cricetulus griseus
tgtggccggcagcatggcatccaaagctaagaagcgagcgttgggaaacggggttcagcggcctctgggacagcaggaccagcgcgaggaggaagaagaggatgaggtggagggtgaggaagaagacgatgaagacagtgacgaggaagaggatgaagacgagatcgtggacgaggaagtgaatattgaatttgaagcttattccatctcagataatgattatggcggaatcaagaagttactgcaacagcttttcctaaaagctcctgtgaacactggagagctaacagatctcttgattcaacagaaccatattgggagtgtgattaagcaaacggatatttcagaagacagcgatgatgaagtagatgaagatgagatcttcggcttcataagcctcttaaatttaactgaaagaaagggtactcagtgtgctgaacaaattaaagagttggtcctaggcctctgtgagaagaactgtgagaagagcacggttgaacagctggacaagcttttgaatgacaccagcaagcctgtgggctttctgctaagtgaaagattcattaatgttcctccacagattgcactgccgatgcaccagcagcttcagaaagaactggctgaggcacaaaaagccaataagccatgtgggaagtgctacttctatctgctgattagtaagacatttgtggaagcaggaaaatctggttccaaaaagaggcgggatggccttcagcaggaagcactgatgttcgcaaatgcagaggaagagtttttctatgagaaggcagtcctgaagttcagctactcggtacaggaagagagcgacacttgtctgggaggcagatggtcctttgatgatgtgccaatgaagcccctgagaactgtgatgttaattccagatgacaagatgagtgaaatcatggaaaaactgaaagaccatctatctgtctagtccatttcccctggacagtgatgggcttgtttatgtgtaattaccaagaagcccttggagagaaactgaaaatctcattattttattcagattcaagtcctctacaaaaagtagggttctgttccatgtgtctgtgacacatttacatattttttaaaaatttggtcaaaattatgaatgattggttaaaaacttccaataagaaaaaatggaatagtaactttaagaacttaataaaaactattttttattttaaaaccaaaaaaaa

SEQ ID NO: 5460 - DNA, 1223 bp, Cricetulus griseus
tggcacactgtgaccctgtcacccatgctggttggccgagcttccaagggcaatcttaaggcagagaagaagctccttgcttctctggagtggctcatacccaatcggttctcacaactccagaggttgaccctcatccactggaaatctcaagtacaccctgtgttggagctggttagcaagttctgtcctcggctcaccttcctcaagctttcagactgccacaatgtgactgctgacactctggtcatgttagcaaaagcctgctccgagctccacagcctggacctacaccattccatggtagagtccacagctgtggtgaacttcttggaggaggcagggtcccgaatgcggaagctgtggctgacctacagttcccagacaacagccatcttgggtgcgctgctgggcagctgctgcccccagctccaagtcctagaggtcagcactggcatgaactgcaacagcacacccctgcaactgcccgtggaggctctgcagaaaggctgccctcggctacaggtgctacggctcctgaatctgatttggcttcccaagccttgtggacgaggggtgccccagggaccaggctttcccaaccttgaggagctctgcctggctggctcctcctgcaactttgtgagcaatgaggttctgggacgcttgctccattgctcccccaaactgcgcctgctggatcttcgtggctgtgctcggatcacacccagtggcctgtgtgatttgccatgtcaagagctggagcaactgtacctgggcctgtatggcatatctgagggattaactctggctaagaaagggagccccctgttgacccagaagtggtatcataccctgagggagctggacttcagtggccaaggcttcagcgagaaagacttggaacaggccctagctgttttctctggcacctctgggggcttacacccagccttgtgttccctcaacttaaggggtacccgagttacaccaagcactgtcagttctgtgattagcagttgcccagggctgctgtatctcaatctggagtcctgccggtgcctccccaggggactgaagcgtgcctaccggggcctggaggaagtccagtggtgtctagagcagctacttacgagcccactctcctccacttaactagaaacctaccagttttgccctggcccttttcacttggaaatgtttgagcttttgttataataaag

SEQ ID NO: 5461 - DNA, 1223 bp, Cricetulus griseus
gaggggaggtggaggagatggcggcgacggcgacggaagatggcgtccgcagcccggagcgagggcggcggggctgcgagcactatgaccgaggctgtctcctcaaggcaccttgttgtgacaagctttatacttgtcggctctgtcatgacaacaatgaagatcatcagctaaatcgcttcaaagtaaaggaagtgcagtgcatcaactgtgaaaaaatccaacgagcccagcagacttgtgaagaatgtagcacattgtttggagaatattactgcagcatatgccatctgtttgataaagataagaagcagtatcattgtgagaattgtggaatttgtaggattggtccaaaggaagattttttccactgcttgaagtgtaatttatgcctagccatgaatcttcgaggaaaacataagtgtatcgaaaatgtttctcggcagaattgtccaatatgcttggaggatattcacacctcccgcgttgttgctcatgtcttgccatgtggccatctcttacatagaacgtgttacgaagaattgttaaaagaaggctacagatgtccactgtgtatgcattctgccttagatatgagtcggtactggagacagttggataatgaggtagcacagactcccatgccatcggaataccagaatgtgactgtggatattctctgcaatgactgtaatgaacgatccacagttcaattccatatcttaggcatgaaatgtaagcattgtgattcctataatactgctcaagatggaggccgtggagtttcagtggatcagcagtgagcagcctgtccttggctggagaacagttctgtgatgtagataaagctctgtgtaaaagatcccatagctcttactagatgaagcctcttcagatgtgttgatcggaaattcctttagtgtcaagttttgaagtcaatgatgtttgccccagatatagtcacattcatagaaatattttatacttccatggaactttaagtgatactatgcacacagagttcatttctagttcttgatagaactgcatttaattttaattagtctttgattttaaggactgtaatgtaatttttaagttcttattgttaaaatctaattaaatatgcttttgtattttcttttcttttctctctctctctctctctctctctctctctctctctctctctctcttttggtttcgagacggttctctgtgta

SEQ ID NO: 5462 - DNA, 1222 bp, Cricetulus griseus
gggaagacccatcccaagccctccagtcccagagacagtatgcatgtgaaatgtagtgggaagccttttaaacacccaagcaatctggagctacacaaacggtctcatacaggtgagaaaccttttgaatgtaacatttgtgggaaacacttctctcaggcaggcaaccttcagactcacttacgccggcactctggggagaagccgtacatctgtgaaatctgtggaaagaggtttgcagcctctggtgatgtccagcgccacatcatcattcactctggagagaagccacacttgtgtgacacatgcggccgagggttcagcaatttcagcaatttgaaggagcacaaaaagacacacacagctgataaggtgttcacttgtgatgagtgtgggaagtccttcaacatgcagaggaagctggtgaagcaccgtgtgaggcacacgggcgagcggccctacagctgccctgcctgtgggctcgggagacctgcgcaggcacgtccgcactcacactggggaaaagccttatagctgtgagatctgcagcaagtgcttcacacgctctgcagtgctgcggcggcacaagaagatgcatggcagagctgatgccaggagcccagctgtgctggatgagctgagccagaccatcgagacctctgacctggataggtctcagagctctgactccttctcccaggatgtgtctgtcacactgcctgtgtctgtcaagctcccagtgcacccagtggaaagttctgtggcagcatttgaaggtcactgtactggctcctactgtaaactacgctccatgttccaccctcctagcatgagtgaccaggacaaactgggcctggatcctgctaagctgaccaagcccaggagctgcagagccagccacatacctatgcttactcagatgcggacacctcagcagctgctgagcagtcacaggctgatggcatggctgtgacccgttcttccttggccaccctggacaaccactgcccagagccactgggcagccgggcaccttcggtgacgtacagaaactctgagggacagtttttctctagtatgactctctgggggctggcaatgaagaccctgcagaatgaacatgagctagagcagtgatgtgccatctcataacactgaggaagcaccctgcctgcccaagccggcctcccccaggctgaccttgactcacagagatccacct

SEQ ID NO: 5463 - DNA, 1221 bp, Cricetulus griseus
ccctgtgatcctctatgaagtgtgagcctgtggcatggcagacacaagcacccactgccccagcaagaaactcccaggctcaaggtgtagcttccattcaggagtccaggctggtgccacaaccctgaataaactaaactccattggcccagaaccttcagtcgtaaaagggccgtctctcagtgttaactggtattggttggtctgaacaataagtggttggtggctggtgagggctaatggcagaattagcagcccgtttaccccagccacttctgcaagaagcatggcaggacatatgctggtcaggaatgcctggttcctagttacttgcctgacctgctttcttccaagcttgcctagggcccagccttcctaaaagctacagcactttacaagcagagtctgccttcttccagcccctgggctgtaggggctgtacccaagtgggaacttccttcccctcacttcccttacccctacctagtcagagcatttcagccgtttgctacctcgattcctcctgtattggatagagactggggatagtgccagcctcattcttcctacctgcctgccgcttgttcccacttgaaagtggacagtttactggccattaaataagaatggggatcagtgtggaaggcttctcctttcacccagggctggactgatcgctatgatttcatctagttgcccccttccaagttgagagggtgcaggccggggtcaggacaggctgtggaagcctgtacctgtggggacttgccccaaaccacatattctgtctaaactcccttgtctttgtaccagtcccacccatccccaactgtgggggagggctgcctaccacccagtggtgagtaactcacggggctggtgccaatagctatgaggagttcgtcaccccttctcctacagtatcttcaccccttcagggtcagttaagggaaagtactggagctccttggtaagggtcaaaagaagggaaaaaatacataaaaggagtaattaaaatgtgaaggtttgtaaatagtctagactacaataatagttgggacagagtctggtttctatttagagatggctttaaaattttttccttatttgtggaagctctgggcttctaggatgtgggaaatggcttggggagggtggtccccagcacaggaagtctgttgtgttatttgttccaatttcaataaaattatttgtagaccc

SEQ ID NO: 5464 - DNA, 1221 bp, Cricetulus griseus
gtgccgcgtgccgccgcgcccctgggctcgtagctgccggttcggggctgtggcgccgggggcacgcgggcctgtccatggaccgcgccgccgtggcgcgggtgggcgcggtggcgagcgccagtgtgtgcgcggtggtggcgggcgtggtgctggcccagtacatattcaccttgaagagaaagacgggccgcaagaccaagatcatcgagatgatgccagaatttcagaaaagctcagttcaaatcaagaaccctacaagagtagaagaaattatctgtggcctcattaaaggaggagctgctaaacttcagataataacagactttgatatgacactaagtaggttttcctacaatgggaaaagattagagtggtatactaagtcccatggtttgcttgttgaacaaggcataccaaaagccaaacttaaagagattgtggcagactctgatgtgatgctcaaggaaggatatgagaatttctttggaaaacttcaaaagcatggtatccctgtgttcatattttcggctggtatcggtgatgtgcttgaagaaattatacgtcaagctggagtttatcattcaaatgtcaaagtagtatccaacttcatggattttgatgaaaatggagttctgaaaggattcaaaggagaactaattcatgtgttcaacaaacacgatggtgccttgaagaacacagactatttcagcgaactgaaagacaacagcaacatcattctgctgggggactcccaaggagacttgaggatggcagatggcgtagccaatgttgaacacattctgaaaattgggtatctgaatgacagagtagacgagcttttagaaaatacatggactcttacgatattgttttagtaaaagaagaatcattggaggtcgtcaactcaattttacaaaagacattataaacagtttgagagaagacgactaccacaggtccagctgaaatgcactggccatcttgaggaaagactcttacttattaatacatactagctcttgctcatggaccctttcccttcctatggcgtcctctgatctccaggtgtgttggacctgtaaactgcagcccttcttcccgcctccatcacgatactacagattgtttaagcaattaaaaatgatcttaagtcaaaattagacaaagaactcccttttcccaaggaaaaaataagcagtttctaaaaaaaaaaaaaaa

SEQ ID NO: 5465 - DNA, 1220 bp, Cricetulus griseus
ggcaccggtcagcaccgagctcggctacaatggcaccgccaccggggaacgtgcgggaaccaaagcgcggatcccatctatgcaggaagtggagaccctcgacttcccactggaccctctacatgaacttgggaggcgtttctggtgggacttttctggtccacccttctgggagcctggagtgactgcgtgggtcgccgcccactgctggtgctgtcctctcttggcctgctgctccaggtcgtggtgtacatctttgtggtgcagctacaactgcacgtcggcttcttcgtgcttggccgagtcctctgtgcccttctaggagacttcaatggcctcctggccgctagctttgcctctgtggcggatgtcagctctaaccacagtcgcaccttccgtatggctctgctggaagcgtgcattggtgtggctgggaccctggcaagccttctcgggggccattggctccgggcccagggttatgccaatcccttttgggtgaaggagccaaagtccgccaggcttttcacgctccaccatcaccaagccattgtcaacctgtatgcagtcgcagccccagagaagtccaggaagcatatagcgctgtactcattggccatcttcgttgtgatcactgtgcactttggggctcaagacatcctgacactctatgagctgagcacgcccctctgctgggactccaagcttgttggctatggctctgcagcccagcacctaacctacctcaccagcctggtgggcctaaaaactaatgcaaatactgcctggcagacacctgggtggctgagattggcctatccttcaaatatcctgggcatggtagtctttgcatttgctaccaccacacccctcatgttcacagggtatgggttgcttttcctgtctttggtcactacacctgtcatccgggccaagctctccaagctggtgagcaagtcggagcagggagctctcttttcctcggtggcctgtgtgaatagcttggccatgttgatggcctccggcatcttcaactctctctacccagccactctaaaacttcatgaaggggctttcccttcctcctgggagctggcctcctcttcatcccggccattctgattgggtcctggagaaggccaatccacaccctgaattccagcagtttcctcagacgttcctgatctagccagaggccatgaggaacaggtggacccaca

SEQ ID NO: 5466 - DNA, 1219 bp, Cricetulus griseus
aaaagcaagataagactggaagcatgaatgttatccacatgctagaaagtttcaccttccggaaccatgtgtgcatggcctttgaattgctaagcatagacctgtatgagctcattaaaaaaacaaatttcagggcttcagcgtccagttggttcgcaagtttgcccaatccatcttgcagtccttggacgctcttcacaaaaacaagatcattcactgtgacctgaagccagaaaacattctcctgaaacaccacgggcgcagtgcaaccaaggtcattgactttgggtccagctgtttcgagtaccagaagctttacacatatatccagtctcgtttctacagggccccggaaatcatcctgggatgccgctacagcacgccaatcgacatatggagtttcggttgcatcctggcagaacttttgacaggacagcctctgttccctggagaggacgaaggagaccagttggcctgcatgatggagttgctagggatgccaccaccaaaacttctggagcaatccaaacgggccaagtactttattaactccaagggcttgcctcgatactgctccatgactactcaggcagatgggagggttgtgcttcaggggggtcgctctcgcaggggtaaaaagcgaggccccccaggcagcaaagactgggcaacagcactgaaagggtgtgaagattacttgttcatagagtttctgaaaagatgtcttcagtgggacccctctgcccgcctcaccccagctcaagcattaagacatccttggattagcaagtctgcacccagacctctcaccatggacaaggtgtcagggaaacggatagttaatcctacaactgctttccagggactgagttccaagctgcctccggtcgttggaatagccagtaagcttaaagctaacctaatgtccgaaaccagtggtagtatacctccgtgcagtgtattgccaaagctgattagctaatggaccgcttggagatgcatatgtatgtatgtatttttagttaccttgcaaacatgcaaaataggaaaacaacaatgaagcccattcattgatggatatgtttttgttagacttaaacttttttaacaaggtcaagaacatttttatatgactataaaagaactcttcaagggctaaattgtctaaccagcttgtattggccatctggagtatacattaaatgtactttttataggt

SEQ ID NO: 5467 - DNA, 1219 bp, Cricetulus griseus
gggctgtggtactgtgggattgctgctggaacattcatttgagattggtgacagagccaacttccagaagcgtggctcattgctctggaaccagcaggaaggaaccttgtctgcaacacaacggcagctcagtgaggaggagcggggccggctccgggatgtggctgctgtcaatggcctttacagagtccgggttccaaggcggcctggggtacttgatggttcagaagctggtggctacgtgtcttcctttgtcccagcgtgctccctggtggagtcccacctctcagaccaactgaccttgcatgtggatgtggctggcaacgtggtgggactgtcagtggtcgcgtaccccgggggctgccggggctctgaggtggaagacgaggacctggagctcttcaatacatctgtgcagctgcggcctccaggcaccgccccaggccctgagactgcagccttcattgagcgcctagagatggagcaggcccagaaggccaagaaccctcaggagcagaagtccttctttgctaaatattggatgtacatcattccagttgtgctgttcctcatgatgtcaggagctccagacgccgggggccagggcggtggtgggggtgggggcagcggccggtgagcagctgtgccacctagagcagcccaagaaggagttcctgttcctccatctccctattgcatgaacatagaaggctgtcccttctgcaactgtgctctgccatgtggcactgtgtccctttgctacagaaccactaactccaccccaccccactccatcatgcagtttgggaacatgccaagctctctccagcctctgtgcctttgtcctccatgccccatgcccccctcactatcacacttagtctccttgccaaggatatgtggcaaggaggcctctgctgctggtggctggatcagccttgaatgtacactctagcaatttgtgtgcatgttttgagccaggtttgagctagctgctcgacagctgttgtgcacttacttgcaacaaccctatagccacttggccacggagattgctgcatagcctcagctgtgttgtgtggctgttgattaaactgttccctaagcagccaccattcaacctgcttcctgccttctgtggttgtaaatagtcccggatggctgctgtcattggcttgatttatgtttgagtggcttccttaggacatgttacagaggg

SEQ ID NO: 5468 - DNA, 1219 bp, Cricetulus griseus
ccgcccgccccagccatgctgtccgccctcgcccggccggccggcgccgctctccgccgcagcttcagcacttcggcccagaacaatgctaaagtagccgtgctcggagcatctgggggcattgggcagcccctttccctcctcctgaagaacagccccctagtgagccgcctgaccctctacgatattgctcatacacctggtgtggcggcggatctgagtcacatcgagaccagagcaaatgtgaaaggctacctcggacctgagcagctgccagactgcctgaaaggttgtgatgtggtggtgatcccagctggagtgcccaggaagccaggaatgacacgagatgatctgtttaacaccaacgctaccattgtggccaccttgacggccgcctgtgctcagcactgccctgaagccatgatctgcatcattgcaaacccggttaactccaccatccccatcacagctgaagtttttaagaagcatggagtgtacaaccccaacaagatcttcggtgtgacaacccttgacatcgtcagagcgaacacattcgtggcagagctgaagggtttggatccctctcgagtcaatgtgcctgtcattggtggccacgctgggaagaccatcatcccattgatctctcagtgtacccccaaggttgactttccccaagaccagctgaccgcactcaccgggagaatccaggaggctggcacggaagtcgtgaaggccaaggctggagcaggttctgccactctgtccatggcttacgctggagcccgttttgtcttctcccttgtggacgccatgaatgggaaggaaggtgtcgttgagtgttcttttgttcagtccaaagagacagagtgcacttacttctccacacccttgctgttggggaaaaaaggcctggagaagaacctgggcattggcaaaatcactccttttgaggagaagatgattgccgaggccatccctgagctaaaagcctccatcaagaaaggcgaggactttgtcaagaacatgaagtgagaggttgaagccccaggcagcagcatcgccctaacttattccacatcatgtctctgcagccaccagggccttcgatttgctttgatggtgggtgttgtaccggcatcggcatctctccccaatggtggctggtctattgataatgacaataaagcagactgtccttttctacaaaaaaaaaaaaaaa

SEQ ID NO: 5469 - DNA, 1219 bp, Cricetulus griseus
ggtggggaagccgtggcagcaagctcccggaggcgaggctcgcgcgcccgcccccgccctggccccagcgcccacccggtcggcccggcccagccatgatcaaggccatcctcatcttcaacaaccacgggaagccacggctctccaagttctaccagccctatagtgaagatacacaacagcaaatcatcagggagactttccatttggtgtctaagcgagatgagaatgtttgtaatttcctagaaggaggattattaattggaggatctgacaacaaactgatttatagacattatgcaacactatattttgtcttctgtgtggattcctcagaaagtgaacttggcattttagatctaattcaggtatttgtggaaacattagataaatgttttgaaaatgtctgtgaactggatttaatattccatgtagacaaggttcataatattcttgcagaaatggtgatggggggaatggtattggagacaaacatgaatgagattgttacacaaattgatgcacaaaataaactggagaaatccgaggctggcttagcaggagctccagcccgtgctgtatcagctgtaaagaatatgaatcttcctgagatcccaagaaatattaacattggtgacatcagtataaaagtgccaaacctgccctcttttaaataaaatagtaaaaaggccactcccaggtaaatccagagggaaagtcatctaagtttaccatgcagttgtttaccaaaaatagaggaggagagtcttaactttgctcttggatttaagtcaaggtactgtatagaagctgcataaaatcagtatggaagttcaatgttgcttttcttgctcagtgattttaaagaaattgacttttctaaattgcattcctatgcccacataaaggcatgcctctatatattggctattacagtatttctaaaagtgagatgtttctttaattatgtacaacccaaaatgttgatgttttgtatggatcacaagtgcagcattctctagttctttctgctgtttgtcacaattgttatttaaagaaccaagtatgtattgcatgaaaacatgaccttttccttagtttaaataaactccaaggtaactggacttctaaagtacctttctgttttgcttgatatctactttagctaataaattttttttacaaccttctgactcaacaaagtaaataaaatatattt

SEQ ID NO: 5470 - DNA, 1219 bp, Cricetulus griseus
agagagtagctgcagaaagggcagagtcttgcggcaatggtaatagtactggataccagattcgtctccagagtcggttgccaaggaaacagggctctatcttatactgcacaacaggcatcattcttcagtggctccagtcagactcgcgtttgtccagcgttagccatattgtacttgatgaaattcatgaaaggaatctacagtcagatgttttaatgaccattattaaagatcttctcattttcgatctgacctgaaagtaatattaatgagtgcaacattgaatgctgagaaattttcagaattattttggtgactgtcctatgatacatataccttggtttgggaagaagctaagcggcgtggtttcagatatgaaaaagactactgctgggaatattttctgtcttcaaacacactgcagatgctgcataacatgaagggacagtttgctgagcatcttcttggagctggatttgtaagcagtagaagtcctaaagatccaaaagctaatataaattcagataatgagaagataattaaagctgtcatctgtgccggtttatatcccaaagttgctaaaattcgactaaatttgggtaaaaaagaaaaataggtaaaagttcacacaaaatactgatggtctggtttctattcatcctaagtctgtcaatgttataataaagcccattatttaataaaatgtacaatgtgtaaatctcagctaacttcttggtttgttttctagggttctacctatcactaagttcacttagttgctacttttgtttgtttcgtttgtttttaactttttaaaagtgttcttttgccaacttactgccctgtgtagcacaatgtagcaactgagcacatgtctggatgtgatggagttctgtcccagctcagactcttttccttatctgaaggacaggtaaaggttgtgaggaatagacatgctaatgcgtgtaaaggaccgcacactactgtcggatgcatagaatcctcacatagactttgctactgttgtccatgaaataaagagcattaagtacatgcgtaggataccttcctaattaactgacctggaacaaaagctctagataattttaagtcaattaattgcaactgtattttgctgcattggtaaaaacaaagtctactttaaaattatttcagtgtctgtgtacccagactaagtaaatgatggcatatttcc

SEQ ID NO: 5471 - DNA, 1219 bp, Cricetulus griseus
ccggaacctgcactctaggcccggtgcatccaacccggaaggccatggcagtggcgactgtggctgcggcgctcctggccgcactgggtggggcgctgtggctagcaacacggcggttttcggggcccaggggccagcgaatgcagggaggcggtgaccggagcctcatgcacgggaagacggtgctgatcactggggcaaatagcggcctgggccgcgccacggcctccgagctgctgcgcctgggggctcgggtcatcatgggatgtcgggaccgcgccagagcggaggaggcggcgggtcagctccgccaggagctcggccgggctgcgggtcaagagcccaacgccaccgaaggccagctggtcgtcaaggagctggaccttgcctctctacgttctgtgcgagccttctgccaagaactgctgcaggaggagcccaggctagacgtcctgatcaataatgcagggatcttccagtgcccatatatgaagacggaagatgggtttgagatgcagttcggagtgaaccatctgggccacttcctactcaccaatcttctgcttggactcctcaaaagttctgctcccagcaggattgtagtcgtttcttccaaactttataaatatggagacatcaactttgaagacttgaacagtgaacaaagctataacaaaagcttctcttatagtcgaagcaaactggctaacattcttttcaccagagaactagcccgtcgcttagaaggaacaaatgtgactgtcaatgtgttgcatcctggtattgtgaggacaaaccttgggaggcacatacacatcccattgctagccagaccacttttcaatttggtgtcatgggcttttttcaaaactccacaagaaggtgcccagacctccatctacttagcctcttcacccgaggttgaaggagtatccggaaggtactttggagattgtaaggaggaagacctattgcccaaagctatggatgaatcagtagcaagaaaactgtgggatatcagtgaagtgatggttggcattttaaaatagaaataaagataagagggctatttataaggtgacccattatacctttggtcgggagcagcatgtgtgagcatgtgctacttgaaaacagcttcagattgacagtaatctagactgagaaggacacatgtatatttgaagggcactggagctatgtgggctaatacaaagtt

SEQ ID NO: 5472 - DNA, 1218 bp, Cricetulus griseus
gggtgttgctcgttcggccttcattctgtctgtagaaccctgatttctcatccccgttcccaatgttcccggaactcaataaccttctcggcaccaccccagacgggacggagcaggggaaactgactctactctgtgatgccaagacagatggcagctttcttgtgcatcacttcctctccttctacctcaaagctaattgtaaagtctgctttgtggcacttgtccagtccttcagccattataatattgtggcacagaagctgggtgtcagcctgacggcagcacgggagcaagggcagctcgtgttcctggagggtctcaagtcctcagtggacatcttcttccatgctcaggaggagcctcaccccctgcagttcctcagggaggccagtgcagggaacctacagtcgctgtatcagtttgttcgggactccctgaagcccgtggacagtggggaaaccccgtggaagttcccagtgctgttggtggacaacctcagtgtgctgctgagcctgggcctggaggcagttgctgtgctggacttcatgcagtactgcagagccactgtctgctgcgaattgaagggaaatgtggtcgcccttgtgcatgacaacagagatgctgaggataaggagaatggcatcctgctgaatggccttagtcatcaaagccacctggtccttcgagctgagggcctggccacgggattctgcaaggatgtgcatggacagctgaggatcctctggaggaggttgcaacccacagcccggcgggatcaaagcctcacttaccaatacaagatacaggacaagaatgtgtcctttttcgccaagggaatgtctcctgctatcctttgacctggattggagacaactaaagtgactttggtcacgctggactgcagctccactgtgaccagggagggtggaatggtgctgtgagggtgtggatgcctttgttccccaggctctgctctgtaaacacagtgaggactctacacccttctgctgagagcggctgcatggtgaactgcagcagaatggtcccttggagcatcccaggtgacttcagtctcacctgcctctttttggtggctgtgcctttaagagccactgtggtaaagtgaagcagtcagcaagttgtcctgaatggcagccatcctggctgacaactaggacagtgatggctggaataaaaaaggttactcacactagg

SEQ ID NO: 5473 - DNA, 1218 bp, Cricetulus griseus
ctgtttatggttttatgcctgcgaaagcaacagttttcaacctgaagtgtgatcctgtgtttgactttggaactggtcctcgaaatgcagccttctatagccctcatggacatatattagtactggctggatttggaaatcttcgaggacaaatggaagtatgggatgttaaaaactacaaacttatttctaaaccagtggcctctgattctacgtattttgcctggtgtccagatggtgagcacattttaacagccacatgtgctcccagatttacgtgttaataatgggtataagatttggcattatactggctctctcttgcataagtatgatgtgccatccaatggagaattatggcaggtttcttggcagccatttttggatggagtatttccagcaaaaacaataatgtaccaagcagttccaagtgaagtacctagtgaggaacctaaagttgctacagcttacagacctccagccttaagaaataaaccagtcaccaattctaagctgcatgaagatgaacctccccagaatatgaaaccacatccaggaagtgacaagccattatcaaaaacagcccttaaaaatcaaaggaagcatgaagctaaaaaagctgcaaaacaggaagcaagaagtgattcggcttctactcccgtcatcccacagagtgtaccacggaacactatcacccagtctgtttcaggtgatccagaagtagacaaaaaaattaagaatctaaagaagaaactaaaagcaatagagcaactgaaagagcaggcagcctctgggaaacagctagagaaaaatcagttggagaaaattcaaaaagagaccgcccttctccgagagcttgaagatttggaattgggaatttgaagatccacagaaagcaaatttgttggccggaaccagtctaagcaaatctgttagtcccatagtgttcatggagtctccacatgcccacttttcacatcagtctgtatttttaaccatttatccaaggctgcatatgtgtgattatttaatgatgtctattaagttgacttttatggtctgctaccctgtatcatgtcagtatgtgataaagagagatgattggttttccagaaaagcttaacaaattgacagacatttgtttttaatagataacagtatttcctatataaacaaataaagacattttaaattagaaaaaaaaaaaaaaaaaaaaaa

SEQ ID NO: 5474 - DNA, 1218 bp, Cricetulus griseus
  modified_base (225)..(225): a, c, t, g, unknown or other
caagccttctgagacaaaatgaagtacaaaggaaaccagttgcagttctcaagagacctaaccagttaaatagaaaaaataacattccagctaactttaccaggagtggaaataaactaagtcatcagaaagatactcgtcaggcaacttttcttttcagaagaggcctgaaggttcaggcccagttgaacacagaacaactgctggatgatgtggtagcaaagngaactcgtcaatggctacttccaccacaaatggaggaatttgactgtatccattgacaacccgccttcattgcatcctagactccattgtctttgatgctctttgaatttcttactggcttatgctagtcatggaaaatcagcaacaattccatgcttataccaaagatccaaatctgatcctcaatgtctgttatttgccagtacttctacttgataagggatttttggaagccaatcatagaacttgaaaataaactctagtttctccttagctgtgatgcttttcattgaggccaaggactcattataaaacatttttgccaatatgaatatttatatttggttcaggaacaaaacattttagagtggtttgctggtagcttattttaaagcaaaggaaaaacaactgagcatgaacactatctttggaacaatttgtgaaaatacaatataaaagtctttgtttcctgttgttttaaatgttattatacagaggtattagtaattccggtttttggaaaaaatcttaaaaattgcccaaatgttgacataagtacattgaaaaacagtgtctttggtatagtaaatgtttgctcttcatgcattgtaatttaattttctttcaaagtgaattttgcctttgatacaactaagttaaaactcttgagtgctaacatgttgtatataaacaaaacaatatgctttgttgaaggaaaattccctttcttggaatgtggttgtagtcatccttgttcagtttttgaagtctcttttttttttattttaatttaaacagggtgcaacttaaaattttccttttgcatcaaggtgtatgcaaaacaattgatgcagtgcatcacaaaatgaaagtttgtatttagtgaggaggtgctttacactgttactttttggttgttttttgaaaaagttacattagatttattctgaagctgttctatttttgacaaataaaatgtaacaggtttcacat

SEQ ID NO: 5475 - DNA, 1218 bp, Cricetulus griseus
aaacaagcacagagtatttttccaaagataaagacagtatttttaaattacgaaatttatctcgtaaaactcctaagaagcgtggattacttttctctcaggaaaattacagaaaacataagtcatgagagaataatcaatgaagaccaagaaaactcagctgacaacagagagataaagccaggaagatgttgaagaagtttggagatatattattatgatctacctgctccatagaagaactcataaacccaagccaagtaattcctcaatatattatctacaacatgtccaacacaagtaagcatggatggttatactacaagacaaatcagaggatcttccacactgggtattatctgctatgaaatgcctagcaaattggccaaagagtaatgacaacaataatccaacttatgttggatttgaacgtgatgtattcagaacaattgcagattattttctagatctccctgaacctctacttacatttgaatattatgaattatttgtgaacattttgggtttgctgcaacctcatttagagagagttgccatcaatgctctacagttatgttgtttgttacttcccccatcaaatcgtagaaagcttcaactcttaatgtgcatgatttctcgaatgagtcaaaatgttgatatgcccaaacttcatgaagaaataggtacaagatcattgatgatacgtactttttctcggtgtgtgttgtgttgtgctgaagaagtggatcttgatgagcttctcgcttcaagattggtttctttcctaatggatcatcatcaggaaattcttcaagtacccacttatttacagactgcagtggagaaacatcttgagaaaatttcaacttctcaagttgcaattgtaagaacttttggagagcattgttagaagtaaaagcttgtctctaaaggagagaagaagaaaactgagacagtttcagaaggaataccccttaatatataagaaaagatttccaaccactgagagtgaagcagcacttttggatggcaaacctacaatcaagcaaccaatgctgagtttaagaaatgcaaagtttcacagtcttcgatactgacttaaaacttcagtaaatgtggccatacataagagtatttctaacttaaaatgaagtctattaatattattggttcccttaaaaggaccttatgaaagagatggcaaaatagtctttttct

SEQ ID NO: 5476 - DNA, 1218 bp, Cricetulus griseus
ggagagtgctggcgggagaggagaacggcagcgattgacgcggcaggtagaggatgaagaaggagcatgttactcactgtcagttctccgcctggtacccgctcttccgaagccttaccatcaagagtgtcattctcccacttcctcagaatgtgaaagactatttactggacgatgggactctggtggtttcaggaagggaagatccaccaacaagttcccagccagacagtgataatgaagcagaagaaacacagtggtctgatgatgagagcacagccacacttacggcaccagagtttcctgagttcaccactcaagtccaggaagctatcaattcgctcgggggtagtgtcttccctaagcttaattggagtgccccaagggatgcatactggatagcaatgaatagttctttgaaatgtaaaaccctcagtgacatcttcctgcttttcaagagttctgatttcatcactcgtgacttcacacagccattcatccattgtactgatgattctccagatccttctatagaatacgagcttgtcctccgaaaatggtgtgaattaattcctggggctgaattccgatgttttgtcaaggaaaacaagcttattggtatttctcagcgggactacacgcaatactatgatcatatttctaaacaaaaagaagaaatttgcagatgcattcaagactttttcaaggaacacatccagtataagttcttagatgaagactttgtgttcgatatatacagagacagtagggggaaggtgtggctgattgactttaatccatttggggaagtcacagactcactgttgtttacttgggaagacctgacatctgagaacaacctaagaggtgacttcggtgaaggggcttctcaggggcaggattctccagctttccgatgcacaaacagtgaggtcacagtgcagcccagcccctatctgagctaccgactgcccaaggacttcgtggatctctccaccggggaagacgttcacaagctcatagattttcttaagctgaaaagaaatcagcaagaggatgactgaatgctgctttgagaagcaccatgtctacctgcatgccacaatgccacccaccatgatgataatggactaaacctttgaaactgtaagccagacccaattaaatgttttcctttataagttgttgtggtcatgatgcctcttcacagcagtaaaa

SEQ ID NO: 5477 - DNA, 1218 bp, Cricetulus griseus
ggtcctggacgcgccgcccgtgtccctcgagttccgagggccatgcccggccggccctaagtgtgggccggggggcgtccccttgcgcccagaccccgcgctggcgccccccgggccgccgcccggcgcgggggccatggcgttcaccttcgcagcattctgctacatgctcaccctggtgctgtgcgcctccctcatcttctttgtcatctggcacatcatagcctttgatgagctgcggactgacttcaagaaccccatcgaccaggggaacccagcgcgggcacgcgagcgtttgaaaaacatcgaacgcatctgctgcctcctgaggaagctggtggtcccggaatattctatccacggcctcttctgtctgatgtttctgtgtgcagcagagtgggtgaccctgggcctcaacattcccctgctcttctaccacctctggaggtacttccaccgtcctgccgatggctctgaggtcatgtatgatgcagtctctatcatgaatgctgacatcctcaactactgccagaaggagtcctggtgcaaactcgccttctacctgctctccttcttctattacctgtacagtatggtttatacgttggtgagcttctaagggtaaagccggccagggagcaagcccagaatggaccggacgcctgtgcacccctagccctgcccttctggccacagaggcctcagccctggggagacagggggcactggtgcctccagcctctccacctccccaactgctgctgcggggatccccgccttcagagctctccccctccaactagggccaggcaaagctctaaacaggggtgaatgctcctctgctagcctgcagctgggcatggcagttgtcctggaaggggtaggactcccagtcttgtccatttcaggggaacttgggccctgccaccaggcagaccttgatcttggaaattctgggcagccccccttggccctcaccctgaagctccccctgcaggtgggggggcacctgcaccaggaacgagcaggctcaatatgggggcagccccatccctagtctgccctctccccttccccaggctctctttccaacccagtctctacttatcccaaacccagcccatcctgtcccttggtcctattttctatgttgcctggaggagtccggcaccccctccccggccatttgtgacaaaagatgaataaactactgagaac

SEQ ID NO: 5478 - DNA, 1218 bp, Cricetulus griseus
taccatggctgaggactggggagaggagacagcatcagcagaagcttcagggttctcagacttgagtgactcggagttggtcgagtttctggacctggaagaagccaaagaatcaactgcttcacttagcaagcctggcccttcttctgaactccctgggaagggatggcaaacctggaagcttgcagaactggaaaaatggatcagatgtcttgtcgcccatggagagattccatttgaaatatttatatgtcactgacctgtgtactcagaactggtgtgaattgcaaatggtgtatggaaaggaacttcctgggtctttgacacctgagaaggcagccgttttggacactggtgctagcatccacctagcaaaagaactagaacttcatgaccttgtgactgtccccatcaccactaaagaagatgcctgggcaattaagtttctgaacatactatcaatgattcctaccctacagtcagaagggcgcatcagagagtttcctgtgtttggggaagtagagggcatatttcttgttggagtgattgatgagttgcactacacatccaagggggagctggagctcgccgaactcaagacacgaaggcgcccagtgctccctctgtcagctcagaaaaagaaagactatttccaagttagtctatataaatatatctttgatgccatggtacaagggaaagtgactcctgcaagcctaatccatcatacaaaattgtgtctagacaagccactgggaccttcagtgctgaggcatgcccgacaaggaggcttctctgtgaaatctttgagcgacctcatggaactggttttcttgtctcttacgctgtctgatctcccagctattgataccctaaaactcgagtatatccatcaagagaccgcctctgtattgggcacagagattgtagcgtttgaagagaaagaagtgaagagcaaggtgcagcattatgtggcctactggacgggccaccgagatccccaaggtgttgatgtagaagaggcatggaaatgtcggacctgtgactatgcagacatctgcgaatggaggaggggctgtggagcgcccagctcgacactggagcccaaagacagacaactgaaataaatggaagttacactgagaaatgttgatcatttctgttcttaatatacctatataaaaggatctgtctctcagcttggctttcatggatcag

SEQ ID NO: 5479 - DNA, 1217 bp, Cricetulus griseus
  modified_base (1203)..(1203): a, c, t, g, unknown or other
agagagcgggacgtccgtctccgggtcgcagcggctgtggagctgatcacctgggagcgaattaaaaatgggcgatgttgagaaaggcaagaagatttttgttcagaagtgtgcccagtgccacactgtggaaaagggaggcaagcataagactggaccaaatctccatggtctgttcgggaggaagacaggccaggctgctggattctcgtacacagatgccaacaagaacaaaggcatcacttggggagaggataccctgatggagtatttggagaatcccaaaaagtacatccccggaacaaaaatgatcttcgctggaattaagaagaagggagagagggcagacctaatagcttaccttaaaaaggctactaatgagtaattctgatgccttatttattacaaaacaaatgtctcatgacttttaatgtgtattataatttaattcacaccaaaattcagatcatgaatggctaacaatgtttttgttggacagtcctgattaagtaaaacttgacttgtagtaaagtggatacgatcttttttaaaataacaattccagttgcataaatactatcacttctctccctttctcaagataggattggacttaattattaaagttctactttccacaaagatgggggtgtcacctaaacctattgaatggtttatacttaaatttatataactgggcatatgagtatgtttaaacactgggaaaactctgttattgtctcagaaatgagaagactcacctgtgtttcagtttgcattcactggtctgttacatgcaatggctaaacatcaaggattttaattaaaattccctaagtcaaaagatgctgccttttaccactgaaaggcacttactgtggtctatgtgtaatatcaaataaagagtatttagcagttctttatagttgatctattaagttaaaatacttttagaaaccggcaacttagaccttccttttaattcttagtgatctaagactaaattgtaattcagaattgtccttaaaagcccattcagaaacacacaaaaaccggaacttcctttaatcccagcgcacgggagacagaggcagacagatctccgagttcaaggccaggcctagtctatagagtgagttccaggacagccagggctacacagagaaactctatctttgaaaacaaaaaataaaaaataaaaanaaaaagttattaat

SEQ ID NO: 5480 - DNA, 1217 bp, Cricetulus griseus
ctggaacaaccatgtcaccgtctttgcgcgttccagaagcacaacgctacccaggcggaagtgttgtctgaattctccgtggatgtggcaaagaggagcgaatgctagaggtgccgctgaaacagtgtccgaccaagagaaatatgtaggcggaagacctgttaccttcctccggcatggacttcctggttctcttcttgttctacctggccttcttgttgattggtgttgccatgatctgcatcttcacaaaaaaccagcgtttgaaaagcctggtcctgggaggagcacaggtgtgctcctgcataatcccacagtgccttcagagggccgcacagaggcttctgcatcagctcttccacacacgcaacccctccttcatcgtcctgcacctgctcttgcaagggctagtttatgctgaatacaccttggagatatttggctactgccaggagctggagttctatctgccttaccttctccttccctatctgctgctgggcgtgaacctggtattcttcacgctgacttgttccgccaatccaggcatcatcaataaaaccaatgagtcattctttctgcaagtctatcgattcgatgatgtgatgtttccagagaactccaggtgcttcacttgtggcttaaggaaacccgcccggtccaagcactgcagggtgtgtgaccactgtgtgcaccgttttgatcatcattgcatttgggtgaacaattgcatcggggcctggaacaccaggtacttcctcatctacctcttgacactggcagcttcagctgccaccatagccattctgagtgctgcctttctggtccaactagtggcagtgtctgatctgtaccaggaaacttacattgatgactttgggcatctccagtcagtggacacagtctttctaattcagtacctgttcctggcttttccaaggatcatcttcctgctgggctttgtcatggtactgagcttgctcctggctggctacctgtgcttccttctgtacctggctgccactaaccagaccacaaatgaatggtataaaggtgactggacctggtgccagaactgccctatggtgacctggtccccatcagctgagcctcacatctgtcagaacattcactcccatggattttggagcaaccttcgagagatctttctacctgccatcccctgttatgagaaaaagaagaaatagaacgggaag

SEQ ID NO: 5481 - DNA, 1217 bp, Cricetulus griseus
ggatcttgttggtgttgccctgaagactcatacgagctccgcgcggctagttgctaagcataagaatctttggtcaactgccacctgagtcaaagcaacaggaaccctgcatcatgcctcatattgacaatgacgtgaaactagacttcaaggatgtcctgttgaggcccaaacgcagcacccttaagtctcgaagtgaggtagatctcacaaggtccttctcattccggaactcaaaacagatatacaatggcattcccattatcgctgccaatatggataccgtggggacttttgaaatggctaaggttctctgtaagttctcccttttcactgccgtccataagcactacagcatccatcagtggcaagagtttgctagccagaatcctgactgtcttgagcatctagctgtcagctctggcacaggctctactgactttgaacagctcgcacagatcctggatgccattccccaagtaaaatatatatgcttggatgtggctaatggctactctgaacattttgttgaatttgtaaaggatgtacggaagcgcttcccccaacacaccatcatggcaggaaatgtggtaacaggagagatggtagaagagctaatcctctctggggctgacatcatcaaagtgggaattggtcctggctctgtttgtacaactcggaagaaaactggagtggggtatccacagctcagtgcagtgatggagtgtgcagatgctgctcatggcctcaaaggccatatcatttcagatggaggctgcagctgtcctggggatgtggcaaaggcttttggggctggagctgactttgtgatgctgggtggcatgctggctggacacagtgaatcaggtggcgaactcattgagagggatggcaagaagtacaagctcttctatggaatgagttctgaaatggccatgaagaaatattcaggaggcgtggctgagtacagggcctcagagggaaagacagtagaagttccctttaaaggggatgtggaacatactattcgtgatatcctcggaggcatccggtctacatgcacatatgtaggggctgctaagctgaaggaattaagtcggagaactacctttattcgagtcacccagcaagtgaatccaatcttcagcgattcccgataaacctgagaagtctactttcccaaggcagcaactctaccacggggccttccaaagggc

SEQ ID NO: 5482 - DNA, 1217 bp, Cricetulus griseus
gagcgaagtgagaaccatccagatcgcttgtttatctacagcgagaaaactttgcctggaacgccggaaactttttcctgcgcgcgcagtgtctgggacggaggcgagcagcggctgtgcgcggctcggctccggtgactcacgccggggacccaagtgggtgttggctcagaggggctttaagagaacccagaagcagcgttgggagaagccttttctgtgagtagccagagacgtctggtcctgaagacacagctcaatcctcacctggacttatgacccgaggccttgctcccctctgcccattgagttccacaagatgggctccttccgccgtcctagaccacgatttatgagctccctgtgctcagcgagctggagctgaccatccgccacgatctccctgctgggcttcgggacctggtcctgctgaaggtgaagctaggtgactcgctactgttggcacagtccaagttgccctcatctgttgtacaaatgctgctcattctgcagagtgttcatgagcccacaggcccaactgagggctatttgcagctggaggagctggtgaagcaagtggtgtctcccttccttggcatcagtggggaccgcagctgcgcaggccccacgtactcactggctaggaggcattccagggtccggcctaaggtgacagtcctgaactatgcctctctgatgagctctgttggccgggagagatggtcctgactccactaacagagcaggaaggagaggcgtatctggagaagtgtggcagcgttcggcggcacacagtggccaatgcacactcggacatccagctgctggccatggccaccatgatgcactcagggttgggggaggaggctggcagtgaggacaagcatctgctcctgccacccagtttcccaccaccacaccgccagtgctccagtgagcccagcatcctggatagccccgatgaactggaactagaagatgtagcaagtggcagccaggaggactcagggatgaactgtgcttccctcagctgagctgactcctccagggtttccttgtgcctactttgtagtcaggaatgaggactgtatgggtgtgtctcctccatggatcatcctggggctcttgctttgagcgacactgccttattttttagggtgtaaggcaagtctccatgccccctggaaacatctgcaaacctccccactctggtgtct

SEQ ID NO: 5483 - DNA, 1217 bp, Cricetulus griseus
ccgactagtagaaagacaggacagacatccaactatcacaggtggtggtcgacagacaaaggagttagtgcctttggtcaggtgatttctctggacctacgttctcagttccaaggggcagggagttccagatgattctgatttaaaaaaatgaagctgatgatgttgcctaaagagatccgttatacccacattctcaaccgagtgcttcctgcagacatccgagtattggcctgggcccctgtagagcctgggttcagtgctagatttaactgtcttgagaggacttaccgctattttttccctcgtgctgatttagatattgtaaccatgaattatgcagctcagaagtatgtcggcactcatgatttcagaaatttgtgtaaaatggatgtggccaatggagtgattaattttcagaggactattctgtctgcacaagtacaactagtgacttggagcctaggtgaggaaagaagacaagaacctttccagttatgtcaatttgaagtgataggtcaggcattcctgtatcatcaagttcggtgtatgatggctatcctctttctgattggccaaggaatggagaagccagagattattgatgaattgctaaacatagaaaaaaatccccagaaacctcaatatagcatggctgttgaatttcctctagtcttgtatgactgtaaatttgaaaataccaaatggatttatgatcacgaggttcaagagttcaatgttacccacctacaacagctatgggctaatcatgctgttaaaacccacatgctgtatagtatgctgcaaggactagactctgtcatgataacatgtggggcaggaacaaagatggaagaagcaacagaatggagaaacattaagccctccgtcataaagcaaagtagtgcctttgtagaaggagtgaaaacgcgcacatataagcccctcatggatcgccctaaatgcgaaggactggaatcccggatccagcattttgtacgtagaggacgcattgagcacccacatttactccataaggaagaaacaaaggccaaaagggactgtgctgacacagaagaagaaaatactgttttagagaatccaacgaagagggtctgtataatagatgcagaaattaacagtattgtataatcccagtaagctaggatctctgccaggatccaagaagcaacaaccagctaattctaatgactggc

SEQ ID NO: 5484 - DNA, 1217 bp, Cricetulus griseus
  modified_base (416)..(416): a, c, t, g, unknown or other
gaagcctggatccagccacctgggtatattcggattgtgcacaagaacagggcacagacgctgaccagagacagggcctttgagaacactctgaagtcttgggaggacaaacagaagtgtgaacttccccgcccaccatccttttccctgcaccccgagatcctgtccgaggaggaagctacccagatggaccagtttgggcaggcggcgagggggcctcattcacagcattcgggaaatagcgcagtcccacagagacatggaacaggaactcgcacacgctgtcaacgccagctccaaagccatggagcgagtatatggacaagcccctggaaatggtgaataacatcagagtgctgcgcagtgagacagagctactgctggctgggaagatggccttgcaattggatcccctnagaaggaacggcttggggctgccttagtcgagatggaccagcagctcaggaagctgacagatacaccctggatgaagaggatcctttgtgggatcaaggagctgagccggagctcccctgccgccgaggcctagcctctgcattctctgcctgtatcctccgctcctcccaagactgaggcccagggaggacactgccaccactcagcccctggcctttctcatggtgctattccctttgttagtgacaggaagcctgatgcccattggtaacagctttggagtcttgaacatagcaacacagctacctttgagaatacctttcctagctacagtcattcggggccgactttgccagtcctacttgtggctctcgctgacctgccttgtgggccatagggaatgtggtgaaacctgacctcccagcacctggcactcctgcagaaccttcttacctgggccacatgcttggactggcctgtgtactccttgtcagcgtcctttattggtcacatgggcagcaccatgtccacctctactgtgtctcaaaggagagttgggtccatcctcagtggtcctcaccagaatgctctctgtgcctgacagcccctctgtggttcttcacagcagccccgcaaaggccgcccactgctgtttccccctttgttcacgagtttttaattaaaaacaaaggttgtgcactttcctggtttgaaagtgacatgggtgtgtttctaggcttattatatatgtttaaagaaaggaaggaaagccttcctgtttaggccaggcctcagggcac

SEQ ID NO: 5485 - DNA, 1216 bp, Cricetulus griseus
  modified_base (217)..(217): a, c, t, g, unknown or other
tgcaatagcatataaggctggtttgatttttcgatatccggaagaagattatgagtcctttccgctctcagaatctgtgcctctcttctgtcttcctatgggagccactattgaatgctgggatcctcaaaccaaatatccacttcctgttttctcaacatttgttttgacaggttcttcagctgtaaaggtgtatggagctgccatccaattttangagccttaccctcgagagcgtctaacagagaaacagcttatgcagctgggcctgttgacccctgtggagagaaaagtggtctccaaacccatcaattcaaacaagtgcatttgtttgctttcacactggcctttttttgacgcttttaagaatttcttatgtttatctacaaagtttctgtgtctggaccacatccccttcccacttgaaaagaattcagaagacattgttgttttctccagtaatttcacgtaatctggctgatgaaattgaaagttacatgaacctaaaaagtcctctgggtagtaaatcttctagtatggaattgcatggagagggaaaccaagagtctggctctgctactacatttgctcaccctttagaaaggagatcgagtctgcccttagacatggcccaccagcccaagacagtccagacattgagaaaagctcccctacagtgtccagatctaaaaaccattagacggggcgtttcaagccacagactccttatcgcacttacaaactgtagtaaattctttatcagggctaaagttggacaatatactctcaggacccaagatagatgtcctaaaatctagtatgaaacaagcagcaacagtagccagtaagatgtgggtggctgtcgcatctgcctacagctactcagacgacgaggaagaaactaataaagattatagtttcccagccggcctagaagatcatatattgggggataatgtatcatctaatgcaagtatctcaggactggttcccagtgaacttacccagagcaacacaagccttggcagtagtaatagcagtggagatgttggaaaactgcagtgtccaacaggtgaagttccattttcaagaaacatcaaagggcaggactttgaaaaattagatcatgggtcttcgcagaataccagtatgtctactatcaaaattgtgcaatggaggttttgatgtcaagttgctctcagtgtagagcttgtgg

SEQ ID NO: 5486 - DNA, 1216 bp, Cricetulus griseus
gaagccaagctacggacggtggtagggcagctggatccgcagcgtctctggggcactttcctgcgtcccctgctgattgtgcgacccccgggtagccccggcaatctccaagtgagaaagttcctggagaccacgttgcggtcgctatcagcaggctggcacgtggaactggaccctttcacagcctcaacacccttggggccattggacttcgggaacgtggtggccacacttgacccaggagctgcccgtcacctcacactggcctgccattatgactccaagttcttccctcctgggtcacctccctttgtgggggccacagactcggctgtgccctgtgccctgcttctggagctggcccaggcctttgatgtgatgctgagcagagtcaagcagcagcagcaggcagcacccgtgagcctgcagctgatcttctttgacggggaggaggcgctgagagagtggggaccacgggactcgctttatggctcccggcacttagctcacatcctggagtcaatcccacacagccccggccccactaggatccaggctattgagctctttgttcttcttgacctcctgggagcgcccagtccaatcttcttcagtcacttcccccgcacagcccgctggttccaacgactgaggagcatcgagaagcgccttcaccgtctgaacctactgcagtctcacccacaggaagtgatgtacttccagccgggggagccccccggcccggtggaagatgaccacctgcccttcctccgaagaggggtccaggtgctccacctcattgccacgccctttcctgctgtgtggcacacttttgctgacacggaggacaacctccacccacccaccgtgcacaacctgagccgcatcctcgctgtgttcctggctgagtacctgggactctagcctgcagacagatactttggaaggatctttcacacctagctgtgggacatgagaggacaccttgagccagtgcggggtggccaggctcacctcagatagtatgctacaaccacctcaaaccactgcatttcaaggtcatgccagaaaaactgaggaaacgaggaagccaaaggcaataaggcatagtttggcgtctgttctgaagtaaacagactggtctggaagttcccagggatcaaatgatgtaacataaggctggcaattgggccagcaccaccaaccaaatgaatcc

SEQ ID NO: 5487 - DNA, 1216 bp, Cricetulus griseus
  modified_base (15)..(15): a, c, t, g, unknown or other
tatgtataaaattanatcttacacaaatcttttttgagaggcattgtaatacctatatgtgccattaatccatactaaagattttatattactattccaaaagtgcattggctaagatattttaagtattttaaacaaaactgcttataggagacagttttcatatcacagtttgactatagtgttcagaacagaaatactaatactgtaactcacaaatatatttttttacagtggtgcgagaaactttgggaaagtttagtcttatttcatgatacaacctgtatcctaggcagtgaccttttttgtcatttttctaatttatatgcatatatacacttgctgtatgcacacatacacaggctcaggtcactttcttgctttcaaatgtttttatgactataaagcattttcttgggatttttttaatgtttacttttaattttatttgggcaaaactgtcaaatgagaagaaaaactaaagcatgtttcttaattgaccacagtttaagctatagcagcattgatacactcctgtttccatgttagttgcaattaaatctggttagccgcattaatgaaattaaagcaacttctgaggctttccagtttacatgtatgtcataggtttttggttttttttttttttcccccccctttgaaatgtaagtttactccaatgtgttaatgatgtagtcaaatatttattgaaaggcaaaatagagtattttaatgttatacctgccatttttcaagaacattctttgcatctaactgccagtgccattgtcaaccttgttttcaaaattgtacttttttattaaacaaagtgcttaattttaaaagtattatgtggccatcatatagtgtataaaatgtataattgccaattcattgtaacttatttatttttaaacaaaagtataagaatactttttgattaattaaagaaatttgttattaaattgtttcctcttttctaatgtagcataaaaacttatgagtttaactgccaatagatgaccagccatgagtaagtcacttctcagttgccagtctttgctcttagtaaaacaacttacaaatgtttagtttttgtatctaatctgactattaaaatgtttataaagtttatttttaccaaagagatgcaattcattatgataaagttgcaaagtaaacgtcattttgtaacaaaaaaaaaaaaaaaaaaaaa

SEQ ID NO: 5488 - DNA, 1216 bp, Cricetulus griseus
gagtcccgacaaggctcaggacggcactgagacctccgcagaggacgtaagggattagtctgcacgtcgactcgctcacggaccactcgtgctcggcggagtcagatggggagaaattgccctgccgccccggggatcccttgtgcgaatcgggctcggagtgtaaggacaagtttgaggacctggaggatgaggaggaggaggaagacgagtgcgagccggacctggcgcctcccaagcctgtgacctcctcgccactcacgggcgtggaggcacccctgctgagcccggcgcctgaagtcgcgccgcgcggtggcagcggtggcaagacgcccctaggcagccggacgtcgcctggagcgccgccgcccgccaacaagcccaagctgtggtcgctggccgagatcgccacttcggacctcaagcaaccatgcttgggcctgggttgcggacctccggggctgccagctgccgccgcgcccgcctcatctcggggccccctccggggaggcctcgccctactcccgccccctcccctgcctgggccgccacctcttggcaattacacaactacgggaacttgaacgccgcgctgcaaggccagggccttctgcggtacaacgccgcggcctccgcaccaggcgagacactacacgccatgcccaaggcggctagcgacgcggggcaagacgggctcgcatccgctggagtcccactacagggcctccgggcggcggctacgagcccaagaaagatgccagtgagggctgtgcggttgttggcgcaggagtccagccctacctataggagggccaagctcagcagtgcaagtaggtgtcacaattgctttggaaaaaaaaaagtcaggaggccattctccttccccaagctcataagtagacagattcaaaccccagatgtggaaatccggaccacattttgtgccactgtaaaagaggaggatgcacactgcactaccaacccacagacactaaagactggacacacgttgttgggcatatgtgaatttgttggcatagtatagcttccccatgtaagttgtattgcaatgaaatctaaaactttttgtaaataaattctgcctggtttttatttaacattgctggttatacaatctctgttggttgtttaacatgaattctctactaatttatatctaaaactgtaaataaaaacaaactagcctacaaaaaaa

SEQ ID NO: 5489 - DNA, 1216 bp, Cricetulus griseus
gaggcgcctccgcgtgcttccttgtggcagctcagaatgatggatcaagccagatcagcaatctctaacttgtttggtggagaaccattgtcatacacccggtttagcctggctcggcaagtagatggagataacagtcacgtggagatgaaattggctgtagatgaagaagaaaacactgacaataacatgaaggccagtgtccgaaaacatagaaggcttaatggaagactctgctttgggacaattgcagtagtcatcttttctgattggatttatgattggctacctaggctattgtaaacgcacagaacaaaaagactgtgtaagactggcagaaacggagacaggcaattcagaaatcattttaaacccagcagaagcattatctttgccagctggagtgcaggagacttcggagctgttggtgccaccgagtggctagagggatacctttcatctctgcatttgaaagctttcacttatattaatctggataaagttgtccttggtactagaaacttcaaggtttctgccagccctctattatatacacttattgagaagacaatgcaggacgtaagacatccaattgatgggaaacctctctatcgagacagcaattggatcagcaaagttgaggatctttcccttgacaatgctgctttcccctttcttgcatattctggaatcccagcagtttctttctggttttgtgagaatgaggactatccttatttggacactaatttggatacctatgagaaactaattcagaaagttcctcagctgaacgtaactcaaattcaatattgcaaaatttccagtacctttgtcacaaacttaactcacattatcgggagcagtgtcttccataatgtataaagaacaaggtagtttttgcctaccacagtgtctatatcggagacagtgatctccatatgttacactaagggtgtacgtaattatcgggaacagtgtttcccataaattttcttcatgcaatggacatcttcaaagcttgaagatcgttagtatctaacatgaattcccaacttcctgtaactccttagttttagttgcaaaagcatttgtggtcattaagcatttggtgggtaaattcaactgctgtacagaaaaatcattacttccaaggttcttttttcgataataaaaaaaaaaaaaaaaaaaaaaaaaaaaaaaaaaaaaaaaaaaa

SEQ ID NO: 5490 - DNA, 1215 bp, Cricetulus griseus
  modified_base (417)..(417): a, c, t, g, unknown or other
gcgagcgcagccccgacgagagtggcagcatggaggaggcgccccacggctgccccggggccgacagcgcccaggcgggccgaggagcctcgtgccagggatgccccaaccagcggctgtgcgcgtccggcgccggcgccgcaccagacccggccgtggaggaaatcaaagagaaaatgaagacagtgaaacatagaatcttggtgctgtctgggaaaggtggcgttgggaaaagcacattcagtgcacaccttgcccatggcctggcagaggacggagacacacaggtcgcccttctggacattgatatctgtgggccgtcggatttccccaaagatcatgggcttggaaggagagcaggttcaccagagtggctccggctggtctccagtgtatgtggaggacaatctgggggtnatgtctgttggttcttgctcagcagccctgatgatgctgtcatctggaggggaccaaagaaaaatggcatgatcaagcagttcctccgtgatgtagactggggagatgtcgactacctcattgtagacaccccacctggcacatctgatgaacacctctcagtcgttcagtatctggctgcggcacacattgatggggcggtaatcctcaccaccccacaggaggtggcactccaggatgtccggaaagagatcagcttctgccacaaggtgaagctgcccattattggtgtggtggagaacatgagcggcttcatctgccccaagtgcaagaaagagtctcagatcttccctcccacaactgggggtgcagaggccatgtgccaggacctgaagatccctcttctaggcagagtgccgctggatccactcataggtaaaagctgtgacaaaggccagtctttctttgttgaagccccagattcaccagccacagcagcctacagaagtataattcacaggatccaagagttctgtagttctcatcaggtggggccatggctaccagatgctgacaggatttgaagtcacttccttaagatactttaatctcctatcttcctgcttcctccagatcaaaggtacaggtactctgcatacaggtgccattcatcataaaataaaactgtctccatgaacatgcccctagggcctgctttctggaatccaagggactggcaagcttctgaggcacaggactcccaggagctgtttctgcctggattataagcctggggag

SEQ ID NO: 5491 - DNA, 1215 bp, Cricetulus griseus
gcccgcccgcccgccatggaacccggccccgatggctcagccgcgcccggccccctgccatccgcgagggctggttccgagagacctgcagcctgtggcctggccaggccttgtcgctgcaggtggagcaggtgctgcaccaccagcgctcgcggtaccaagacatcctcgtcttccgcagtaaaagctacggcaacgtgctggttctggatggcgtcatccagtgtactgagagggacgagttctcctaccaggagatgatcgccaacctgccgctctgcagccaccccaacccgcggaaggtgctgatcatcgggggtggagatgggggcgtcctacgggaagtggtgaagcacccctctgtggagtctgtggtccagtgcgagatcgatgaggatgtcatcgaagtctccaagaagttcctgcctggcatggccatcggctactccagcccaaagctaaccctccatgtgggcgatggctttgagttcatgaaaaagaaccaagatgcctttgatgtcatcatcaccgactcctcagaccctatgggcccagctgagagcctcttcaaggagtcctattaccaacttatgaagacggcactcaaggaagacggcattctttgctgccagggtgagtgtcagtggctgcatctggaccttatcaaggagatgaggcacttctgcaagtctctgttccctgtggtgggctatgcctactgcaccatccccacctatccaagcggccagataggcttcatgctatgcagcaaaaacccgagcaccaacttccgggagccagtgcagcagctgacacaggcccaggtggagcagatgcagctgaaatactataactcagacatgcaccgtgcggcctttgtgctgcccgagtttacccgaaaggccctgaatgacataagctgagcctaggtgccactgcaacaccacccgagacctcaatcggactggaccaaggagcttccaaggtgtctggggccccaccagccctggaccagactcccagatgactcttgcccaccaaccaagtgttacaggccccagaatgctgcctggcctgccctgctgggtggactcagtctctgtgtctgtctgtctatctctgtggcgtttggccccaaacctataccagctctgtacagcaccgtctatgccctctgtcgcccaacaaaacacgtgtatttataacaagctcagt

SEQ ID NO: 5492 - DNA, 1215 bp, Cricetulus griseus
gcagtgtggctgtcttcagggtggcagtacaggtcctgcccagcgtgcagtctgatgcccatccagccctttgaccaccgggaatggaatgagcctatgcactccctccggatcagtgtagggggccttcctgtgctggcatccatgaccaaggccacggaccctcgcttccgccccgctggagggtgatcctgacatccttcgcgggtgctgccctcctctggctgctgtactcccatcatcaggcccctctctcactacaatgacacctatcccctgtcacccccccagaggactccaggtgggattcggtaccgaatcgcagtcattgccgacttggacacagagtccagggcccaggaggaaaacacttggtttagttatcttaagaaaggatacctgacactgtcggacagtggggataaggtgacagtggagtgggataaagaccatggagtcctggagacccacttggcagaaaagggccggggcatggagctctctgacctgatcgtcttcaatgggaaactgtactccgtggacgaccgcacagggatcatctaccagatcgaaggcaccaaagcagtgccctgggtgatcctttccgacggcgacgggaccgtggagaagggcttcaaagctgagtggcttgccgtgaaggacgagcacctgtatgtgggtggcctgggcaaggagtggaccaccaccacaggggaggtgatgaacgagaaccctgagtgggtgaaggtggtaggccacaggggcaacgtggaccacgagaactgggtgtccagctacaatgctctgagagctgccgctgggatccatcctccaggctacctcattcatgaatctgcctgctggagtgacacgctgcagcgttggttcttcctgccacgacgggccagccatgagcgctacagcgagaaggcggatgagcgcaagggcagcaacctcctgctgagtgcagcccaggacttcaaggacatctctgtgagccgtgtggggacgctggtccctactcacggcttctcatctttcaagttcatccctaacactgacgaccagatcatcgtggctctcaagtccgaagaggacagtggcaggattgccacctacatcatggccttcaccctagatggccgcttcctgcttccagagactaagatcggcagtgtcaaatatgaagggatagaattcatctagatgagtaag

SEQ ID NO: 5493 - DNA, 1215 bp, Cricetulus griseus
taacatggccacgctgcgccggcttttcgccgctccgcggcacttaatggtctgtgagaaatccaacttcggccacgaaaagtctcgtcacaaacaacacgtggagactcattatcacaattacagggtttcatttcttattcctgaatgtgggctgctaccaaaagaactgaaaagcctggccatggaatttgggccctattactctgtgaagaatttacctcttcatgaactagttacacatgagttcatccacacatttgtaaagaaaggttcattctctgcactaacatacaatacaaatattgatgaagataatactgctgcccttctaccaaatgggaagttaattttatcactaaacaaagatacttatgaagaaactggacttcaaggtcatccatctcggtattctggcagaaaacctatgaagtttattatttccattgatttaatggacgttaacctggattctaagaagtatgaaagaataacttggtccttcaaagaaaagaaacctttgaagtttgattttcttttggcttggtatcagacaggtacagaagaatcaacaataatgtcatacttttccaaataccaaattgaagagcatcagccagatgtggaactgagcacagtgagagagctgcagtgcccagtgctgcagaatgactccctcgaaggagagcctgaggaggcctgcactgccctggagcactttgactggcttggcgctgtcttctgccatacgggccttgataaccagccttataattttatatcaacctaccgctgtccccagccaagcatagtggcagcccaagcttctctgtgtacaatcaagggtttcattctgccagagaagatacacgtccttctggaacagctgtgtcactactttgatgaaccaaagttagccccatggctcaccttgtcagttcaaggctttgcagacagccctgtttcatggagagagaatgaacatggcttccaaaaaggaggagagcacttatacaactttgtgatttttaataatcaggactattggcttcagatggctgttggggcaaatgatgactgtccaccataagaaaatgcaaacttctctcttctctctctctctctctctctctctctctctctctctctctctctgtgtgtgtgtgtgtgtgtgtatgtgtgtgtgtgtgtgtgtgtgtgtgtgtctgtgtgtgt

SEQ ID NO: 5494 - DNA, 1214 bp, Cricetulus griseus
gggagtactatgaaactgacaattataccatgctaccccagctatgaggagggctgtgctagagaccaagcggagtcttgaggctgctgggcatacgctggtccctcttgccaaacaacataccctacgctctggaggtcctgaccacaggtgggctgttcagtgacggtggccacactttcctccagaacttcaaaggtgactttgtggatccctgcttgggggatctgatcttgattctgaagctgcccaggtggtttaaaagtctgctgagcttcctgctgaagcctctgtatcctcggctggcagcctttctcagaagcatgcagcctcggtcggctagaaagctgtgggaactgcagcatgagattgaggtctaccgcaactcagtgattgaccagtggaaagcaatgaacttggatgtgctcctgactcccatgctgggccctgctttggatttgaacgcaccaggcagagccacaggggctatcagctacactgtgctctacaactgcttagacttccctgcgggggtggtgcctgtcaccaccgtgaccgctgaggacgatgcccagatggaacactacagaggctactttggagatatctgggacattatactgaagaaggccatgaagaagagtgtaggcctgcctgtggctgtgcagtgtgtggctctgccctggcaggaagagatgtgtctgcggttcatgcgagaggtggagcggctgatgactcccgaaaagcggtcatcctgagggtggtttacctgcccggccatggagggacctaaggcctttgagctctacagccccatctattcaggacactgtatcacctgtgaggaaatgccaagcacagggaagaggtgtccatctgccctcccttccattcatcccataaacacactgaattccttccacagtgtgttcaggggaatcaaacagaaacagcccttccttgaatggtcttccgttctaccagcaactaactgttaattacacaacgtgtccgaaatgctataaagcagaagtcctgggtatgatgacatcaagcgagtgctagctacctggcctataatgtgtctgtgagcaggtgtgtcagggaggacttcctgtgtgaagtgacgtctaagctgaaaagaacattgcctaagggccaaggaacgagtgtttcaagaatgtcagagtcaacttaaatgctactgatataac

SEQ ID NO: 5495 - DNA, 1214 bp, Cricetulus griseus
ttctcgagcggagtgtcttccgcagccgcgccttcaccatgagcgtcccggctttcatcgacatcagcgaggaagaccaggcagctgaacttcgtgcttatttgaaatcaaaaggagctgagatctcagaagagaactcggaaggtggacttcatgtagatttagctcagattattgaagcctgtgatgtgtgtctgaaggaagatgataaagatgttgaaagtgtgatgaacagtgtggtatccctcctcttgatcctggaaccagacaagcaagaagcattgattgaaagtctgtgtgaaaagttagtcaagtttcgggaaggtgaacgcccgtctctgagactacaattgctcagcaaccttttccacgggatggataagaacactcctgtaagatacacagtgtactgcagcctcatcaaggtggcagcatcgtgtggggccatccagtacatcccaactgagctggatcaagtgagaaaatggatttccgactggaagctcaccactgaaaagaaacacacccttttaagactactttatgaggcactcgtggattgtaagaaaagtgatgctgcatcaaaggtcatggtggagttgctggggagttacacagaagacaatgcttcccaggctcgagttgatgcccacaggtgtattgtgcgggcactgaaggatccaaatgcctttctttttgaccatcttcttactctaaagccagtcaaatttttggaaggcgagcttatccatgatttattaaccatttttgtgagtgctaaattggcatcatatgtcaagttctatcagaataataaagatttcattgattcacttggcctgttacatgaacaaaatatggcaaaaatgagactcctcactttcatgggaatggcagtggaaaataaagagatttcttttgatacaatgcaacaagagctacagattggagctgatgatgttgaagcatttgttattgatgctgtaagaactaaaatggtctactgcaaaattgatcagacccagagaaaagtagttgtcagtcacagcacacatcggacatttggaaaacagcagtggcagcagctgtacgacactctaaatgcctggaaactaaacttgaacaaagtgaaaaatagccttttgagtctttcagatacctgaatttttatacaaataattttgttctttctttgaggaaaaaaagttctaagt

SEQ ID NO: 5496 - DNA, 1214 bp, Cricetulus griseus
  modified_base (361)..(361): a, c, t, g, unknown or other
gaggcagacaggggcaagcgtgcagcggggcctggtccccagcaggcgggctggggaggccgccactgactctatctgtcattcctttagctatttagggaccaaaggaccaaactttttattgcagatgtgtagctctgtcaattagaggtggaatggagaccaaactccttcctgcctcctggctgttcttgaaacagcttagagcgattctatgaaaaatagtaataaaaaataaaaataaaaaaaaaataaaaaaaaaaaaaaaaaaaaaaaaaaaaaaaagaagtctctgaaatttcctatggttttctgtattatatgtctggatggagctgttaaggtaaacatattggtgganatttggggaaagcaaccaagatattaaatcattaaccatgaagagtgagaacacgagggaaccaggggacttcgaaggcaaggtaattgttgtgaaaagtctgtaaatgcttctaactcttccccctcttaaaatcataatagttgtacagaattttaaaaggaaaagtttaaaatacctatatcatagaagaaaaaattagaggaaagcaaaaaataaaaataaaaaaggaaaaaaaaccttaatagaagttagcgttatgctaaaatcccagatgttgtaggactgtacttctgtagagtttagactgagcatcgatcccgtctccccgcgagtgctgtcggactcggtccccaagggccaggccggactgtccagacctgcaggctccagccggaagcgcccctccgcaagaaaacaaacaatctctgaagaatttctgaaactgtttacaaggaattttgaaaaacagggatgtttaaatgatgccggctctgtttttctgtaaataaatttgcatattttgtaggacttttaattgtaatgatagagaaaaaacaaggaaaactatttaatgaaagcacgatatttatctttggtaaatgactttagagcagttaaagacattgacttaaaaaaaactcagaatcagaaaaaacacgaattatttaagaacacatatattttaaagtataacatatttattataattattgcacccttgggaagacttgctttgcattctgcctcaagagcttctcattgatgtccatctggaggccagaggggtctcagaactatctattttttttctttaggacggcaaaaattctggttgctctcaggcctcctt

SEQ ID NO: 5497 - DNA, 1213 bp, Cricetulus griseus
cttgatagatctcaacagcactcatggcactttcttgggtcacattcggttggaacctcacaagcctcaacagattcccatcgattctacggtctcttttggtgcgtccacaagggcatacactctgcgagagaagccacagacattgccatcagctgtgaaaggagatgagaagatgggtggagaggatgatgaactcaagggcttgctgggacttccagaagaggagacagagctcgataacctgacagagttcaacactgcccacaacaaacggatttcaaccctcactattgaggaggggaatctggacattcagagaccaaagaggaagaggaagaactcacgggtgactttcagtgaggatgatgagatcatcaacccagaggacgtggatccctctgtcggtcgcttccggaacatggtgcagactgcggtagttccagtcaagaagaagcggatggagggatccggctctctgggcctggaagagacagggaacaggcgcatgcagaactttgccttcagtggaggactctacgggggcctgcccccacacataatgaaacaggctcccaaccgcatggcatccatgggacagcactcattggtggcttgcccatgccatatccgaacctcgcccccgacgtggacttgacgcctgttgtgccatcagcagtgaccataaaccccacaccaaaccctgcagtctataaccctgaagctgtaaatgaacccaagaagaagaagtacgcaaaggaggcttggccgggcaagaagcccacaccttccttactgatttgatatttttggctatggagagggtgggcaggggggtggagggctgacaaagggagctaatgaactagggagaaaactttccatgtgtgcggtatcgtctttcagaaagtctcctggggtcctaaccatgtaatattgagactaggggtggggctaaagtgccggttagaggcctgagtcagaacacttgaagtgtggagaaaggcttcccgggcccttctgaggagactgccctggcgccctccctgtgccgccgactcctaggaccatttccatgtgaagtcgctcataggtggaatccagagctatggaggaggcagtagcctcatttaaaattcatttcccttgagagtcccaggtagcaaaatggtcacatggatcccaggttggttggcattcttcattttaacca

SEQ ID NO: 5498 - DNA, 1213 bp, Cricetulus griseus
caagatggaggcactgatcttggagccctccctgtacactgtcaaggccatcctgattctggacaatgatggagatcgactctttgctaagtactatgacgacacctaccctagtgtcaaggagcaaaaggcctttgagaagaacattttcaacaagacccatcggacagatagtgaaattgccctgttggaagggctgacagtggtctataaaagtagcatcgatctctatttctatgtgattggcagctcctatgaaaacgagttgatgcttatggctgttctgaattgcctctttgactccttgagccagatgctgaggaaaaatgtagaaaagcgagctctgttggagaatatggaggggctcttcttggctgtggatgaaattgtagatggaggggtgatcctagagagtgacccccagcaagtggtgcaccgggtggctttgaggggtgaagatgtcccccttacagagcagaccgtgtctcaggtgctacagtcagcaaaagaacagatcaagtggtccctccttcggtgaagatgctctgtgcccagttccttgcccctcaaaaccccacatctgctgtgacttcctatccaggcccccaacagatgctcttagggtcatcttggagcagattggaaagaggcaggggaaacaccctcttcctactacactggtcctcctacccccacattgtctcctggttccttggcccttttctatggcttacttaagatcaaagcaggagaaagaatgtgctgagtgttttcctccctgtgccttaagggctctcatcccagcagcccatatgtccagcaaaggggaggactccttccttcagcacaagtgggtgtggagtggcaggggctgtgcatctttgcctcgcagcagcgtctctccttcctgctgccctgtcctctgcctttggaagaggaacagctcataggagggggacagatctgcagaggaacagtgacttaaatgctgtcagagcttatgcagtgcagtctctaccatgatctggcccttcagcttcaaagctgctgtgcctgcacatgagaacatcctactctaggtctgtaccacacctctgcctgcatcacctgtgaggtctttgggcagcctctgcaagaaatggagtcagacgaagtccaccttgtacgttgctgtgcgtcagacgaataaagtgcatctcttccaaaaaaaaaa

SEQ ID NO: 5499 - DNA, 1213 bp, Cricetulus griseus
  modified_base (1191)..(1191): a, c, t, g, unknown or other
aagacatgttcaagcttctcatgttccccgagagccgcatctttcaggcagaaaatgccaagattaaacgcgagtggctggaagtgctggaggaaaccaagagggcgctcagtgacaagaggaggagggagcaggaggaggcagcggcccctcgtgcgccaccaccagtgacttccaagggcagcaacccctttgaggatgaggatgaggaagagctggccacccctgaggcggaggaggaaaaggtagacctctccatggagtggatccaggagttgcccgaagacctggatgtctgtattgcgcagagggactttgagggcgcagtggacttgctggacaaattgaatcactacctggaagataagcccagcccacctcctgtgaaagaactgagggccaaagtggatgaacgagtgcgacagctcaccgaggtgctggtggagattatcattgaagccaccaagcaccggaactcagaggagatgtggcgtcggatgaacctgatgacccctgaggccctgggaaagctcaaagaggagatgagaagttgtggggtcagtaactttgaacaatacacgggggatgactgctgggtgaacttgagctatacagtagtagcttttaccaagcagaccatgggcttcctggaggaggcattgaaactgtacttcccagagctacacatggtgctcctggagagtctggtggaagtcatcctggttgctgtgcagcatgtggactacagcctacggtgcgagcaggacccagagaagaaggcattcatcagacagaacgcatcctttctttatgaaactgtcctcccagtggtggagaggaggtttgaggaaggtgtggggaagcctgctaagcagcttcaggaccttcggaatgcatctagactcctgcgggtgaaccctgagagcaccacttctgtggtctgaggcctgaggcctggtctgctgtgtgtgtgtatacatgtactacagatgtattatttgtatttacattaattacacttgtcagcacattcctcacagtcacaacagcatattcatggtatcctcttagaaatacaggaaaaggagaaagaaaatgtgttaagccttgaactccgagatccgcctgcctctgcctccgcctccggagtgctgggatcaaaggcgtgcgccaccaaccacaaaaaaaaanaaaaaaaaaaaaaaaaaaaaaa

SEQ ID NO: 5500 - DNA, 1213 bp, Cricetulus griseus
gcacacacgatctgaatatcccactcttcccacttggcttaacggatgaggcaagccatggatcaattgcactggaggacgaccccgagggtcctggggctgatgtggccagcgcacagctccagcaaaagatctcaagtctggagactaaaactgaaagcgtctgaagaaggaggaagctgagaattaaaaaggatgtggactcgctgatggagaagcacagtgtcctggaggaaggtttcctgaaggagaaggagcaggatgccgtgtcctttcaagcccgctaccgtgagctgcaggagaagcataagcaagaattggaagacatgaggaagggctgggcacgaggcgctgagcattattgtggatgagtataaggcacttctgcagtcttcagttaagcaacagttagatgccattgagaagcagtacatgtctgcaatcgagaaacaagctcacaggtgtgaggagctgctccatcctcagcaccagaggctcctggaagtgctggataccgagaaggaactgttaagggaaaaaatccaggaagctttggctcagcagtcccaggagcagaaggaaacacttggaaagtacctgcaggaggaagtgcagaagaataaagagacactggagtcagctgtgaggcttgagaaagaaacgatgaaagatgtcatcacaaaagcggtggaagaagaaaggaaaaacctggaaaaagttcatgctcaggaacgggaactgtggaaagcagagcacgcaagagatgaagagagggtcgcggaggctgtccaggccgccattcaggagcagcgggtgatgagtcaggaagctgtcaaagcagccatcatagaggagcagaagagaagtgaaaaggccatggaggaggcagtgaagagaacgagagacgagctggtggagtacgtgagggagcagagacggcttgatcaagtcacccgccaacggagcctgaccagcctggagctgttcctgtcctgtgcccagaagcagttgagtgctctcatcgctacggagcctgttgacattgaatagagacacactgaccaacctgtccctatcattaagcctgcctactctgaagctgttcatctcctgtgcctggaagcagctgagtgttctaagggccacggagcctggtagtgttgaataaagggaacaagacaggctacctttaccctggccattgtgtcaatca

SEQ ID NO: 5501 - DNA, 1212 bp, Cricetulus griseus
  modified_base (97)..(97): a, c, t, g, unknown or other
tttaacttttttttcgtttttttttagtacttttacctttttatggtcatttaaattgggatttctttcaataaactggctggattctttttaaagngggaaatactgtataggcaaattacttgataacaatgttttaaccaagtggcaacattgtgaagttagtttctgtgcattgcctacttgcattgccctatgcaataactgtagagttacatgtatcaagtctatatgttttatacagatgatatatagtattacatgccaggctgttgaatggaatttctcagtagcagcctagaattgaatagtgagtggcataaagcatatcctttcagaatgaagtgccttaaatatctcagcagtctttttttggacctgcactgactgaactgtaaagtaggagaaagtttcaagatggtatctggagtgaagagggaagatgtagcatggtgcctctgtagacattcttagagcttccaattcccttcagatattttaataagggttttttttttttaaagttgtttaaacgtcaaatgtgaattggtgatgggtgatggagagatccaagaggagtggatgtgtgaatgatggatggctttggtgagaattgtcaagtgtgcggttcccatgcatgttgggtaatgcaaatccttggaaacattgatgatgctatccagtcttgtagctttattacttaagggggtagggaaaataagttcccattctttcgacctccttaagtgtgtgactcttttcctagaatagaaatgcaaatgtgcatgaacagataattgtaccatagtgttcagaaatacaatcatagcattgtctgtttttctcttcatatttgtggtggggggcaaggggcggagtgctggatacagaaattgaagatcgcaatgctatgatgctagtttttcttgactattgccaaggcagagcggactttctagaaagctttgttggaagaaagtatggcatattgcaccactaccctgatttgtagtccctgggcttgccatcactggcttccctagctccttcctcctaaaatacagctgctgggagaagcaggcaagcactttggaggctgcaacatgggggtggttttatttatttcttttgttgccagcaagaatgtggattctttcagggactggttaagccaagaggcagtatttttgctgttttttaaggaaagaatga

SEQ ID NO: 5502 - DNA, 1212 bp, Cricetulus griseus
ggcggcggcggcggcggcggcggcagccagcgaccccgcggcggctcgcaacggactggcggagggcaacgagccggatgaggaggaggacgagcaggtgcggctgctgtcttcgtctctgaccgccggctgcagtctaaggagctccctgggccgggaggccgagccccggggaggatcggacgatacgatacgtccgctatgaatccgagctccaaatgcctgatatcatgagactgatcaccaaagatctgtcagaaccctactccatttatacgtatagatattttatccacaactggccacagctgtgtttcttggccatggtaggggaggagtgtgtaggtgccatcgtttgcaagttggatatgcaacaaaaagatgttccgcagaggttatatagccatgttagccgtggattccaaatacaggacaaataagtctgctttgaaactttatgaaaaccttggttttgttcgagataagaggctgtatactatttaaatggagttgacgcactgcgacttaaactgtggctgcgctgatcgactgacagcaaggaatggctccacccacatggaagcgacttttgcatgcaatgcaatttgtgcagaattgctttgcaggtggatttagtaattcccatgcagctgttatctgtcagtgtccattgagtgtcgcacaatatttgttgctactttggcatggcgcatttattctgaattaaatgagattgtttttaaacttcaagggttcttttggtaccaacaggatgtgccagttaatagccaagacttgttcatttgcaaagtctgctgacagtgctatttacatagtgatcattttatcacagaaccagtaagtgggacatgatttttgttccttaaagaagccaatgtagttaaagtctcttaattatactaacatttcacacacaacctgccatagttttctgaagggtgagggaaaagcttcaatttaggttttattttttcaatattaaattttccattcttgaatattggtacctcagtgattagtggatgacaagtgtagggtgggatttgtcttacaatgagtaaagatgacaattaaattgcgtctgccagtgcctgtgtagataagtattcttgtcttcatctctagttttgaatgcatgctgtcttttcttttctttaatgcctttgcaagcaaacttgttttgatttaaat

SEQ ID NO: 5503 - DNA, 1212 bp, Cricetulus griseus
ctgtgggaaatgctggcgcgcgcggcgcggggcactggagcccttttgctgaggggctccgtgcaggcttctggccgcgctccgcgccgcgcctcctctggactgccccgaaacaccgtggtactgtttgtgcctcagcaggaggcctgggtggtggagcgaatgggccgattccaccggatcctggaacctggcttgaatgtactcatccctgtgttagaccgaatccgatatgtgcagagcctcaaggaaattgtcatcaatgtgcctgagcagtcggctgtgacccttgacaatgtaactctgcaaatagatggagtcctttacctacgtattatggatccttacaaggcaagctatggtgtggaagaccctgagtatgctgtcacccagttagctcaaacaactatgagatcggagcttggcaaactctctctggacaaagtttttcgagagcgggagtctctgaatgccaacattgtggatgccatcaaccaggctgctgactactggggtatccgctgcctgcgttatgagatcaaggatatccatgtgccaccccgagtgaaagagtctatgcagatgcaggtagaggcagagcggcggaaacgggccacagttctagagtctgaagggacacgagagtcagctatcaatgtggcagaggggaagaaacaggcccagattctggcctccgaagcagaaaaggctgaacagataaatcaggcagcaggagaggccagtgcagttctggccaaggccaaggctaaagctgaagcaattcgaatcctggcttcggctttggctcaacataatggagatgcagcagcgtccctgactgtggctgagcagtatgtcaatgcgttctccaagcttgccaaggattccaacacagtcctactgccctccaatcccagcgacgtcacgagtatggtggctcaggccatgggcgtatatggggctctaaccaaagccgcagtgcctggagcccagaactccaacgagaacagcagaggtgcccagggtacagatgcaagtcttgaagaactgggtagagtcaagcttagttaaggagacagcttggccagggagtgggggaccagaaacagtactctcagattctggctctagcctccctgccaaagttttagtttttattttttatttgaacttaataatcatgtaataaacttatcagtggtaaattggaaa

SEQ ID NO: 5504 - DNA, 1212 bp, Cricetulus griseus
aagtactgagattataggcatgtaccaccaggataaataaccaaagatgagtggatggaaaagctcaacaacttacatgttcaacgagcggacatgaaccgtctcatcatgaactacctggtcacagaggggtttaaggaagcagcagagaagtttcgaatggagtctgggatcgaaccaagtgtggacctagaaacacttgatgagcgaatcaagattcgggagatgattctaaagggtcagatccaggaggccattgccctgatcaacagcctccacccagagctcttggacacaaaccgatatctttatttccaccttcagcaacagcacttaattgaacttatccgtcaacgtgagacagaagcagccttggagtttgcccagacacaactggcagagcagggtgaggaaagcagagagtgcctcacagaaatggagcgaacactggctttgttggccttcgatagccctgaggagtcaccttttggagaccttctccacatgatgcagaggcagaaggtgtggagtgaagttaaccaggctgttctggattatgaaaatcgggagtctacacccaagcttgcaaaattactgaaactgctactttgggctcagaatgagctagaccagaagaaagtaaaatatcccaaaatgacagacctcagcaaaggtgtgattgaggagcccaaatagagcctgtgcacggacccagcactgtcaaccagcacaggactcgttcccttctggctgtgactggcccatttgccactgcagtagagaactcttcccccctgtaattttctttggcccttactgtttaaaaaggggaaatggcctttttaaacactggcaaacccatgctggaacacgccacctctgccatgccctgcgtcctgagggttgcacactgcttccggtattgctggctctagaagatctggtttgccacacgtgtgctgcactgctagggagtgtcgtttcagctgcaggcctcacgctcacagagcaggaaagcacaggaacagcactggcgtgctttgccgttctgctgccatgcaggcaggcagttgtttattttcctaggtcttatcagcccttctaagtttttccttaccccttttctttctttttcctcctctttttgttccttcataggaaagaatatataaatttgtaaatcttaattcaaagataacttgtgtgcgggta

SEQ ID NO: 5505 - DNA, 1212 bp, Cricetulus griseus
gtgcagcaacaatgggtgagccccagggatccaggaggatcctagtgacagggggctctggactggtgggcagagctatccagaaggtggtcgcagatggcgctggcttacccggagaggaatgggtgtttgtctcctccaaagatgcagatctgacggatgcagcacaaacccaagccctgttccagaaggtacagcccacccatgtcatccatcttgctgcaatggtaggaggccttttccggaatatcaaatacaacttggatttctggaggaagaatgtgcacatcaatgacaacgtcctgcactcagctttcgaggtgggcactcgcaaggtggtctcctgcctgtccacctgtatcttccctgacaagaccacctatcctattgatgaaacaatgatccacaatggtccaccccacagcagcaattttgggtactcgtatgccaagaggatgattgacgtgcagaacagggcctacttccagcagcatggctgcaccttcactgctgtcatccctaccaatgtctttggacctcatgacaacttcaacattgaagatggccatgtgctgcctggcctcatccataaggtgcatctggccaagagtaatggttcagccttgactgtttggggtacagggaaaccacggaggcagttcatctactcactggacctagcccggctcttcatctgggtcctgcgggagtacaatgaagttgagcccatcatcctctcagtgggcgaggaagatgaagtctccattaaggaggcagctgaggctgtagtggaggccatggacttctgtggggaagtcacttttgattcaacaaagtcagatgggcagtataagaagacagccagcaatggcaagcttcgggcctacttgcctgatttccgtttcacacccttcaagcaggctgtgaaggagacctgtgcctggttcaccgacaactatgagcaggcccggaagtgaagcatgggacaagcgggtgctcagctggcaatgcccagtcagtaggctgcagtctcatcatttgcttgtcaagaactgaggacagtatccagcaacctgagccacatgctggtctctctgccagggggcttcatgcagccatccagtagggcccatgtttgtccatcctcgggggaaggccagacgaacaccttgtttgtctgcttctgccccaacctcagtgcatccatgctgg

SEQ ID NO: 5506 - DNA, 1211 bp, Cricetulus griseus
agctgctggtccagcacctctatggtctcgccctagaggtttgctatttgggggcagtggccgcagttgtgtgggtagcaggccccaagtgacagtagcatggaggaattcgactccgaagacttctccacgtcggacgaggatgaggactacgtgccgtcaggtggagagtacagtgaagatgatgtcaatgaattagtgaaggaagatgaagtggatggtgaagagcaggctgagaaaaccaaagggaaaagaaggaaggctcaggacattccagccagaaagagaaaacaaagtagcctcttgttagaagatgaagaggaggatggcaaggaagaatctggaggtagtggtagtgaagaagatgaagaggagcaagaaggaggccttgggtctgagaacgcaaggaagaagaaggaagatgaactgtgggccagcttccttaatgatgtgggaccaaagtcaaaagcagcttcaagttcacaagttaaggcagtagaggaaaatgaagagactagttcaaataaactgttggtcaaagcagatgagctggagaagcctaaagaatcagaaaaagtgaaaattaccaaggtatttgactttgctggtgaagaagtgagggtgactaaggaagtagatgctgcatctaaggaagccaaatctttcctcaagcaaaatgagaaagaaaaacctcaggcagttgtcacttcagcagcagcagcactccctgctgggtccggcataaaaagatcaagtggcatgagcagccttttggggaaaattggagccaaaaaacagaaaatgagcacccttgagaagtccaaattggactgggagagcttcaaggaggaagaagggattggtgaagaactggctatccataaccgaggaaaagaagggtacattgaacggaaagcttttctggatcgagtggaccacaggcagtttgaaattgagcgagatctcaggctgagcaaaatgaaaccttgacactctgagaattagtagcagcttaaccctattgacaatgtgagctcttctgtgtgtctgtgaactatttccagtgttcttcatcatgtttccagcaagaccctttttctacgttgcaatttggtttatgtatcttaatctcagctggtttcattcattttactttttaaaatttgtctttaaataaacaaagagaagccctctgtgaggttggtgaaagt

SEQ ID NO: 5507 - DNA, 1210 bp, Cricetulus griseus
ccctggtgaaaacctgaggacagagcctctgcccaccatgagtgtcaccccagaggtcaagagtcgtgggatgaagtttgctgaagagcagctgctaaagcatggatggactcaaggcaagggtctgggccgcaaagagaatggcatcacccaggccctcaaggtcacactgaagcaagatacccatggggtgggacacgaccctgccaaggagtttacagaccactggtggagtgatctcttcaacaagactgcagccagcttggtagtggacacagggaaggatggagtgcagataaggcgcctttccaaggagaccacccagcgcagtcaccccaagtccaatttgctgtatcagaagtttgtgaagacagccacactgacctcaggtgaagagaagcctgacagagagagcggcagtgatgatgacagccatgagcccacgcctccaaagattctgactgatgaaatgctactcaaagcttgtgaggggcgaacagcacacaaggctgcccggattggaatcacaatgaaggccaagcttgctcgcctggaagcccaagagcaggccttcctggctcggctcaaaggttcaaaggatgtaggcacctctcaaccacacactgacaaggagccctcccacaaaaagaaaaagaagaggaagcagaaagaggaggaagagactgcaacaaccgaaaagaatgttagtgaggagctcctagaacacactgaccctcagagcttcaagaaaagggagaagaagaaaaggaggcggaaagaccagagagaggaaatggctgtaggaagtggggaggaagaggctgaaggagcaagtgggcctggagaacagagcacagagcaatctgaccagtcttctaggaaaaggaagaaaaagaggaggcggcaccatgaagaagaggggaagatggaagtctgtgatgaaagaggcagagatatgacaggcaggccaaaggcagtggacagtggagcagacccagatccatggagaagcagtaagaagtctcagcagagtggggatgacttggacacccaagatgaagggaagaatggcctaacaaaagcagagagaaaggtcagaagaggcaagaaaaaaagaaaagacagcagtctctgaagaagaagtagtcttggatgtgagcaataagacgatgatgacaggacttgggaagtagagaatgaaggtgagaga

SEQ ID NO: 5508 - DNA, 1210 bp, Cricetulus griseus
tacacagaagaattccggcacctgccactcattaagctttggattggaccagtacccctggtggccctttacaaggcagagaacggtggaggtaattttgaccagttcgaagcaaattgataaatcatttatgtacaagttcctacagccatggctaggactaggacttctcacaagtacagggaacaagtggcgctccaggaggaagttgttaacgcccacattccattttacaattctggaggatttcttagatgtcatgaacgagcaagcgaatatattggttgataagcttgaaaccatgtcaatcaaggagcatttaactacatactttcaccaacaatgtcattgctgaacgggtcagtgacatgaaggcaaaggaggactggacaagtgctggcactggttgtgaaccctccaaaagtaagcgcaaggcctttcttgacttgcttttgagtgtgactgatgaggacggaaacaggttaagccatgaagacatccgagaggaagttgacaccttcatgtttgagggtcacgatacgactgcagctgcaataaactggtccttatacctactgggttcttatccagaagtccagagaaaagtggacaaggaactggatgacgtatttggacggtcccttcgccctgtcaccttggaagacatgaagaagcttaaatatctggattgtgtcattaaggagactctaagaattttcccctcagttcctttatttgcccggagtcttagtgaagactgtgaagtcgctggttacaaaatttcaaaaggcacagaagcagtcctcattccgtatgcattacaccgagaccccaaatatttcccagatcctgaggaattccagccagagcggttctttcccgagaactctaaaggacgccatccctatgcctacgtgcccttttctgctggacctcgaaactgtattggtcaaaagtttgctgtgatggaggagaagaccattcttgcctgtatcctgaggcggttttgggtagaatgcaatcagaagagagaagaactcggcctgtctggagatttgattcttaggccaaataatggcatctggatcaagctgaagaggagacacgaggaaccttaactttgtccttgagaccttatcatgatgaagatcattctgtaagaaacatggtatttgctaatttttagattgtgagccaaaaactctgaatc

SEQ ID NO: 5509 - DNA, 1210 bp, Cricetulus griseus
ggatcggtcatgggcctttgcaagtgccccaagaggaaggtgacaaacctgttttgcttcgaacatcgagttaacgtctgtgagcactgcttggtagccaatcacgccaagtgcatcgtgcagtcctacttgcagtggctacaagatagtgactacaaccccaattgccgcctgtgcaacacacccctgaccagtcgagagacaacccgtcttgtctgctatgatctcttccactgggcctgcatcaatgaacgtgctgctcagctaccacgaaacacggcacctgcaggttaccagtgccccagctgtaatggccccatcttccccccagccaatctagctggccctgtggcttcagcactgagagagaagctagccacagtcaattgggcacgggcaggactgggcctccctctgatcgatgaggcaataagcccagagcctgagcccctcaattccccagacttctctgactggtccagcttcaatgccaccagccctgctgcacaagaggagatagacagcacttctgttgctccaactttctatggccaggttccctgtcccccttctccccccaacctgtcctgagcagcacacagtcatacacatggctagtactgaggccctgacacacgccccaaggaaggtatatgacacacgggatgatgaccggacagcaggattccatggagattgtgatgatgacaaataccgccgccggcctgctctaggttggctggcccaactgctcaggagcaggactgggtcccggaagcggccactgactctgctccagcgggcagggctcctgctcctgctggggctgctgggcttcctggcactccttgcccttatgtctcgcctcggccgggctgcagctgacagtgatcccaatctggatccactcatgaaccctcacatccgtgtaggtccttcctgagcccatgcttgtgtctgggccagcttaggatctgaagtcctggggagagaaggtctgggaggcctgagagcttttgtccacctttcttcctcagtcctaagacactaagatcccctggaccaagtcagttggaggctgaggctgcaggccaggtctgtagccttgttggtcaaattggtcttcacttgcttgtccttgggtctccagcctcctacttaaccctcaaaggagcagacaggtgcaaataaacaacaagactttattaaa

SEQ ID NO: 5510 - DNA, 1210 bp, Cricetulus griseus
gggacacgtcgagccgggcagaggtggcgggggtctttgggacaagtccagaccgggtgaggggatccagttccgagaggaaggcacagacgggcggaggcttgacctgggaagactttttgctgactctcatctttttctggaaaactggatacttccaaccatatggggatgaaccatatgggcatgaaccatatggggatgaaccacatggaccacaatgcctatgaccttctactttggctttaagcgtgtggaactattgttttatggtttggtaatcaacacacctggagagatggctggagcttttgtagcagtgtttttactagcaatgttttatgaaggactcaagatagcccgagaaggtctgctgcgtaagtctcaagttagcattcgctacaattccatgcctgtcccaggaccaaatggaactatccttatggagacacacaaaactgttgggcagcagatgctgagcttcccccacctcctgcagacagtgctgcacatcatccaggtcgtcatcagctacttcctcatgctcatcttcatgacctacaatgggtacctatgcattgcagtagcagcaggagctgggacaggatactttctcttcagctggaagaaggcagtggtagtggacatcacagagcattgccattaacgtcagactccaaatgtggccttatccatttgctgtaggaagcatcttgggaccggaagatatgattccctctccaatcatcccttctttctcctgtctctttatgcacacacacctactgaataggggcttagttgacagtctctgagtagtggtatttctattaagatgaaattgacatttcgcttgagaagccacctgtgagatgtcttctccctcataatcctgagccttgtctaatccaggtagcttcctagttaatgacttggttatctgcttctttttatttttctgggtttttgaggcagggtgtacattatatcatttaatcttgagcctgccctttccagccacttcagaagattaatctaaatgatgtctgcatttgatgtaatgccttaatcactgggtctacattcctgttgactgtttgagactgtaagctcccagagagcagaattgctacaatgggaatgttttaagtgttgtgtgcaagagaacaaaataaatatcttgattttgtgattctaaaaaaaaaaaaaa

SEQ ID NO: 5511 - DNA, 1210 bp, Cricetulus griseus
gctgtgctagccctgctgcccacagtgccactgaaaagtttattgcagagaggtgacaaaatcacatctgagaagctacggagaagccccaagtggactgactgaaggcctggacagggacgggctctttggggagagactggaaggtataatgtggacattctcagtttaggatgtgggaattagccagtgcttacagcatgtcgtggaggatgctgacaggacaccagctctgcaggctgtgtcttctcagaaagccacaaccagctctgaaaatcaaacgttcaacatgtgtcacctatgaaatggacagccaggcaaacaaacaaagcaagagaacagtggaaaagctccaggcatgttcagttgatatcatgaagatctgcagactgaaagcctgggtacttctggaggataacacctatgttgaagagattgcaaatattctgaaagaactcggtgaccaacaaaactgtgatagctagtattttagaacgctgtccagaagcaattgtctgcagtcctgttgctgtcaatgaccaaaaagaaactctggcagatggtctgcaaaaacgaggcagaactaatccggttaatagagcagtttccagaacctttctttaccgtcaaggaccaggaaaaccagaagctgaatgtccagttctttcaagagctgggactcaagaatgtggtgattagcaggtttctgacgactgcctctagcattttccataatcctgtagagaacaacaggcgaatgatcggggttctccaggagagctacctaaacttaggtggctctcaggccaatgctaaagtgtggctactgaagttattgagccaaaatccattcattttgttaagttctcccacagctgtagcccagatactacaatttcttcaagggcaaggcttcacaaactctgaagttcttcagcttctgtccaaacttaaagggtttctttttcaacttcagccaggaagcatccagagcagtatgtcttttactaaggctatttttgagtgcacagaccatgaccttcggcagttagttgtgaactgcccttcgttgctgtgttaccctgcctcaattctagaagagaggatccaggcactgctgaaggaaggaatcaccgtgactcagataagagagtcaccaatggtccttggagttgaccaccaacagatagtccaatacaggataaggaag

SEQ ID NO: 5512 - DNA, 1210 bp, Cricetulus griseus
ccagcgccgccaccgccaggctgctgctgctgcccccagcccgagcgtctggaagccgaaaggccgagcggagcagcagcaccccttatgccggaaggatgctggagatggagaagcgcagtgacgggctgctgcagctctggaagaaaaagtgctgcatcctcaccgaggaagggctgctgctcatcccgcccaagcagctccaacagcagcagcagcagcagcagcccaacctagtggccccaccgtcgccgggcttgagccaccagtcaagctcaaggaattgcacttttccaatatgaagactgtagattgtgtggagcgcaagggcaagtacatgtacttcacagtggtgatggcggagggcaaagagatcgactttcggtgcccccaggaccagggctggaacgcggagatcacgttgcagatggtgcaatacaaaaatcgtcaggccatactggcagtcaaatctacgcggcagaagcagcagcacctggtccagcagcagcctccgcagacgcagcagatccagccccagccccagccccagccccagccccagccccagccgcagccccagtcccagccgcagatccagcctcaaccgcagatccagcctcaaccacagattcagccacaaccgcagcccaagcctcagccgcagcagctccactctcacccgcacccgcacgcgcaccctcatcctcaccctcacccgcacccgcaccctcatccacaccaactccagcacgcgcaccagcctcctcactcgctgccgcacggccaccggcttctccgcagcacctccaactctgcctgaagagggcggcacccagggccactccaggtttcgaggacttcgggaagtgggacaaatgcattgctattgtgttcacttggatccaaaacaacagtctcccccctcccgtgccagctcgagtagtttgtggacatcacccgacttttctgcataatcttcatcagcgtgcaggaagcgattttgagtcaagacgactttatttatgaacctttgaaaggatcgtctaacgtaatggaccttgtaggagcaatttatgtactgtaattttattttaatgtattttggtttatgattatttattagtttttttatgcctattctaagacatttctgaatgtaggccacctccaaagaaaaagaaaaaaagaaaaaaaaaaaaaaaagttaatt

SEQ ID NO: 5513 - DNA, 1209 bp, Cricetulus griseus
  modified_base (277)..(277): a, c, t, g, unknown or other
ggttctccatcaaagcaacaaatgagacctgttatttctgtgacttcagcaatgaaagaagtgggcctggaaggaagtttaactggtacccaagaaagtgcagaagaaatgcaaaagagcaacaatgctatttcaagtaagcgagaaatactgcgtaggctaaatgaaaatcttaaagctcaagaagatgaaaaggaaaagcagcatcactctgattcctgtgagatcgttggtcataaagatgccaaagagtatgagaaagcaaatgctgtttccnctgatcgcaagaagtgggaggtcggaggtcagcttggtgatttcctttggatgaactgacacattctgagcacttgaacttagttcagtcaactcactgtccaccagaagaatcagttttactccgaacccgctctgattcaaccaccaaaaactaaaaccaagaattccttactgattgggctttcaactggtctatttgatgccaacaacccaaagatgctgaggacgtgttcacttccagatctttccaagctgttcagaaccctgatggacgttcccactgtaggagacgttcatcaagacagtcttgaaatcgatgagcttgaagatgagcacattaaagaagggccctctgatttcgaagacactgtgtttgaagaaactgacacagatttacaagagcttcaggcctcaatggagcagctgcttagggagcaacctggtgacgaatacagtgaggaagaagagttggtcttaaaaagcagcgatgtggagcagacagcaaggggaacagatgtggcagacgaggacgacaaccccagcagtgaaagtgccctgaacgaggaatggcactcagataatagtgatgttgagattactagtgaatgtaaatgtgacagtgtctttaaccatttggaggaactaaggcttcacctggagcaagaaatgggctttgaaaagttctttgaagtttatgagaaagtaaaggctattcatgaggatgaagatgaaaatattgaaatttgttcaacaatagttgagaatattttgggcaatgagcatcagcatctctatgccaagattctgcatttagtcatggcagatggagcctatcaagaagataatgatgaataaccctcaggacattctctaatactcaactatatgaaaacattcgaacttggctcataatacaagcttcctggaaaa

SEQ ID NO: 5514 - DNA, 1209 bp, Cricetulus griseus
aggtgtctacacgtctgaccgttcatacgtccgtccctcctggggccggaactgaccatgcccagcggctgctgctgcctacatctcatgtgcctgctgtgcatcctgggggcgagcagccagccagccagagcggatgactgcagctcccactgtgacctggcccacggctgctgtgctcctgacggctcctgcaggtgtgacccaggctgggaggggctacactgtgagcgctgtgtgaggatgcctggctgccagcatggtacctgtcaccagccctggcaatgcatctgccacagtggctgggcaggaaagttctgtgacaaagatgagcacgtctgtacctcacagtcaccctgccagaatggaggccagtgtgtgtatgatgggggtggtgagtaccactgtgtgtgcctgccaggcttccatggacgtggctgtgagcgcaaggctggaccctgtgagcaggcaggctccccatgccggaatggcgggcagtgccaggacaaccagggttttgccctcaacttcacatgccgctgcttggcaggattcatgggtgcccattgtgaggtagatgtggatgactgcctgatgcgcccttgtgctaatggtgccacatgtattgatggcataaaccgcttttcctgcctctgtcccgagggctttgctggacgattctgcaccatcaacctagatgactgtgccagccgcccatgccagagaggggcgcgctgtcgggaccgcatccatgactttgactgcctctgccccagtggctatggtggcaagacttgtgagcttgtcttacatgctccagaccctgccacagtgggcaccccacaaacacccacctctgctgtagttgtacctgctacagggccagccccccacagtgcaggggcaggcctcctgaggatctcagtgaaggaggtggtgcggaggcaagaggctgggctaggagagtctagcctggtggccctggtggtgtttgggtccctcactgctgccctggtcctggccactgtgttgctgaccctgagggcatggcgccggggtatatgccccacaggaccctgttgctacccagccccacactatgccccagctcggcaggatcaggagtgccaggttagcatgctgccagcagggttccctctgccaccagacctgccccctgagcctggcaagaccacagccctgtgatgg

SEQ ID NO: 5515 - DNA, 1209 bp, Cricetulus griseus
cgcgatggcaggtgtaggggtcgagcggctgcaggcgatggtgcgatttacgctgctggtgctcactgtgtgtgctgcgggtgcccatgggctctatttccacatcggcgagactgagaagcgttgcttcatcgaggaaatacccgacgagaccatggtcatcggcaactatcgaacccagatgtgggacaagcagaaggaggtcttcctgccctcgacccctggcctgggcatgcacgtagaagtgaaggacccggacggcaaggtggtactgtcccgacaatatggttccgagggccgcttcaccttcacgtcccacacacccggtgaccatcagatttgtctgcactccaactccaccaggatggctctcttcgctggaggaaaactgcgtgtacacctggacatccaggttggggagcatgccaacaactaccctgagattgctgctaaggataagttaacagagctgcagcttcgagctcgacagttgcttgatcaagtggaacagatccagaaggagcaggattatcagaggtatcgtgaagaacgattccgtctgaccagtgagagcaccaatcagcgggtcctgtggtggtccatcgcccagactgtcatcctcatcctcactggaatctggcagatgcgtcaccttaagagcttctttgaagccaagaagctggtgtagggctcttgctgtatgacctttcccttttaccttaattatttgataatttccccacctagtccctgtccacctggattttgaggaggaaaattgaaaaaacaacgtgtcactggtatcactgccttagggtttgggagaagttggaattaacccaagatcgagtcgttttttttgcctcgagatgaacaaatgttcttctgttttctgtttgtctgcttgtgcagtgggcaactggcataccccatggaggaagcgctgcctcagtgttcctgggtcagtcctgagttctctcaatggctttgtgaatgtaaataagggacatttcttggccctgaaggattgagattttttctatattttagaactatttttggataaattatatattttccttcctggtttgatcatcactgcctgtaactagccaaaaacaccaatccagacctatgcattctacttacacatttttagtatctgccatgaagtgaaataaaactaattaactgtgaacaaaaaaaaaa

SEQ ID NO: 5516 - DNA, 1208 bp, Cricetulus griseus
ggatgacaagccccagttcccgggggcctcggcagagtttgtagacaagcttgagttcatccaacccaatgtcatctccggcatccccatctaccgggtcatggaccgccagggccagatcatcaaccccagtgaagacccccatctgccccaggaggaggtactgaagttctacaggagcatgaccctactcaacaccatggaccgaattctgtatgagtcccagcggcagggccggatctccttctacatgaccaactatggtgaggagggggacgacatgtggggagtgccgccgccctggaccgtacagacctggtgtttggccagtaccgggagggcaggtgtgctcatgtaccgcgactaccctctggaactgttcatggcccagtgctacggcaacgtgaatgaccctggcaaggggcgccagatgcccgttcactatggctgcaaggagcgccacttcgtcaccatctcctcccctctggccacacagatccctcaggcggtgggggcagcctatgctgccaagcgggccaatgccaaccggattgtgatctgttactttggcgagggggcagccagtgaaggggatgcccatgctggcttcaactttgctgccaccttggagtgtcctatcatcttcttctgccggaacaatggctatgccatctccacaccaacctccgagcagtaccgtggggatggcatcgcggctcggggccctgggtatggcatcctgtcaatccgtgtggacggcaacgatgtgtttgcagtgtacaatgccactaaggaggcccggcggcgggctgtggctgagaaccagcccttcctcattgaggccatgacctacaggattgggcaccacagcaccagtgacgacagctcagcataccgctcagtggacgaggtcaactattgggacaagcaggaccaccccatctcgaggctgaggcagtacctgctgaaccagggctggtgggatgaggagcaggagaaggcctggcggaagcagtcacggaagaaggtgatggaggcctttgaacaggctgagcggaagctaaagcccaacccgaacctgctcttctctgacgtgtatcaggagatgccagcccagctccgcaggcagcaggagtcactggtacgacatttgcagacctatggggagcactaccccctggaccactttgacaagtgaggccctggcc

SEQ ID NO: 5517 - DNA, 1208 bp, Cricetulus griseus
ctgcggccgtggcagctgcacggctcccggccccggagcatgcgcgacagccgccccggagcccacagccgcggcgccccgcgtcccgccgccagcgcagccccggacgctatggcccacccctccggctggcccctcgtgtaggatggtagcacgtaaccaggtggcagccgacaatgcgatctccccggcagcagagccccgacggcggccagagtcctcctcatcctcgtcttcgtcctcgccggcggcccccgcgcgtccgcggccctgccctgcggtcccggcccggcccccggcgacactcacttccgcacgttccgctcccactccgattaccgacgaatcacgcggaccagcgctctcttggacgcctgcggcttctactggggacccctgagcgtgcacggggcgcacgagcggctgcgtgctgagcctgtgggcaccttcctggtgcgcgatagtcgccaacggaactgcttcttcgcgctcagcgtgaagatggcttcgggtcctacgagcatccgcgtgcacttccaggccggccgcttccacctggacggcagccgcgaaaccttcgactgcctcttcgagctgctggagcactacgtggcggcgccgcgccgcatgttgggggccccgctgcgccagcgccgcgtgcggccactgcaggagctgtgtcgccagcgcatcgtggccgctgtgggtcgcgagaacctggcgcgcatccctcttaatccggtactccgcgattacctgagttccttccccttccagatctgaccggccgccgccgtgcccgcagcattaagtgggatggccttgttatttcctattattaattattattattttcctggaaccacgtgggagccctccccgcctgggtcggagggagtgggtgtggagggcgaggtgcctcccggcttctggccggagaccccatcctgcctctcggggggcctcccctcctggtgctccctccgggtcccctggttgtagcagcttgtatctggggccagaaagaacctgaactccactcctacctctccatgtttacatattcccagtatctttgcacaaaccaggggtgggggagggtctctggcttcatttttctgctatgcagaataccctattttatatttttacagtcagtttaggtaataaactttattatgtaaagtttttttttaaaagtaaaaaaa

SEQ ID NO: 5518 - DNA, 1208 bp, Cricetulus griseus
ctccccgcgctccctccctgaccgcgaagatggcgctgtccagggtgtgcggggctcgcgctgctctttggggctcggccgtcgcccttggaccctttgtcacccgcaggctgcagctaggtcgctctggccctgcgtggcgggcccctcggtcttcaaggctgcatctttctccaaaggcagatgtgaagaacttgatttcttatgtggtgaccaagacaagagcgattaatgggacataccatcggttcttgggtcatcatttcccccgcttctatgccttatacacagtcttcatgaaaggaatacagatgttatgggctgatggcaaaaaggctagaagaataaaggcaaatatgtggaagcacaatgtaaagtttcatcaactttcttaccgggagatggagcatttgagacagttccgtcgagattcagggagtgcttctctacttggcctctgggcttgaatcaactgcaggctctgcacatgagagccttgagccgggccatcgctcctcaccccttacctgcctccgccttgttgagatggcgtttgaaaagccacaccactgtgatacaccagctggacagggctctggcaaagcgtgggggttggccagctgactgctcaggaagtgaaatcggcttgctatctccgtggcttgaattctacccatattgctgatgataggtgtcggacttggctgggagaatggttgcagatttcctgcagcctaaaagaagctgagctgtccctcttgctgcacaacgtggtcctgctttccaccaactaccttgagacaaggcgctgagtgaaccctggagagaatgacattgtcctgcagttgcagagtatagtagtgtgggaccaaagagcacttgtcagcagtctgcactattagcgtgggaggcagtggagtttcttttaatattctcttatgggtacatcctaaaggaggtgaaaaggaaaggaccggctgcttggccctcccctgcacttatcccccgagcgtcttaattttcaggctgtcacacagcccctaaggcccttatgtgtttgctacctccactgtgttgcactaagccatctgtagtcagcagtggctgccttctttaggccatgggtcaatcgcataaggtactcattactgccgagctgggagatgagatctgcacaagatagtaagctgggtttggctgttgtgtgt

SEQ ID NO: 5519 - DNA, 1207 bp, Cricetulus griseus
  modified_base (310)..(310): a, c, t, g, unknown or other
gctggccgtctcctggcagtgggcactgacctctacgggcagcgcaatagtgccccggagcaggagctgttgctgcaggacactacgtccgtgagcaactccctgctgcctgagaaggcgttcagcgacatcccctcgccctacctgcggggcaccatgaagatgatgcaggcagtgcgccaggccttccaggatcaggatgaccggcgcacgtgggacggtcggcctcttaccatggctgccaccttcgacgactgcctgtatgctctctgcgtggtcgacaccatcaagaggtccagccagactgganagtggcagaacattgccatcatgacagaggagccagagctgagtcccgctacctaatcagtgaggccatgcgcagaagcaggatgtccctctactgttagcacgtgggacctgtgctggagcccttcagagggccaatgaagccttggctcccttccaggctactgacatgttgcactactgaatactctcaaatctgctgcagccttttgtttacaccagcagagaacggagtgatcaaaagaacattctagttgaaatgcttgttgcttagtgcagcgatcaaagcttgcctgggccagtagagcagggaagtcatcatggccatggagtcaccgtgtcagtgttgtctcctgtgccctgtccagctctctgctgtcccctgcagccaccacaagggctaggctgttcaatgagccccatagcttctaagaaatgcaatggcttatttgtagtgctaagtgatatcccaggtgaagaagcaaaagcctacgacctgacctgcccctatattctgccctgtcccttgtttaggggagggagaactttctaacaactatggctttgcttgctgcctggtgctttttagatgtcatttgttttcatttcctcttttaaaaaaaccaaaattgcattggtttggttgtcattgtcaggtgtatatttattgttttacaaatgtgagtatatatgtatgtgtatgtataaaaccaaacttatatataaaaagtcaaggcatgtatactagatattttaaagttatttatcaaagggaaaagatgagtgttataaagtaaaacagagtctatattttatatataatgtagataccaaaagatagcttataaattataggttttactttttttgttttctattattaaacaaaaaaagttaa

SEQ ID NO: 5520 - DNA, 1207 bp, Cricetulus griseus
atggacatggtatttcctgccaattcagacccagagaccccggtgttgaacctcctgccagagcctcaggtggctcgcttcattcgcctgctgcctcagacctggttccagagaggtgcaccttgcctccgggcagagatcctagcctgtccggtctcagatcctaatgacctgtttcctgaggcccacacactgggatctgctgactctctggacttccggcatcacaattataaggctatgaggaagctgatgaaacaggtgaatgaacaatgccccaacatcacccgtatctacagcatcgggaagagccaccagggtccggaagctgtatgtgatgggagatgtcagaccagcctggggagcatgagctgggagagcctgaggtccgctatgtggctggcatgcatgggaatgaggccctggggcgggagttacttctgcttttgatgcagttcttatgtcaagagttcctgcgaggggacccacgagtgacgcggttgcttactgagacacgtattcacctattgccctccatgaatcctgatggctatgagactgcctaccacgaggggctcagagctgggtgggctgggcaggagggtcgcgtcggacccaccgagggcattgaccttaacactaattttgctgacctcaacacaccactgtgtatgagctacctacacaccaattgctttgaagtcactgtggagctgtcctgtgacaagttccctcatgaaaaggagttgcctcaggagtgggaaaacaacaaagatgcccttctcacttacctggagcaggtgcgcatgggcattgcaggagttgtacgggacaaagacacagagctggggattgcagatgctgtcattgctgtggaaggcattaaccacgatgttacaacagcctggggtggagattattggcggctgctgactcctggggactacgtggtggcagccagcgctgagggctaccatacagtcaaacaacattgccgggtcacctttgaggagggccctgttccctgcaatttcctactcaccaagactcccaagcagaggcttcgagatctgctggcagcaggggctaaggtaccccccagaccttcggaggaagctagagcggctgaggggacagaagaattaatgccttcagctgaaagagacatccttggacaggctggacctgtctagaactgagagaggag

SEQ ID NO: 5521 - DNA, 1207 bp, Cricetulus griseus
cgccgccgccgccgccgccaaaatgtccacaggtgtgccttcaggaagttcaagtgctgctgctggcagtaatcgaagactccagcagacacaaaatcaagtcgatgaggtggttgacatcatgagagtcaacgtggataaggtgttagaaagagaccagaagctctcggagctagatgaccgtgcggatgccttacaggctggtgcgtctcagtttgaaacaagtgctgccaagttgaagagaaagtattggtggaagaactgcaagatgtgggcaatagggatcagtgtcctggtgattgttgtcatcatcatcattgtatggtgtgtctcttaatgaagaacccgggaaactgaagcccactgtcaggagcgtcttcgagactttctacttagaacctgctgtgttatcgagcttacctactgttttttccaaatgattatttttgttagtttacatacagttcagtgcctaggaaatgtacctttgttttactgtacactccagatgagggtgtgacccaccctgcccacattttgcacagtgcctttacagatttatgcaccaactagggaagaggacttctgatgctccagagtgttggagtctagatggatgctgtcactgatgacttgctgtggactccaggaaggggacttgttaagtcagctgtccccacatctgacatcgccttcaaaaccacattttaaacctttgggcgattagattcccaacttgtgccttccgaaaagaacactactgcctagtacaaatcggtgacaataacagggtgtgccttattttgatacttggctccttttcattaggaggaccctcgtttttttgtaagcactactgaccctgctgtatttaagatgctatgctctcatgttaggtgtcaagatgtttgctttcttgttcttatgtattatttctaaaaagttaatttaatacaaaagtaacccctttgaagtttttataaaacgatgaccaaagtttctcttttgccaaaagttaaatacaaataaacatcagcctagggcttatgtcctggtctgaccccacaaccttggtgctgttccctccatactcagacccatgcaactcattggctcctgcattaacacagtaatacctcgcttgtctgtgcatttagctgggaactttccagctatgatgtcctgaataaagttgtttattaacatg

SEQ ID NO: 5522 - DNA, 1207 bp, Cricetulus griseus
caaagggcaggtcatcaaagcctgcaagacagaggcagatggtcgtgtggtggaggggaaccatgttgtgtaccggatctccgcccccagccccgaggagaaggaggaatggatgaagtccatcaaagcaagcatcagcagggacccattctatgacatgttggccacgaggaaaaggaggattgccaataagaaataggtaaatgccaagccccagactccatagcagatgtgctggctactcacaagcagcaggacgagggggcagtgtggtgcccatgtcctccagacagctagccaagacccaagccctgaaatcctcgtcctcggggatgttggtcagctgtgagtgtttacttctgcactatcctgccattgacctttggggacccttgtctacagagcacttggtgacacagcctcaggacctgcacagcccacatgggactccttttctggagccagagcctcatctacaccatgccacacctgctcttttgggcagcattagctgttctagaagtcactgttttatatcaaaatgggaaagaaacctaccactttttattctagtaattttctcagatatataggattatagtcttttatactttgaggggactttgcctgatggctgttggtgctaagaatcctaagttactggctctcagagtatccatatggagtcacctaactcaggttttgttgtgacagtattaaccccaagggcatctggccacttccagggcttgcaaaaggtcggtcatactcatgccctttgtctgacatcatgaaagcattaagtcctactctggccaaagacagtttcctgtcctgctgggccctgtgcttcatgtcataccgattttcagagctacagctgtgttttgctgacaagtgaggtctgttacagaccgaaaccacaagtgatttctttttatcttagaaaacatttctatttacaataaatagttgctatgtaaataatgtacatatgtattaatttctgcagtgtttgttatatacaatgtacatattcctacaacctgcatgaagaaatatcctattaatgttatcagaatttctggctattttattgcaaagcaaacagctagtaaaatggaggggcttacagctggtcagaactattgcaaatactgtgttccctaaataaaaacatactgctaaaaaaaaaaaaaaaaaaaaa

SEQ ID NO: 5523 - DNA, 1206 bp, Cricetulus griseus
gagctccatgtccagccgcgtctccccgcgatgttgccctccggaggaaagcggcgcagctgccctgggaggacggcagggccaggttgcttcctggaggcctccgccggaaatgctaccatcttccaacctcttcattgcctttcctcctgttggtcttcttctccctgctctggctgcagctcagctgctctggaagataatggcccaggtggaccaggggacaagggcaggagacctggggcccacctcgggcttgccctccagagccgccccctgagcactgggaagaggatgcttcctgggggccgcaccgcctggcagtgctggtgcccttccgggagcgctttgaggagctcctggtctttgtgccccacatgcaccgcttcctgagcaggaagaagatcccgcaccacatctacgtgctcaaccaggtggatcatttcaggttcaatcgggcagcgctcatcaatgtgggcttcctggagagcagcaacagcacagactacattgccatgcacgacgtggatctgctccctctcaatgaggagctggactatggcttcccagaggctgggcccttccatgtggcctccccagagctccaccccctctaccactacaagacctatgtgggcggcatcctgctgctctccaggcagcactaccagctgtgcaacgggatgtccaaccgcttctggggctggggccgagaggatgatgaattctaccgacgcatcaagggagctggcctccagcttttccgcccctcaggaatcacaactgggtaccagacatttcgccacttgcatgacccagcctggcggaagagggaccagaaacgtatcgcagctcaaaaacaggaacaattcaaggtggaccgggagggaggcctgaacactgtgaagtaccgggtggattcccgcacagcgctgtctgtaggaggggccccctgcactgtcctcaatatcatcttggactgtgacaaggcagccaccccgtggtgtgtatttggctgagttggctaaacagtcaggaagcctgtgctcgagacctcgatgctgctcacgctcaggaaacctcaggccttaggcccagctcaagaggatgcagagtggccagaaagaatagacagccttttttttttttttttaaatttttattaactaagaaaaaaaaaaaaaaaaaaaaaaaaaaaaaaaaaaa

SEQ ID NO: 5524 - DNA, 1206 bp, Cricetulus griseus
gcgtggctactaccaagctgaggaggaatttgagaagcggcagaaagataatcttgaactcccatcggcagagcaccaagccattgagagcagtcaggctggagtggagacctggaagtataaagccaagaattctctcatgtactatcctgagggtgtccctgatgaagagcagttgttcaagaagccacggcaggtagtgcataagaatacacgtttcctccgggaccctttcagtcaggccctgagcaggtcccagcttcagcaggcagctgccctgaatgcccagcacaaacagggcaaggttggtcctgatggcaaggagcttattcctcaggagtccccccgagtgggaggctttggatttgttgccactccttctcctgctcctggtatgaatgagtcaccactgatgacgtggggagaagttgagaatactcccctgagagtcgaagggtcagagagcccctatgtggataggacaccaggaccaactttcaagatcttggagccaggacgcagggagcgtctgggtctgaagatggccaaccgggccaagaagcaggaagcattgcggagagtcacggaaaacttggccagtcttactcctaaaggcctaagtccagcaatgtccccagctctacagcgccttgtaagcaggacagccagcaagtatacagatcgagccctgcgggccagctatacaccatctccagcacgctctacccacctcaagaccccagctggtgggccacagacccccacaagcacaccagcccctgggtctgccacacgcacacccctcacacaggacccagcctccatcacagacaatctgctgcagctccctgcccggcgcaaagcttcagacttcttttagagccaggcctggctggacctgtggatgctttgtgggacactttgtggaacgagtagggcagctatctactctttagacaactccaggccttggagacccataccatgggcagttggttatcccaggaaccacaagtgtatagtgccgtgccatggccaggttggcacattacactgaccactcccttgggagtatagcactggtgctgtccctcaaggccctactgaaactgctttctagttaactcccaactgaaccctcattaaagaacacctggcaccctctggccgggctgctgatccatgtcctgggccacctgggtatct

SEQ ID NO: 5525 - DNA, 1206 bp, Cricetulus griseus
cgcgacggtcctcagcggcaagatggcgacggcgccgcaggaagcccgcgatggagccgcgcagttggccaggcccgcgtcagagactgaccccctcggccgcttcacgtgtcccgtgtgcctggaagtgttcgagaagccggtgcaggtgccctgcggacacgtcttttgctctgcatgcctgcaggaatgtctgaagccgaagaaacctgtctgtggggtgtgtcgcagcgctctggcacctggcgtccgagctgtggagctcgagcgacagatcgagagcacagagacttcttgccatggctgccgtaagaattacgtcctatctaagatccgagcccatgtggcttcatgtcccaaataccagaattacatcatggaaggtgtgaaggccaccaccaaggatgcatcccttcagccaagaaacgtcccaaaccggtacacctttccttgtccttactgtcctgagaagaactttgatcaggaaggactcgtggagcactgcaaattatcacacagcatggataccaagtctgtggtttgtcccatatgtgcctcgatgccctggggtgaccccagctaccgcagcgccaacttcatggagcatatccaacgccgccaccgcttttcctatgacacttttgtggactatgatgttgatgaagatgacatgataaaccaggtgttgcaacgatccatcatcgaccagtgagcagggtcctcactgtccacctcattctagagcttccattacgcattaggtgtgagcccttgactcctgtacctcacatgtaatgcagatctgtaaatgagccatggcaccagacagggtcacttctcccagggcctagggcagagagagccctgtttcctttgggctcttgttgacattgtcttcctggctgataaccttgtttgtcccatggtccgctctcgtcacaccttagctactgcctcctttaaaaagaagagtccagcttctgttcccacgtgttcttgtttcatgttcatcctactgtccagtgttcgtctcttaggtcctcctactcagccagccccttccccggggccatgaatagcacaattaaacagggactcctttccctggccctgaggtacctgggttctgtgggaagttaaagttaggcccctgccaaagttaagaaaggtgttctgctggaggcttttctcgagcagcagctctaa

SEQ ID NO: 5526 - DNA, 1205 bp, Cricetulus griseus
cctttgaaaacgcgcgcgcctaaacgctgcgacggttacagcgagtgtcagcgggagctgttcctgcatcttccggcctgggtgctcacacagctttgagccagctcgtcacttcacctttttacttgatcaagggtgtgactgtggacctaaagtgattgctacaatggaaggaatcaataatttcaagacaccaaacaaattatctgaaaaaaggaaatctgtattatgttcgactccatgtgtaactatccctgcctctccatttatgcagaagcttggctttgggactggggtcaatgtttacctaatgaaaagatccccacgtgggttgtctcattctccttgggcagtgaaaaagatcaatcctttatgtaatgatcactaccgaactgtatatcagaaaagactgactgatgaggctaagattttaaaaaaccttaatcatccaaacatcatagggtaccgtgcctttactgaagccagtgatggcagtctgtgccttgctatggagtatggaggtgaaaagtctctgaatgacttaatagaagagcgaaacaaagacagtggaagtccttttccagcagctgtaattctcaaagttgctctgcacatggcaagagggctaaagtatctgcatcaagaaaagaagctgcttcatggagacataaagtcttcaaatgttgtaattaaaggtgattttgaaacaattaaaatctgtgatgtaggagtctctctgccattggatgaaaatatgactgtgactgatcctgaggcctgttatattggcacggagccctggaaacccaaggaagccttggatgaaaatggcattattactgacaaggcagatatgtttgcttttggtcttactctgtgggaaatgatgactttatgtattccacacatcaatcttccagaggatgatgatgatgaagatgcaacctttgatgagagtgactttgatgatgaagcatactatgcagctctggggaccagaccatccatcaacatggaagaacttgatgaatcataccagaaggtcattgaacttttctccgtgtgtactaatgaggatcctaaagatcgtccttctgctgcacacatcgttgaagctttggaactagatgtccaatgatgtggcggtctaagcaggaagcatagcttgtatgtgaactgttaactcagacacacttagttactat

SEQ ID NO: 5527 - DNA, 1205 bp, Cricetulus griseus
gccggcggggacggcggagctatggccttgaggctgctgagacttgtcccggcgacggcttccgcgcgcggccccgcggccggagtccagcgcgtgggacaaattcataccagtgtgcaaaaccagatgaagtatggagctttggccttcatgcttggtgagaagacaaccaaaaaactgactgagtacagccgagtgataacggtagatgggaacatatgctctgggaaaagcaagctcgccaaggatatcgcagagaaactaggcatgaggcactttcctgaagcagacgtacagtactcaagcagcaccacaggtgatgggaggcccctcagtacagaatttaatggcagctgtagcctagagaaattttatgatgaccccaaaagcaacgatggcaacagctaccgcctgcagtcctggctgtatgccagccgcctcctacagtactcagacgcgctggagcacctattgagcacaggacaaggtgtggtcttggagcgctccatctacagtgactttgtcttcgtggaagcaatgtacaatcagggctacatccgaaaggagtgtgtggaccactacaatgaagtgaaacagctcactctcccagagtacctgccacctcatgcagtcatctacattgatgtgcctgtgccagaaataaagagccggatccagaagaaaggagatccacatgagatgaaggtcacctctgcctatctccaggacatcgagaatgcctacaagaacaccttccttccacagatgagtgagcagtgtgaggttctggtgtacaatacctgggaatctgaagactcaaccaaggtggtagaggacattgaataccttaactataacaaagggccttggcttaaacaggatgaccgaacctttcaccacctgcggatgctggttcaggataagatggacgtgctgaattacacaaccattcccatctacctcccagaaatcacagttggaccgcaccagggtacccggatctacaacagcttcaaacagctgccaggccgcaagtacaaccctgggtacaatgccgaggtgggtgacaagtggatctggctaaagtgaatggtcggtcccctctgcctagctgtgtcacagccatgaagatgtctgctctgcccaactctgaactctggagctttacaagacaacaggaaaaaagcaatgatcaagaaattgcc

SEQ ID NO: 5528 - DNA, 1205 bp, Cricetulus griseus
atgagccttcggcagctgctcttgcgcttgtcgggttacctcggggcctctggtcccccacatcgcccgtggtggtgctccaggtcccccgacaccatctcctcagtgggctcctggcgcggccggtgctccaggtctccagcccactggaaccaggtggtgtcagaggcagaaagatcgtgggttaccccgcttccttcatgagcctccgctgcctgctgagtgacgagctcagcaacatcgctatgcaggtgcggaagctggtggggactcagcaccctctgctttccactgccaggggccttgtgcatgacagcaggcataacctccagctgcggggcctagtggtgctgctcatttccaaagcagccgggcccagcgctgacaactctccatgtcagaactacgacatggtcagtgggatatactcatgtcaaagaagtttggcagagatcacagaacttatacacactgctctcctcgtgcatcgtggaatagtaaatttaagtgaattacagtcttctgatggaccactgaaagacatgcagtttggaaacaaaatagctatcctgagtggagactttcttctagcaaatgcctgcaatggactagctcttctacagaacaccaaggtttcagaacttatagcaagtgctcttatggacttggtgcaaggagtataccaggaaaattctgcttcggatgaggaacattctatcacagatgacattggaatgtcgacgtggaaggagcagacctttctgtctcattgtgccttgctggcgaagagctgccaggctgcaatggagttagcaaagcatgatgctgaggtccaggacatggcatttcagtatgggaagcacatggccatgagtcataagataaattctgacctccagccttttattaaagacaagactagtgactctaagacttttaacctaaactcagcacctgtcgtcttacatcaggagtttcttggaagagatgtgtggattaggcagattggagaggctcaagaaaaaggaagattaaactacactaagttgcgagaaacaatcaaagctggcaaaggtgtgacttcagctattgacctgtgtcgttaccatggaaacaaggcactggaggccctggagagcttccctccctcagaggccagatcggctttagaaaacattgtgtttgctgtgaccagattttcatga

SEQ ID NO: 5529 - DNA, 1205 bp, Cricetulus griseus
tcagaattacttgaaaaattccagttccgtaatgcaaaaacttcagacttttgggagtcactggaagaggcaagtaatcaaccagtgaaagaagttatggactcctggactagccagatgggctatcctgtgatcactgtgaaagaacggaagaacttaagccagaaacgcttcctgttggattccacagctgacccttttaggatttgcatgcaagatgggagacagagaagccttgaacaacgcttcccagttatttgataactggctccaaaagaacgaaaacattcctgtaaatctcaggcttctggcctaccgctatggcatgcagaactctggtaatgagacttcatggaactatactctagaccaataccagaaaacatccctagcacaagaaaaagaaaaactagctctatgggctagcttctgtgaagaatgttactcttctgtcaaggtatctggacatgctcaaagacccagatattattaaaagtcaggatgtgtttacagtcattcgctacatctcatacaacagctacgggaagagcatggcctggaactggatacaactcaattgggactatctggtcaacagattcacaatcaatgacagaaaccttggccggatcgtcaccatcgccgagcccttcaacaccgagctgcagctctgggagatggagagctttttgacaaaatataccaaatgctggagcgggagcacaacccagacagcaagttttggaaacagtagaagaacaatatagagtggctaaaacaaaacagggagaccatccgagactggtttgctagcttgccgaaggacgcctgaggaggcctgttttacagactgcagagggagccttcgaaatgggttctgcttgggctaagtactgtgtttatgtctcgaaaagcttttaaattattcctctttgtttttgaaggaagatactaatagagtatttaatatcctcagggatttctgctaagtgtacttcacagggatgtctttacaaacggaaaggtttaatagtcacattaatgtctttaaatatcattccttgtatctttaaatctgtgaaaatagaacaatttggtcctagctttactattttttagcgccaaagaaacaccacttaatcttctctcttgtattgtatttttaaagtttaaataccagtactgcggacagattgccatcttaa

SEQ ID NO: 5530 - DNA, 1205 bp, Cricetulus griseus
  modified_base (1199)..(1199): a, c, t, g, unknown or other
atggcggctccctgtgtgtcctgcggccgggcgctttcgcgtcggctctcccacgcggttagggttagcctctgccagaggccggggtactggcccacctcggcggttgactggcaggcgggtcccaggtcccagctattaaagctaatacataccacagttgtaacaaaaaagaaaaatgtccaagcctcaagacaggaatcatatacagaagattttattaaaaagcagatcgaagacttcaacatagggaagaggcacttagccaacatgatgggagaggacccggaaacttttaccgaagaggatgttgacagagctattgcttacctctttccaagtggtttgtttgagaagcaagccaggccaataatgaagcatcctgaacaaatttttccaaaacaaagagcaatccagtggggagaagatggccgcccatttcattttctcttctatactggcaaacagtcatactatgcattaatgcacgaagtgtatggaaaggtcctccagctagaaacccacagaggtccactttcagggaaaactgagcccagagacctgattggcagcagatggctgattaaggaggaactagaagaaatgttagtggaaaaactgtcagatcaagattatgtacagttcattcgactgctggaaaagttattgacattgccctatggtcctgctgaagaagaatttgtgaagaggttccgcaaaagtgtaactattcagtccaaaaagcaggtgattgagcccgtgcagtatgacgagcaaggccaggcattcagcaccagcgaaggcaggaggaagagcgccacagcacaggcggttgtttacaagcacggaagtgggaagatccgggtgaacggacttgattacctgctttactttcccgtcacacaggacagagaacagctcatgttccctttccacttcctggaccggctggagaaacacgatgtaacctgcacagtctccgggggtgggagatcagcgcaggcaggagccatacgcttggcgatggccagagctttgtgcagcttcatcaccgaggacgaggttgaatggatgagacaagctggactacttactcctgatccacggatcagggaacggaagaagccaggccaggagggtgcccgaagaaagttcacctggaagaagcgctttggtttcaaaaaaaaaaaaaaaaaaanaaaaaa

SEQ ID NO: 5531 - DNA, 1204 bp, Cricetulus griseus
gtccagatgttagttccaaggtctggccaccccataaacaatccagagctgggaacagtcagtttaaataagagcagagccttcggaaggaggactcatggcaggccacagagagggagcactggcacctcgaagtggtccgggagcagggaattgagaagagcatgtcccttctataagagaatccccggaactggttttactgtggatgcttttcagtatggcgaggtcgagggctgcactgcctacttcctcacacacttccattcagaccactatgccggcttgtctaaggacttcgagcggccaatttactgtagtgagataactggcaatttggtgaagaagaagcttcgtgtgcaagaacaatacatccatcagttgccgatggacactgagtgcatagtggatggtgtcaaagttgttctgctggatgccaatcactgtccaggtgcttccatgatccttttccgtcctcctaacggcgccgccatactgcacactggagacttccgagccgaccccagccatggagcgctcccttctcgcaggccagaaagtccacacgctctacttagacaccacgtactgcagcccagagtataccttcccatcccaacaggaggttatccagttcgccatcaacactgcttttgaggctgtaactctaaacccacgcgctcttgttgtctgtggcacttactgtattggaaaggagaaagtcttcctagccattgctgatgttttgggttcaaaggtgggcatgtcccaagaaaaaatataaaaactttgaagtgcctcaatctaccagacgtcaattccctcatcactacagatatgtgcagttccttggttcacctcctcccaatgatgcaaattaattttaagggcttgcagagtcatttggagaaatgtgatgggaaatatgatcagattttggcttttcgacctacgggatggacacattctaaccgcataactagcatagcggacattactccccagaagaaaggaaagatatcaatatatggaattccctacagcgaacacagcagctacctagaaatgaaacgttttgtccagtggctgaagccacagaaaatcatccccaccgtgaatgtcggcaccttcaagtctcgggacacaatggagaagtacttcaaagagtggagactggaagctggatactgatgctgtcaccaga

SEQ ID NO: 5532 - DNA, 1204 bp, Cricetulus griseus
tggtgagagtttagtaattgcggttgggcgtgcgagttgtctgaaactcggatacaagctcccctctctctgttggaaatctttaagtcacaggatgagtctgcagtggactgctgttgccaccttcctctacgcagaggtctttgctgtgttgctactctgcattcccttcatttcccccaaaagatggcagaagattttcaaatcccggctagttgagttggtagtgacctatggcaacaccttctttgtggttctcatcatcatccttgtgctgttggtcattgatgctgtacgtgagatccgaaaatatgatgatgtaacagaaaaggtgaacctccagaacaatccaggtgccatggagcacttccacatgaagcttttccgtgctcagaggaatctctatattgctggcttttccttgctgttgtccttcctgcttagacgcctggtaactctcatctcccagcaggccacactgctggcctccaatgaagcctttaaaaagcaggcagaaagtgccagcgaggcggccaagaaatacatggaggagaatgaccagctaaagaaggaagctgctgaggatggaggaaagttggatgttgggagtactgaggtgaagttagaggagaacaagagcctgaagaatgacctgaagaagctaaaagatgagctggccaacaccaaaaaaaactagagaaagctgaaaacgaggctctggccatgcagaagcagtctgagggccttaccaaggaatatgaccgcctgttggaagagcatgccaagctgcaggcctcagtacgtggtccctcagacaagaaggaggaataaaggcttgtcttccctgcctgcagctggcttccacctaacccatgctcactgcttcctgaaagcttagcctctcctctctctggcacttgggtttattcccttctacttccccagttttcttccatagtttatagatcatcattttaacccctttacatatcctgcagtcataccaaaagggacctgattgttgctcattcacagtaattttgccacagtcctgcctggccagggcactttgcactcctagaagtgtggaagggtacttgtgacctgtcatacagttaagcccaatttgttttgctgtgtgtcctaaaggaggctgtgaggcgggtcaactgttttatcctggggacaataaaggttgttatgt

SEQ ID NO: 5533 - DNA, 1204 bp, Cricetulus griseus
gttggtagtcgctccctgcgggtcctcgctgccacttctgcatcgcgagccgggagaccttcgcggccggccctctctcctgtcacagtctctagtatctagtcgtcgcgactccgccaggatgttcgaggctcgcctggttcagggctccatcctgaagaaggtgttggaggctctcaaagacctcatcaacgaggcctgctgggacatcagctcgggcggcgtgaacctgcagagcatggactcgtcgcacgtctccttggtgcagctcactctgcgctccgaaggcttcgacacataccgctgcgaccgcaacctagccatgggcgtgaacctcaccagcatgtccaaaatactaaaatgtgctggtaatgaagacatcattacactaagggctgaagataatgccgatactttagcactcgtatttgaagcaccaaatcaagagaaagtttcagactatgaaatgaagttaatggacttggatgttgagcaacttggaatccctgaacaggagtacagctgtgtggtaaagatgccttctggtgaatttgcgcgcatatgccgagaccttagccatattggagatgctgttgtaatatcctgtgcaaaggatggggtgaagttttctgcaagtggagagcttggaaatggaaacattaagttgtcacaaacaagtaatgttgataaagaggaggaagctgtaaccatagaaatgaatgagccagttcagctaacttttgcactaaggtacctgaactttttcacaaaagctactccactgtctcctacagtaacactcagtatgtctacagatgtaccccttgttgtagagtataaaatttctgacatgggacacttaaagtattatttggctcccaagattgaagatgaagaaggatcttaggcgttgctagaatctgagaaaaccaagcctttgagaactgcttctgagatgccagcatgttttgaagtcttttctgtcaccgagtttgtacctgagtaatatgtagatatcttctgtaaataacctactttttttctctctattctccacaatttgtttaaagaataaagctccaaagcaaaaactggttcttttaacataaatatatctgccttagaaatcctggcgattttttatgaaagatgttgacgctaaatgcagtttcaagaaatgtttttcagtttaaataaagttaac

SEQ ID NO: 5534 - DNA, 1204 bp, Cricetulus griseus
tccttcttcggcgagctcttcaaccagaaccctgaagtgttcttttctctacgagcctgtgtggcacgtgtggcaaaaaactgtaccccggggacgcggtttccctgcagggggcagcgcgggacatgctgagcgctctctaccgctgcgatctttccgttttccagttgtatagccccgctggcagtgggggcgcaacctcaccactctgggcatctttggggcagccaccaacaaggtggtgtgctcctcgccactctgtcccgcctaccgcaaggaggtcgtcgggctggtggacgaccgcgtgtgcaagaagtgcccacctcaacgcctggcacgcttcgaggaggagtgccgcaagtatcgcacgctggttatcaagggtgtgcgcgtcttcgatgtggctggtgttggcgccgctgcttggtgttgtgtttaaacaaacacagcccagaccccaagctgaggaagcccacatattctattatagatatataatataaataaccacacaggcacttgctgtcaaacgttttgagtcagtgaatttcaaaagaacagcctcaacacacgcgcacatgcgaacacacacacacacacacacacacacacacacacacacacacacacacacacacccctgctaagctgggagaagcctctgccttgataataactgggagttgtttagtcacatgtaaaccacagcttgccaggtgcccaggagtggaactagtcttctacagggaaaaccaagcagggcagagaaagaaagcacacactactccctgttcagctttgagtagagaaaggaagaaacaagcccttgagagttgaaggcattcggttttgattacttctgtattgtgagttgagagacagggtaccttgaagcagagactggggccactcgcaggttttcttctccccctcatgtcccatccaaactaataatactaaagccaggaatttgaaatagtttgcttgggacttggggtgtcctggagatatgatgtcccttcatttcctaaaggcaaatttgcaaatcaaagtacatgctgcagacagtgtaggattttagctaagaacttttaggtactgaaaggattctgaggaagcagaaataaaaatggattagtgtgtaggattttgagatttggtattttccaaggagaaaaaaattgaattttccagcagtggttat

SEQ ID NO: 5535 - DNA, 1204 bp, Cricetulus griseus
ccgtgctacgttcaggcttcccacagcaccaggtcatgtggctgcctaactaggcagaggcctctagtacggaagatggctcctggcttccagcaaacatctgggtctaaagaagccatcgccaacctacggagaggtcacatccagaagttgaaccttcgctacactcaggtgtcccaccaggagctcagggactatgcatcctggaacctgagtgtaaacctctacactgtcaatgcaccatggctcttctccctgctgtggtgtgccggggttccatccgtcacttctgacaactcccataccctttctcgggtgccttctccactctggatcatgcccccagacgagtactgcctcatgtgggtcaccgccgacctgatctccttcagcctcatcatcggcatcttcgtgctccagaagtggcgcctgggtggcatacggagttacaacccagagcagatcatgctgagtgccgcagtacgccggaccagccgggacgtcagcatcatgaaggagaagctcatcttctcagagatcagtgatggtgtggaggtctctgatgagctctccgtatgttcagacagcagctatgacacctatgccaacagcacagccacccctatgggccctcgaggtggtggcagccgtgccaagaccctcacagaccgcagtgggcattagctgaagatccgtctgcccaacttgtacctgaggtagaacctaaatgagaagagctgacagaaactgcacgtgcagtgccctgggagctggctccgcagcctgcttgtgtgctccaagctcctttgtcagttccagcctctctctactctcttcacccatctcaaagcacaaggacatctcaggaggaaaatcaggggctatggtggagacatgttctcccaaccagcttccctccaccagtggcctctgagtccccgagaagcagctagagatggccagaatcacaggtttggggctgttctgcctcacacccaattgtccaacaggcctctggggcagaagaagccttgaagatcagataatcaacagactgacatgacctcaggttcccacagcagtggccacagggcaatgggccacctgggcaaagtgctctgggctcagtcaagcatggcgtctggccaaagatacctacagtagaaggaacctaagggccaaggcaattaaagcgtgccatctt

SEQ ID NO: 5536 - DNA, 1203 bp, Cricetulus griseus
  modified_base (247)..(247): a, c, t, g, unknown or other
gggattgcgctcggaggaggggccggaggtccttgggtctacggctctgtctgcgcggggccccagctggagggagaaactgtcggctccggaggtccccgttccgccgcgagtcgccgcggagggacaccgcagtggccccaacccagtcccttcagtgacagcggggcgggcaagcctcgcgaggagaagaggacggccctaagcaaggtggtcctccggcggctgccccccggctcaccaaagngcagctggaagagcaactgcgccccctgcctgcgcacgattacttcgaggtggtagctgcggacctcagtctctatcctcatctctactcaagagcatacattaattttcggaaccccgatcgacatccttttgttcagagaccgctttgatggatatatcttcattggcaataaaggcctggagtaccctgcagtggtggagtttgctccattccagaagattgcaaaaaagaagccgaggaagaaagatgccaagactggaagcattgaagatgacccagaatataaacagtttctggaaacatacagtctggaggaagaaaaaaccagtgctagtcccgagacacttttgggagagatagaagtgaagacaagagaactccttgccagaagaaccacacctcttttggaatatattaaaaatagaaaactagaaaaaacagagaattcgagaagagaagcgtgaagagcggaggaggagggagttagagaagaagcgtttgcgggaagaagaaaagaggaaaaggagagaggaggagaggtgtaaaggaaagaggcggatagacagaagagaaccgagaaggaagtgaagattaagcttcttaaaaagctaggaaacagaagaagcaaccacagagaaacccagagaaagaggtgactcagtcagtactggagacgaaaagcaggaagcctggccagtggaaagcctgccggagacgcctgctgagaggttacaggatggcagtgataaagagcaaagggacaaaagatttcgagagaaagaacctgaaactccaagatgtcacccagatggttgcaggaagcacagcattcactctgagtttgccaggttttccagaaggaataaagatgaaccaaagtgggggaaaggcttcaccctgggtacagggaaaatggggagccaggatgggagtgtccctgtggacaaggcaga

SEQ ID NO: 5537 - DNA, 1202 bp, Cricetulus griseus
gctaccgctgggctgctgagcgtgcagggccgccctgcacaacccgagccgccgcgcttcgcgtcctgggacgagatgaacttgctggctcatggactgctgcaactgggccacgggctgcgcgaacatgtggagcgcacccgtgggcagctaggcgcactggaacgccgcttggctgcgtgcggtaatgcttgtcagggactccagggcaaagatgtaccttccaaagacccagaaggcagagtccctgacagcgaggcggctcctgagactctgcagagtttgcagacacagctcaaggctcagaacagcaagatccagcaactgttcagaaggtggcccagcagcagaaacacctagcgaagcagaatctgagaataacaaaatcttacaaagccacaggacctcccagagactgccaggaactcttccaagaaggggagcggcacagtggacttttccagatccagcctcaggggatcccgctccatttttggcaactgtgagatgacatcagatggaggttggacagtgattcagagacgcctaaacggctctgtggacttcaatcagtcctgggaagcatacaaggatggcttcggagatccccaaggcgagttctggctgggcctggagaagatgcacagcatcacgggagaccgaggcagccagctggctgtgcagctccaggactgggatggcaatgccaaattgctccagtttcccatccacctggggggcgaggacacagcatacagcctgcagctcacagagcccacagccagtgagctgggtgccaccaatgtctcccccagtggcctttccttgcccttttctacctgggaccaggaccacgacctccgaggggacctcaactgtgccaagagtctctctggtggctggtggttcggcacctgcagccactccaacctcaatggacagtatttccactccataccacggcaacggcagcaacgtaaaaagggggaatgcagagggaccactcaggtcaaacttgctgggcccttaatggtggactcagtcatattgactggctgggagacagggttcccaggagccctggatacactcatggtgctgttgtgggtgctgtggatgaatgggtgccaactgtggttaccgggcacagctcacagcattcttggaaataaaaacaacctcagaaacaaaaaaaaaaaaaa

SEQ ID NO: 5538 - DNA, 1202 bp, Cricetulus griseus
gttccgcgtccagcctgctcggagcatcccgggcggcgtgaacggcccaaccatgtccgcagccatgagggagaggttcgaccggttcctgcacgagaagaactgcatgaccgacctcctggccaagctcgaggccaagaccggagtgaaccggagcttcatcgcgctcggtgtcatcggactggtggccttgtatctggtgttcggttatggagcctctctcctctgcaacctgataggcttcggatacccagcctacatctcaatgaaagccattgagagtcccaacaaagatgatgacacccagtggctgacatactgggtggtgtacggcgtgttcagtattgcagaattcttttctgacctcttcttgtcctggttccccttctactacatgctgaagtgtggcttcctgttgtggtgcatggcccccagcccgtctaatggggcagagctgctctacaggcgcatcatccgtcctgtcttcctgaagcatgagtcccaggtagacagcgtggtgaaggacatgaaagacaaagccagagagaccgcagataccatcactaaagaagtcaagaaagctacggtgaacttactgggtgaagaaaagaagagcacctgagccctggctggaagctccccattccacttccttagagccccatgttacgctagggacagtggcatagtcgttgaataatgttgccttggaaacgttttgatgtattaaaaatggaatgtgttgtaagctgttttgcttttattgtcatatatgtagggagcgttttcatttaaatctaacacagtggacaatatctaaaaatttttaaatattttgctgagtaggaagacatgttactactttctaggaagtacaaactgagataggaaatctgagtccgtaagccctttgctctgcggggctcaccctgcatgcattttcttgtactgacaactaggaactcttatgattctgctgtatgtggcgtatgatttcatatagttctgtgttttagtgtatttgtgcatacgtataaatgtatatatatacacaggagaatgctgtttggctagaacatgcatagagcttgagagagagaggccaggagaagggtgtgtatgccacctgtaacctgagaagaattatggcaatacgctataataaagattattgtttatctggtctctcaaaaaaaaaaaaa

SEQ ID NO: 5539 - DNA, 1201 bp, Cricetulus griseus
ggacttaaaaggcaaggtcttgccacaacttagctgcgcagcttcccaaagcaactctcccagttttctgtctaacactgaggttcgccgggtcatggtgccagcctgactgagaagaggacgctcccgggagacgaatgaggaaccacctcctcctgctgttcaagtacaggggcctggtgcgcaaagggaagaaaagcaaaagacgaaaatggctaaattcaagatccgtccagccactgcctctgactgcagtgacatcctgcgactgatcaaggaactggctaaatatgaatacatggaagatcaagtaatgttaaccgagaaagatctcctagaggatggttttggagaacaccccttctaccactgcctgattgcagaagtgcctaaagagcactggacccctgaaggacacagcattgttggtttcgccatgtactattttacctatgacccatggattggcaagttactttatcttgaagacttctttgtgatgagtgattacagagggtttggcataggatcagaaattttgaagaatctaagccaggttgccatgaagtgtcgctgcagcagtatgcacttcttggtagcagaatggaatgaaccatctatcaacttctacaaacgaagaggtgcttctgacctgtccagtgaagagggatggaggctcttcaagattgacaaagagtacttgctaaaaatggcagcagaggagtaaggagtgcctttgtagacaatgacaacctccattatactttagaataaattctcaacttatcttgctctctatcttgtttgtagtgaaataatagcatgaacaccaattccaaagctttattaccagtggcgttgttgcatgtttgaaatgcagtctgtttaaaatggcagtcatgtatgtggtttggaggcagaattcttgaacatctttcagtgaacaacaaggtgatatgatcttactatataagaaaaacaaaacttcattcttgtgagtcatttaaatgtgtacaatgtacacactggtacttagagttcctgttttgattcttttttttaataaactactctttgatttaaaaaaaaaaaaaaaaaaaaaaaaaaaaaaaaaaaaaaaaaaaaaaaaaaaaaaaaaaaaaaaaaaaaaaaaaaaaaaaaaaaaaaaaaaaaaaaaaaaaaaaaaaaaaaaaaaaaaaaa

SEQ ID NO: 5540 - DNA, 1201 bp, Cricetulus griseus
ctccgcttttaggtgtaagctgcaaacatcttggacgccaggagaagtcgcgttgaaaacagagtattttgctcctctctcagaatgaatgggaaccagaaattggatgcttgtaaccaagaaaggcaggatttcatccagcacttctcccagatcgtgaaggtgctgactgaggacgggctaggccacccagagacaggcgatgccattacccggctcaaggaggtcctagagtacaatgctgtgggaggcaagtacaatcggggtttgactgtgttgcaagcataccgggagctggtggagccgaggaaacaggatgctgagagtcttcagcgggccctgacagtgggctggtgtgtagaactgctccaggctttctttcttgtgtcagatgacatcatggattcctccctcactcgacgtggacagatctgctggtatcagaagccaggcataggcttggatgccatcaatgatgctatgcttctggaagcctgcatctaccgcctactgaagttctactgcagggagcagccctactacctgaacctcctggagctctttctgcagagttcctatcagacggagattgggcagactctcgacctcatcacagcaccccagggccatgtggatcttgatagatacactgaaaagaggtacaaatctattgtcaagtacaagacagctttctattctttctacctgcctgttgcagctgccatgtacatggccggtattgatggggagaaggaacatgccaatgccaagaagatcctgctggagatgggagagttctttcagatccaggacgactaccttgacctctttggtgactccagtgtgactggaaaggttggcactgacatccaggacaacaaatgcagctggctggtggttcagtgtctgaaagtagccactccacaacagcgccagatcttagaggacaattatgggcagaaggatccagacaaggtggcgcaggtaaaagcactgtatgaagcactcgatctgccggcggtgttcttgaagtatgaggaagacagttacagccgcctcaagagcctcatagaacagtactctgcgcccctgccccaagccatattcttggaactagcaaaaaagatctacaagcggaaaaagtgacctcgagattgcaaaggctcggaggggagggatcttaataaattattgtacaaca

SEQ ID NO: 5541 - DNA, 1201 bp, Cricetulus griseus
aagagctcggtgcaggaatttagctgtgttgtcctgcctcacagaacacctcatctgctgcaggcctagctagcctgggttgcagcctttgtaaacaaggaaacatctggaaggtatcaacatggcatttccatagaggtcctaatttgtaactgtatcaagaaggagaattgtgtggacttctctgagggagatccgaccagcctggatttaagggaaggatgagataatgtgtgctcaacacctaacggacaccacagaagtcaagtggcagaaggttttatatgaacggcagcccttccccgataattatgttgatcaaagattcctggaagaactccggaaaaacatctatgcccggaaataccaatactgggctgtggtatttgagtccagtgtggtggtgcagcagctctgtagtgtctgtgtttttgtagtgatctggtggtacatggatgagggtcttctggccccccagtggctttttgggactggactggcatcttcattgattgggtatgttttatttgatctcatcgatggaggtgatggacggaagaagagtgggcggacccgatgggctgacctgaagagtactctggtcttcattacattcacttatggtttttcaccagtgctaaagaccctgacagagtctgtcagtactgacaccatctacgccatgtcagtttttatgctgttaggccatctcatcttctttgattatggtgccaatgccgcaattgtatccagcacactgtccttgaacatggccatctttgcttctgtttgcctggcctctcgtctcccccggtcactgcatgccttcattatggtgacatttgccatccagatttttgcactgtggcccatgttacagaagaaactgaaggcatataccccccgaagttatgtaggggtcactctgctttttgcattttcagcttttgggggtcttttgtccattagtggtgtgggagccatactctttgcccttctgctgatttccatttcgtgtctctgcccttactacctcattcgtctgcagctttttaaggaaaatattcatgggccttgggatgaagctgaaattaaagaagacttgtctaggttccttagctaaactagggaccttcattccattattacagcaagccaaaagacctcgaacctaaccagtataacacttaagggcagcggg

SEQ ID NO: 5542 - DNA, 1201 bp, Cricetulus griseus
cagaagaagagtattggaagttactaaataatttttttactaaatgtcatccaagcattaggtgaacatcttaaattaagacaacaggttattgctactgctacagtctatttcaagaggttctatgccaggtattctctgaaaagtatagatcctgtattaatggctcctacatgtgtgtttctggcatccaaagtagaggaatttggtgtggtctcaaatacaagattgatcgctgctactacttctgtattaaaaactagattttcatatgcctttccaaaggaatttccttacaggatgaatcatatactagaatgtgaattttaccttttagaattaatggattgttgcttgatagtgtatcatccttatagacctttgctccagtatgtgcaggacatgggccaagaagacgtgttgcttccccttgcatggagaatagtgaatgatacctacaggacggatctttgtctgctgtatcctcctttcatgatagctttagcttgtctacatgtagcctgtgttgtacaacagaaagatgctaggcaatggtttgcagaactttctgtggatatggagaagattttggaaataatcagggttattttaaaactatatgagcagtggaagaattttgatgagagaaaagagatggcaactattcttagtaagatgccgaagccaaaaccacctccaaacagaagctccctgagtgattctccactaatggcagggcctgaagctgcaagatgatgatggacaagataaggcaatctcctattgtcacagttactggtatttccagctttagttatttttattttaatattcagcatttttctaggaaatttccatattttttttgatgtataaaggtttgttatcattaccatatgattttattatgtcattggacagcaggtttgttttggttttggttttggttttttttttttgtaaagacagtttggatttcctaaagagtagaaatagagttttacatgtcagattaatttcgtaggaaatttgtccagaatttgtgatctctatgttgagtgatacctgtaataatagtgaaatcccaaacgctaacttaaatctttgaatgtatatgcacactaacttctagattgcttttgtgtatgagggcccaaagttacagaagaataaaagcataaaaaccaaaaaaaaaaaaaaa

SEQ ID NO: 5543 - DNA, 1201 bp, Cricetulus griseus
  modified_base (263)..(263): a, c, t, g, unknown or other
  modified_base (295)..(295): a, c, t, g, unknown or other
  modified_base (353)..(353): a, c, t, g, unknown or other
caaagcagtcacctccgatgtcagctcctaaatggattgatccaaaatctgtttgtgagacacctagtagcaattccttggatgattacatgagctgttttaagactccagttgtaaagagtgactttccccctgcttgcccgtcatcatcaacacctttcagccagcttgcctgtctccagcagcagcagcagcagggtcttagtactcctcttcaaaacttgcagatttcaggatcctcatcaataaatgaatgcatttgngttaaaggaagaatttattccatattaaaacngataggcagtggaggctcaagtaaggtatttcaggtattgaatgaaaagaagcaaatntatgctataaaataatgtgaacctagaagacgcagataaccagactattgacagctaccggaatgagatagcttatttgaacaaactacaacaacacagtgataagatcatccgactctatgactatgaaatcacagagcaatacatctacatggtaatggaatgtggaaacattgacctgaatagttggcttaagaagaaaaaatccatcaatccgtgggaacgcaagagctactggaaaaacatgttggaggcagtacacacaatccatcagcatggcattgttcatagtgatctgaagcctgctaactttctaatagttgatggaatgctaaagctaattgattttgggattgcaaatcaaatgcagccagatacaacgagcattgtgaaagattctccggttggcacagttaattacatgcccccacgaagcaatcagagacatgtcttcttcaagagaaaatgggaaagtcaaagaccaagataaagccctagaagtgacgtttggtccttgggatgcattttgtactatatgacttatgggaaaacaccatttcagcatatcattaatcagatctctaaactacatgccataattgaccccagtcatgaaattgaatttcctgatattccagaaaaagatcttcaagacgtgctaaagcgctgtttagtaagggaccctaaagagagaatatccatccctgaactgctcacacatccgtatgttcaaattcaaccccacccaggcagccagatggctagggaagccactgatgagatgaagtatgttctgggtcaactggttggtctgaattctcctaactccattttgaaagctgccaaaa

SEQ ID NO: 5544 - DNA, 1201 bp, Cricetulus griseus
tcgaagcaatgagcaagacctgccgagacattgcaaagcacctccctgacggctgccctgctatgctcgtccttcctctgtatgcctccctgccctactctcagcagcttcgagtctttcaaggggccccaaagggctatcgcaaagtgatcatttcaaccaacatcgctgaaacctccataaccattacaggaataaaatatgtagttgacacgggcatggttaaagcaaagaagtataaccctgatagtggtcttgaggtgctagctgtacagcgagtgtcaaagacccaggcctggcagcgaacagggagggctggccgagagggacagtggcatctgctaccggctctacactgaggatgaattcgacaagtttgagaagatgacagtgccagaaatccagaggtgtaacctagcaagtgtgatactgcagctctagcaatgaaagttccaaatgtagctgaagtcagagcacagctgagggaaatctgcttaaagatgtcaatgccaataatgtcatctcgaggggacatggagagtgtccgccgctgcctggctcacagcctctttatgagtactgccgaactccagccagatggcacctatgccaccacagacacacaccagcctgtggccatccacccatcgtctgtcctcttccactgcaagcctgcctgtgtggtatacactgcactgctctataccaacaaatgctacatgcgtgacctctgtgttgtggatgccgagtggctctatgaggctcgcccctgactaccgttccggaggaagctgagaactgccaagaactgaagagcctcatccatactaggtgttttctgggtcaaggaaaaattagcttacattgactgactccataacaagcactgggaacttaccatggagtgactggctgcagtgagtactaggcacttcccagaaaaggagtgaaggatacagtttctgagtaacttaatgtttctgtgcagaatatgttcatcactttaacattgtggcaaaattttaatagagtatttactttttattgggcttttaaaacaagtgggtttttaacaaagctgctcagggattaaatcagatggaaaccccattctgactccacatattactacagagaagttaatgcttatcttaagctgcagagcagtgccctttaagctttcttaagaaagtaaattgtt

SEQ ID NO: 5545 - DNA, 1201 bp, Cricetulus griseus
  modified_base (528)..(528): a, c, t, g, unknown or other
gtcaggagtggtgtgattcccgaccaagatggcggccgtggggcgagtcggctcgttcggttcctctcccacccgggctagcctccacttacgccagcgggcccttggccaacgagctggcgtcgggcagcggcggccccgcgccgggcgacgacgaggacggacagaaccgtctggtcctgcatcctcagcgaggtctccacgcgctcgcgctccaagctcccgaaagttgatcagagacttccaagagtatgtggagccaggagaagacttcccagcttccccgcagcgaagagccacagctacccaggaggatcgagatgacagcgttgtcctccccctgggcgcagacacactcacacacaacctgggcctcccggtgctcgtagtctgcacaaagtgtgatgccattagcgtattggagaaagagcatgactacagagatgaacacttcgattttatccagtcacacatccgcaagttctgtttacagtacggtgcagcgcttatttacacttcagtaaaagngaacaagaacatagacttagtttataaatacatcgtccagaagctgtacgggttcccctataagacccctgcggtggtggtggaaaaggatgcagtgtttattccagcagggtgggataatgataagaaaataggaatattacatgaaaaaagataattttgaagacatcataaccaaacctcctgtccgaaagtttgtgcatgagaaggagatcatggcagaagatgaccaagtgtttctcatgaagttacagtcccttttagcaaagcaaccaccaactgcagctggaagacctgtggatgcatctccaagagtccctggcgggtcccctcgaacaccaaacagatctgtgtcatccaatgttgccagcgtgtctcccatccctgcaggatccaaaaaaattgatccaaacatgaaagctggagcgacgagcgaaggtgtcctggcaaacttcttcaatagtctgttgagtaagaagactggctcccctggaggccccggggtcgggggcagtcctggaggaggggctgcagggggaagcagcggcttgccaccctccgccaaaaagtcaggccagaagcctgtgctctcagacgttcatgcagagttagacagaatcacacggaaacctgcttccgtttctcctacaacacctacatctcccacggaagg

SEQ ID NO: 5546 - DNA, 1201 bp, Cricetulus griseus
cccctggcccccagccacccacaccccgccgtcgtgggcatcaacgccttcagcagccctctggccatcgccgtcggggacgccgcaccggagccgggctatgcccgcagctgcggcagcgcgtctccccggttcgcgcccagccctggctcacagcagagcagctacggcagtggccttggagctggcctcggcagctacggtgctccgggtgtgactggcctcggtgtgcccggatcccctagcttcctcaatggctccaccgcaacctcacctttcgccatcgccccccgcctcggcggctcgcctcctccactcgtccctcccggcccgcctcgcccccaccaccagcgtcttctccttctcgcctgtcaacatgatctccgctgtcaaacagaggagcgccttcgcccctgttctgcgcccacccagctccccatcccaagcctgccccagagcccacagagaggggcttccagaccagccttttgaagatactgacaagttccactctgctgcccgggggctacagggcctggcatactcttaattatggtctgcaggtgctgccccaatgaggctggactggaggtccttctggattcatgttcatggctgggatgggtgaggatgctcttggcaagagagcaccgtagggaggtgttgggatgtcgggccttacccactggattggttcctctgtaagaggtggattttgtgaagaccagaaatgttggtaagatgagcaagaattaggaaccatgggaaagaggacatctcagggagaggtggtctagacgaggtcctgtttgctttctgaccagtctcacctggcctagagcccaccttctctcatgaacaaggtggtgtctagcagtctcaggaggcccattcaggctcccatggagctgcccacaagccactggaccccaatggctgcccccacttcctttgaaagtagcacattcatgcagatcccatcacgcctccttgtgaggggatttagggcatggaagatgcacagaagggcctcctgaatcttgactcttaccccaatggatgtttcatgaattttgtcccctattgccatacacccaactctagttggccccaaagaacaacctggctgccttttggtggcctcacattctgctgagtttggacaaaatggaataataaatcagatgcaggtggccaacgt

SEQ ID NO: 5547 - DNA, 1201 bp, Cricetulus griseus
cggttcggggcggcggggagcagcatccttgagctgagtctacagcagacacccctggagcctggattccatctagcagacagccctgctagcccacaccatgcatcaccagtccattctgcacagtggctacttccacccactgcttcggacctggcaaacctctgcctccaccatcagtgcctccaacctcatctatcccatctttgtcacggatgttcctgatgacatccagcccattgccagcctcccaggaatagccaggtatggcgtaaaccagctagaggacatgctgagacctctggtagaagcaggcctgcgctgtgtcctgatttttggtgtccccagcagaattcccaaggatgaacagggttctgcagctgactctgaggactctccagctattgaggctatccgtctgttgagaaagaccttccctgaccttctggtcgcctgtgatgtctgcttgtgcccctacacctcccatgggcactgtggcctcttgagtgagaatggagcatttctagctgaggaaagccggcagcggttggcagaggtggcactggcctatgccaaggcaggatgtcaggttgtagcaccatcagacatgatggatggacgtgttgaggccatcaagactgccctgctaaaacatggacttggcaacagggtctctgtgatgagctatagtgccaaatttgcctcatgtttctatggccctttccgggatgcagctcagtcaagcccagcttttggagaccgccgctgttaccagctgcctcctggtgcccgtggcctggccctccgtgcagtggcccgggacattcgggaaggagctgacatgctcatggtgaagccaggattaccctacctggatgtggttcgggaggtgaaggacaagcaccctgagctccccctcgcagtataccaggtatcaggagagtttgccatgttgtggcatggagccaaggctggggcctttgatctcaggactgctgtactggagaccatgacggccttccgcagagccggtgccgatgttatcatcacctactttacaccccagctgttgaagtggctgaaggaagagtgatgggagagtgtgcaggacttgatcttgacaaagctcccttgggccttgagaagtgaaaaaaaaccaagtaaatgctgctgtaagaactgaaaaaaaaaaaaaaaaaaa

SEQ ID NO: 5548 - DNA, 1200 bp, Cricetulus griseus
gcggagctaacgcgacaggcggcggctcggggcccgacatggacaagctgaagaaggtgctgagcggccaggactccgaggaccacagcagcctgtctgaggttgtggagtcatcgtccttaagctggggtaccagaataaaaggcttcatcgcatgttttgccctaggaattctctgctcactgctgggtacttttctgctatgggtgcccaagaaaggactgagcctctttgcagtgttttataccctgggtaacatggcatcaattgggagtaccatcttcctcatggggcccttgaagcagctgaagcgcatgtttgagcctacgaggctgatcgccacaatcctggtgctgttgtgttttgcacttaccctgtgttctgccttttggtggcataaaaaggcactagcgctcatcttctgcattttgcagtctttggccttgacatggtatagcctttccttcataccatttgcaagggatgctgtgaagaaatgctttgccgtgtgtcttgcataatacactgccagtctgcagagagcactgtggatggaaactggtggacaattttgtaaataccctctgaactctgtctcacagacatgtgcctttcacttgcagcaatgcattgcttgcaatttggacattttgagggttgcccatgggagcagtcctgaatcctaagccttatcatctgtagcacagtgcaaggttctgggctagtgtagaggactcttcctcatgaccatcttcctctctggatggtatcccactgagttctcacacattagtctttgtttaatatcagcctataagctgcaggagcacctgattccctggcagcagcaggaatgtctagccctgaactctgtcctttgcaattctattgtgaaattgatagtgagggcatgcaaaagcctatgatggaggcacccttatccttgtgactttgggcatctgggcacacttcccagcagtaaaaccaaatccaaaatgcctgtggtggatttgtatgccttgagaacattgtacctgttctaatacagtgaactttagaactttgttaaaacaaatgaaaccatttttataattgtgtaggtgtagttgattttgaatattactgattgtataactgaatttttatatctaaaaatacattcttgagtactgccttatctgccttgaggatctagttcat

SEQ ID NO: 5549 - DNA, 1200 bp, Cricetulus griseus
ctctgatgtcacctccatcgagggtgtgggtaagtgaggtggatggtggtggcaggtgtgttaagcgctcgactctagccttggtcctagcctggctctctacttacgtagcagacagcagtaacaaccaactgctgggcaccattgtgtcagcaggcgacccatctgttctccacctggggcatgtggaccagctggtaagccaaggcgctccagaaccgactgaactcccccatccatcggaggggactgatgagaaggctgaagagaccagtgacactggaggagactccactggggaacctggagctaggggagatacggagcccagccttgagcatctcctggatattcaaggcctccctaaaagacaagcaggcctggagagccctccagaagctccactgggattagatgatagcacctgcctctctcccagccccagcctcatcaatgttcggctcaagttcctcaatgacaccgaggagctggctgtggccaggccagaggacactgtgggtaccctaaagagcaaatacttccctggacaagagagccagatgaagctgatctaccagggtcggctgctgcaggacccagcacgcacactgagttccctgaacattaccaacaactgtgtgattcactgccaccgctcacccccaggggcagctgtttctggctcctcaggctccttgaccccctcagccactgagccatccagccttggtgtcaatgtgggcagcctcatggtgcctgtgtttgtggtgctcttgggtgtggtctggtacttccgtatcaattaccgtcagttcttcacagcacctgccactgtctccttggtaggagtcacggtcttcttcagcttcctagtgtttgggatgtatggacgataaggacatccaggagacaatgaaaggcatggtcttcctctttcatggcctccccccctttcctggccagagctgggcccaaggacctgggagggagggatggggaaggatatggtgggtaccctgtccatgggacccaggaaggaggtgtgtggcctcccttggtgtccacagggtacagatatctctgcaagcacaactcaggtagaaacaaggatatcattttcccgattttggaatcccaaagttcaaatgccaagctcagtgagaagcttgggctctgggtttttctctcttggccatggcc

SEQ ID NO: 5550 - DNA, 1200 bp, Cricetulus griseus
ctgaagccaggtgtgcagtgcagtgataggaacagtccttgctgtaaaaattgtcagtttgagacggctcagaagaagtgccaggaggctattaatgctacttgcaaaggcgagtcttactgcacagggaatagcagtgagtgccccccaccgggagatgctgaagatgacactgtgtgcttggacctcggcaagtgcaaagctgggaaatgcatcccgttctgcaagagagagcaggagctggagtcttgtgcgtgtgctgacaccgacaactcatgcaaggtgtgctgcaggaacctttccggcccgtgtgtgccctatgtcgatgcagagcaaaagaacttatttttgaggaaagggaagccctgtacagtagggttttgtgacatgaacggcaaatgtgaaaaacgagttcaggatgtaattgagcgattttgggatttcattgaccaattgagcatcaacacttttgggaagtttttggcagacaacatcgtagggtccgtcctggttttctccttgatattctggattccattcagcattcttgtccactgtgtggataagaaactggacaagcagtatgaatccctgtctctgtttcatcacagtaacattgagatgctgagcagcatggattcggcttctgttcgaattatcaagccttttcctgcaccccagactccaggtcgtctgcagcccctgcagccagtctccatgatgccgccagtgtctgcggctccaaaactggaccaccagaggatggacaccatccaggaagaccctagcacagactcgcatgtggacgacgatggctttgagaaggacccctttcccaacagcagtgcagctgctaagtcttttgaggatctcacagaccaccccgtcaccaggagtgaaaaggcggcctccttcaagctgcagcgtcagagccgagtcgacagcaaggagacagagtgctagtgctggcctcatcctgctctaggatgtgcacatgaagatgctcgagagctgagcgaaaccaaacattgtgacaacccaaggaacacagaagcaacgtacaggatgctggtcatgaacgtgaccttcctaggacaacctgtgtaggtgtaggccccttgaaggggtgaggtaaatctggcttatgtggggtgtgtgggtgtatgtatgaatcaaagttcttggcagaatataagaaaa

SEQ ID NO: 5551 - DNA, 1200 bp, Cricetulus griseus
cccactgtccaaagctgcttccaatgactcctcagatgtccacttctacctcatcgtgtatgcagccattgctggcgtcaacactctctgcacccttctccgggccgtgctctttgcagcaggtgcccttcaagcagctgtcacgctgcaccaccgcctgctgcatcgactcctcacggcacctgtgactttctttgactccacgccctcaggccgagtcttgaaccgattctcctcagatgtagcctgtgtggacgacagcctgcccttcctcctcaacatcctgctggctaattcgggcctggtgagcagcttcacacagacggaagccatgatggtgagtgtcgagcgactggaggaatattcctgtgaccattccccaggagccccaaggccagccactgcagacaccccgccagcagggcatcaggtggctgacccagggaagtgtggagttccaggacgtggtgctggtgtatcggccagggctgccaaatgccttggacagggtgacattccgagtgaagcccggagaaaagctgggcattgtaggccgcacaggctctggcaagtcttccctaatttttggtgctcttcaggctgctggagcccagcgcagggcgggtgctgctagacggtgtggacaccagccagctggagctggctgagctcaggtcccagctggctgtcatcccccaggagccttttttgttcagtgggactgttcgagagaacctggacccccagggcctacatgaggacagggccctgtggcaagccctagagcagtgccacttgcgcgaggtgatcgtcactgtggggggtctggatggagagctgggcgaaaggggccggaacttgtccctgggacagagacagctgctgtgtctggccagggctcttcttacagatgccaagatcttgtgcattgatgaggccacagcaagtgtggaccagaagacagaccagctgctccagcaaaccatctgcaaacgctttgccaacaagacagtgctgactattgcccacaggctcaacacaatcctaaactctgaccgagtgctggtgctccaagccgggagggtggtagaactggactctcctgctgtcctgcgcaaacagccccagtcactgttccagcagctattacagagcagccagcagggagcccactccctccctgcaggacgctgagcctcc

SEQ ID NO: 5552 - DNA, 1199 bp, Cricetulus griseus
gccccggcggccttggtaggacccatggcggatctctcgcctgcgccggccccgcgggaaggcggcccccgtgcgtaccggccctccgcgccctccccgccgccgcgctctcgctccggctcggagcccgacgaggccgagctgtcgctgagcttggcccgcaccaagacccgctcgtacggcagcacagccagcgtgcgggcgccgctgggcgccggcgtcatcgagcgccatgtggagcaccgggtccgcgccggagacacgctgcagggcatcgcgctcaagtacggagtcacgatggaacagattaaacgggccaacaaactgtttaccaatgactgtatatttctgaagaaaaccttgagcatcccaattctctcagagaagaagccttttacctttaatggacttaactccattgattctccagaaaaggaaactgttgacagcaatttttgtcatgaagaggagactgtggtggctggggaagaattgcctcctcccagtcctcaggacccaggtcctgaacctgcgcagcctgaggaagtgtctgccagagatttcctgcagagacttgacttacagattaagctatcaactcaggcagccaggaaactcaaagaagagaacagggatgaagaaagcccttatgctgcttccctttatcatagttagtgactggcagatgtcattctaacccggatcaaaacatggctggaccctaaagaatccattggctggggctgcagaagcaacgccgcttctggactcccatagtgcacatcttcaggccacagttaagtagacccaaccgcagctgcactgaatcgatcagttcctctggcttcctgtagttaaatcttaccatggcatgatagcaaacctgtactctaaagcctgtcacttttgtagatggtggtagttttagactggcttttgtagctacaaaaagcatcaaagactttatatatttaagccaaaagcaatgtttatttcctgatgagatcctaaatgtatggaaaacatggtggctgtaaagtgataatgcatttgctgtgtgtttataactcgagtgctataatatatatttcaatatcacatattctgtactactgtaaagaaccaaaattttgtctgctattttgtaaaagtaaaatacaaatgtctggatgaagaaaaataaaactattgtttttaca

SEQ ID NO: 5553 - DNA, 1199 bp, Cricetulus griseus
cagatcaccgtggacatgatgtatggtggcatgagaggcatgaaaggacttgtgtatgaaacatctgttcttgatcctgatgagggcatccgttttcgaggccacagtatccctgaatgccaaaaactgctgcctaaggctaagggtggggaagaacccctacctgagggcttattttggctgctggtaactggacagatgcctacagaggaacaggtgtcttggctctcacaagaatgggccagaagggcagctctgccttctcatgtggtcaccatgctggacaactttcctactaatctgcaccccatgtctcaactcagcgcggccatcacagcccttaacagtgaaagtaattttgcccgggcgtactcggagggcatcaacagaaccaagtactgggagttgatttatgaagattgtatggacctgattgcaaagctcccttgtgtggcagcaaaaatctaccggaatctttaccgggaaggcagcagcattggtgccattgactctaagctggactggtcccacaattttaccaacatgttaggctatactgaaccacagttcactgagcttatgcgtttgtacctcaccatccacagtgaccacgagggtggtaatgtgagtgcccacaccagccacttggtgggcagcgccctttcagacccttacctgtcctttgcagcagccatgaatgggctcgcagggcctctgcacgggctggcaaatcaggaagtgcttgtctggctgacacagctgcagaaggaggtaggcaaagacgtgtcggatgagaagttgcgagactacatctggaatacactcaactcaggacgggttgtcccaggatatggtcatgcagtactaaggaagactgacccacgatattcctgtcagagggagtttgctctgaagcatctgcctaacgaccccttgtttaagctggttgctcaactgtacaagattgtgcccaacatcctcttagagcaagggaaggccaagaatccttggcccaacgtggacgctcacagtggtgtgctgctccagtactatggcatgacggagatgaattactacacagtcctgttttggagtgtcgagggcacgtgggtgtgctggcacaactcatctggagccgagccctaggtttcccactagaaaggcccaagtccatgagcacggatggtctgatgaaattt

SEQ ID NO: 5554 - DNA, 1199 bp, Cricetulus griseus
  modified_base (1151)..(1151): a, c, t, g, unknown or other
ttcaagaaggaccacgggctggtgggaagggtgttcgccttcgatgccaccgccgcccccccggctacgagttcgagctgaagctcttcaccgagtacccctgcggctccggcaacgtgtacgcgggggtcctggcggtggcccgccagatgttccacgatggccctccgggagccgggcaaggccctggcctcgtcgggcttcaagtacctcgaatacgaacgccgccacggctcaggggaatggcgccagctgggagagctgctcaccgacggggtccgcagcttccgagagcccgctcctgccgaggccctgcctcagcagtacccagaaccgaccccggctgctctgtgtggcccgccacctcgagccccctccaggaacctggcgcccacgccacgccggcgcaaggcgtcccccgagcccgagggcgagtcagccgggaagatgaccacggaggagcagcagcagcggcactgggtggcaccgggtggcccctactcccagcatcgcctggtgtcgcgcaacggagaggcagaggtcagccccacggccggggctgaagctgtcagcgggggtggtagcggcacaggggcgacccctggagcccccttgtgctgtaccctgtgcagagagaggctggaagacacccacttcgtgcagtgtccctcggtacccggacacaagttctgcttcccctgctctcgagagttcatcaaagctcagggcccagctggagaggtgtactgccccagcggagacaagtgtccgctggtgggttcctccgttccctgggccttcatgcagggcgagatcgctaccatccttgctggagacatcaaggtcaagaaagaaagggacccctaggccgccaatgccaggctacttaccccgcccccctagaccacccaccgcagttcttgcggataaattattccctaccccgcccagcccagtaccgccctaacctgtgtatataccctcttcccctacccggatggatcccctagggtagatgcattgtgggtggggggagagcttgtggctcctgtcagagcaggcgtttggagttcctgggtccctccgatttccttctcctttcttggcttggctttttctgctgttggtagttggggagagagatgccccgnttgtcctcggaggggaggtctcctgagaactcgctctttataaacgaa

SEQ ID NO: 5555 - DNA, 1199 bp, Cricetulus griseus
ggcctctggctttcactgcggcttctgactccggccttgggatgggttgcgacggaggaacaatccccaagaggcacgagctggtgaaggggccgaagaaggtcgagaaggttgacaaagatgctgaactggtggcccagtggaactactgtactctaagtcaggaaatcctgaggcgtccaatcgttgcctgtgaacttggcagactgtataacaaagacgccgtcatcgagttcctgttggacaagtctgctgaaaaggctctggggaaggcagcatcacacattcggagcatcaagaatgtgacagaactcaggctttctgacaaccctgcctgggaaggagataaaggaaacaccaagggcgacaagcatgacgacctccagcgagcacggttcatctgccccgtggtgggcttggagatgaacggccggcacaggttttgcttcctccgatgctgcggttgtgtgttttctgaacgcgccttgaaagagataaaagctgaagtttgccacacgtgtggggccgccttccaggaggaggagatcattgtgctcaatggcaccaaggaggacgtggacttgctgaagaggaggatggaagagaggcggcttcgggccaagctggagaagaaatcaaagaaaccgaagaccaccgagtgtgtttcaaaggcgggtgtcacagacgactctgcagggccatcaaaagtgaaggctggcaagcctgaagaggcagaccccgatcctaaagagaagagaagcaccgtggcttccagagcagctagcgggagtgcttctgggaaagctgggaagcccccatgtggggccctgaagaggtccatcgcagacagtgaagagtctgaaacctacaagtccatcttcacaagccacagctccgccaagcgctccaaggaggagtctgcccactgggtcacccacacatcctactgcttctgaagcaggaccacagccctccccttggggctcctcccctgtggccttctgtgccagcttgcctgatgtggcaccatgctataaagctctcctctgcaatcttcgacctgcgtggtcactggctgtgacatgtgtgggtccaaggagggtgaggtggcttgcaacttaacaggccgctgctcccacgggctgtacctcttgcttagcctggtgactgctgcttacacttaggtagcagaaggactc

SEQ ID NO: 5556 - DNA, 1199 bp, Cricetulus griseus
tgtatcattgatgaggactgtgggcccaccaggtactgccagttctccagcttcacattacaccttgccagccgtgccgggaccagcagatgctatgttcactcgagacgagtgagtgttgtggagaccagctgtgtgtctggggtcactgcaccaaaaaagcctccaaaggtagcaacgggaccatctgtgacaaccagagggattgccagcctggcctatgctgtgccttccaaagaggcctgctgtttcccgtgtgcacattcctgccggtggagggagagctatgccatgaccctgccagccagctgctggaactcatcacctgggaactggagcctgaaggtgctttggaccgatgtccctgtgccagtggactcctctgccagcctcacagtgcttcagtaactctgaaaagtcagaaattggagggccatttgtgtaaattaattcacaggaaggacacttgggtaattgtagggccaggttattatgaagtttgcaaggtcgcttagcaacaacggaagggctttctcaatagcacagagaaatcagaaccaaaccaggctgtgtgaagtatggctgtgatgtccagaaagaaggctgggctgggtgtcaggcctcagatgatggtttcaggtgccaggaactgtttccatcctgtcttcaccctaggttattaaattttaaagttgcacacagttgagtaagcatgctttcttctgagttttaaattatgtataaacacgtgtgttgcactcaaagataaatcactttggatactatttaataattcttggacttttttctctttgactttcaataaatgtaaaccaccttcatccagaacaataaaataaaacaatctgtagtataaagagacaaaaaatatttccatagaaacagattttccaggcatctgcagttcacctcttttagaatatgttggaactcttattcatgtctggatgggaattagttttaagagagaaaatactttcctgcctcctgaaggaacaaatggaatatttgagtcttctcttggaggctctctgtaatcaaaagttctggcctcttgttagcattgttactctaacaaaatatctgaggtaatttatttatatatttaaaaatgtttattttggttcatcatttcaagtttcagtcatgatccacctgagggatgagggttcattttg

SEQ ID NO: 5557 - DNA, 1199 bp, Cricetulus griseus
gagctgggacagcggcagccataccgctttgcagagccggctcggagcgtggagggcgggcgcggagcagggagtcgcgttctctggagtcgcagaccctgtaagatctggacatgtccttcatatttgactggatttacagtggtttcagcagtgtgctgcagtttctaggactgtataaaaaaactggtaaactggtattccttggattggataatgcagggaaaacaacgttgctacacatgctgaaagatgacagacttggccagcacgtcccaacactacatcccacttcagaagaactcactattgctggcatgacttttacaacttttgatctgggtgggcacatccaagcccgaagagtatggaaaaattaccttcctgctatcaatggcattgtatttcttgtggattgtgcagaccatgaaaggctgttagaatcaaaagaagaacttgattcactaatgacagatgaaaccattgccaatgtgcctatattaattcttggaaataagattgacagacccgaagccatcagtgaagagaggttacgagagatgtttggcttatatgggcagacaacaggaaagggcagtgtgtcactgaaggagctgaatgccagacctctggaagtgttcatgtgcagtgtgctgaaaaggcaaggctatggagaaggcttccgctggatggcacagtacatcgattagcagctgtcctgcccactcccatccaggcctctgaggtccatctcccaacatgcataacttgaattcaatagacttttgttggtttcagaataggtgttttttagattattaatatatctacctgagtgggaattgcaaactgattcaagtttgaatatcacaatgttagctttctaattccatacagatagtttttacagtttacagccccacatcaacctgttcaccgtttataaagatcagcttcccagcggtacatttgaagcactttttaacaatgtgaaactacaaatataaaccatatttaaaagctcatcatgtgaaacttttatgtactttttggaaatagtttttcaattttagattgtccgcctatcttgtgtacagttaaaatccgcttatcagtgattgcatgatgccttacggttttcaagactactttttcttatgcaaacgtcatgcaataaaacaaactacaacgtttggctc

SEQ ID NO: 5558 - DNA, 1199 bp, Cricetulus griseus
cctcacgaagtaatgagaagagaaaagcaatagactgtctgcaccttcttcttaccttgtcaggagcctagcagatgttcctcgagagtatggctcatcacagtcatttttaacagaagttaattttgctgttgaaaatggagactctggttcccgatacttttattcagataacttttttgatggtcagaggaggaggccacttggagatcgtgtacaagaagactacagatattatgaatacaaccatgatctcttccaaagaatgccacagaatcaggggaggcacacttcaggtattgggagagttgctgctacatctcttgggaatttaactaaccatggttctgaagatttaccccttccccctggctggtctgtggactggacaatgagagggagaaaatactacatagatcataacacaaatacaactcattggagtcatcctcttgaacgagaaggacttcctcctggatgggaacgagtagagtcctcagaatttggaacctattatgtggatcacacaaataaaagggctcagtacaggcacccctgtgctcccagtgtgccccggtatgatcagcctcctcccatcacataccagccacagcaaactgaaaggaatccagtccctcctggtccctgcaaatccttatcatactgcagaaatccctgactggcttcaggtttatgcccgagcccctgtgaaatatgaccacattttgaagtgggagctcttccagctggctgacctggacacctaccagggaatgctgaagttgctcttcatgaaggaactggagcagattgttaagatgtacgaggcctacagacaggctcttctcactgagttggaaaatcgcaagcagagacagcagtggtatgcccagcagcatgggaagaagtttttaagttaactttatcacaatccaagttttataagagctttaaaatagtttcagataaatgactgcaaacaagtactttggttaataaaggcaacttactatttggaattataaaattctagttttacatatattttgttaccaaatttttctcttattgaaccaaaaatgttatcttttaaagcgccaatatggcatatgcttccaaatgctgtatattaagaaactgctttgaatattgttgatgaaaaggggtacaggaagagagcatcatcatacccaggcatt

SEQ ID NO: 5559 - DNA, 1198 bp, Cricetulus griseus
gccatcgctcctgtgttaccatgggaattcaagccttgccaaactaattgccgatgtggctcccagtgccatccgagagaatgacatcaagagctacttcggtcgcaaggtggccattgatgccttccatgagcatctaccagttcctgattgctgttcgccagggtggggatgtgctgcagaatgaggagggggagaccaccagccacctgatgggcatgttctaccgcaccatccgcatgatggagaatggcatcaagcctgtgtatgtctttgacggcaagccaccacagctgaagtcaggcgagctggccaaacgcagtgagaggcgagctgaagctgaaaagcagctgcagcaggctcaggaggcgggggtagaggaggaggtggagaagttcacaaagcggctggtgaaggtcaccaagcaacacaatgatgagtgcaaacacctgctgagtctcatgggcatcccgtaccttgacgcacccagtgaggcagaggccagctgcgctgccctggtgaaggctggcaaagtttatgccgcagccaccgaggacatggactgcctcacttttggcagccctgtactaatgcgacatctgactgccagtgaggccaagaagctgcccatccaagagttccacctgagccgcgtcctgcaggagctgggtctgaaccaggagcagtttgtagatctctgcatcctgctgggtagtgactactgtgagagtatccggggcatcgggcccaagcgggctgtggacctcatccagaagcataagagcatcgaggagatcgtgcggcggctggatcccaacaagtaccctgttccagaaaactggctccacaaggaagctcagcagctcttcctggagcctgaggtgctggacccagagtctgtggagctgaagtggagcgagccaaatgaagaagagttggtcaaattcatgtgtggtgaaaagcagttttctgaggagagaattcgtagtggggtcaagcggctgagtaagagccgccagggcagcacccagggccgcctagatgatttcttcaaagtgactggctcactctcctcggctaagcgtaaggagccagaacccaaggggcctgctaagaagaaagcaaagactgggggagctgggaagttcaaaagggggaaataaaacgtgtcctcccctccattgtcccctgaccccag

SEQ ID NO: 5560 - DNA, 1198 bp, Cricetulus griseus
  modified_base (764)..(764): a, c, t, g, unknown or other
gtttactccaggagtgattcaaatggagcaagggttctaagccgagggctgtttcctggcgtccgcccattgccgatcactcccattgggatgacggcggccataaggaatagcatcagcagttgccggatgcggactgagagtgagccgccgtgtggctccccagtggtcagtggtgaccccaaggaggatcataactacagtagtgccaagtcctccaatgctcgaagcacctctcccgccagcgactccatctcttcctcctcctcctcctcagctgacgaccactacgagtttgccaccaaggggagccaggagggcagtgagggaagcttccagagccatgagagccacagtgagaccgaggaggatgacaggaaacccagccagaaggaggccaaggatgccctgggggacagcggatacgcatcccagcacaagaagcgacagcacttcgccaaggcaaggaaggtccccgagcgacacactgcccctcaaaaagagacgcacagaaaaaccccctgagagcgacgatgaggagatgaaagaggcggccggttcgctcctgcacttggcagggattcggtcctgtttgaacaacatcaccaatcggacggccaaggggcagaaagaacaaaaggaaaccacaaaaaactgaaacaagtctctgatttgttttgaacttacggccatttggtttcagcatgtcaggagatttctaatgatttgtggcaatatcagctaattttttccttttctctttnttccttttgtctggtttccttttctttttcttttcttttcttttttactttcttttttttttttttaattttgccccccactcctttggttttggacccttaagaattttatgtttaaaggagattgaagccatagaactcatattgacactcagccgttttacaaaagcatttctttatctgaagacaaaagccgaaggaaaaaaaaaaaagccaaaattaaccattgcttcctgcagcctgtcagaaacctgtggctgaacccacagggatgtcaacattaatgtcacaggaacgaacattcctgtgccacctaagaggcacgcatgcagaattaccatgctcaggccaaccgttaggtttaaaaagtcagtgtgttcagagtgatgaaactggggagcaagtgcagagactgaagagccccgtgtgcccct

SEQ ID NO: 5561 - DNA, 1198 bp, Cricetulus griseus
cgacgggctcagccggccggcgcggggccgccatgggcaacctgtttggccgcaagaagcaaagccgggtcactgagcaggacagggccatcctgcaactaaagcaacagcgggacaagctgaggcagtaccagaagagggtcacgcagcaactggagcaggagcgggctctggccaggcagctgttgcgggatggcaggaaagaacgggccaagctgctgctcaagaagaagaggtaccgggagcagctgcttgaccggacagagaaccagatcagcagcctggaagccatggttcagagcatcgagttcacgcagattgagatgaaggtgatggaagggcttcaggtgggcaacgagtgtctgaataagatgcaccaggtgatgtccatagaggaggtggagaggatcctggacgagacccacgaggcagtggagtaccagcggcaaatcgatgagctgctggcagaaagcttcacccaggaggatgaggaagccatcctggaagagctgaatgcaatcactcaggaacaaatcgagttaccagaggttccttcagagccccttcctgacagaaacccagaagcccctgccaaggccagatccaggcaggccgagctagtggcagcttcgtaacttggactctccagggactcgcagggattctctgagaactgacccacagagtgtttggctgcgtgtcaaccctgagggctcccaggaggcctgaagggctgcgctggccagtgtgggtgctggtggctggagccgcggctcacaggggcctgacatcagggctactcctggtgctgttctcatggctgacccagtccgtgtgacctgcctcagaccttggggtccctatgcttccttctcttgtctctgctgccctcatgagctgaggggggcttcagttaaggggttcttactgtgcctggcctcctgctatccctcagtttctctgcaggctagtggcagaaaccctagggtactgctgctctccaaatctcttggagcatctttggcacctcaagtcttgaaccttttatgtttgggggaggtggaccaggggccattctgctgaatggacaaatctaggagcctgacttggggtcttcacaaaagaaagacatcttgaagttggtgacaagaccctgttccaatgggtgtgtacccccatggagtcctggacacagcta

SEQ ID NO: 5562 - DNA, 1198 bp, Cricetulus griseus
gagggagtccctgacgcagagactgacggacctgccaagcggcagagggaccagagtgagggcagcaagagctactcagcaacaatgtcttcagaagtggagacctcggaaggggtagatgagtcagagaaaaagaactctgtggccccagagaaggaaaatcataccaaaatggcagacctctctgagctcctaaaggaagggaccaaggaagcacacgaccgggcagaaaatacccagtttgtcaaagacttcttgaaaggaaacattaagaaggagctatttaagcttgccactaccgcactttatttcacatactcagcccttgaggaggaaatggaccgaaacaaagaccacccagcctttgcccccttgtattttcccatggagctacaccggaaggaagcactgatcaaggacatggagtatttctttggtgaagactgggaggagcaggtgaagtgctccgaggctgcccagaaatatgtggatcggatccactatgtagggcagaatgaaccagagctgctggtggcccatgcttatactcgttacatgggggacctttcaggaggccaggtgctgaagaaggtggcccagagggcactgaaactccccagcaccggggaagggacccagttctacctgtttgagcatgtggacaatgcccagcaattcaagcagttctacagagccagaatgaatgccctggacatgaatttgaagaccaaagagaggattgtggaggaggccaacaaagcctttgaatataatatgcagatattcagtgaactggaccaggctggctccatgctggcaagagaaaaccaggaggacgggttccccatgcacgatgggaagggggatgtacgtaaatgccccttttatgctgctcagccagacaaaggtacactggaaggcagcaactgccccttccggacagccatggctatgctgaggaagcctagcctccagctcgttctagctgtcagtgtggccctggctgctggactcttggcctggtactacatgtgaaggacctgtcctgtcatttgcatcctacctaccccaagtgacctattccatccctatctccacctctaactaaacaaccacctcaggtgacttttttaatgctgggttcgagaaaacaagcaaccaataaaagccagacactagaaaaaaaaaaaaaaaaaaa

SEQ ID NO: 5563 - DNA, 1197 bp, Cricetulus griseus
cagaaagcttataacccagctttgattaaagatgacttccttgatcactcaagaaattcacctttctaaaagacatgaagaaatagtatcacaaagattaatgttacttcagaaaatgaagaataattttggagatcaaaacacagaaagagcatgtctccttcaagccactgagactgcttcaaaaaggaacctcagtctcttgcaggacatagaagcttcagagaagtccttacagacaaggcttaagccatatccacaacctgcggtacgttctcttgagttgtctttaagacagagtttcactctatagccaaagctggtcttgaagtcacagcaatcctcctgcttcagcttctgagcattgggattacaggtatgagcccccacactgaggtcatttgtattttttaaagtagacaatgggatgagttaaaactcacacaagccctcactataacaaaaacctagtcaagcatccactgtgcaacacgtcccttgttcactgccatcttgggaatgtcctgttgagtgggtgttggtgtgggtaacaataacattgttttcataatatgtgctggcagattagcacacttctctgcagtgttaacagttgtaattaaggaataaacagcacagggtgtcagtccgatgacaatttcatctatagtgtcacaatacaaaatgtcacaaaatattagagctgttatatagctataaaaagtaccggcttaaagctgaaggcatctttaagagagaagacagaggaaggaggaaataggaaggctgacttagcggccagacaattttatacattctcaagactgtcatgaaaacaaattgataattttttctgttacattacagtttgggctccagccatccagttgatttagcaggaaaatgcaggtttctttgcagctccaaattggtaaaacagatttaaatgtaggaaggaacatgaggaaggttttttttaacatccagtctcccagcatatgcacataagaaggtgaatgaagcaatgtgaaacttatttttctttagtcaaagtgaaaaaaaaggctaaacatttgttagctggtaaaatattgtgtcaagtaagtaagaacaattccaaaaattaaacagtggttgatacattactgtcctcaaatatttgagtgtacacttccttgagatctgtaaattaaatca

SEQ ID NO: 5564 - DNA, 1197 bp, Cricetulus griseus
tactgctattgccattttggctgtggacttcccacttttccctagaagatttgccaaaactgagctttatgggacaggggccatggattatggagtaggtggcttttatttttggggctgcaatggtttgtccagaggttagaaggaaatgtatagtagggtccagatttaattatcttagaaaatcactgtattctgtttggcctctagtcttcttaggaatgggacggttagtcgttaataaaatccataggctatcaggaacatttaactgagtatggagttcactggaactttttcttcaccatcatagttgtgaaattagtaacatcccttcttttgactatttttcctttaaataagtcttgggttgtggctgtcagcattactgtgttataccaactagctcttgactttactccactcaagggggtaattttgtacggcactgatggtagtggcacaagggttggtttataatgccaaccgagaaggaataatttccactttggggtacgtgacaatacacatggctggtgtgcaaacagggttgtatgtgcttaaggtcagaacacatatcagagactggaataaaagttacttgttgtattctcttagtgctgtcagcttcttcattttctcttcatatagttcaagttaatatagaagccgtatctataattttgagttttgccaaatttctaattaaaggggctctagtaccatgttcttggaaacttatacagttgcctgctacaacaaaaaacattccgaatctctaaatcttggaaactgaaaaaaaagatcccagtctttgtttaatcacagccctgaacagaaaccagctgtttttttcttactgtcaaatataacaactggtctgattaacctgactgtagatacattacacagtggtgcctcatggaccttagttgtactgtgtacttatatgtttaccaattgtttagttatatatgtacttgacttacaaggtaaaaccataaagctttggtgatgagtgaggaggctatatatatttgagcagcattattttagtggaggagagtaagggtgaaggaaatgtgctcttagcaatctatcttaatcatatttaattatggagtttcaaccctctaagacagaaattaaacttttacttttttttgggaggcagaggcaggcggatctctgtgagtt

SEQ ID NO: 5565 - DNA, 1197 bp, Cricetulus griseus
acggctcttccccgggcagcatggcggataccgcgcctcaactcaagagaaagcgcgaacccgaggcagaggagtcagaaacccccagcacagacgagaaggaagcaggcgttggcaatggtgcctctgcccctgtccgcttaccgttctccggctttagagtacaaaaagtactgagggagtctgcgcgggacaaaatcattttcctgcatgggaaggtgaatgaggactctggggatacacctggagaagatgctgttgtgatcctagagaagacaccatttcaggtagaacacgtggcccaactcctaacggggagccctgagctcaagttgcaattctccaatgatatctacagcacctataacctgtttcctccaaggcatctgagtgatataaaaacaaccgtggtgtaccctgccacagagaaacacctgcaaaaatacatgcgtcaggacctccgcctgatccgagagactggagatgactacaggaacatcactttaccccacctggaatcccagagcctcagcatccagtgggtgtataatattcttgacaagaaggccgaagctgaccgaattgtttttgagaacccggaccctgctgatggctttgtccttatcccagacctcaagtggaaccagcagcagcttgatgacctgtacttgattgccatctgccatcgccggggtatccgatcccttcgggacctcactccagagcacctgccactactgaggaacattctccgagaaggacaagaagccatcctgaagcgctaccaggtgacaggagaccgccttcgcgtgtacctacactacctgccctcttactatcacctgcacgtgcacttcactgccctgggctttgaggctcccggctcaggtgtggagcgggcacacctgctggctgaagtgattgagaacctggagtgtgaccccaaacactatcaacagcgcactcttacttttgcgcttaggaccgatgaccccctgcttcagctcctgcaaggaagcccagcaagaggggagctagtgggctgggtttggggtagtgtgggctgggcttttatctctgagtgattttccctaaaaaattttttgtagtttcttgaccttttagcagaggtcaagtgtaagatgttattttgtactgttgtattcctcacaggagaataaagtactttgttattgg

SEQ ID NO: 5566 - DNA, 1197 bp, Cricetulus griseus
  modified_base (1187)..(1187): a, c, t, g, unknown or other
ggagtctgaagaccagggttcaagaccatccgtgctacttgctcttgtgagatcttgggcaggtacctctcacctctcagccttaacacactttcctgtgaaatggggactgtggtcatcccttctctgagtcactgagagtgaggacacaatggcccagtggttgttgtgaaagagttctggccttgacaccatctataaggacacccatttgtgggttctaccaggccttgtgactcccagggcctgagaggttagcatactagtgcatacacgtccacgtgaggcactgaggacacagccagcatgaactgggggttttctacaagggatcttgagcggtgtgaacaagtactccactgcactgggccgcatctggctgtcggtggtctttatcttccgagtgctggtgtacgtggtggcagcagaagaggtgtgggacgatgaaacaaaaggacttcatctgtaacaccaagcagccaggctgccccaacgtctgctatgacgagttcttcccggtgtcccatgtgcgtctctgggccctgcagctcatcctggtcacctgtccttccctgcttgtagtcatgcatgtggcctaccgagaagaccgggaacgcagacaccgccgcaaacatcggaaacccaacgccccagccctgtacagcaaccttgagcaagaagaggggcggcctgtggtggacatacctgctgagtctcatcttcaaggctgccgtggactcgggttttctctatatcttccaccgcatctacaaggactatgacatgccacgagtggtagcttgctctgtggatccctgcccccacaccgtgaactgttacatctcccgacccacggagaagaaggtcttcacctacttcatggtagtcacagcagccatctgcatcctactcaacctcagtgaggtcgcctacctggtgggcaagagatgcatggaggtcttccgtccccggcgccggaaaactcggaagtcacatctaccagatacatgcccaccatatgtgatctcccaaggaggccacccccaagatgaaaatgatggcctaacaaaggtcgggatagccacagtggatgcaggtgtgtatccgtgacctgcaggtaggcttacctggtcactgcctggtcactaaagccaacccaagaaaatggttcccagtgaaaaaaaaanaaaaaaaaaa

SEQ ID NO: 5567 - DNA, 1197 bp, Cricetulus griseus
tttttcattttgttctgtttgaagtttatataagtatgtattacttttatataatcagaatttttagaaatattgtactgatttaaaggcttaggcatgtttcaaacgtctgcaaaactacttattgtctcagttttagtttttctaatccaagaaggcaggccagttgactttctggtgccaatgtgaaatttaaatgtttttgttttacctgctttgtggatagaaaatatttctgagtggtagttttctgacaggtagaccatgtcttcttatcttgtttcaaaataagtatttctgattttgtaaaatgaaatataaaatattgtctcagatcttccaattaattagtaaggattcatccttaatccttgctagtttaagccttgcctaagtcactttactaaaagatctttgttaacccagttattttaaacatttgtctgcttatgtaggtaaaagtagaagcatgtttgtatgctgcttgtagttttagtggtaatagtagtaaatactttaaaataattttctcaagatccttaagaactcttggaaattgtaacatactgacaagagtagttgtttaaatacttctaacaacttgtataagagtcaatatgaataaaatccagctaaatgcttcatagaacacaggatttaccctaaacaattatcataatggacctcttacagagactctagtctgttttactacagagcacagtttgagagtgaaactgttacaatttagatttttgttgtattttctaagagaaagaatattgttaggttctcctaacttctgttgactactatggtaagtggtgtcattttaattgcaaatttaaatagaaattaacagaattaagtacttttaaaacttgtgtgctgagagttaagcaagacctctttttttttttttgttcttcatgagttgcgaaattgaattcatgaagctgatgtggctaacaagtttattttaagaattgtttagaaaatgctgttgcttcgggttcttaaaatcacagcattccaactctaatcaagttgttggagacttaccagagttggactgagctcacactaaaataaaaaaaaattgctttctgcgctataatctgtcctttgttgtagattaaagctttatttttctgtgaagtaagacttatcaaataaagcactatttactttaaaatg

SEQ ID NO: 5568 - DNA, 1197 bp, Cricetulus griseus
catccacggagttgctgatcatctgggctgtgatcctcaaacacggttctttgtccctcctaatatcaaacagtggatcgccttgctgcaaagaggaaattgcacctttaaagagaaaatatcacgggctgctttccacaatgcggttgctgtagtcatctacaataataaatccaaagaggagccggtcaccatgactcatccaggcacgggagatattattgctgtcatgataacagaattgaggggtaaagatattttgagttatctggagaaaaacatctctgtacaaatgacaatagctgttggaactcgaatgccgccaaagaacttcagccgtggctctctagtcttcgtgtcaatatcctttattgttttgatgattatttcttcagcgtggctcatattctacttcattcagaagatcaggtacacaaatgctcgcgacaggaaccagcgtcgtcttggagatgcagccaagaaggccatcagtaaattgacaactagaacagtgaaaaagggtgataaggaaacagacccagacttcgatcactgtgcagtctgcatagagagctataagcagaatgatgttgttcggattctcccttgcaagcatgttttccacaaatcatgtgtggacccctggcttagtgaacactgtacctgtcctatgtgcaaacttaatattttgaaagccctaggaattgtgccaaatctgccgtgtactgataatgtagcatttgatatggaaaggcttaccagaacccaagcagttaaccgaagatcagccctcggtgaccttgccagcgacagttcccttggccttgagccactgcgaacttcaggcatatctcctcttcctcaagatggggagctcactcctcgaacgggtgaaatcaacatagcagtaacaaaagaatggtttattattgccagttttggcctcctcagtgctctcacactctgctacatgatcatcagagccacagctagcttgaatgctaatgaggtagaatggttttgaagaaggaaaaacactagctttctgactgattgccttgaaggaaaaaagaacctatttttgtgcatcatttaccaatcatgccacacaagcgtttatttttagtacattttattttttcataaaattgctaatgccaaagctttgtattaaaataaataaataataaaaaaaaa

SEQ ID NO: 5569 - DNA, 1196 bp, Cricetulus griseus
cacagaatcagagcaagcagatacatgtatgtctttgagtgaaagaccaaaagaagtgaagatctctggagtggaacaaacctttagaaagctttcacaggaaacttacagcatgaaggaggccctcaagtccagctccaagactaataatgtggtatcaagtaccctggttagggagaagaacccaaactaccagctttctccagtgaaattccctgctgctaacagaaataaagattggacttcgcagcagcagcagcagacctccatcaaaaactactttcagccatgcaccaaaaaaaaggaaagggatgaagaaaatccagcaatgtcctcatccaaatcatcaagaatggaactatcttgttctcttctagaacaaacacagcctgctgcaccctcactttggaaaagcaaggagcatccatctcagagtgagcctgtaggacaaggaagcagacagatcatttgtgggtgatagagacataaaacccaatgggaagactcttgccagtaaatcattttccatagaaaatcttggaccaaaaaaaagaacaattgatttggctatagaagaggaagtactggaagagttactcaagagtacagagccagagatggcagttcaagtgaaagttgaaaagcaagaggcggatgtcagtgtcagaaaaaagccaaggatggatgtagaaaggaatagctaccttaatggtgacatggtaccagaaagcaacaggataactcaagaagatgaaacagaaaagaaagttgaactcaacagagaattactgtggtcgacaaaagatgaaacagttaacagtgatgaacttccagacagcagtgagcagcttccaagaaaagtgctactaactgaatttaggtcactggtggtcagtaactccacttccagaaatctgtgcatgctaaatgattgtggtcaactgaagaatttcaagaaattcaagaaggtcacatttcctggagcaggaaagcttccacacatcattggaggatcagatctcatagctcatcaagctcgaaagaatacagagttagaagagtggctgaaacatgaaatggaggtacagagacaacaagcgaaagaagagagtctcgctgatgatctgtttagatataatcctaatgtaaaaagaagataattgaactttgtaaaggaagctatagaaacacatttc

SEQ ID NO: 5570 - DNA, 1196 bp, Cricetulus griseus
tctcgtagccggagaccggagcacagcggaccgccggagctgttttatgaccagaatgaagcccggaaatacgttcgcaactcacggatgattgacatccagaccaagatgactgagcgagcattggagctcctctgtttgccagagggtcagccctcttttctgttggacattggctgcggttctggactgagtggagactatatctcagaagaggggcactattgggtgggcattgacatcagccctgccatgttggatgctgccctggaccgggacacagagggagacctgctgctaggggacatgggccagggaatccctttcagaccaggttcttttgatggctgcattagcatctcagctgttcagtggctctgcaatgcaaacaagaaatcggatgtccctgccaggcgcctctactgcttcttttcttctttatactctgcccttgtccacggggccagagctgtcttgcagctgtaccctgagaactcagagcagctggagctgatcacaacccaggccacaagggcaggctttaccggtggcgtggtggtggacttccccaacagtgccaaagcaaagaagttctacctctgtctgttttctggaccttctacctccctgccaaaggggctgactgagagtcaggatgcagaccaggccaccgagttgactttcaccagtgagagggctccacacaagaaggcacggcgggacctggtgaagaagagcagggaatgggtcctagagaagaaggagaggcgcaggcgccagggcaaggaggttagacctgacacccagtacactggccgcaagcgaaagccccgcttctgagggtgctgtatttaatcaagtggagagtctggctacccacacctgcatccagtcctgcagatggccctggccactcactctgttcagaagttgagagctgtcgaatccgggactacctttcaggagttttctagattgaactgtttacctgcagcgagcaaaatagtatttaaaaaaagtgcaaaattcctcaaaatattttttcactaaaagagtttcagggatttggtttggcagcccagatcttgtatgtaatcccaataccctcctgagaggctgaggcagcgagatgggaagttccaggccagtctgagaaacacagcaaaaaacctgtacttaaaaaaacaaaaagaaaa

SEQ ID NO: 5571 - DNA, 1196 bp, Cricetulus griseus
agcttctccaagtctacacctatggggtggcagcagagatcaagacaaaccattttttcggctcttttgactctgggccttccacgagcaagaggctttggatcgccgcctcaaaatccttttgcttcacctgtctctgatgagcagaaagatgaaaagaaacttctggaaggaattgttaaagatgtaagagatttgggaatcatcggggcaatggatgttttctgtttttcgccagtgaaaaagaagcctaacatttcaggtttcacagacatttcaccagaagagttgaggcttgaataccataacttcttaaccagcaataacttacagagctatctaaattctgttcaacagctagtaagtggaagaataggattaatgaactgaaaaatttaaatatgtcaaccaaaggagctctgctgtctgatataaaggatggagccagtcaagcagtgccccctgcgtttggatttggaagtaagcaatcagggacatttgggtcatcaggttttccagtgaataacagcagcagcaataatgttcagaactttagttttaaaacaagctctggattttccactgccccgtctggaagcacgtctgcgtttgggagtcacccagcctttggtgctgggccctctgctggctctgccatcgcttcctccgctccagcctttggatttaggaaacctgaagccacatctgctgcttcgttttcgttcaagagccctgacacttccagttttggatcacctgggttttcagggtttccagcttccttggcagtgagtccttttggccatgcaatggcccctgccttcggaagtggcagttctgtgcctggttttggtagtcctggcccacagtctcagactgtgtttgccaaaccttctaatgacatgtttggaggtagtagcatgtcggcctccctccccgtctctgccacaaataatgtactgttcacacccagggatcagctgactaaagaggagctggagcagtttcagtcccagaaatttactctgggaaaaatcccattgaagccaccacctgtggagcttctgactgtataaaagggcagtttcaaatacagaaaagaacggctttagccaggcttgtggtgcgtgcctgtagtctgggaggctgagagaaggaatgccacaaactcagggccagcttggactgcacagagt

SEQ ID NO: 5572 - DNA, 1196 bp, Cricetulus griseus
cctggcggggaggagctgagccgcctgcttctggatgacctgccgccgaacccagcggctggaacgtctgttcggcctgtccccgtgcctcctggccctcgcgggcccgcccgccggcgcgtggcccggctcctgctccaggccggtaaggctgggctgcagggggagcgggccgagctgctccgggtggccgaggcgcggggcatccctgtcctgaggcccaggcggcagaaactagatgccttgtgcggccaccaggtgcaccagggcgtctgcatggaggtgagcccgctgcggcctcggctttgcgatgatgaggcggcagaggcgagcccgggcgacgaccctcagcagctgtggctcgtcctcgaggggctccaggatccccggaatctaggggctgtgctgcgctccgctcacttcctcggagtagacagagtcatcaccagccggagaaacagctgcccgcttactccagtggtcagcaaggccagcgctggggctgtggaggtgatggacgtgttcgccacgtctgacttagccggatttttgaaggccaaggcccagcagggctggctcgtggtgggcacagtaggctgcccaggtcctgaaatctcccattccaccaaggtccccatcactagctgcctagagttcatctgggaccggcctactctccttgtgctgggcaatgagggctctggtctatcccaggaggttcttgcctcctgccagctgctccttactattctgcccaggcgtcacctgcctcctggtcttgagtccttgaatgtgtctgtggccacaggaattcttctacactccatttgcagccagaagaagagtttccctgtacagacggagaaaggacaacttctccaagacacttgagaacctttagctatgcggaaggactcagagaggcccagtacccaggactgtcattgtggttggaaaaacaggccaaatgtgggctggcacagacttgagttgcttgtatgtaggaatcggaatgagttgtacatcgaccctcaggcttgaatgttgctgggctctctgcctgtgagggcctgtttgctggctgcattcaggagatgtttgtagtggagactgggaggtggggtcatttccttttggaaaagggttagtttgctcatttccaggatggattaagacagacggtctctgtcctggat

SEQ ID NO: 5573 - DNA, 1196 bp, Cricetulus griseus
atgactttcttaggcttcctgaagccctggctgggggatgggctcttcctgagttcaggtgacaaatggagccaccatcgtcgtctgctgacaccagccttccactttgacatcctgaagccctatgtgaagatttttaacaagagtgtgaacatcatgcatgacaagtggaagcgcctgtcctcggaaggcagtgcacgtctggaaatgtttgagaacatcagcctcatgaccttggacagtttgcagagatgcctctttggctttgacagcaactgtcaagactctcccagtgaatacattgctgccatcttggaactcagctctctcatagtaaaaggtccagaagctcttcctgttttcggacttcctgtactacctcactgctaatgggcaacgcttccacaaggcctgtgacctggtgcatgacttcacagatgctgtcatcagggagagacgccgcatcctctctagccaaagtgttgatgagttcctgaaatccaaggctaagtccaagactttggacttcattgatgtgctcctgttagccaaggatgaacatggaaaggagctgtcagatgaagacatccgggcagaggctgacaccttcagtgtttggaggccatgacaccactgccagtgggctctcctgggtcctgtacaacctggcgaggcacccagaataccaggagcgctgccggcaggaggttcgggagctgctgagggaccgagagcctcaggagattgagtgggacgacctggcccagctgcccttcctcaccatgtgcatcaaggagagtctgcggctgcaccccccggtcatagaccttcttcgccgctgcacccaggacattgtgctgcctgatggcagggtcatccccaaagggaacatctgtatcatcagcgtctttggtatccatcacaatccttcagtctggccagaccctgaggtctacgaccccttccgatttgacccagaaaaccctcagaagaggtcacctctggcttttattcccttctctgcagggcccaggaactgtataggacagactttcgccatgaccgagatgaaggtggtgctggcgctgacactgctgcgtttccgcatcctgcccgacaacaaggagccccgccggaagccggagttgatcctgcgcgcagagggcgggctgtggctgcgggtggagcccctgagc

SEQ ID NO: 5574 - DNA, 1196 bp, Cricetulus griseus
ctccctcctgacacgcgaacaccgccccgacatcccgagctgagcaggaggcgctggccgctcccgccgcccggagcccggcgggctgggcatccctgcgccagtgcttgcccgctgctcctcgttcccgctgatcccgcagcccagagccccagccgtcgtgtcgccgcagagacccggacgccgccggcccgcgggaccaatgagaactccgctgctgccgcgggcgctcctggtgcagtcgctgctgcttcttttaggctcaggccattatgcagctgggttggacctgaatgataccacctctgggaaaattccagcattttctgggcaccacaatgccactggacttgtggtttctgcgggaagtgaggtctctaccataagtgaaatgccctctggcagtgaactctccacaggggactatgactactcagaggaatatgataatgagccacaaatatccggctatgttatagatgattcagtcagagttgaacaggtaattaagcccaagaaaaataagacagaaggggacaggacttcagacaaacccaaaagaaagaaaaagggaagcaaaagtgggaaaggtagaagaaaaaagaagaaaaagaacccatgtgatacgaatttccagaacttctgcattcatggtgaatgtgtatacatcgagaaccttgcagtgacatgcaagtgtgattctgaatactttggtgaacgctgtggagaaaaatccatgaagactcagagcaaagatgacaatgacctatccaagattgcattagcagccataactgtctttgtctctgtggtaaccctcatagctgttggcattgttgtcacagtccagcttcgaaaacgatacttcaaggaatatgaaggagaagcagaagagcgaaagaagcttcgacaagaaactggaaatgtacctgtcatagcctagttgaagacaattcaggttaacagtcgcgtcactgccaagtcagaaacaaaaatgccacattggtcctcttcttgatgaaggaagtggagccttctgatggttccagtctttcagctgtcaattttcatgatggtcttatttctgtacataatgagatgtgtggagataaagtattttttcatgttgtaaatagtttatttaatatttaagtgttatttattttatagctcattaaactttttttaaacaaaca

SEQ ID NO: 5575 - DNA, 1195 bp, Cricetulus griseus
gatgaagtctttaactttctgctcgtgtggtattacttgcaccttgaccattcgggagagcattctcatcagcaatggctccagaatcaaaggctggtgggtgtctcaccattacgtctccacgttcctgtctggagtgatgctgacttggcctaatggactaatttatcagaagtttcgaaatcagtttttagcattctccatttttcagagctgtgttcagttcctacagtactattaccagaggggctgtctctacagactgcgagccctgggggagagggaaccacctggacctcaccgtggaagggttccagtcttggatgtggcggggcctcaccttcctcctgcctttcctttctgtggccatttctggcagctctacaatgccgtcacgttgtttgagctctccagccacgaggaatgcaaagaatggcaggtatttgtgttggcactcaccttcctcatcctcttcctgggcaatttcctgaccacactcaaagtcgtgcacgccaaactccagaagaacggaaacaagacaaagcagccatgagcctccgcactcctgtgccaggggtcttgggacttaagactgctggagattccagtcagcaccctggctgccagtcactggtagccatgtgcagcagcatctcagggtccagcagcatcactgggaacagggctaaggccctggtccctggccagacacgaggaatgtgaaggccgcctgtgcgcacagtattaacctgccccaactccctatttatgacatatttaatactgggtcttccctgcttccccggactctgaggcctcccctgcagccctgggtaatggcagtggccatatctgtgcctgtcttccagggaggggcaaaaagcctcagagaacccctctcttcctatcatttgaacccctcactggggtttggatgtgcctcactggggttggctttagccgacctgctatttactgtgtcccaggcacctggtggaatgaaacttttagcatcctgtggagccccttcccgtgggccaccacctctgtgtaagctccccgtagcccccaccttctgtggtgagggagtatttaagttctcagagatcctgcctgtcctgtgtcttgctttgtgtttcctgcaccacctgcctgctggccactatgggagaaaggcgcagcctactcaggacct

SEQ ID NO: 5576 - DNA, 1195 bp, Cricetulus griseus
tgggtgtatgagtgtctggagaagagtgacttctttcagaaccaggacaagttctggagactgctggagcgtttcctacccacacacagcatctgctccctgccttttgtcacctctttctgcctgggcctggggactcggagagtctgctatggcaaggagcaggcagtggggccctggtaccaccctagtgcccaggagacccagcccctctttggtgaacacaaactggctggagacggtgcgggttgggtgaagacacagtgctgcctggccgacgcttggcatgggggtggctctctgctgctccggggcctgatcccacccgaggttgacaacgtggccgtgaggttgttctccttgcatgtcccagtgccacccaagcttttcctgtcaatggtgtacaagtttgaaggctcgatggatgtccaggtggctttggagctcacaacaggggaggccggcagctgccatgtgggtagcgtgtcagtgttcccggctccttctcagctgcaccctgcactggtccttccctctgctccaagcccgttgcttccggattcactgctgggaacgaacaggaagcagctctgcaactgaggagccctctgggactgagaagcccgtgttcctgggcctggcttttgccaacctgtaccgtgtggtggacttggccgtggaggctgctagatttgggcaggatggtcgtgtggagttcctggtggagcctgtccccaggggagaggattcctggtgcctcaggccgagtggggcagggcagccctgctctactcagcccctcagtgagcccaccacagagcacagtgccttcttacctcaagacctgggtatttcttcttggccagctgcccagggcagtgcagcattcctgaatgccctgcttcccttgtggttctggaatccgagtttttaaaagtgctggttccttcacatattttatgcagagaaggaggaaaaatttatggtggctattattttcttacagtctggtgagcaagcaattagaaggaaggggcttagcagagcaaggctcgaggcagagctgcacaaccccgctccccaggagcacggtccccagccccagcaacactggctcctgtgcaagaaaattaatctgccggcatttaagcctcggcccctctggtggatgtaatcgcttggaaataaattatcc

SEQ ID NO: 5577 - DNA, 1195 bp, Cricetulus griseus
  modified_base (1174)..(1174): a, c, t, g, unknown or other
gaaactttgaagccagagtcaaagctggatcttcgagtccaggagctgataaagttgatctgtaacgtgcagacaatggaggagatgatgatagaaatgaagtatgacaccaagaaagccccacttggaaagctgactgtgaagcaaatcaaggcaggctatgagtctctcaagaagattgaggattgtattcgcactggccagcatgggcgagctcttcttgaagcatgcaatgaattctacaccaggatcccacatgatttcggactctctatccctccaataaatccggacagagaaagaactgtcagagaaagtacaactgctagaggcactgagggacattgaaattgcccttaaaactggtgaaatcagggcaccaaggcccagaacacccactggaccaacactatagaaacctacactgtgcattgcgtcccctggaccatgaaagttatgagttcaaagtggttttgcagtacctacactctacccgaggctcctacacacaataactacaccatgaccttgctggatgtttttgaagtagagaaggaaggggagaaggaggccttcagaaaggaccttcctaacaggatgctactctggcatggttccagactgagtaactgggtaggaatcctgagccacggactccgagtggccccacctgaggctcccgtcacaggatatatgtttgggaaaggaatctactttgctgacatgtcttccaagagtgccaattactgctttgcgtctcccctaaagagcacaggactgcttcttctatcagaggtagctctaggtcagtgtaatgagctactggaggccaatcctaaggcagaagggttgcttcagggcaagcatagcaccaaggggctgggaaagatagctcccaaccctgaccacttcatcaccctgaatgggagtacagtgcccttaggaccagcaagtgacacaggaattctcaatccagaggggtataccctcaactacaatgagtttattgtctacagccccaaccaggtccatatgcgataccttctaaagattcaatttaatttctgcagctgtggtaaatgttgattaaataagcaagagaggattcaatcttacaaacaaaacccataataaaataatataaatctgaaaaaaaaaaaaaaaaaaaaaaaanaaaaaaaaaaaaaaaaaaaaa

SEQ ID NO: 5578 - DNA, 1195 bp, Cricetulus griseus
cctgcgctgccgccgtcaaaactcggcaggcctccctgacgatcaccgaaccgtagttgggtccgtgttcctgggtcggctactgtgtctgattgtcgccacgccggagccatgtttcgaaaccagtatgacaatgatgtcactgtttggagtcctcagggcaggattcatcaaattgaatatgcaatggaagctgttaaacaaggttcagccacagttggcctaaagtcaaaaacacatgcagtgttggttgcattgaagagggcacagtcggaacttgcagctcaccagaagaaaattctccatgttgacaaccatattggtatctcaattgcgggtctgactgctgatgctagactgttatgtaattttatgcgccaggagtgtttggattccagatttgtatttgacagaccacttcctgtgtctcgtcttgtgtctctaattggaagcaagacccagatcccaacacagcggtatggccggagaccctatggtgttgggctgcttattgctggttatgatgatatgggccctcacattttccaaacctgtccatctgctaactactttgactgtagagctatgtctattggagcccgttctcaatcagctcgtacttacctggagagacatatgtctgaatttatggagtgcaatttagatgagctggttaaacatggtctgcgtgccttgagagaaacactccctgcagagcaggacctgaccacaaagaacgtttccattggaattgttggtaaagacttggagtttacaatctatgatgatgatgatgtgtctccattcctggatggtcttgaagaaagaccacagagaaaagcacagccatcacaggctgctgatgaacctgcagaaaaagctgatgaaccaatggaacattaagtgataaaggacacagggatatgaggatgtaggagcatacactggtgacagtaatctgtacttagaaccaacagctgcagagtatggggtggtatgttttagaaatcagtccagatgtgagttttctccaagcaacttcacagaaaccatataatgggtgcattttctttgaaagggtctacataatcattttctagaaagtataggtatctataccaatgtttttatatgaataaaatagtgtctttacagttttaaagacaactgtgaaataaaattgtttcacctccta

SEQ ID NO: 5579 - DNA, 1194 bp, Cricetulus griseus
tctcctgtagagacacctgaaaagacagtggacagtgactgtccccccagttcagccacagggcgtctgactcagagctggacagtgatgatgagttcatcccctatgatatgtcaggggacaaagagctgaagagcagcaaagagccccggtatatccgagactgcttggaagccttgaccacatctgaggacatggagcgctgggaggcagccctaaatgtgcttgagggcctggtttataggagccctgaggccactcgggaggtgagtgtggagctggccaaggtgctactgcacctggaagagaagacctgcatggcagagtttgagcaacttcgccagagagctctagtggctgtcacggtcacagacccggagcaggtagccaaatatctgacaacacagttctatggcctgaattatagcctccggcagcgcatggacattctggatgtccttgttctggctgcccaggcactgtctcggccacggagcctccagaggctttcccagcatggtccccctggttctggcaccttgtgtgcaccagcactagctagttctcagcctggcaatgctgcgactcctgactggcaggtggttgtggaagagcggatcaaaagcaagacccggaggttctccaagggctgtcctcggagggagctgacaggtggccctaatgaattcaactccgtggctggttacttcttctttcccctccttcaacactttgacaggcctctggtgaccttcgaccttttaggagatgatcagttggtacttggaagactggcccacaccttagcatccctgatgtacctggctgttaacaccacagtggctgtgcctatgggtaaggccctgctggagtttgtatgggcccttcgcttccacgttgacacttatgttcgacggggcttgctgtccgctgtttcatctgtcctcctcagtgtacccacagagcggctattgggggacctgccagatgagctgctagaagccagatcctggttggcagatgtggctgagaaggatgtggacgaggactgcagggagctggcaatgagggctctgctgcttctggagagactcagagacaagctcctatccatttcctctccatagccctgaggactccacaggggcccagatggcccctcggtcctccccactggaaggaggagacctctga

SEQ ID NO: 5580 - DNA, 1194 bp, Cricetulus griseus
actcggcctctgagctccgggagtcgctgcctccgcgcagtccggaactgcgctgtgtccgccgcgggaacgagagagggtctgtcgtaacctgttgagtaactatggaagactatatcaaaatagagaaaattggagaaggtacttatggtgtggtgtataagggtagacataggactactggccagatagtggccatgaagaaaatcagacttgaaagtgaggaagaaggagtgcccagtaccgccatccgggaaatttccctattaaaagaacttcgccatccaaatatagtcagtcttcaggatgtgctcatgcaggactcgaggttgtatctaatttttgagttcctgtccatggatctcaagaagtacttggattctatccctcctggtcagttcatggattcttcactcgttaagagttacttataccaaatcctccaggggattgtgttttgtcactcccgaagagttcttcacagagacttgaagcctcaaaatctattgatcgatgacaaaggaacaatcaaactggctgattttggccttgccagagcttttgggataccgataagagtgtacacacatgaggtagtgacactatggtaccgatctccagaagtgttgctgggatcagctcgttactccacccctgttgacatctggagtataggcaccatatttgcagaactagcaactaagaagccgcttttccatggcgattcagagattgaccagctcttcaggattttcagagctctggggactcctaacaacgaagtgtggccagaagtagagtctctgcaggactacaagaacacatttcccaagtggaagccggggagcctcgcatcccatgtcaagaacctggatgaaaacggcttggatttgctctcaaaaatgctagtctatgatcctgccaaacgaatctctggcaaaatggccctgaagcacccgtactttgatgacttggacaatcagattaagaagatgtagctttctgtggagtccctgcttgctgtggcagggccagatagtggcatttactgttggctctcctcctgtcttgtatatttttctgttgtttgtaaaccatcacctggacttttcttaatttcatacatataacttaattaacatgtaaatattattccatatgaatttaaatataatacttctgtatatgtgcaga

SEQ ID NO: 5581 - DNA, 1194 bp, Cricetulus griseus
actcctggtggtcgtgccttcctctgtgcgcttcacctgggagcaggcctttcttcggtggctgccatctctgagcccagagaacatcaacgtggtggtgacggggaagggccgcctaacagctggcttggtcaacattgttagctttgatcttcttagcaagttggaaaggcagctaaaaacccctttcaaagtcgtcattattgacgaatcgcacttcctgaaaaacattaagactgcccgctgccgagcagctgtgcctatcctaaaggttgccaagagggtgatcctactgtctccaacctgggcgagctgaagctgctgctggagaggcaatcatgctgaggcggctcaagtctgacgtcctttcccagctccagccaagcagcgaaagatggtgctggtcaaccctggtaggatcagcaccagggccaaaggcggccctggatgcagcagccaaagaaaatagaccaaggacaaaactaaacagcagcagaaagaagccctcattgtcttcttcaacagaacagcagaagctaaagtcccctgtgtcattgaatacatcatggaccttttggagagtggacgagagaagtttctagtgtttgcacaccataaggtagttctggatgcagttgtaaaggagcttgagaggaagaaagttcagaacatccgaattgatggctccaccccttcagcagaccgtgaggatctgtgccagaagttccagctgtccacggggcacacagtggcagtgctctccatcaccgccgccaatatgggccttaccttctcctcagctgatctggtggtgtttgctgaactgttttggaaccccggggtgctgatccaggctgaggaccgagtgcatcgcattggacagacaagctctgtgggcattcactacttggtggcaaaaggcacagcagatgactacctttggcctctgattcaagagaagattaaagttctgggggaagctgggctttctgaaaccaatttctcagaaatgacagaagctactgattatctctacaaggacccgaagcagaagaccatctatgacctgttccagcagtcctttgaagagacggaaatgacatggaattcctggaggcgcagagtcctttgacccaggaagtacttcaggaacctctggaagtagttcccaggatcgtgggagacatcttggat

SEQ ID NO: 5582 - DNA, 1194 bp, Cricetulus griseus
gattaccaacaaaaagattacagctggaattaaggtcttgcaaaacacaatactgcaacaggataagcgactggccaaagccatggtgggtgatggttcccttcatatcaccttgctagtgatgcagttgttaaatgaagatgaagtaaacattggtactgatgcgcttttggaactgaagccattcattgaggaaatccttcaagggaagcacctgactttgcccttccaagggattgacactttccaaagtcaggttggctttgtgaagctagcagatggagatcacatcaacacacttacagagatagcagagactgcaaaaagacatttcaagaaaaaggcatcctggcgggagaaagcagaagctttaagcctcacttgacctttatgaaactgtacaaagcaccaatgctcaggaagaagggagtagaagaaaatagagccggagggactggactcgccgccgaaggaatactgccgtttacattgcttagagcatctgactactttatactgaggccaaaacttgcacacagctatcaagtactgagttcagtttgtcactgttgaaatgatcatgtgtgtagtgagtccacaatgtttcacatttgtccccactgtactcttaccataatctttatttgcagtaaattaagtttcatgtaaattatattatttttggcaaaacgcaatcttttctatgaaatgtgggtaacattttaaaggttttctagccttatttgataagtcagtgtgccatatttgatgtatttcattgatatttgaactttaaatgtattatataattttttccccttaggcaagaaaccagttgggatccaagacttaattaatgaagctttgcaccgagaaaggatggagctgaagtccaaagtgaaacagataaaggaacttttgctaaagcctgagactcaggccatgattaggaaggagcttttcgaaggaagagttcttaatgatggtaatcacacgatgatgctgacttcagtgtgactttgctgtagctcttcactgcttatgatggtaaaaaccttatgaactctcagtccagcacatagccctttggtaaataaccaaagtgttcttacagtttctacaaagcccacaaaccaacatttggtaaggaatcaacaacttcttgccaaaggaatgcatatggctgtcattact

SEQ ID NO: 5583 - DNA, 1194 bp, Cricetulus griseus
gctcgcttcggcccgcgtggtcgcgcagggatggattcctcctcgtcctcctcgggcgcgggtttgggcgctgtagacccgcagttgcagcatttcatcgaggtggagacgcagaagcagcgctttcagcagctggtgcaccagatgacggaactttgctgggagaaatgcatggataagcctgggccaaagttggacagtcgggctgaggcctgttttgtgaactgtgttgagcgcttcattgatacaagccaattcatcttaaatcgactggaacagacccagaagtccaaaccagtcttctcagaaagtctttctgactgatctcagcattacctctttggaaaaatagttcaagcaatgaagagctgttgatgggatggttgaagaaatggctatgtgggggggggattggctcccaattttctttatcatcttgggacatcttgttatctgagaatgaacaaagaccagtttttatgtatgggagttgagagtcatgtgtatttggttgtgtttttaaaactaatcatgtgaaaataattgacagataaatgaaattatgagatgcatattactgtatatgggactatgttttctcaaggtcccttaactcctttatataattttgatagtggaagtgctttttataatttgatagtgggaccacatagggtaaatctctttgtatggaattcgtttctggttttctagggagatctttgtgtcagaaaaagtagcagtagggaaataacctggctaacctggcactgtttaaccgtgagctttcttatctttcaagtttgactatcagagctgaaaaacattctatgggtgttatacaatccaggttgtctcttccctatactgtgatttacttaaatcttggattaaaaacacggtctcaaggtacaatgggcagcctgagaatccagagggctttagttagttataaaggaatctagctcatgagcataattcttactaccagactgccatgggaagaagttaacttactctgtctatcaggctacaaaacattcacacatgtgcctaaaagaagtataacaatttaggccagtcaagaacaacagtttcaggtagaggtgcatgcctgatattagtcataaattccattaactgcattctttcggtcactgaaataaaagactctgcgagataaaaaaaaaaaaa

SEQ ID NO: 5584 - DNA, 1194 bp, Cricetulus griseus
aattcacgcgcagcttcttccgaggttgccctgacctcagcacggttacgcactccattgtacgacagaaatttttgacccatgtgggccgggatcaccttgaacctgaggagaagcaggcgttgaagcggctggtggaggaagagctgctgaagatgcaggcggatgctggtaccagagaaggaaagctagactttaccaaagtgaagaggtctcctgctccctgcagtgacccagagagaaaaaggtctcgcttcaattcagagtcagattccagctctacatcatccagtccagactgctcaggaccccccagaaagaacagcacaaaaaaaaggagaagccatgtttgaagagagccttaaaataaaagcagttgagagcaaaaaggaagaacagacaaacagacctggttgtacaagatgagactagaggagagcagtgacgaggaaggggagggctctgtgagagggaagtgagcgactctcgggcaggagagagcaccaaagaggaaaggaagaaccgctcttccaagaagagctccaagaaaggcaaggcagaaaggcaaggcacgaagttccggtctcatcagattcaagtccagaacccacaagtcagaaggttgggtctcgtcaccgaagagaggaccatccagctgtggtgagactaaagcgttatattcgggcttgtggtgcccatcgaaactacaagaagctgctgggttcctgtcgctcccacaaggagtgcctgagtgtcctcagggctgagctggaagcacttggcatgaagggcaatccttccttggagaagtgtcgggccctgaaggagcagcgggaagaagcagctgaggtggcttccttggatgtcgccaatatcatcagcagttcaggtcgaccgcgaagacggaatgcctggaacccttcaggggaaggaatccccccaggggagctttatcgcagagctctggactcagaagaggagaggccacgccaagcacctccagactggtctcatatgcggggcatcatcagcagtgatggtgagagtagctgaactccatgtcccaggatggaccttaccctgttatacaagagcctgtggcactgaagcagctttcaaaaagactattcccccagggacctatgttgttggcacagttctcaatttcatgctctctaaggtgggtttggggtt

SEQ ID NO: 5585 - DNA, 1193 bp, Cricetulus griseus
tttcgattcactattttacccaaagataaagttcagaatttcctaaaggatagtcatttgcattttgaagctataagtgatgaagagaagagtcttcgagaacaggatatcactgcatcctcgcctagcctaagtggggttaagtgggaatcagagtccgtttacaagatcccctttgctgatgctctggacctgttcagaggaaggaaagtctatttggaagatggccttgcttacgtgccgcttaaagacatcgtggccatcatcctgaacgagttcagagccacgctgtctaaggctctggcactaacagccaggtccttgcctgcagtgcagtccgatgaacggctccagcctctgctcaaccacctcagtcattcttacactggccaagattacagcatccagaagaaccctgggaagatttccttagatcagattgactcgctttctaccaaatccttcccaccttgcatgcgtcagttgcacaaggctttgagggagaatcaccatcttcgtcatggaggccggatgcagtatggcctgttcctgaagggcattggcctaactttggaacaggctttgcagttctggaagcaagagtttatcagaggaaagatggatccagataagtttgataaaggttactcttacaacatccgtcacagctttggaaaggaaggcaagaggacagactatacgcctttcagttgcatgaagattatcctgaccaatccaccaagccagggggattatcatgggtgcccattccgtcacagtgacgcagagttgctgaagcagaagatgcagtcctacaagatccctgcctccgggatcaaccagattttggatttagtaaaggggactcactaccaggtagcctgtcagaagtacttcgagatgacacataacgtagatgattgtggcttttctttgaatcatccgaatcagttctttgttgaaagccagcggatcctaactggtggcaaagacatcaagaaggagtccagccagccagagacgcctcagcccaaacccagtgtccagaagagcagggatgcatcggctgcactggcctctctgaactcctccctggaaatggagctggagggactagaagattattttagttcatgatgtgaccacttcagtaacccctttccccagcaaatacattccactttgtaaggttt

SEQ ID NO: 5586 - DNA, 1193 bp, Cricetulus griseus
tgacagcgccgggtccggtcggccgtggcggcctggctttgtttttaggccgggtctctgggaccggcccgggaagatggtgctagggggctgccctgtgagttacctactgctgtgcggccaggcagccttgctcctggggaacctactgttgctgcactgtgtctctcggagccactcgtttaatgccacggccgaactggatctcacaccctcaggcgccgctcaccccgagggtcccgtagccccgagctgggaatacagcgacccccactctccggtcatcctttgctcttacctacccgacgagtttgtagattgtgatgccccagtggatcacgttggaaatgcaaccgcctcccaggaacttggttatggttgtctcaagtttgggggtcaggcctacagtgatgtggaacacactgcagtccagtgcagagccctggatggaattgagtgtgccagtccccggacctttctacgagagaataagccttgtataaagtacaccggacactacttcataaccacgttgctctactccttcttcctgggatgttttggcgtcgatcgtttctgtttgggacacactggaacagccgtcgggaaactgctgaccctgggaggacttgggatctggtggtttgtcgacctaattttgctcatcactggagggctgatgcccagtgatggtagcaactggtgcactgtctactaaaagctgctgctgccccaggccagcaagaacaaaaaagtgttaggttgcccggctaattactacaagctccaaattcttctccaaacatcactttcccctttagaagttcagactgaacttttcaaaccaaaccttaccttgcagaccaaaaatgacaagcagtgttgtgggagtccagttgtatctttcttcatgtggaaaaataagcaaaagaaatagtgacttctatccacggatcattttcagaacgccgtttctgtgtggcttggatcttgagtcatctggagcaggggcccaacaggataaaccaaagcgtgtgtttacccatgcacaggcacaagtcagaaactgcgccagtgagaaatctccaggagacatagaaatgactgtggattttaatacacaccaaaattctgactctgtgaatctaaattacagaataaagttttaaaacctaaaaaaaaaaagaaaaaaa

SEQ ID NO: 5587 - DNA, 1193 bp, Cricetulus griseus
cacgcgcgctaccgcgccgacgaccacggcggcctggacctggcgcgcgcgcccgcgctgggcggcagcttcgccgggatcgagcccatggggctgctctgggctctggagcccgaacggccattctggcgcctgatcaagcgcgacgtgcagacgcccttcgtggtgggagcgctggcgcgcgcggtgcacgagcgtcacttcatggctcccggggtgcggcgcgtgcccgtgcgcgaggccgtgtgcgcgccacgctcttcctgcccccaggaaatggaccctttccaagaaattgttggaccttttttggagttggaggttggccttctggagtaccgagctagtctgctggctgggaagggctttgctgtcattggctttggcttattataactacgatgacctccccaagggcatggatatctttcacctggagtactttgaagaagccgtgaactacctgctcagtcaccctcaggtaaaaggtccaggaattgggctgcttgggatttccaaaggggtgaacttggccttgctatggcctccttcctgaagggcatcaaagctgctgtcatcatcaatggctctgtggctgctgttgggaacaccatacactacaaggatgagactataccccctgtgtctcttctgagaaatcgagttaaaatgaccaaagacggccttaaggatgttgtggaaggtctgcaaagccctttggtggaagagaagagcttcatccccgtggaaaggtctgacacggccttcctgttgcttgtaggtcaggatgaccacaactggaagagcgagttctatgccaatgagatctccaaacgcttagaggcccatgggaaggagaagccccagatcatctgctacccagaagcagggcactatattgagcccccttacttcccactgtgcaaggctggcatgcacctcctggtgggtgctaatatcacctttggaggggagcctaagcctcacgctgtggcccaggtggatgcatggcagcagctccagactttcttccacaaacacttgggttttttttctttttactttttacttttttttttttcttttcttttttttctttttttttttttttgagacgtagggtttctctgtgtaccacacacacacacacacacacacacacacacacacacacgcgcacacacacacacaca

SEQ ID NO: 5588 - DNA, 1193 bp, Cricetulus griseus
  modified_base (1185)..(1185): a, c, t, g, unknown or other
ggaaccatgtgtgggtcggcaccgatactgggatcctaaaaggggtgaaccttcagcggagacatgcaacaaacttcacgccatccggacagccgcggcgggaggaggcggtgaatgctctgtgctggcgcgcgggtgacgagacccagatcttggtgggctgcgcggacatgaccgtgaggcactttaacaccgaggagggtacattccagagccagagacactgcccaggcggggagggcacgttccgaggtctcgcccaggccgatggaacccttatcacatgtgtggattctgggattcttagagtctggtgtgacaatgacaaggaagcatcatctgacccactcttggaactgaaggtgggtcctggggtgtgtaggatgcgccaagacccagcacatagccatgtggttgccacatgtgggaaagagaatgctttgaaagtatgggacctacagaagcctgagcagcctgtgttcagggcaaagaatgtgaggaatgattggctggatctacgggttcctatttgggaccaggatatacagttcctccctgggtcacagaagcttgtcacatgcacagggtaccaccaggtccgtgtctatgatccagtctctccccagcgacggccagtcctagaggccacctatggagagtacccattgacagccatgacccttactcctgagggcaattctgtcattgtgggaaacactcatgggcaactagcagaaattgattttcggcaaggacgtctactgggctgtctgaaggggctggcaggcagtgtccgtggcctgcagtgccacccttccaagcccctattagcctcttgtggcttggacagagtcttgaggatacacaggatccgaagtccacgtgggctagagcataaggtttatctcaaatctcaactgaactgcctcctcctgtcaggcagggataactgggaggatgagccccaagaacctcaagagcccaacatggtgcccccagaagacacagagacagatgaactttgggcatctttggaggcaaatgccaagcggaagctccctgatttaaatcagatacaagggactctccaaacaagaaaaaaaaagaagcggcctggatcctccagtccttgaagacttttgctattttgttaataaacagcccaacgtgcgaactgaaaaaaanaaaaaaaa

SEQ ID NO: 5589 - DNA, 1192 bp, Cricetulus griseus
ctgctgccaagttctaaccccggatcttcagaaattgaacaacattcttctgatcaaaagccaattggattaactactgaacagtctaatttggagagaatgtatttgtacaaagcacctgagaaatcttctgggagtaacattcttaacaaaagtgtcgggatgcaatcaccagggaagtcttatggctcctcagaacctgccatttcagcccaagagctggacactaggactgcattatatgccaagttggtggaagcaaggcagaaacatgctaataaaatgaatgtgcctccggctattctagcaacaaacaagatactactggatatggccaaaatgagaccaactactgctgaaaatgtgaaacagattgatggtgtctctgaaggcaaagctactctcttggaccctctgttggaagtcatcaaacacttttgtcaagtgaacagtgttcagacagacctcttttcgagtacaaaacctcaagaggagcagaagaaaagtcaggtagtggaaaatggagaatgctcactctcacagtctgtggctgtcacatattctttattccaggacaagaaaatgtccttgcacaacatagctgagaataggcttctgcctctcacagcagttggcatgcacttagcccaggcagtgaaagctggctaccccctggatatggagagagctggcctgaccccagaggttcagaagattattactgatgttatccgaaaccctcccatcaactcagatatgtataaagttaaactcattagaatgctagttcctgaaaacattgacacataccttatccacatggtaattgagatcctggagaatggtgacagcagaagccaaccttcctgtgatcccaacagaaagagatgtttccctagcactgaagagagctgtgtgagctttaagaaaaacaaggacatagtcactgataccaagacatcatctgaaatgtcgaagagaaaattacctgagtggtttgccaaaggaaatgtgccctcagctgatactggcagctcatcaatggccaagacaaaaaagaaggtctttttagttaagatgacaactgcataacaacttgtgtgccctacgattaactttttttttttttgtaaatagaaatggactagcacacacacacacacacacacacacacacacacacacacacaca

SEQ ID NO: 5590 - DNA, 1192 bp, Cricetulus griseus
cttaggaccgcacacgccgcgctcaggccagcttcccgtcctcagccggacgcgtgcgggctggggccacctgcctctgaactcaccccatggttacccctgtaggaaatgggtgtcgcctcttcctgcagcgtcaggctccactccgcctcaaagatgatataagtgatcctctgtgcaatgcggttggatggaaacagccctctcgctgctgttcagatgtgcacttcctgtacttcttcaaggacctgtgctaagggcatgatgaaaatgaactcacttcttgccttcctagagcgagtagactaacagggaagataaatgctttcctccagtttaccctgaattatacgtgaaaatgaaatacattgccaagaaatgtggagttaggttccagcccccagctatcatcttaatttatgacaatgaaaccgaggggaagagtcgccagcgtatcatgccagtccgaaacttctccaagttctcagattgcaccagagctgctgaacaattaaagaataacccacggcacaagaattacctagaactggtgtccctgaagcagctggagaagctgtttgtttttttacgaggttacttgcaggggcagagcttggcagaaacgaaggaacaaattcaacgggaaacgaccattgaccccgaggaagacctgaacaaactagatgacaaggagctcgccaaaaggaagagcatcatggatgaactttttgagaaaaatcagaagagaaaggatgaccccagttttgtgtatgacgttgaagttgagttccctcaggatgaacagctgctgtcctgcagctgggacaccgagtcagccgatgagttctgagacctgctgatccatgtctccacaaagaacaaggactggccctagaaaatctgtaaacacgaaggtacatataaaaccaagagactcatgtgtgctgccgtaggcctgtgaggttactgtgaaacccagacacttcctgtgagaggctggtttagacagtgggaagctaccactgtgagtgagcactaggtcttcttgttcagacctgcacagttgaaatgtacagtgatctccatctaacaaggccaccgtgcgcagatggtttgttcttgctagaatattaactgattgatagaaatcatatgttttctacaaggaagctattattcattgaataaagct

SEQ ID NO: 5591 - DNA, 1191 bp, Cricetulus griseus
cgctgcggctgcgggatggtcggcggcggcgggaagcgcaggccgggcggggcggggccgcagcgtgagaagacagttgaagtgaagaaaagtaaatcctgtgaagccgatgtctccagcgaccttcgaaaagaagtcgaagacctttataagctttccctgcctgaagatttctatcacttctggaagttctgtgaagaccttgatcctgaaaagccagctgatgcacttgccacaagccttggacttcggttagtgggtccctatgatatccttgctgggaaacataaaatgaagacaaaatccacaggcttgaactgtaatcttcactggaggttttactatgaccctcctgagttccagaccattattattggagataataaaactcagtaccacatggggtatttcagggattctcctgatgaacttccagtatatgttggtacaaatgaagcaaagaaaaattgtataattattcaaaatggagacaatgtgtttgctgccatcaagttatttttgatgaaaaaacttaaagaagtaacagatagaaagaaaactagtattttgaaaaacatagatgaaaaactcacagaagcagccagaaaactaggatactcactggaacagagaaccatgaagatgagacagagagacaagaaggtcgtgacaaagacctttcatggtgcaggcttggtcgttcctgtagataaaaatgatgttggctatagagagcttcctgaaacagatgctgacctcagaagaatttgcaaggcaattgtggaggctgcaagtgatgaggagagactaaaagcatttgctcccattcaggaaatgatgacttttgtgcagtttgctaatgatgaatgtgattatggcatggggcttgaattaggaatggacctcttttgctatggctctcattattttcacaaagttgctggccagcttttacctcttgcgtataatctgttgaagagggatctgtttgcaaaaattattgaagatcatctggcaagcagaagtacagagaacatagatcagcttgcaggatgagtgagttgctctgtcagtgcagtgttttgaagtaggactggtcagagtggggcttttgtttttaaggaagagaaataaataatggaaacacatttattaaaaactttaaaaaaaaaaaaaaaaaaaaaaaaaaaa

SEQ ID NO: 5592 - DNA, 1191 bp, Cricetulus griseus
gaggacgaagctttgagacacattcagaaccactgccacgagctcgtgagcctcaacctgcagtcctgctcacgcatcactgatgatggcgtggtgcagatctgcaggggctgccaccggctgcaggctttgtgcctctcgggttgtagcaatctcacagatgcgtctctcacggccctgggcctgaactgccccagactacaaattttggaggctgcccgatgctcccatttgacggatgcaggctttacactcttagctcggaattgccatgacttggagaagatggatcttgaagagtgtgtcctgatcactgacagcaccctcatccagctatccatccactgtcccaagctgcaagccctgagtttgtcccactgtgagctcattacagatgaagggattctgcacttgagcagcagcacgtgtgggcatgagagactgcgggtactggagctggacaactgcctccttgtcacggatgctgccctggagcacttggagaactgccgtggcttagagcgtctggagctgtacgactgccagcaggtcacccgcgcaggcatcaagcgcatgcgggctcagcttcctcatgtcaaggtccatgcctactttgctccggtcacccctccaccagcagtggcaggaagtggacaccgactgtgcaggtgctgtgtcatactttgacagcagctgcttaggccaaggcccatcctccaggtcagaccagtctgcgtcaccatcacccaatctcgactctgcattgggaaagcattacaggtaaaagacttcagcacagatggcagtaactggtgataccattcaccttaacctggcttgggatgcaagcaaaatcaaagcctgtgtaccttcagtgttagcggacaaacccaaagcagagcaaagagcctgtggtttttctaccaatccttaagccagtggcctactttaattcatgattcctactgatttgcaggacttttcacttggaagactagaagcaccgttgtcaatgcgaatatactgcaaactgagaatggctggtggttcccacgtagaaacccgtgggaaaaggcatgttagcttatttccgttaagacaccaaagaagtgaggactctgagctgggtggggcagggtcttcacctttctgtttatgtcaatgtgtcatacccaactctagggaccaaaa

SEQ ID NO: 5593 - DNA, 1191 bp, Cricetulus griseus
gacggtgccagcccacaagctagactcacccaccatgtctcgggcccgcataggctcagatccactggcctatgagcccaaggcagatttgcctgtcatcaccatcgacccagcctccccacagtcacctgagtctgtggacctggtgaacgaggaattgaagggcaaggtcctagggctaaaccgggatccaacaaggctgactcggggggaggaagatgaagatgaggatggtgtcattatgatgcggagcaaggagccctcatccccaggcaccgatgatgtcttcacccctgcaccaagtgacagccccacgctcccagagaatacagcgctgcctcagtgacccaggcccccacccagagcctggggagggagagcctttcatccccaaagggcagtagagccaggccagtgggtgtcccatagactctcccacagagtgggggctgggagctccccttgcctcctgacctggattggtcctgcccccccccccgcatggcagctgggtccacagcccccactgcagcacggcttgcccctgcctcctgggaagtgtcctctcccaccagaactgccttcccaattcatttggcagaacagctgggctggtgaggcaggccctgccccatctctagatccaggctctcttgtactggaaccagggctccatgaggccctcccttcctgcagccccctactcatccagaccaattttccatctttgatcatcatttttaaccaaagagccactggctccactgcggtcctaccaggaaaggagggagctgaaccttccttggcctcgactgggccctcctgtatcagaggacagcaggcatgtggctggggagacagatgggtgaccatggcagaagagacctttgctcacaggcacatactcccttccgccacgtgactgagcccaagcccatggtgtctgtccaacccccaagcactgccttcccaggatcgtgcaatagtcagagtggtccctcccaggggatggggccatgggtgcttggcccagctgtctcctctccatgcaagtgctgttttgggcaggagttgccatgcaaggtgacatcgacaaccatgtacaaagccaccgcagttgctgccgctctgccgcctgtacgaaagaaactgaacctttttcatattctaataaatcaatgtgtagttttt

SEQ ID NO: 5594 - DNA, 1191 bp, Cricetulus griseus
cttcctatggcagtgcagtcacacacatccggcagccagacctgagtaacatcgctgtgcccccagaccaccgcaagttccagggttactacaagatcgccaggcactaccgctgggcactgggccagatcttcaacaagtttcaagttcccagcagctgtggtagtggaggacgatctggaggtggcaccagacttctttgagtacttccaggccacctacccactgctgagaacagacccctccctttggtgtgtgtctgcttggaatgacaatggcaaggagcagatggtagactcaagcaaacctgagctgctctatcgaacagacttttttcctggccttggctggctgctgatggctgagctgtggacagagctggagcccaagtggcccaaggccttctgggatgactggatgcgcagacctgagcagcggaaggggcgggcctgtattcgtccagaaatttcaagaacgatgacctttggccgtaagggtgtgagccatgggcagttctttgatcagcatcttaagttcatcaagctgaaccagcagttcgtgtctttcacccagttggatttgtcatacttgcagcgggaggcttatgaccgggatttccttgcccgtgtctatagtgcccccctgctacaggtggagaaagtgaggaccaatgatcagaaggagctgggggaggtgcgggtacagtacactagcagagacagcttcaaggcctttgctaaggccctgggtgtcatggatgacctcaagtctggtgtccccagagctggctaccggggcgttgtcactttccagttcaggggtcgacgtgtccacctggcacccccacaaacctgggaaggctatgatcctagctggaattagcagcacctgcctttccctgctggatctgcttgtcatatcatgagctgagacaggcctgcagtccctgagctgtaccatcctgtccctgtttccctctagctgagaccaggacatctctggccccaaagcagctcctgccctgccttcctcaccctccccccacccccaccaagatgcaggtagctggttggagagaaatctgtgtgtttttgtttgttgcctgaccttagtttcatggaagaaaatggaatctacagaattattttcaaaaataaagtaaaggctgaattgtctgaaaaaaaaaaaaaa

SEQ ID NO: 5595 - DNA, 1190 bp, Cricetulus griseus
ggaacaaagcgcggcctgcgggcggtggctgggctccctccggaggctgggccccccgggagcggggcctgtgggccgcagcgtgagtgaaacattgcaggggtccaggtggcatcacagtccgtgtcggccgggccatgaacgggctgccctcagcggaggcgccaggaggcgcgggctgcgctctggccgggctcccgccgctaccgcgcggcctcagcggccttcttaacgctagtgggggctcatggagggagctggagcgcgtctatagccagcgcagccgcatccacgacgagctgagccgtgccgcccgtgttccggacggtccccgtcacgccaccggcgctgccaactcaggctctgcagcaggcgcgcgccgcccggttaacctggactccgcactagccgcgctgcgcaaggagatgctgtggggcctatatgagtcgatccaggactacaagcatctgtgccaagacctgagcttgtgccaggacctgtcatcctcccttcactcggacagctcctacccacctgatgccggcctgtctgatgatgacgagcctcctgacgccagcctgcccccagaccctccacccctcactgtgccccagacacacaatgcccgtgaccagtggttgcaggatgccttccaaatcagcctctgaaaagctgaggtggatagcaatgcacccatacaaaaggctcaaaaaaacttgcccttcagcaagtccttagtcgacagtgcctgctcttttaccagtaccacctcacttcacttcaggagggcaaggcatatacccatcaggcaaagtggtcaagactgcagccagtgccagtggactggacttcccacttctccctcttgtgtgcacccctagcttggccagcccttagtctgaccgtggggtccaaagcgtcttgcactcccgttggcatctctgggactgggatgattgcctagcttccatctctttttgtcttttgctgccacttgcagctgctggctcaggggcatccctacctgtggccccagggtttccctccctgggactaggactccaggatccacccctgcagccacccacggccagaaaggctaaggtctctatgctggatatttaagtttagggaccagttcctggatgagaaaataaatacttttcaatattgtaaaaaaaaaaaaaaaa

SEQ ID NO: 5596 - DNA, 1190 bp, Cricetulus griseus
accaagcgtcttgtagaaggagagattaatccagggcagacctgtctgatcattgaggatgtcgtcaccagtggggccagtgttttggaaactgttgaagttcttcagaaggagggcctgaaggtgactgatgccatagtgctgttagatcgagagcagggaggcaaggacaaattgcaagctcaggggatccgtctccactccgtgtgcacgttgtccaaaatgctggagattctcgagcagcagaaaaaaattgatgccgagatggtggggagagtgaagaggttcattcaggagaatgttttcatagcaactaatcacaatggtgttccccctcctgagaagaaagcatgcaaagaactcagctttggtgcacgagcagagctgcctggcgtccacccacttgcctcaaaacttctcaggctgatgcagaagaaggagactaatctctgtctatctgctgatgtctctgaggccagagagctgctacagctagcagatgccttgggacccagcatctgcatgctcaaaactcatgtcgatattctgaatgatttcactctggatgtaatggaggagttggcagctctggcgaaacgccatgagttcttaatatttgaagacaggaaattcgctgatataggaaacacagtgaaaaagcagtatgaaggtggcatctttaaaatagcttcctgggcagatctagtaaatgcccatgtggtaccaggctcaggagttgtgaaaggtttgcaggaagtgggcttgcctttacatcgagcatgcctgctcattgcagaaatgagctctgctggttccttggccactggaaactataccaaagcagcagttgggatggctgaggagcactgtggatttgtggttggctttatttccggctcccgagtaagcatgaaacccgagtttcttcatttgaccccaggagttcagttagaaacaggaggggatcaccttggccaacagtacaatagtcctcaagaagtgattggcaagcggggttctgatgtcatcattgtaggccggggaatacttggagcgtctaaccgcctggaagcagccgagatgtatagaaaagctgcctgggaagcttacttgagtaggcttgctgtttaatgagaagacactgaggatgcctagtgtcccacaagtcactggtttcaaagcaacagtgc

SEQ ID NO: 5597 - DNA, 1190 bp, Cricetulus griseus
tccggtggagaggaggtaccacgtccccggatgtctcctgccaccatagcagccaaacatggtgaggaggtgtcacctgcagccagcgacctggccatggtgctgacccgtggactgagcctggaacaccagaagagcagccgggactctctgcagtactccagtggctacagcacgcagactaccacaccttcatgctccgaggacaccatcccctcccaaggctcagactacgactgctactcagtgaatggggatgcggacagcgagggcccccctgagttcgacaaatcatccaccatccctcgaaacagcaacattgcccagaactaccgccgcctgatccagaccaagcgcccagcctcaactgctgggctgcccactgcagggctgcccacagccatggggctaccttcaggcgcacctcctggcgtggccaccatcccgccgcacaccctctaccaacgcccactgaaagacaaccaggctgatctcagcatctcatgggaagtgacttcctttacgcacctcgccaggacagagcctgttttatactttccttacccactcatcctccttcctgcaggccctgccctgcccaaaccccagagccccataaccaagggctgggcctgccacaacgggccccacctggcctggggtccacaattttcttcctctggtcctgctgcccccccccaaggcccatgtgcccggctcttcccttgaatgctggctccctcttctccctgcctgggccctgtctcctttcttcctcttgcctttaccctgtctgagtgagctgcaggcccagcttggagcaagtcttagaaggctggttttgactttctgttgccagtggcaatgccatcccaagaaagtcattgcttgcaggcctggctggggctggcagcaggggccagagaaagtggggactgcctccactgagcaacccaagtctgagcaagtcaaagcacgtatgtgtagggcgagaagagagattcaggaggtgcaggtagggcaggcagcaaactctcccaccccacagggagtccagagagtaggccttgttctggatggagcggagttggggctgatctgggcccatggtttcaggggagctccagtactgtagttaaaaaaaaaaaaaaaaaaaaaaaaaaaaaaaaaaaaaaaaaaaaaaaaaaaaa

SEQ ID NO: 5598 - DNA, 1190 bp, Cricetulus griseus
  modified_base (1173)..(1173): a, c, t, g, unknown or other
gcagctctgctggtgcgggggcggcgagcgagaccgagcgaccgcgaccggagcgcgccggccaccgcccgcatcaccctcccgctcgcccgcccgcccgcccgccctccggacggccgcagccctgcgggtctcggctcgggacccacccccgccccaccccgcgcgcctctgccgcctcttgcagagagccagcttgccgagcggccgtcgctgccgctgccgccgccgccaccgcgccaagttccggccgcggccaccctccgccgtccagggcccctccgtctcggccccgggaccccggctccccgccagccccggccccggcaccatgtcggagaagagcgtggaggcagcggccgagctgagcgccaaggacctgaaggaaaagaaggagaaagtggaggagaaggctggccggaaagaacggaagaaagaagtagtggaggaggaggagaacggagctgaggaggaggaagaagaaactgctgaggatggcgaggatgatgatgagggggatgaagaagatgaggaagaggaggaggaggaggatgaaggccctgtgcggaagagaactgctgaagaggaggatgaagcagatcccaagaggcagaagacagaaaatggggcgtcggcatgagcccctgccagtgggcttggggatgggaggcccctcaggtcctggaggtggggcaggaacacacaagtacagccccccttctcctggctccctgctctggccctgccccagagctgtgacccttgtccttccgcccagtctctcgtctccatctctccagacactgctcctccgccctcactgccgtcgttgcagctcctgatccactcacctgagctcccccgccagccctcactttgccccctgctttccttgttcttccctgcctccctcaccatcccatgtgtcccggtccttggaaagcctctccttaccctcggcaccccagcctctcagcctgcccttctttctcctgcctgatccctgggtctccctcagattccctcctctcagacagcgccaggccggggtggggccggggttggggccaagccccgaagctgccccctcccctttttgtataatttaataaagaaacggtcgcgcttctgtttttaaaaaaaaaaaaaaaaaaaaaaaaaaaaaaaaaaaanaaaaaaaaataaaaaaa

SEQ ID NO: 5599 - DNA, 1190 bp, Cricetulus griseus
gagcagagtgttgctgctgaaactcacagttgtcatcatctccgtgcttctgtttttgtgaatatttcatctaccacctagtcatctttcagtgccattggcctgaggtgaagacactagcccatggcgataggcagaagcctgtgctgaaagccatgtttctggctgacactcacttgcttggggagataagaggccactggctggataaattacggagggagtggcaaatggagagagcctttcagacagctctgtggtggctgcaaccggaagtcatcttcattttgggggacatctttgatgaagggaagtggagcaccactgaggcctgggcagatgacgtgcaacggtttcggaagatattcaggcatggtagccatgtgcagctgaaggtggtcattggcaatcatgacattggcttccactatcagatgagtaaatacagaataaaacgatttgagaaagtgttcagctcagaaaggctgttctcttggaaaggagttaattttgtgatggtcaacagcgtcgcaatggaaggggatggttgtagcatctgctctgaagcggaagctgaactcagagagatttctcgtaaactgaattgctcccgagaggtgcagggatccagccagtgtgaaggggagcagcggctccccttttctgcccccgtgctgctgcagcactacccgctctatcgggccagtgatgctaattgttctggtgaagatgcagctcctccggaggaaaggaacgtccccttcgaggagaaatatgatgtcctttctcgggaggcttcacaaaagctgctgtggtggctccagcctcgcctggttctgagtggccacacacacagcgcctgtgaggtgctccatcctggaggagtccccgaggtgagcgtcccgtccttcagttggaggaacagaaacaaccccagctttatcatgggcagtctgacatccaaggactatgctctctccaagtgctacctcccatttgaggacagggtgctggccacatacggtgcagcagcggtcttccttgtggtcctcatcttagctcacttggagcgtctgccctcatcctttctgtttggttggaaacttcgcaaaatgcacatgagaggatgaagagcctgtgattgttgcatatggtaatataaatcaaagccaaagacataggacttccag

SEQ ID NO: 5600 - DNA, 1190 bp, Cricetulus griseus
gagcggaccctctgctgtgaatcccgagttccctcagtccagtggccctgtgtaactaccaccgtgaagatgtcgcttcgcttcggggccacctgtttgctgtgcttcagtttcctgctcctcatcacttcttcagccggacacattggacttggaaagggttttggagatcatattcactggaggactttagaagatgggaagaaagaggcagctgcaagtggcttgcccctgatggtgatcatccataagtcttggtgtggagcttgcaaagctttaaaacccaaatttgcagaatctaaagaaatttcagaactgtcccataattttgttatggtaaatctggaggatgaagaggagcccaaggatgaagatttcagccctgatgggggttatattccacgcatccttttcttggatcccagtggcaaggtgcgtcctgaaatcatcaatgagagtggaaaccccagctacaaatatttctacatcaatgctgagcaagttgttcaggggatgaaagaagctcaggagaggctgacaggtgatgccttcagagggaaacactttcaagatgagctgtgacatgaaggcgtgttctggaagaaaagcatcagggagggaatccacccagaacagtgacaccaccaggaaaccaggcttctacctactctgggaggagctctcactgtggaagagacatgctgacgaagctggtctgtgcatccagcagcatggccgactatgttctgctcatctctcctaaaatatccattcctttgaatgtaaaggatgaagctatctgatacaaaaacttgagccacttggagatttactccatgtcagtatttacgcctttacccatttcttcctactgtacccaggctgaagtgaacattctcttttttctcttggtgataatcctgggcttcttcctgaattcctgtgctgttccttctctgctcaggcctccctgctcgcacgaatgtgtgtcaagaatggcccagtgctgggactcagcctcagccggaagcatgttttccccgttgctgttagagaaactcaagccttcaagccctgtgtggagccattttgtcaattcaccaactgtatttttgtactggagttaaaacaaaaacaaaagataagatattaattatttcattaagctttaataaaactttaaatggaaa

SEQ ID NO: 5601 - DNA, 1189 bp, Cricetulus griseus
tggccctattgcgagaagcgctgcagctactgcaacttcaataagtacatcccccgtggcgtggaggagggcgccttgcggaactgcctggtgactgaggcgcagacgctgctgcggctcagtggggtgcaaagggtggactctgtgttctttggtgggggaaccccgagtctggccagtcctcacactctggctgctgtcttggaggccgtggcgcaggaagcccatttgcctgcagattcagaagtcacattggaggctaaccccacttcagccccaggttccaggctggcagcttttggagcagcaggaatcaacaggttgtccatcggtctgcagtccctggatgacacggagctgcagatgctgggacggactcactcagcccgagacgctttgcggacctgtgatgaccacctctccctctaccagctgaccctggaacggggcacctcactctttgcccaggtgcagcagggcaccctcccagcccctgacccggacctggctgctgagatgtaccagcagggcaggaccatccttcgagatgctggctttcgccagtatgaggtctccaactttgcccggaacggggcgctcagtacccacaaccggacttactggcagtgcggtcagtaccttggcattgggcctggagcccatggacaatttgtgccccggggagctggaggccacacccgggaagcacggatacagacactggagccagacaactggatgaaagaggtgatgctgtttggccacggcacgcggaagtgtgtcgccctgagcaagctggagctgctggaggaggttttggctatggggctgcgcactgatgtgggggtcactcatcagcactggcagcagtttgagccccagctgaccctgtgggacgtgttcggagcaagcagggaggtgaaggagttgttggcacggagtttgttgctgctggaccacaggggtctccggtgctcctgggagggtctagctgtgctggactcactgttactgatcctcctgcctcaactccaggaggcctggcagcagcacaggactccctcacctgtgtcaggaggatgaccagctgttcctgcaacgtagggcaacaccagttggacttggaaggctgggccagcatggtgggcatccatgtgtataaaataaaaagaaatcccaaactaaaaaa

SEQ ID NO: 5602 - DNA, 1189 bp, Cricetulus griseus
tggcaggttgaccctgacatcttggaccagagtcagaggcctcagcggggaacaggttcaacttcatgagatggtgagtgaccagaaagcagctgggccctcagacagctggttctcaaagagcccagtgctccaccccagccacccgcacctctgacctggaatttcaatgtctgtcaagcctgcctcccactggctcaagggaaactagaaagcgtctcacatttatcaggacctgtgtttcaatggctgtttccctttgggaaaatcccagaaactaagacgtgtcaaacggggtcgtgtgcatctgtaccacttcgtgcagtcacctgtaagcggcatgtgggggcagagccctaagtacccgggtgctcactgcagagacaccactccaagccccggcctaccgtgtaggtgtctggcccctgtgcctgtgacttctcacctggacagcttcagccagcaaggtgctccacctttccttgttgccccctcaccctttctgaacttgggatctgtctacaggcctcctcggaaagagccacaccctgcatcctccttcaggatcctggccccagggcctcagaagggagctatacaagtcattctaatgccaccagagcaactggtggccagaaagaaaaaatgggccccgttggccttcactgggagaggtacattcctacctcctcccaacccctcagaaggaatccaggaatttagttctgtttcaaatgctctgttttcctgacagtattgttgagtgggtcaaaagctgtccttcaacaggttgagacaccagaaagggggctgggagacactaaaagagcctgtcacttgcccacaaccattttgtgaggtgggagcccatacatttagggggagcccgtctgctcggcacatcttggcagcaggtcagaacattgaacatacaaaatgtgaataaagtctggagtcacctttgggaccgaaggattaaagtaccacccaccacatgtgacttctccatttctggctgcaagttccatttttttaaataggaattttcacccctgtgcttgtctaatgtctgctctgaacagttcaagcccttgttgctgttttaaaatgcatgcgtgttaaaatgagactccaaccggaggacaaaataaaactacaaaaagtttttagtaaaaaaaaaaaaaaaaaa

SEQ ID NO: 5603 - DNA, 1189 bp, Cricetulus griseus
acactattccagacgtggatggtacctgcagtgcgtgtggacttctacaatgctgatgagctcaagtctgaagtatcctggattcccaacaaacactactctgggatttatggcctgatgaagttggttctgaccaagactctacctgccaacctggagagagtgattgtcctagacacgactctcttttcccaagtcaaaagcagagctgctgtcaatgttggacatggggaccctgttcacattcaggtaccacgtctggactaaaggccatgcacccacaaactttgccaagtggcggactgccaccatgccttaccgggttgagtgggaggctgattttgagccatatgttgttgtgagacgagactgctctgagtacgatcggagatttgtgggttttggctggaacaaagtggctcacatcatggaattggatgcacaggagtatgagttcaccgtgttgcccaatgcctacatgatccacatgccccatgctcccagtttcgacatcactaagtttcgttccaacaagcaataccgaatctgtctcaaaaccctgaaggaagagtttcaacaggatatgtccagacgctatggctttgctgccctgaaatatctcacggctgagaacaacagctagcacatgaaggccacgactagggatagacatgccacaggggaagagccactttctgcctgggcaccagactttgaagacagaattcatcactgcttttctttggtttgtttctctttgtctctctagccccacaaagctgctttgttctgagatcttcgacagggacccaatcatgaggtgcttccagaatggaatacagaagggtagaagcaaatgaagagttaacaacttaaccacaaagccacagatcaagtcggagtttctggatgttctcattgctttttaataattatggttcaaatcctagctgtaagaaagctatgacagggactacagaaatatgaggccaaacactgtatgcaagtcacattttctatggacaatgaccaagtcacaaggaaagggcttcaagaaactttcattactcacagaaggtatgattctcctctcagacctttagaacttgaacagttcatagaagaccaatctgaagacttgtgtgaccacatggaaggcactggaagaaaagggtcaggcacctcctgt

SEQ ID NO: 5604 - DNA, 1189 bp, Cricetulus griseus
tggcatgttcgaggagcccgaatgggtcgaggcggccccagcagccgtgggcctccgtccagcgacaacacagaatcggccagcgactgctccgccagtcaagggccgcaagcgccgccatctcttggccacattaaaggctctggaagcagcatctctttcccagaaattccccagcccacctggcagtgactctgaggaggaggaggaggtaggaaggaagaaaaaatacctccaaaggccctcacaagccaatgccttgaaggaaggaggggagaaaagaaaaagaaaatgtacaaaaacaggtgttatctatcagtgactctgagggcaaagaaatagaaaggaaatagcagtgctgcccaacgcctcttccaggaagaccctgaggctttctcctctatcaccaaggctttcagaaacaagtagaagaagtggccactgcacccagtggatcgtatcgccaaagatctccgacagaagcctgcatcccttggtggtagctgacttcggctgtggagattgccgcctagcttcaagtgttcggaaccctgtgcactgctttgacttggcctctctggaccccagggtcaccgtatgtgacatggcccaggtgcctctggaggatgaatccgtggatgtggctgtgttttgcctttcactaatgggcactaacatcagggacttccttgaggaggcaaatcgagtactgaagccggggggtctgctcaaagtagctgaagtcagcagccgctttgaggacattcgggccttttggggggctgtgaccaaacttggctttaagatcatctacaaggacctgaccaacagccacttcttcttgtttgactttgaaaagactgggcctcctcgagtaggacccaaagcccaactctcaggcctgaaacttcagccctgtctctacaagcgcaggtgaccaaaggacacctgttaaaaggggagggctcagactccaagctcagaactctgaagactgtacctacccaagctacaagccagaacctggtgccaccctcctgtaccaagaacactgtggtaaagccttctgctcagctctactctaatggagccttcttggctacatcttctgactgtattgtctagtctctgctcatccaaagtttctgctccttcagcttcaagactacagacacacagcttttgcctt

SEQ ID NO: 5605 - DNA, 1189 bp, Cricetulus griseus
gctgctctatcccactggccaagggtatcgtccctcgtggaagaccaaccaggaattcaaagcctgaagctggggctagatcctctgctgtccccatcatggtcaatgacccaccaatacctgccttcctgtgggcccaggaagtaggccatgtcttggcaggccgtgcacgcaggctgttgctgcagtttgggtgctcttctgcaccatcctcctattgctctgggtgtctgtgttcctctatggctctttctactactcctacatgccgactggtcagccacctcagccctgtgcatttccactacaggacagactgtgattcctccaccgccttgctctgctcccttccctgttgccaatgtctcactggctaagaatggacgtgatcgggtgctgatgtatggacagccatatcgagtcaccctagagcttgaaaaaatgccagaatcccccgtgaaatcaagacttgggcatgttcttagtcactgtttcatgctataccagaggtggccgaatcatctctacttcttcacgctcagtgatgctgcattaccgctcccagctgctccagaatgcttgacacactggtgttctccagcctcctgctgtttggctttgctgagcagaagcagctcctggaggtagaagtctactcggactatagggagaattcgtatgtgccaacaactggagcagttattgagatccacagcaagcgcatccagctgtatggagcttacctccgaatccatgcccacttcactgggctcaggtacctgctgtacaacttccctatgacctgcgcctttgtgggtgtcgccagcaacttcacattcctcagcgtcatcgtgctcttcagctatatgcagtgggtgtgggggggcatctggccccaacaccgcttctctttgcaggttaatatccgacaaagggatagctctcgacagggtacccagcatcggacctctcgccatcagccaggccaggagtctacgcagcagtcagacgtgacagaggatggtgaaagccctgaagatcgcccagggacagagggcaagcggtctgaggaagagaaaccaccacgtcagcccctgaatggagaggaggagcaagagcgggaggccagtgatggctcctgggaagatgcagctttgctaacaaaggccaacctgcctacttctgcctc

SEQ ID NO: 5606 - DNA, 1189 bp, Cricetulus griseus
aggtaataaagctcttacaatcaaaataccactacaaagaagaggcggaaatcatctgtgataaagttcaagttaaactcagcaaggagtgctttcatccatacagtacatgcattacagatgtgaggacttcacactgggaagaagcaatccaggaaaccagaggtggtgctgacaataggaaattggcagaagaatgttactttctgtggaaatctacacgtttacagcatatgaccctagcagaagatgtcaaagccatgctcactgaacttcgcaaagaggtccgcctactcttgttaacaaacggtgacagacagacacagagggagaagatcgaggcttgtgcttgccagtcttactttgatgctattgttgtaggaggagagcagaaagaggagaaaccagcaccttccatattttatcactgctgtgatctccttggagtgcagccaggagactgcgtgatggttggtgacacactagaaaccgatatacaaggaggcctcaatgcaggactgaaagccacagtctggataaacaagagtggaagggtgcctctgacatcatcccccatgcctcactatatggtttcttctgtgctagaattacctgctctcttacaaagcatagattgcaaagtcagcatgtctgtgtaacacacagaagaacacagcaaccaaatgcagagccagtttacagggttagaactgatgcacgccaaggcattctgtgtatttggttcagttctaagaatgtgagtgaggattcactgccatgctgtgacgatcctcccaaccctgctgctgctgataaccataggcttgcattcatatctgaaatccaggttttaaatctgtagtccagaaaacttgaagaaaggcaagatagcttacatgtgggtatgcaggtactggcttacagcatagaaatagatatttatataaaaaatagatattctaaaatagagattcaagcaactaaatcaggttggtataagtactaaatcatacaagttaaaacatttcatagtgaaattttgcatattttagacaatttttttgttaaaatattttgcctactttcaatgtgtatgttcttatctattatctaatttttctgcatgatttttgaaggactgaattttctgtggtgtgaacatgacagattgttataatttagaaaaaaa

SEQ ID NO: 5607 - DNA, 1189 bp, Cricetulus griseus
tgaggccctgccctcgtgccctttagcaggagcagccctgctctaagagtttagcccagacaccaaagtctcctccgagccctgccactaccccccctgccctggtatccactctgtgctctcactctctgggttccaggtccactgccaggtgcaggtctggaaggccaggcccagggctctcacccagtgtgaatgaccgtggcctccacagcctgcccacctctctactcacatgtctggggccaatgtgaccctcctcttccaaatctctctgccaacctgccttcttatcgacagcacagaatcccacaagtgacccagaggacatttctgaggggagatggcccctccccagccacaggccttatcttcggtatcctggcaaggatgagttcttcccttgacccctcagtggcctgggagggcactgaatcctggactgaagctggctcctacagagaagctgctgctgtcccttcagacagtagtgctgagctctggtcctctgctgaggcacctgccccactgcagtgcacagagagacgtctgggcctttgtcagaaggagcaccgggcttgaggaccagaaaacaggcaagcgtgcaagtcaggaaacaaaaccagctgctttccttccccctgggcaggcttggctggctgccagcagcccagggcctctggggcaacaggagtttaatcttttcccttgtttaaaagttactaaacagcaggaacaggtggaggctgtatgctagggagggcaaggaagtacccacagaaaggctgggcagggccagggtgactgcagcaggagagtgaagggctaaggtcttgcccactaaggtaccaagaaggaactcatgtccctttgagtggaagtctgtccccaaggacacaggccccaactaggggggaatctacagggagcccctggttcacattgaattggttgccctgtcccaggttgctgccagtggtgggccgctagccaaatgcaccccagcagggcctggacgggcagaactgccagcccaagggttccatgtgcattggggaaattttcacattacctatttatgaacatgtaagtctttctatcaaatctatttttgaaaaatgaaaagttgcctttctggatatgtcacagagccagtgtacaattcaaacattaaacatttctgtactga

SEQ ID NO: 5608 - DNA, 1188 bp, Cricetulus griseus
tgctttttgtgggcaggaaggctgcacagccatggcgggcaagaagacatatgaaagagatccaaatctacaagatcaagggtttggccaaggacatgctggatggggtttttgatgacttggtggagaagaatgtgataaatggaaatgagttactcagactaggggaaggtgcgagcttccttctgaataacgctgaaaacctggttgagaatatctttgagaaaacccaagacacactgaagcttttgtcctcgtgatcaattctataagatgaagacagaaaaggcaaaagagatatatccagtgatggagaaggaaggccgaacacgattggctcttatcatctgcaacaaaaaagtttgactacctttttgatcgagaagatgctgaggttgatattttgaacatggaggagctacttcaaaaccttggatactcagtggtgataaaggaaaaccttacagctcaggaaatggagacagaattaatgcagtttgctggccgtccagagcaccagtcctctgacagcacattcctggtgtttatgtcccatggcatcctggaaggaatctgtggggtgaggcacaggaacaaagagccagacgttcttcctgatgacaccatcttcacaattttcaacaactctaactgcaggagcctgagaaacaaacccaagatcctcatcatgcaggcctgcaggggcaaacataatggaattgtttgggtatccacaagcaaagggatagccactgctgatacagatgaggagcttgtgctgagctgtaaatggagaagcagtgtggcaaaggcccatgtggagaaggatttcattgctttcaaatcttctaccccacataatatttcttggaaggtaagcaagagtggctcgctcttcatttctaaactcatcgactgcttcaaaaagtattgttggtgttatcatttggaggaaatttttagaaaggttcaacattcatttgaggatccaggtgaactcacccagatgcccaccattgagagagtatccatgacacgatatttctacctcttccctgggaattaacacaggtgatacacatgcagttctcagccgagtattgctgtgggtgagaagaaaggaaaatacaaagaatcctggatttttaaatgtttaagtcttttcaattagatgttttatagaacatc

SEQ ID NO: 5609 - DNA, 1188 bp, Cricetulus griseus
  modified_base (420)..(420): a, c, t, g, unknown or other
cggtggtggcgggcatggcggtgtgcgctcggctctgcggcgtgggccctgcgcgtgggtgccgccgccgccagcagcgccgcggcccggccgagacagcagcggcggacagtgaggcggacaccgaccctgaggaggagcgtatcgaggcggggccggcgcgctgctccctgctggagctcccgcccgagctgctggtggagatcttcgcctgctgcccggcaccgacctgcccagcctggcgcaggtctgcagcaggttcccgccgcatccctgccacaccgacactatctggagacggcgctgcccgcgagggattctgatgaagttcatctacaccagtcagtacgacaactgcctgacctaccgccggatctacctcccaccccagcaccccgatgacctcatcaagccaggccnctttaagggcacctatggcagccatggcctggaaattgtgatgctcagcttccatggctcacgtgccaggggcaccaagatcacgggcgacccaaacatccctgctgggcagcagactgtggagattgacctgcatcgtcgaatccagagcaggaggctggcgaggaccctgccccacttcgggagccttcagccaagggccctgatgggccgcatgctgcggacagcaaagagcctggcagtggagctgaggcagctgagccgtcggcctcatctgggcaggggcagccatttgtgttgcctgtgggtgtcagctcaaggaatgaggactatccccgcacttgccggctctgtttctacggcacaggcctcattgctggccatggctttaccagtcctgagcgcactcctggtgtctttgtcctgtttgatgaggaccgctttgggtttctctggctggaactgaagtccttcagcttgtacagccgagtccaggccaccttccagaatgccgatgcaccgtcgccacaggccttcgatgagatgctcaggaacatccagtctctcacctcctgacctccacgtgggcagagaggctgcactggggcccgggggggagaagcatgcacttgggaaatgaacgcacacctcctcactaagggtcctggtttgccctgagacacttcttgtatagtgtgtaacatactcttgtatatttgatttgttggtagctatggaggagagcattaaatatggtgggaaaaaaaa

SEQ ID NO: 5610 - DNA, 1188 bp, Cricetulus griseus
agctctgggctgtgctgaatggctggagacaacacttcatcagttttgacagtgacaggagtggaacggtggatccccaggaactgcagaaggctctgacgacgatgggattcagattgaacccccaaactgtgaattcaattgcaaagcgatacagcaccagtgggaagatcacctttgatgactacatcgcctgctgtgtcaaactgagggctctcacagatagctttcgaagacgggattctgctcaacaaggaatggtgaatttctcatatgatgatttcattcagtgtgtcatgaccgtctaagtcaagaagaagttgtctgaatatactcaacattccaactggagcccaagcttgcttcctcctgccttcagtgctgtgtgcagatttccaacaacactccctgacaactgttgaacgggattgtgactttatatacaaccgaagcttcatttttaattttgataataaatccctgaggttcaattaatataagaacaagtgtgttgtaccagccagaacctccttgagccactattaaccaggccttattttcctgctgtcttttatataaacttaagtatgcagagagtttaaaagcatattgtattattttcttgtgacatgaaatcttttcatccatctatccaaactgttgttaattatacctaaaagtcttctatattataagcttaaaattcacaggaaaagactaaaaagggagataagaatatattaactgtttatctttgactgatgggattctagatgactttaatttcctttacatgtatttccatatctcacaaaattttataatgtgtatgcttccatcttaaaaccagatgttgggggcagagagacagctcagcagttaagagcatgtactgctcttgcagaggactcaagttcccagcgcccatgttgggtgacttaagcactgcctctggcctccacaggcacctgcacttggatgcacataccctggaacagatgtgtatgcacaatcataactaaaagtaataagaataagaaaaccagacagaatcattcttaaaacattgttgaaatccatttttaaatgtcatgtgttaatgtacttaaacatgcacaagaaaggaatttaaatgaagagagagagagagagagagagagagagagagagagagagagagagagagag

SEQ ID NO: 5611 - DNA, 1188 bp, Cricetulus griseus
ccaggtctcggcaagcctccagctatggagccccttgtcaaccaagcagcagctggcctgaggacacccctggcagtgcctggcccataccctgccccctttggcatggtaccccatgccggcatgaatggagagctgaccagccctggtgctgcctatgcaggtctacacagcatgtctccacagatgagtgccgcagctgctgcagctgctgcagcagtggttgcctatgggcgctccccaatggttggttttgatcctcctccccatatgagagtaccttaccattcccccaacctggcaggaatacctgcatcctcagcccctgcctgctatgccctggccatcagccctgactccaaggtctgcttctcatgctgcagtgatggcaatatcgcagtgtgggacctgcacaaccagaccctggtcaggcaattccagggccacacaggacggaggccagctgtattgacatttctaatgatggcaccaagctctggacaggcggtttggacaacactgtgaggtcttgggacctgagagaagggagacagctgcagcagcatgatttcacatcacagatcttctccttgggatactgccctactggggagtggcttgccgtggggatggaaagcagcaatgtggaagttctgcatgtgaacaagcctgacaaataccagctgcacctccacgagagctgtgtgttgtccctaaatttgcttattgcggcaagtggaaaaaggctaccgtttatgaggtcatctactgaaaacattatggcttcatatttacagttgaatgggccaaatgtttggaatttgtagaaatagaaaagttataattaaaaaacaaacaaacaacaacaaaaaaaaacaactgaagaaacgtttccaaatgttgacatagaactgctttgagtctacaaagaaaatgcaacaagtctatcaatagacagtcacctgtctacctttggacaccataaccacacagaggccacaagtgtgggatagagaagcaagctactgcctgtcagtcacatcttgcccaactgtgagcttacttttctgttccttgcagttcacttcacgttgagttcctctgtagagcagtggtgtctccaatgaacttgtttcttggttttgctattctttgttttggttttttttttttttttctttgttattt

SEQ ID NO: 5612 - DNA, 1188 bp, Cricetulus griseus
gaaaagccatctttgcattgttcccgggtcctgctccgcgctcgctgcagccaccttcgcctcccgcccgcctcctccgcggcggactccggcagctctctcgccagagtcctcgagctccagttctcgcctccctcgctgcagcgcatcaccggcgtgccccaccatgtcagacgcggccgtggacaccagctccgagatcaccaccaaggacttgaaggagaagaaggaagttgtggaggagacagagaatggaagagacgcacctgccaatggaaatgctaatgaggaaaatggggagcaggaggctgacaatgaggtagatgaagaagaggaagaaggtggggaggaagaggaggaggaggaagaaggcgacggtgaggaagaggatggagatgaagatgaggaagctgaggctcctacgggcaagcgggtagctgaagatgatgaggatgatgatgttgacaccaagaagcagaagaccgatgaggatgactagacagcagaaaggaaaagctaaacttaaggccaccgtgacctattcaccctccacttcccgtctcagaatttaaacgtggtcaccttcgagtagaggagcaggccccgcccttagcgggcagtgccacccacagatgacatgcgctctccaccaccccaccaaaaccacaccatgaatttgcaacaggggagggaaaaagaaccaaaacttccaaggccctgctttttttcttaaaaatactttaaaaggaaaatttgtttgtattttttatttacattttatatttttgtacatattgttaggggggtcagccatttttaatgataacgggtgaccaaaccagccttcagagcgttttctgtcctacttctgaccttacttgtggtgtgaccatgttcattataatctcaaaggagaaaaaaaaaaccttgtaaaaaaaaacaaaaacaacaacaaaaaaaacaatcttattccgagcattccagtaacttttttgtgtatgtacctagctgtactataagtagttggtttgtatgagatggttaaaaaggccaaagataaaaaggttttttttttccttttttttttgtctatgaagttgctgtttttatttttttggcctgtttgatgtatgtgtgaaacaatgtccaacaataaaccggaattttattttgctgagttgttctaac

SEQ ID NO: 5613 - DNA, 1187 bp, Cricetulus griseus
  modified_base (715)..(715): a, c, t, g, unknown or other
actggaaagcgatccgctactccccgggctcgctgcagatcctcgatcagctgcagctgcctgagcactgccgctacgaggcgattgggctcagtgcagcaggccagggaggccatccgcgccatgaggtgcgcggcgccccgccatcgcgcgtggtgggctgcctcagcctggccgtggagctgcgggcgggcgccggcggtcctgggctggcctctctggtggccttcgtgcaaaaccagctgcgtctccttgtcgccgccaggcccaccgctgtcaacatggcccgtgccgctcgagatctggctcgcgtggcagcccaggaggcggagcgcgagggtgccaccgaggagaccgtgcgggaaagagtgatcggcctcgccgaggacatgttggagaaggacctcagagacaaccgcaacatcggggacttgggagcccgccacctcctggagcagaccaatcccaggggtggcaaggtgacagtgctgacccactgtaacaccggtgctctagccactgctggctatgggacagccctaggtgtgatccgctccctacatgagatgggccaattggagcataccttctgcacagagacccggccttacaaccagggagcccggctgacagccttcgagttggtgtacgagcagattcctgctactctcatcactgacagcatggcagccgctgccagggcacgaccggggtntagcagctgtggtagtgggagccgaccgtgtcgttgccaacggagacacagccaacaaaataggaacgtaccaactggccattgtcgccaagcaccacggaatccccttctacgtggctgcccccagctcatcctgtgacctccaacttgagactggcagggagattgtcatagaggaacgccctagccaggagctgactgacctgaatggagtcaggattgctgcacagggaatccaggtttggaatcctgcttttgatgtcaccccccacgaactcatcaccggtggcatcatcactgagttgggtgtctttgcccctgaggagctccgagcagccctaagtacctccatctactcagaggaacagaccctagatagtccccagatgtgactagctggctctcctgtagaccaggctggtctcaaactcagggaacctcctgcctctgtctcccaagtgctgggattaaa

SEQ ID NO: 5614 - DNA, 1187 bp, Cricetulus griseus
cttgggactaaatgaagaacagaaggaatttcagaaagtggcctttgattttgctgctcaggaaatggctcccaatatggcagagtgggatcagaaggagctgttcccctgtggatatgatgcggaaggcagcacagctgggctttggggggatctacgtacgaacagacgtgggtgggtctggactgtctcgcctcgatacttctgtcatctttgaagccttagccacaggctgcaccagcaccactgcctatataagcatccacaacatgtgtgcctggattattgatagctttggaaatgaggaacagaggcacaaattttgcccaccgctctgtaccatggagaagtttgcttcctactgcctcactgaaccaggaagtgggagtgatgctgcatctcttctgacctcagccaaacgacaaggagatcattacatcctcaatggttccaaggccttcatcagtgggggtggtgagtcagacatctatgtggtcatgtgccgaactggaggatcaggccccaaaggcatctcctgcatagttgttgagaagggaacccctggccttagctttggcaagaaggagaagaaggtggggtggaactcacagccaacccgagcagtgatctttgaagactgtgctgtccctgtggccaacaggattgggagcgagggacagggctttctcatcgctatgaaaggactgaacggcggaaggatcaatgttgcatcctgctctcttggggctgctcatgcttcaattgtccttacccaagagcacctcaaggtccggaagcagttcggagcacctctagccagaaaccagcacctgcaattccagttagcagacatggccaccaggctggttgcctcccggctgatgatccgtactgcagctgtggctttgcaagaggagcgggaagatgcagtggccttgtgctccatggccaagctctttgttacggatgaatgctttactatctgcaaccaggctttgcagatgcatggaggctatggctacctgaaggattatgctgttcagcagtatatgcgggactccagggtccaccaaatcctagaaggtagcaatgaagtaatgaggatgctgatctctcgaagcctgcttcaggactagcccccaaacaggagagtccagcctggggttcatgtgcagccgcaatcagtc

SEQ ID NO: 5615 - DNA, 1187 bp, Cricetulus griseus
tgaagaagccacttgccttccatgcacaaagccgagtgcacagcctgcgtcaggagttgaagtccatggtagctgagaaggacactcagatacagttgctgccactttcagctgagaggctaaaacctgcacaacctgccaaatctcaggcatctaatgtgagaaaaagagaaactgcagcgtcttctaaaacggtaatggccagctcattacagactcagcctcagaaagacgatcagaagaaagcctttgtgggaagttgggtgaaagggttgttgagcagaggtggttcctttatgccaccctgtgttttggctcagaatagagcggtaactgacctacagccctctgttaaaggagccaataattttgatggctttaagacaaaaaatgtaaacaggaaggctaagaggatgtccaggaaggcttctaagcatgtggatgagccgactgcaggcagctgctctccaccttcaggcagtacagctactctgccccatgctggtgggaacgccacatcaatcttgttgaagggacaggaaagctcacgtgcaactcccctcagcaacaatttgcatagcagtgaaagtgtcatctctccagcaagctgtggagatgcagctgaagatcaggttcataagcttcggctcaaacttcttaaaaaactaaaggacaaaaaagaagaaactagctgctctcatgtcttccccgaaccgtggcacctctgtaagtgaccattcagagcctgtgtcccattgtggctgtaagtgaccattcagagcctgtgtcccattgtgggtctccaaaagactgtgagtccatagaagatctgttgaatgagctacagtatcaaattgaccttgcagacaacaaatcagggtgcaccactgctcctgatggcacctcatgtaacagccagagtcatgaagagattttagcagaattgttgtcgcctccagccctgtcagagccctcagccagtgtggagtctgagttgaggtacttggaggtgggggacagcacaccagcacctactgaattcaatgctgtttcccagagcatctgtctgggacaggaccataactactgcagcccaagaaaaaccaagtgtgaagctgaagtacagtcactcacagacagtgcctgcataagagccttgaacttggggagcccatgaagactgatat

SEQ ID NO: 5616 - DNA, 1187 bp, Cricetulus griseus
agagcttaagaagttactggtgttcacagcatctggggtagagtcccggggcaaggtggctgcctttgtacctagatgggactctcatcaccactcgttctggaaaggtcttccccactagccctagtgactggaggattctgtacccagggattccaaagaagctccaagagctggatgctgaggggtacaagctggtaatcttcaccaaccaaatgggcattgggcgagggaagctgccggcagaggtgttcaaggccaaggtggaggctgtgttggagaagctgggggtcccatttcaggtgctggtggcaactcatgcaggtctaaaccgaaagccagtgagtggcatgtgggaccatctgcaggagcaggccaacgagggcatgcccatttccattggtgacagtatctttgtaggagatgcagcagggcgcccagccaactgggcgccagggaaaaagaaagacttctcctgcgcagaccgcctgtttgcccttaacatcggcctgccctttgccactccagaggagttcttcctgaagtggccggcagctggctttgagcttccagcttttgacccgaggaccatctccagcgctgggcccctctacatcccagagtccagcgtactcctcagccccaacccagaggtggtggtcacagtaggattccctggggccggcaagtccaccttcgtacaggagcacctggtgtcagctggatatgtccatgttaacagggacacattggggtcatggcagcgctgtgtgagctcatgccaggcagcactgaggcaggggaagcgagttgtgattgacaacaccaatccagatgttccaagtcgggccaggtacatccagtgtgccagagatgcgggagtgccctgccgctgcttcaacttctgtgctacgctggagcaggctcgccacaacaacaggttccgtgagatgactgacccctcgcatgcaccagtgtcagacatggtcatgttcagctacaggaagcagtttgagctacccatgctgaccgagggcttccaggagatccttcagataccattccaactacggacacatccagaccctgcactgcagcggctgtactgccagttcttagagggctgagcccacaataaacactgatgctactatgctcaccaccttgctggaaatgtgagagacaaa

SEQ ID NO: 5617 - DNA, 1187 bp, Cricetulus griseus
cagcctctggccatggcgggacctgagtggcagtccttggagcagtgcctggaacagcatctgccgcccgatgagttgggcgaggtgaagcgaattctctatggcaagcagactaggaagcttgatctgcccagaaaagctctagaaactgcagcagagagaaacttcgaattgaagggctatgcgttcgaagcagccaaggagcagcggagatgcccccagatcgtgcgtgtggggctcgtgcagaacagaataccgctgcccacgtccacccctgtggcagaacaggtctctgccctccacaagcgcatagagtctattgttgaggtggctgccatgtgtggagtcaatattatttgtttccaggaggcatggaatatgccctttgctttttgtacacgagaaaaactgccttggacggaatttgctgagtcggcagaggatgggctaacgaccaggttctgtcagaagctggcaaagaggcacaacatggtggtggtgtctccgattttggaacgagatcgagatcacgggggagtcctgtggaacacagctgtggtgatctccaattcaggactggtcatgggaaagaccaggaagaaccacatccccagagtgggtgacttcaatgagtcaacttactacatggagggaaacctgggccaccccgtgttccagacgcagtttggcaggattgcagtgaacatttgctacggacggcaccaccccctcaactggctcatgtacagtatcaatggagcagagatcatcttcaatccctcagccaccattggcgaactcagtgagtccctgtggccaatcgaagccaggaacgcagccattgccaatcactgcttcacttgtgctattaaccgtgtgggtcaggaacactaccccaatgagttcacttctggagatggaaagaaagcacatcatgaccttggctacttttacggttcgagctatgtggcggctcctgatggcagccggacccctggtctctcacgcaatcaagacgggttgctggtcactgagctcaacctcaacctctgccagcagattaatgatttctggactttcaagatgacaggccgacttgagatgtatgcccgggaacttgctgaagcagttaaacccaactaccgtcccaacattgtgaaggaagacctgcttccagcccctagctc

SEQ ID NO: 5618 - DNA, 1187 bp, Cricetulus griseus
ggctcagggtggctcgccatgtctgcgggaggcccgtgcgagggatccgtgtccctggactcctccgagtcttccctacccttggccgcgctcaacgtgcgagtgcggcgccgtctctctctgttcttgaacgcgcggacgccggtggcggccgactggactgtgctggcggaggagatgggcttcgagtacttggagatccgacatctagagacgcgccctgaccccaccggcagtttgttggatgcctggcaggggcgctctggcgcgacggtcggcaggctgatagagatgctagccgcgctgggccgtgaggatatattgctggagctggggcccagcatcgaggaagactgggatagcagtgtcccacaaacaaaggagctggagggcatcaccactcttgacgaccctctgggacaaacaccagaaaatttcgatgccttcatctgctactgtcccagtgacattgagtttgtgcaggagatgatcagacaactagaacagacagactatcggctgaagttgtgtgtgtccgaccgtgatgtcctgccaggcacctgtgtctggtccattgccagtgaactcattgagaaaaggtgtcgccggatggtggtggttgtttctgacgattacctacagagcaaggaatgtgacttccagactaagtttgctctcagcctctctccaggtgtccaacagaagcgactgattcccatcaaatataaggcaatgaagaaggacttccctagcatcctgcggttcatcacgatctgtgactacaccaacccttgcaccaagtcctggttctggacccgccttgccaaggctttgtccctaccctgaagatgaatggccctggtagccctaggcacacatgctctctctcacacacaggcatctgcatacatacatgtgtttgctttgggacaactcccaagaatggctgagtggaagcgttctaaaatcaagggggcctggccatctccctggacaaaatggggtgtccttgctccaggtagtggcacttgcctctaattccagcgtttgtgaggtagaggcaggagactcaggagttgaaagctctccttggctacacaccaagtttaagggcagcctggacgacatgagagactatcacccccagtttgtacttaaaaaaaaaaaaaaaaaaaaaaaaaaaaaaa

SEQ ID NO: 5619 - DNA, 1186 bp, Cricetulus griseus
gaaggcgggtgctgccccgtatgaccttgccttgccttcctcagagacggtcgtctgcaggtctcagccagctcccgtgtccccgttgcagaagtcagtattggtctcttcgcctacagtaccccctggggggatgccgcctgtgccccgtcatctgcccagatggtcccccttcctgcaaacaactcccttgtgaccacagttgtccccaccactccacccagccagccgccagctgtctgcccaccagtgttgttcatgggcactcaggtgcccaagggcaccgtgatgttcgttgtgccccagcccgtcgtgcagagccccaaacctccggtggtaagccccaacggcaccagactgtcccccatcgcccccgcgcccggattccctccttcggcagcaagagtcactccccagagtgattcatccagagtgaggagtcacgtctgtagccacccgggatgtggcaagacttactttaaaagttctcacctgaaggcccacgtgagaacgcacacaggagaaaagcccttcagctgtagctggaaaggctgtgaaaggaggtttgctcgttctgacgaactgtccaggcaccggcgaacccacacaggcgagaagaaatttgcctgtcctatgtgcgaccgtcggtttatgaggagcgaccatttgaccaagcacgcccggcgccacctgtcagccaagaagctcccaaactggcaaatggaagtgagcaagttaaatgatggagccaaaaagtgggtttgtgttccgcagggatgccatcttctccatgagttatcttgtttgttactactcatcttcccagtcagctgtggatgtagttattaagtctatctacaagtatcattttccactattgttggtattttacagttgaacagccgtacattgttaaggggtgccaaaagaactggaaccctcattaatttaattgcttggaagtgcagctaaaatttaggcatttcactctaatttagatttagtttgcctgcagtttcttgtgtagatttgaaaattatatgccaatgtgttttctgtagacttaagatattctgcactttgtttagggaaaaatctgaaggtgaaaatatgtattgtaaaggggtgatatcagaaatttgagataactccttgagaaagatggctttctgtcatcggtaaagga

SEQ ID NO: 5620 - DNA, 1186 bp, Cricetulus griseus
cggaagtagggaccggtattccgtagcctcttagcaacgcgagagggtcaagtgacaccgtcagctgactcccgtggtggaggacgctgtggtagccagttctggcggtgttgcagtcacgattgctcggctgggggcccgagccgaacagtcaccgttaggatgtcgggcaaagaccggattgaaatcttcccgtcgcgaatggcacagaccatcatgaaagctcggttaaaaggagcacagactggtcgaaacctcctgaagaaaaaatctgatgccttaactcttcgatttcgacagatcctgaagaaaataatagagactaaaatgctgatgggtgaagtgatgagagaagctgccttttcattggctgaggccaagttcacagcaggcgacttcagcaccacagttatccaaaatgtaaataaagcacaagtgaagatccgagcaaagaaagataatgtagcaggtgttaccctaccagtgtttgaacattaccatgaaggaactgatagttatgaattgactggtttagctagaggtggggaacagctggccaaactgaagaggaattatgccaaagcagtggaactactggtggagctagcttcactgcagacttcctttgttactctggatgaagccattaagataacgaacaggcgtgtaaatgccattgagcatgttatcattccccggattgaacgcacccttgcctatattatcacagagctggatgagagagagcgagaagaattctataggttaaagaaaatacaggagaagaaaaagattatcaaggaaaaattcgagaaggagttggagtatcggagagcagctggagaagtgatggagcctgccaacctgctggctgaggagaaggacgaggacctgctgttcgagtaacggcccctttgctccctcagacccagcaccagctccgtgttaacccagtgtataggttcggtatatgtggctatttattttggcataagaattccctggctttaagatttatcgggatgtcctgtaagactatttctcctgcattgtgattcagcaaccttgtgttactgtggtcgcagctctacatctatttttctttgcacgctaagtctgtctgttaatggaagcagttctgcccatttaaatgtgacttatgaacagagtaaaacgattttaaaaa

SEQ ID NO: 5621 - DNA, 1186 bp, Cricetulus griseus
cagagccgccgccgccgccccagctcccccgtcgcggggagggcaccaggttactacttcctagtggagtccagaagagggaggaggcactgcctccactccagcagctatacacacaatgcagagcatcaagtgtgtggtggtgggtgatggggctgtgggcaagacatgccttctcatctgctatacgactaatgccttccccaaggaatacatccccactgtgttcgacaattacagcgcccagagtgcagttgacggacgcacagtgaacctgaacctgtgggacactgcgggccaggaagaatatgaccgcctccgcaccctttcctaccctcagaccaatgtctttgtcatctgtttctccattgccagtccaccctcctatgaaaatgtgaggcacaagtggcatccagaggtgtgtcaccactgcccagatgtgcctatcctcctggtaggcaccaagaaggacctgagagctcagcctgataccctacgacgcctcaaggagcagggtcaagcgcccatcacaccgcagcagggccaggcactggccaagcagattcatgctgtgcgctacctcgagtgctcagcactgcagcaggacggcgtcaaggaggtgtttgctgaggctgtccgggcagtgctcaacccaacaccgataaagcgtgggcggtcctgcatcctcttgtgtaccctggcactcagcttggagcctaccccttgttcccccaccagttgtgccttggcgccttgtctgctcccagctgtgccttaaggactaattctggcaccccatgccaggggactccctgaatgccttttattccttaaggaggtacacagggaaaggggctttgggccccaccccactctgcttaggaataccaagtattccatgagttcacctaagccaggttgacctttccaagaggccaacccagtgctgccttccatttcctgctactgaccagttcatccagctttccacaaagttgttgctgcctattgtggtgcctctctaactcaagttaagggctcaaacctctctgcctttgctcttggagtaggctctccaagatattctctccctcccccaagggaggagccacagaaccctgagaagtaaaaatgtaccctaacctgccccatcgtgcccaggcctgatacgtctgctgactgactc

SEQ ID NO: 5622 - DNA, 1185 bp, Cricetulus griseus
ccgcggtcgttcctgcccgcctggccgcggtgctctcccgcaaggttcctgccagtgtctctggagtatggcaggctgctgagcttgagtggcagtgtcaagcgggagctgtgtgacttgcccagtggcagggaaggtgtccatggctgcagccaacagaggcaataagcccagagtccgaagtatccgctttgcagcaggccatgatgcagaaggctcccagagccatgtccactttgatgaaaagctgcatgactcagtggtcatggttactcaggagagtgacaacagctttctagtcaaggttggcttcctgaagatcctgcacaggtatgagattaccttcactctgccttcagtgcgcaggctgagcaaagacatccgtgaggcccctgtccacagcttgcacctcaagctcctcagtgtcactcccatccctgaaggttacagcatcaagtgtgagtattcagcacacaaagagggagtcctcaaagaggaaatgctgctggcctgcgaaggtgacacgggcacctgtgtgcgtgtgatggtgcaggcacgagtcatggaccgacaccacggtacacccatgctgctggatggtgtcaagtgtgtgggcgctgagctggagtacgactcagaacacagcgactggcacggctttgactgaggcctggggccctgcctgcctgcctacctgcctgcctgagcccctgagccttaaattctgcctgcttcccgacatgctgcgtgatggtgtggcttcctcacctctcccctgggtgggtgtgtggcagggcttgaccctgctcatgcctcccacttctgccttcattcctgccaccatcctgcctctcctatggcctcctctcccacttcctcctctcccatgtgcctaagtctcctgactgaagaaatgggttgagtcccatggaggcttatctgagaggaggaatctggagtggatttacctcctccaccccaagccataggggctctactgtctgtgtgacattgatgccccattgctgctgctattgtcgtctcaccatctccacctctgcggtccctccatcttccccactgctgttcatgtggtgaggaggtacagttcccagctcctacccctcaggtctgtggtacttggtttttaatgactggttgggatagagtccttaataaataaaa

SEQ ID NO: 5623 - DNA, 1185 bp, Cricetulus griseus
gagaatccaaacctagggtaaataaagggagtgtcaccctgtccaaggcccctgagacctagagactcccgcctccccgaggccaaacaacgaagtgctgagtcacgctgactgacgactggcgctctgcaaaccgttcttccctaagctgtgtccctgacgctggtggcttccctcctgggcctgagctacagcagaccctacagcagaacgttctttttacacttcaaaatgggatcctctaagaaggttactctctcagtgctcagccgggagcagccagagggggttggagctcgggtccgcagaagcattggcagacctgagttgaaaaatttggatccgtttttgctgtttgatgagtttaaaggaggaaggccgggagggtttcctgatcacccacaccgaggttttgaaacggtatcttaccttctggaagggggcagcatggcccatgaagacttctgtgggcatgttggtaaaatgaacccaggagacctacagtggatgactgcaggccggggcattctgcatgctgagatgccctgctcagaggagccagcccatggcttacagctgtgggtgaatttgagaagctcagaaaagatggtggaacctcagtaccaggagctgaaaaatgacgagatcccaaaacctaccaaggatggtgtgacagtcgctgtcatttcaggagaagccttgggagtaaagtctaaagtttacacacgcacgcccaccttatatctggacttcaagttggaccaaggagcaaagcattcccagcctattcctaaagggtggacaagcttcatttataccatctctggagacgtatatattgggcctgatgatgctcaacaaaagatagaaccccaccacacagcggtgcttggagaaggtgacaatgtccaggtggaaaataaggacccccaaagaagccattttgtcttaattgctggggaaccattaagagaaccagttgtccaacatggtccctttgtgatgaataccaatgaagaaatttctgaggccattcttgatttcaggaatgcaaaaaatggttttgagggcgccaaaacctggaagtcaaagattggaaactaatgaagagctgaaattctgccatttggatggactgaccattcagtatattcaatttccaaagctggcttagctggtgcttct

SEQ ID NO: 5624 - DNA, 1184 bp, Cricetulus griseus
  modified_base (470)..(470): a, c, t, g, unknown or other
ctgctggcctatgccagcagtgaccatccagatttaataacctgtttggaacgaggcaatcattattacggaggaaaaatacagcaaattctgccccgctggttgtagagacatagcaggagacatttctgggaatatgaaagatggctacagagatacctctttattatgcaaagctgccatccatgcagggatcatcgcagacgaactaggtggccacatcaacctgctgcagagcaaaggcatcagtcattatgaaggagtcctggccaacggtgtgctctcccggcatggctccctgtcggaaaagcgctttctgtttacctccacaggaatgaatattacaaccatagttattccggcagtgatcttcgtcattctccttctggctggaatgggggtctttgctgtcttcagaaagaggaagaaaaaaggaaatccgtatgtatcagcagaggctcaagaaaacnggactggttggaagcagattaatgccttgacgcactcggaaccggagtacgccacacccatcgtggagcgacacctgctgcgagcacataccttttccacgcaggacggctaccgagtccccgggcccaggcccactcacaaacactccctttcctccggagggtatccccttgctgcaggagccatccagagcaaaggctatcagaggccagcaagccccaagcctgtgggtggtggctatgacaagcctgctgccagtagcttcttggacagcagagacccctcccctcaattgcagatgactcctggggtgaatgatggttatttagcacccagaaacggccttgcacccctcaaccagatggccatgactgctcttttgtgaacccaatgtgaaaaaacctgctgtggtactgagcgtgctctgcggcgagtcactggaagaagtgcgcgcatgcgtgtgtgtctcttcaggatcctagagataacctcactcactgtttacagatctgagcagcgggttttgttccgaccctgccgcagagccgcttggtttctgtcgtgctagaacaaggagaccttttctcgttgctaactgtgatgctgtgctgtaaaatgtgcaatttgtatagtcatatttaacatgaattaaaagaaggaaggttgtggtgtttgttttctacacaggggtgaagcagaaaacttgggatttg

SEQ ID NO: 5625 - DNA, 1184 bp, Cricetulus griseus
acctggcctgatctgaagcgcccacccagcattctgggtcatgctggcaaggagagctgctctgtcatctttggctatgtgcagggccacgagcagaagctgctggtgtccaccgaggatggcaatgagaactccagggccaatccagaggaagtaacagaggtggtccgaatcaccaagcagttgaccctggaccagacagtggatcccaaggacattgccgtccttacaccatacaatgcgcaggctgccgcaatcagcaagggcctcaggcaaagaggggtcactggagtgactgtgacttctataaccaagagccaggggagtgaatggcgctatgtattagtgagcacagtcagaacatgccccaagagtgatgtggaccagcggccaaccaagagctggctcaagaagtttctgggctttgttgtggacccccaccaagtaaacgtggccatcacccgggcccaggaggggctgtgcctcattggggaccatgtactgctacgctgctgcccactctggcaccgtctcttagacttctgtgaggcccagcacagccttgtacctgctgagaaggtgcgggtccagagaaagtctgctttatcttcctgaagagctcccaactacccaggctttgatgtaccagcagctgaggatatgtccctcattcttcttgctaaggccctaggcatacagtgaattgccacagctcacacgtcccagtggaacgttagtcagccacctctgctatcttcttgggagacgccccaatactggctgcagtcatgtagcaatgacagtcttatgggcggtggcctcttcctgagccggaagcagacttaatgaccttcctgtttgtgcctgaacttgagtggaggggaaaagagctggaggtgggcccctttgctgctgactgtgttgcttttcctggggcatttggtgttgggacacctcttagtgaccacaaaggaccctaggatatacctttgctgcttgttactaggagcataaacaggaatgagactcctctgaggctgcactttgagattgaggatccatctacggttgcactgggcaccatgtatccatttgtcaatattttctagtcttaataacctaaagctagcacctcttactgggccactcagaatggccaaggaagccttcctggaggaaaagac

SEQ ID NO: 5626 - DNA, 1184 bp, Cricetulus griseus
tgctgcaagtctggatccagaatcttatatcaacggacatacgcagggaaggatgctttggaagagtcagtgacttggggcagttcatccgagaatctgagcctgaacctgatgtaaagaaatcgaaaggattcatgttctcacaagctatgaagaagtgggtgcaaggaaatactgatgaggcccaagaggaactagcttggaagattgctaaaatgatagtgagtgatgttatgcagcaggcacactatgatcaaccactagagaaatctacaaagctgtgactcaaaaccagaaataaggaaatatgattttgaaaaataacaacttttccctttggttggattcctcaacacagccgatgacaatggagcactgcatttctttccactgctagagcattgttgtttccaagaaagagtgcgagagacagtccaagatctgttgttaaatgtagacatagatgcacacataatggtaacacagtgagtcacaagatacagagtggtattggtgacattattagacaatttagtcttccttcacagaggacattaattcagaaagaagcttgcagttatggatcaagcctcagtgatatcattccttcttttgggtgacagaacatgatttttcacatttcactcactcctgtgatgttatatccttaaagctagtctctcctctactagcaaaagggcagatttagttttactttgagcatcaagacccattcctccataggaatgccatgcttcagatactttattccctcttcggaatacacatggaaaaaattaagtatcactccagtttttcccatgtggtactcggaacacattctcagattttttattttttaataaggtggggaaagaaacactcgcttttgagtgtctccccagtcttcactgtgagtgggaactgtgcagtcgccttttccctttctgtcttcagacagtaggaaactcactcgctgccctgctgcttagttggctttgcacctgtggcacggcatgggcagggccacctagttggcaagcacactcccctggccatatggtgccagtgcttcctgtgtgtgacagtttagagagaaaggaagttttcttaggtgttactgcttttgctcaaagtttgcaaaagaatatatatatgtgtgtgtgtgtgtgtgtgtgtatata

SEQ ID NO: 5627 - DNA, 1184 bp, Cricetulus griseus
cagctatggcgcggaagttgagccggtccttgttgcttctcttgccgttcctgctgggggtccctctggcgcaaggcttcagccccctgcccctagtcctcaacacttggccttttaagaacgctacggacgcagcatggcggacattagtgtctggagggactgctgtggatgcagttgagaatggctgtgctgtctgtgagacagagcggtgtgaaggcactgtaggctttggaggaagtcctgatgaagttggggagaccaccctggacgccatgatcatggatggcgccaccatgaatgtgggagcagtgggagacctcagaagaattaaaaatgccatcggagtggcacggagagtcctggaccacacaacacacacgcttttagtaggggactcagccaccaactttgctgaaagcatggggtttaccgttgaagatttgtctaccaccacctcaaaaagtcttcattcagagtgggcttctaagaattgccagccaaatttttggagaagagttacaccagatccttcaaaatactgtggaccctataaaccatctggtagcttggagtgggctatttctgcccacaaacaagtggatatccataatcatgatactattggcatggttgtaatccataagacgggacatgttgctgcgggcacatccacaaatggtttaaaattcaaaatacctggtcgtgtaggagactcaccaatacctggagccggggcctatgctgaagacatgattggggcagctgcagccacaggggatggtgatatactaatgcgctttctgccaagctaccaagctgtggaatatatgagaagaggagaccacccaaccaccgcttgccaaaaagtgattgcaaaaattcagaagtattttccaaaattctttggggctattatatgtgccaatgtgatgggaagttatggtgctgcttgcaacaaacatccaacatttactcaatttagtttcatggtttataattctctacgaattcagccaactgaagaaaaagtagactgcatctaatctaccgtgtctgttagcatgtgtttttaaagaggagagaaactaaagctaggaaagttgctgactggcatcatgtagtagccttcatatatttcaagttcatgtgtaagctaactgtaaaaataaaataaattatgc

SEQ ID NO: 5628 - DNA, 1183 bp, Cricetulus griseus
caggcacctgaaagggtgaaggcgagaggcagatgacgacgctgaacacaggctctgcaagaatctccataatgaatggatccagtgtggcaagtacatcacccagtgtgaaatgcaaagaggaccaagagttacatggacatgaggaaaaggaaaacccatttgcagaatacatgtggatggagaatgaagaggatttcaatagacaggtggaggaagagctgcaagagcaagacttcttggaccgctgcttccaggagatgctggatgaagaggaccaggactggttcattccagcacgagacctgcctcagactatgggacacttacagcagcagttaaatggattgtcagtcagcgacagtcatgaatctgaagacattttgagcaaaagtaacctgaatccagatgccaaggagtttattccaggagtgaagtactgagctgttggaagcttccagaaggacttgtcttgtccccgtacctggggccagcaatgtacaaaaaggcagagctgaaggggggtggcaggggtgtgcagccaggcgggttgggttgggaaggtggtttaactggatactgtgactctgagtaactaatgtgcgaggtactactctccaagccctctgagcatggctcttctgttctgctgatttgttcagagcagtttccccttttattttatttttgatgatctcttttggagtttaaggaactgcagctgtttttcccttgtaaggtatgttctgtctgcattcaagcaaaaataagatgaccaaggaaaacagtatttaagaaataatcttccctgctgtgtacctaccgagagcagggcatctggaaagcttaagaagtttggcagctgggtggtaagaaggaaaaacaaggagatgtaaaccagctgcaacactcagctcccccaaacccctgacatttccatgatgaactgaagtaccagtagcccacaaagcccttgtctcctggcctgaactctactcaagaaaacacagatttgaaagttcttggatgaataaaactttggatggaagcaagttgtacatcaattggatccaggacctcacatgtgctatgcaagcactacaccaagctgcattccaggcctgtgccagcctgggtcttagtaagcaccctattctacaattacaagagctatgattggttc

SEQ ID NO: 5629 - DNA, 1183 bp, Cricetulus griseus
attcagagcggcctcccagggaaggagtttctgtgagcttctgtacatcaggatggtgcaggccaagagctggaccctgaagaagcactttgaaggcttccctactgacagtaacttcgagttgaagactactgaactcccacccttaaataatggggaggtcttgctggaagccctgttcatctctgtggatccttacatgagaattgcatcgaaaagactgaaggagggtgataggatgatgggtgagcaagtggccagagttgtggaaagcaaaaatccagccttccccgcaggaaccatcgtagtggctttatcaggctggacatcacattccatttctgacgggaatggactgaggaaactgccagcagagtggccagacaagttaccactgtctttggctttggggacagttggcatgccaggcctcactgcctactttggcctgcttgacatctgtggtgtgaagggtggagaaacagtgatggtcaacgcagcagcaggagcagtggggtctgtagtggggcagatagctaagctcaagggctgcaaagttgttggtgcagcagggtctgatgagaaggttgcctatcttaagaagctcggattcgatgttgcctttaactacaagacagtaaagtctttggaagaagctttgagaatggcctctcctgatggttatgattgctattttgacaatgtaggtggagagttttcaaacactgttatatcccagatgaagacatttggaagaattgccatctgtggagccatctctcagtacaaccgtactggtccatgtccccaaggcccacccccagaggtcgttatttatcagcagctccgtatggaggggttcatcgttactcgctggcagggagatgtccgccagaaggctctgacagacttgatgaattgggtctcagagggtaaaatccagtatcacgaatatatgcttgaaggatttgaaaagatgccagcagcgttcatggggatgttgaaaggagaaaatctggggaaggccatagtgaaagcatgaaaaaaaaatgacatgtgcatcatcactggaagattagccttttttcttttttaacatttggtacaaatgtatactgccttatataagaaataacagcaagggatttgacctatctaataaaatctatgtgtgttaattttt

SEQ ID NO: 5630 - DNA, 1183 bp, Cricetulus griseus
  modified_base (1163)..(1163): a, c, t, g, unknown or other
gcgaaaccagctgctggaagtggattttctgcattggccgtgacatccgaaagaaagatatcaataatattgtcaagaccttgcatgaatggtgtgatggctgtgaggcagttctgttgggcattgaacagcaagttctgagagccaaccagtacaaagagaaccaccaccggactcagcagcaggtggaggcagaggttagcaacatcaagaagacactgaaagcaacagcgtcctcctcagctcaggagatggaacagcagctttggtcccattgcggaaaacgattgctcctccttcacctcctttcctacgttgttcccttcaaactcaggggctcaacggatgccatcctaacagggtccgacactgcccagcctccctccaggggttccttgtctctgtgtatgggctacctccctcccagttgttcttttgctccgtgtcattttgtcaggctggttctaagctggaggcagtttatccagccctgagggatgactggaggaggcttctctctgagtgaagaggtggccttgcttctccagccccatgtaccacagtacccacaatggtgcaagtgtctctagtcaggtagccacgttgttccctctcctgccttactcctgttggcagtgccagttcaggctgtggagggatgtggtgctgggctctgtttactaaacctttgggttttcagcctcttaagcccagccaggatctctcactaagttgggagcactgggctgactcacctctggtgtctgagtccgagtggagggcgcttggggtccgtgggcggcagaaggtgtttctcctggctcggtgtcctctgctgaccactcctcctgctgtcttaggctgctcagccttgatttggcacttaggcccagttgccctctgggattgtctgccaacatttgctctcctgagatcttttcatgcctcctggctgcccctggggtaggaatggtgatgccgaagcccctcagactggtgaaggaccattgctgctttttctcctttcttcccaccctccttggctggcgacccagagccctctgatgacaccatactcctggccagagaaaaggcttgactagactttctgaacttgaacagtttcaggttatattttaactttttttttttgtactaggttnattctaattacattttcaac

SEQ ID NO: 5631 - DNA, 1183 bp, Cricetulus griseus
cggagggagctcggcgcgcgcgtgcgagcggccagccggctgcatggcgcgctgcgagcggctgcgtggcgcggccctgcgcgacgtgctgggccaggcgcagggcgtcttgttcgactgcgacggggtgctgtggaacggcgagcgtaccgtaccgggcgcccccgagttgctgcagcggctggcgcgggcgggcaaggccacactgttcgtgagcaacaacagccggcgcgcgcggccggagctggcgctgcgcttcgcccagctgggcttcgcggggctgcgcgccgagcagctcttcagctctgcgctgtgcgccgcgcgcctgctgtgccagcgtctgcccgggcagcccgacgcaccgggcactgtattcgtgctgggtggtgaagggctgcgcgctgagctgcgtgccgcgggactgcgcctagcgggggaccccggcgacgacgacacgcgcgtgcgcgctgtgctcgtgggctacgacgagcacttctcctttgccaggctgagcgaggcatgcgcgcacctgcgcgaccccgactgcctgctcgtagccaccgatcgcgacccttggcacccactcagcgacggaagccggacccccggtactggaagcctggctgccgcagtggagacagcctcaggacgccaagccctggtggtgggcaaacccagcccctacatgttccagtgcatcaccgaagacttcagcgtggaccctgcccgcacactgatggtgggtgatcgtctggagaccgacatcctctttggccaccgctgtggcatgaccaccgtgctcacactcacaggggtgtcacgcctcgaagaagcccaggcttatctggcagctggtcagcatgaccttgtgcctcactactatgtggagagcatttcagacttgatggaggggctggaggactgagcccacctcccccactccctgatcccatagatggagcctccaggccatgagtcacattcagcaccatgagcaccctggcacaggtgtctgtaccccagtaaagggaagctaggatccaggaaggtttgtgggctctcatacccctcctagcaatggctggacactgctgttcagaagctgcccccacatcttgaaggttcatcctggcctgaccccaccaggtggccttatttcttgccctatcacctccccttcttg

SEQ ID NO: 5632 - DNA, 1183 bp, Cricetulus griseus
gggaagaggctgaatggcagaaccggttctgtgagatcgccgccgccatgcagcagatgctgactgagagctgtaagagccggctcattcagatggcctatgagtctcagaggcagagcctggtccagcaggcctgttccagcatggctgaaatggaccagcggttccagcagattctgtcatggcagcagatggatcagagcaaagccatcagccacatccttcaggagagtgtgatgcagaaggctgcattcgaggctctccaggtgaagaaggacctggcgcatcggcagatcaggaaccagattaggctaatagaaactgagttactgcagctgacacagctggagttaaagaggaagtccctggacacagaggcgcttcaggagatggtctcgagagcagcgcaaagaaaagaagcagcgagaagaagaactccatgacatcctggtggaattagaagccaagagtgaaaccaagcaggaaaattactggcttattcagtatcaacggcttttgaaccagaagcctttgtccttgaagctgcaggaagaaggcatggaacgccagctagtggccctgctggtggagctgtctgccgagcactacctgcccatcttcgcccaccaccgaatctcgttggacatgctgagccgaatgagccctggagatctggctaaggtgggtgtctcagaagcaggcctgcaacatgagatcctacggagagcccggaaccttctggatgtggccagggtccaaccagagttgaaaccacctaaggatgaggtccttgatgtcctggagacccccgaagccccttgggagcctcccgagtcagtgagaccatctgctcccccagcagaactagacatgccaacctcagagtgtgttgtgtgcctggaacgtgaggcccaaatggtcttcctcacctgtggccatgtctgctgctgccagcagtgttggcagccactacgcacctgcccactgtgccgccaggagatctcccagcgcctccggatctaccacagcagctgaatgcacagccagctaccagcgctggcccttgcttggcaccatctccaccactgctgggctcccatgcacccacgttccccagactagggcaagattaccatggccttttggcaccacctgccaaccccgctgatgatgcatctgaaag

SEQ ID NO: 5633 - DNA, 1182 bp, Cricetulus griseus
cccggccgagtccccgccgtccgcgcccggcgcccgcagcccgagccgcacccgccgcggacggagctcatgcgcgggcccagccagcgccggtccgcgcccccaccctcccggccccggccccggccccgggggcagtcactccagcaagcggtggggcaggagctcctggagtggcagcctctatagaagcgatgacagaatacaagctcgtggtggtgggcgctggaggcgtgggaaagagtgccctgaccatccagctgatccagaaccattttgtggacgagtatgaccccaccatagaggactcctaccggaaacaggtggtcattgatggggagacatgtctgctggacatcttagacacagcaggtcaagaggagtatagtgccatgagggaccagtacatgcgcacaggggagggcttcctctgtgtgtttgccatcaacaacaccaagtcctttgaagacatccatcagtacagggagcagatcaagcgggtgaaagactcagacgatgtgccaatggtgctggtggggaacaaatgtgacctggctgctcgaactgttgagtctcggcaggcccaggaccttgcccgcagctatggcatcccctacattgaaacatcagccaagacccggcagggtgtggaggatgccttctacacactagtacgtgagattcggcagcataaactacggaagctgaacccacccgatgagagtggccctggctgcatgagctgcaagtgtgtgctatcctgacaccaggtgaggcagggaccagcagacatctggggcagtggccccagctagccagatgaacttcatatccactctgatgtccctgctccccccatcctgccaatctccctgcctgaggtcagtggtgtcctttgtgcccgtcccggcacaggctcaggacgtggaggtgccggatgcagggaggaggtgcagacggaaggaaggaaagagaagggaggaaggaaggaagcgatgctggagccagtccagtccagggatggtggacagaggtgaccaagaccttcgcatggacaattggaacagactgtgtcatgaactgtccctattgccactggcaccccagtcctcaacccctctcagttcccttcgggtgcctatggggcacaggttgaattacagtaaattatttgatggtctt

SEQ ID NO: 5634 - DNA, 1182 bp, Cricetulus griseus
tttcacccgcaatgagcttcctcaaaagcttcccgccgcctacgtcggaagacgggctccggctgcagcagccagacaccgaggctgtgctgaacgggaagggtctcggctccgggaccctttacattgcggagagccgcctgtcttggttagatggttctggattaggattctcactggaataccccacgattagtttacatgctgtttccagggacccaaatgcttatcctcgagagcatttgtatgttatggtgaatgccaaatttggagaagaatcaaaagaatctctctctgatgaagatgaggaagacggtgatgatgttgaacccattgctgaatttagatttgtgcccagcgataagtcagcattggaggcaatgttcaccgcaatgtgtgaatgccaggccttgcacccagatcctgaggacgaagactctgatgattacgatggagaagaatatgatgtggaagcacatgaacaaggacagggggacatccctacgttttatacctatgaagaaggactgtcccatttaacagcagaaggacaagccacattggagaggttagaaggaatgctttctcagtctgtgagcagccaatataacatggcaggagtccggacagaagattcagtaagagattatgaagatggcatggaggtagataccacaccaactgttgctggacagtttgaagatgcagatgttgatcactgaagagatgatttaaacaattctcttataacagtaggcgagaacttggtacctcttccagtccagagtggggctggtgaaaggctttttccttctccaaaacttactttgcaagacagactataatgagacagcaagctgtcaccagcagaagagactgagacctttatcaacaaaggtgaattaactgagcgggtatttgtggttctcatttacccccaaacttcctgggtctaggtgtcttccaagtaggcctctaattcctgcctttgctgtgtgcacatctgtcagccagaaagcctatgaggtgaaatgtacaaagctcacactggctttctgtaacataataagtaatctgtaatgaagtctgcaaagtaactcttgatgttttttgttctttgttaatagttaactaaataaaaaactaagtttttttctaaaaaaaaaaaaaaaaaaaaaaaaa

SEQ ID NO: 5635 - DNA, 1182 bp, Cricetulus griseus
gccgccgccatggggagccgcgtgtcccgagaggatttcgagtgggtctatacggaccagccgcacgccaaccggcgccgggagatcctggcaaagtatccagagatcaaatccttgatgaaacctgaccccaatttgaaatggatcataactgtgatgcttctcgtccagttggcttcattttacttagtgaaagacttggactggaaatgggtcatattttggtcctatgtctttggcagctgccttaaccattcaatgactctggggatccatgagatttcccacaatttccccttcggccaccacaaagctctatggaatcgctggtttggaatatttgctaacctccctttgggagttccatattctgtttcttttaagagataccacatggatcatcatcggtacctgggagctgatggcatcgacgtagatattcctactgattttgagggctggttcttctgcaccactttcaggaagcttgtctgggttgtccttcagcctctcttttatgcttttagacccctactcatcaatcccaaaccaattacttctctggaaatcatcaatactgtgatacagatcatctttgacattatagtttactatgtttttggagttaaatctctagtctacatgttggcagcctccctgcttggcctgggtttgcacccaatttctgggcattttatagccgaacattacatgttcttaaagggacatgaaacatactcatattatgggcctctgaatttactgaccttcaatgtgggctaccataatgaacaccatgacttccctaacattcctggaaaaaacctgcccctggtgaggaaaatagcagctgaatattatgataaactcccccaatacaactcctggatcaaagtactgtatgattttgtgatggatgacacagtaagtccctattcacggatgaagaggcctccaaaagggaatgagattctggagtaaatatcacagcccaaggaattcctctccacagcttcataatagctgatagagtggaatttttatcttgttaagcttaagatgagtgatgctcagaagctgcactggtgtaatttccaaccaggatctcagtggcatcagaagctactcagccttcatataaagttttgctttattaaaacaactaataaactgaactgttaa

SEQ ID NO: 5636 - DNA, 1182 bp, Cricetulus griseus
aagtccctgaggagccgactcagagatgggcccagtgcacccttggaggcacctgaacctcgaaagcctgtgacagctcaggaacgccagcgagagcgagaagagaagcgtaggaggcgacaagagagagccaaggagagggagaagcgacgacaagagagggaacgcaaggagagaggacgctggtgccttgggggggccctctactgaccctctggctggactggtgcttagtgacaatgaccgaagcctgctagagcggtggactcgcatggctcggcctcctgccccaactccagccccagccccagctccatcccctgcccaacctgctagtcctcccactggccctgtatctcagtctgctggtcctcctctacagcctgcaggctctattcctggtcctgcctcccagcctgtttgcccacccactggccctgctccccagcctcctggaccctatcccctgccccactccaaactgccccttccactagccttctggcctctcagtcacttgtgccaactagtgggttgcctggctccagtgccccagaagttctgccttacttcccatctggcccaccacctccagatccctgggggcccccctcagccttctacatcagagtcaccagatgtcaacctggtgacccagcaactgtctaagtctcaggtggaggaccccctgcctcctgtgttttcaggcactccaaagggcagtggggctggctacggtgttggctttgacctagaggaattcttaaaccaatctttcgatatgggtgtggctgatgggccacaggatggccaggcagactcagcttcactctcagcctccctcctggctgactggcttgagggccacggcatgaacccggctgacatcgagtctctgcagcgtgaaatccagatggactccccaatgctgctggctgacctgcctgacctccaggagccctgaaacccacagcttgtgccttgctgtcaggacagacccagcttcaaggtccagggatgcaatccagaggcctgcagccttggcactggcaggtgaggctcagcttgagttactctgcaggttcatctcagacccacctttcagccttaagcagccacctgagccaccaccgagccataacaggattgggagactactcccctgagcagtcttctccagta

SEQ ID NO: 5637 - DNA, 1182 bp, Cricetulus griseus
atcaggacgcgacctcctcagccttacccctcccgctgccatgcaccctgcagccttcccgcttcctgttgttgtggctactgtgctgtggggagcatcccctatccgaggccttattcgagcgacctcggagcacaatgccagcatggactttgcagacctcccagctctatttggggctgccctgagcgaggagggactccgaggggttccttggtggaggcccatccagaaaatgcctgcagtcccattgccccaccaccctcagctccggtcaatgggtcagtctttattgcactgcttcgaagattcgactgcaactttgacctcaaggtcttaaatgctcaaaaagctgggtatggtgcagctgtggttcacaatgtgcattccaatgagcttctgaacatggtgtggaatagtgaggaaatccaacagcagatctggatcccatctgtatttattggagagagaagtgcagagtacctacgagcccttttttgtctatgagaagggggcccgggtgcttctggttccagacaatagtttccccttgggctattatctcattcctttcactggcatagtaggactgctggttttggccatgggagctgtactggtagttcgttgtatccagcaccgcaaacggctccagcggaaccgacttaccaaagaacaactgaaacagattcctacccatgagtatcaaaagggagatcaatatgatgtctgtgccatctgtctggatgagtatgaggatggggacaagcttcgggtacttccttgtgcacatgcctatcacagccgctgtgtggacccctggctcactcagacccggaaaacttgccccatctgcaaacagcctgtccatcggggtcctggggatgaggagcaggaggaagaaactcaagggcaagaggaaggtgatgaggaaggggagccaagggaccagcctgcttcagaatggaccccactcctgggctctagccctactcttcccacctcttttgggtccctagccccagcacccgtggtctttcctgggccctccacagaccccacaccttctccttcatctgctgccctggcctgaaacttcctacactccagcacctctggtgatatgtttgcacaaacttttcctccagtctaataagctgagggtttttttttgtggatgaa

SEQ ID NO: 5638 - DNA, 1181 bp, Cricetulus griseus
gagctgtctgacttcaccctgagggtgcaggtcagggacgatcaggacactatcctcacccagtttttgtgtccagactccgcagccaccccccaaaagtgccattaaaccatccgggcagaggaggttcctgaagaagaacgaggttgggaaggtcatcttgtccccgttcgttgtcaccaccaagtacccaacgtttcaggaccgccccgtgtctagcctcaagttcggcaagctactaaagacggtggtgaggcagaacaagagccactacctgctagagtacaagaagggtgacgcagtggccctgctcagcgaggaacgcatccgcctcaagggacaactgtggaccaaggagtggtacatcggctactatcagggcaaggtgggcctggtgcacaccaagaacgtgttggtagtgggcaaagcccggcccagcctgttctcggggcctgagctgagcacctccgtgctgctggagcagatcctccggccctgcaagttcctcacttacatctatgcgtccgtgcggaccttgctcatggagaacatcagcagctggcgagccttcgcggacgccctgggttacgggaacctgcctctcaccttcttctgccgggcggagctggacagcgaggcggagcgggtggcgtctgttctggaaaagctgaaggaagactgtaacaaccctgacaacaaggaccggaagtccttccagaaggagctggtgatggctttgctgaaaatggactgtcagggcctggtggtcagactcatccaggactttgtgctcctgaccacagccgttgaggtggcaccgcgctggagggaactggccgagaagctggctaaggtctccagacaacagatggatgcctatgagtctccccaccgggacaggaacggggtggtggacagtgaggccatgtggaaacctgcctatgacttcttactcacctggagccaccagattggggacagctaccgagatgtcatccaggagctgcacataggcctggacaagatgaagaaccccatcaccaggcgctggaagcacctcacggggactctgatcctggtgaattcgctggacatcttgagggcagcagccttcagccccgcagatcatgatgactttgtgatctgagtgggggccctgccctgctgctcactagagctgg

SEQ ID NO: 5639 - DNA, 1181 bp, Cricetulus griseus
tgggcacgaccagctgagcaaaaccaacctgtatattcggggactgcagccaggcactaccgaccaggaccttgtcaagctctgtcagccatatggcaagattgtctccaccaaggccatcctggacaagaccacaaacaagtgcaaaggctacggcttcgtggacttcgacagcccttcggcagcacagaaggctgtaactgcactgaaaagccagtggtgtgcaggcccaaatggcaaagcaacaggagcaagaccctacaaatttatacatctcaaacctcccactgtccatggatgagcaagagctggaggggatgctgaagccttttggtcaggttatctccacccggatccttcgagactctagtgggaccagcagaggggtcggctttgcaaggatggagtccacagagaagtgtgaagccatcatcacccactttaatggaaagtatattaagacgccccctggagtaacagcaccatctgaccccttgctttgtaaatttgctgatggcgggccaaagaaacgacagaaccaaggaaaatttgtgcaaaacggacgggcctggcccaggaatggagacatgggtggtatgggccctaacctatgaccccacacagctcttccaaatggggttctacccaaccccttacaacatcgcccacagcagggtgcttgctcaggctgctctctccccatatctcccgtctcctgtgtcttcctatcagggctcggttcttacaccagggatggaccatcctctttctctccagcctgcctccatgatgggacctcttactcagcaactgggtcacctgtcactccaacagcctgggcacgttcatgccaacagcgtgctgctatacaaggagcttacatcccccagtaccctcccgggccttcttccaatgtttctgttgaggagagcagtggccagcagaatcaagtggcagtggagacaccctcagaccatggggtctatcctttccagttcagcaagtagtgaggtttttttttttttttttttgtttttttcgagacagggtttctctgtgtagctttggaccctatcctggcacttgctctggagaccaggctggcctcaaactcacagagatccacctgcctctgcctcccgagtgctgggattaaaggcgtgcgccaccaacgcccggct

SEQ ID NO: 5640 - DNA, 1181 bp, Cricetulus griseus
  modified_base (68)..(68): a, c, t, g, unknown or other
tggtactaagcttctccaggattgcatacatcctccctgcgaacgagagctttgggcccttgcagatntcccttggaaggactgtgaaggacatattcaagttcatggttctgttcattatggtgtttctggctttcatgattggcatgttcatcctttattcttactaccttggggccaaagtcaatcctgcttttaccactgtggaagaaagtttcaagactttgttttggtccatatttggactgtctgaagtgacttctgttgttctcaaatatgatcacaaattcatagagaatattggatatgtcctttatggaatatacaatgtaactatggtggttgttttactcaacatgctaattgctatgattaatagctcataccaagaaattgaggatgacagtgatgtagaatggaagtttgcacgttcaaaacttttggttatcctactttgaatgataggaaaaacattacctccacccttcagtttgtttatttcgtcatgcggatcactaactttccaaatgcaggaggagaagacttcagaaggatctggaagtgggaatgggtaactccaagtccaggttaaacctcttcactcagtctaactcgagagtttttgaatcacacagttttaacagcattctcaatcagccaacacgctatcagcagataatgaaaagactcataaaacggtatgttttgaaagcccaagtagacaaagaaaatgatgaagtgaatgaaggtgaactgaaagaaatcaagcaagatatctccagccttcgttatgaacttttggaagacaagagccaagcaacggaagaattagccatcttgattcataaactcagtgagaaactgaaccccagtgtgctgagatgtgaatgaggcagcaacccgcagtcaagctctgactatagcacaaatgtgggcaataatattcctaagtaggaaatacttgaaaaactatggtgtaaagttctagtgttaactatgtttatcatacacaactttaaaattaagctaggtggcaatgatttccattacatgaaaatgatttcagcaattgacctcaacattgcaagcagtgacatgctattgtatttagaaacccagtattaatgtcactgacatgtttgtctatttttgtctttatattacctgtcggcctctaagag

SEQ ID NO: 5641 - DNA, 1180 bp, Cricetulus griseus
cttcaccgtgtgttcgaggtggtgggcgggcagctgaccgagtgtgaactggagctcctggccttcctgctggatgaggctcccggcgcccccggaggcctggcccgcgcccgcagcggcctggagctgcttctggagctggaacgacgcggccagtgcgacgagagcgacctgcggctgctgagccaactcctgcgcgtgctggcccgacaggacctgctgccacatctggcccgcaagcggcgccggccggtgtcccccgagcgctacagtaatggcagtgccgcctcttcttccaaaagcgcagagggcagctgccggcgtcggcgacagccaagcagttcttctcagcagagtcagtgggacacgggctcccctccaaccaaacggcagcgtcggagtcggggccgccctagcagtggtgccaggcggcggcagagagcagggcccgcagcggagcagcagcagcagcagcaccaggagctgggcaggccctcatcagaaggaaaagtgacctgtgacatccggctccgggttcgagcagagtactgtgagcacgggccagccttggagcagggtgtggcatcccggagacctcaggcgctggcccggcagctggatgtgtttgggacaagccactgctgtgctgcggtcaagggacctggggctcgtgtggtgtgtgacatcaaattctcggagctctcctacttggacgccttctggggtgactatctgagtggtgccctgctgcaggctcttcggggcgtcttcctgactgaggccctgcgggaggctgtgggccgggaagcagtccgcttgctggtcagtgtggacgaggctgactacgaggctggccggcgccgccttttgctgatggaggaggaaggggggcgtcgtgggacagaggcctcctgatcctggatctggcaggactgacccccacctccaagtctctgggccaccttcttccttggaaggagaccatcttgtcccctggacgactgtcacttcagcagctctgaggactgcatcaggtctgcaagttcctgccagcctctcctataggatgtgggctttgaggcatgaaccactcccagctgcttccatcccaaactccccgctcccaggtggattccctcagccttgggggccaggtttgctgagccccaaagcaggaagg

SEQ ID NO: 5642 - DNA, 1180 bp, Cricetulus griseus
  modified_base (1074)..(1074): a, c, t, g, unknown or other
aagaaagagagcccggcaaatcaatgtttccacggatgactcagaggtcaaggcttgccttcggagccttgggagaacctatcacactttttggagaaggccctgctgaacgaagagaaaggttaagaaatattctctcagtggttggaactgatgccttaaaaaagacaaaaaaagatgatgagaaatctaagaagtcaaaagaagagtatcagcaaacctggtaccatgaagggccaaatagcctaaaggtggccagactgtggattgctaattattcactccccagggcaatgaaacgcttggaggaggcccgtctccataaggagattcctgagacaaccagaacctcccagatgcaagagctgcataaatctctccggtctttgaataatttctgcagtcagattggagatgatcggccaatctcctattgtcactttagtccccaattctaaaatgctagccacagcttgttggagtgggctttgcaagctctggtctgtccctgactgcagcctccttcacactcttcgaggccataacacaaatgtaggagcaattgtgttccatcctaaatctactgtctcattggaccaaaaggatgtcaacttggcttcttgtgctgctgatggttctgtgaagctttggagtctggacagtgatgaaccagtggcagatattgaaggccatacggttcgtgtggctcgggtaatgtgactggcagtggtgacaacacctgcaaagtgtgggaccttcgacaacgacgttgtgtctacaccatccctgctcatcagaacttagtgaccggtgtcaagtttgagcctatccatggagacttcttgctcacaggtgcctatgataacacagccaagatctggacccacccaggctggtccccattgaagactttggctggtcatgagggcaaagtaatgggcctagacatttcttctgatgggcaactcatagccacttgctcatatgacaggaccttcaagctctggatggcagagtaggcaagaccatggaaggacttggaccttgtgctctcaccgaggagccatttctcanagaaaagaatagtgttgtgttctatcatgttttcttgtccaaaataaccaatgtgtaggattggattttcactgagtttgagaccagcctggtctacagagcaagt

SEQ ID NO: 5643 - DNA, 1180 bp, Cricetulus griseus
tggcggcggctccgctgctgctgctgctgctgctcgtgcccgtgccgctgctgccgctgctggcccaggggcctgggggcgcgctgggaaacaggcatgcggtatattggaacagctccaaccagcaccttcggcgagagggctacacggtgcaggtgaacgtgaacgactatctcgatatttactgtccgcactacaacagctcagggcctggcggcggggcggagcagtacgtgctgtacatggtgaacctgagcggctaccgcacctgcaacgccagccaaggctccaagcgttgggaatgcaaccggcagcatgcctcgcacagccccatcaagttctccgagaagttccagcgctacagcgccttctcgctgggatatgaattccatgccggccaagaatactactatatctccacgcccactcacaacctgcactggaagtgtctgaggatgaaggtgttcgtctgctgcgcctccacatcgcactccggggagaagccggtcccccactctcccccagttcaccatgggccccaatgtgaagatcaacgtgttggaagactttgagggagagagcccccaggtgcccaagcttgagaagagcatcagcggaaccagccccaagcgggaacacctgcctctggccgtgggcatcgccttcttcctcatgacactcttggcctcctagctctgctcttgctatgacagagagaggtggggcagggctgagaaggagcagggagtcagctgtggggcctacatccttctttccatggttgggagtggggcctgcacggtacatctgtctgtctatctgtacctgccctctttgcccactctctctagggcaggcaccgcggtggatcaggcacagggacagccataggtcccaggtggcctgtggctttggtaatgtttggtaccaaacctgaggcctttaaaaggcagcgctcaggactccctgacccctccctgaccccggtgccctccctctttgtccccccaagaggcacatatgccccagagagaccacatgaagccgggaggtgccccctgtcactctcctcggggcagaacatggggaaagggacgtagatgggtgatgggcggagcctcaggctacccccttcccctgttttacagcaataagcatctcctctccctccactcccaca

SEQ ID NO: 5644 - DNA, 1179 bp, Cricetulus griseus
cccagcacctggtctgacagcctatgtggtcaaggtcttctctctggctgccaacctcatcgccatcgactctcaggtcctttgtggggctgttaaatggctgattctggagaaaacagaagccagacggtgtctttcaggaggatggacccgtgattcaccaagaaatgattggtggaaccccggaacgccaaagaggctgatgtatccctcacagccttcgtcctcatcgcactgcaggaagccagagaaatctgtgaggggcagatcaatagtcttcccgggagcattaacaaggcaggggagtacatcgaagccagttaccaaaacgaggccttctctctaacagccaaaggaaaaggccaaggcacagacctggaactgctgagcagtggagtggacagatacatctccaagtatgagatgaccaaagcctactcctaccaggagcaccctcatcatctacctagaaaagatctcacactcagaagaagaatgtctgtccttcaaagtccaccagttctttaatgtgggactgatccagcccggctctgtgaaggtctactcctattacaacctggatgaatcatgcacccagttttaccatctggacaaggcggacggaatggctgagcaagctctgccacaatgaaatgtgccggtgtgccgaggagaactgcttcatgcatcaggcacaggagaaggtcagcctgaatgagcgactggaaaaggcttgtgagcccggagtggactacgtgtacaagaccaagctagtcacgacggagctgtctgatgattttgacgagtacatcatgaccatcgagcaggtcatcaagtcaggctcagatgaggtgcaggcagggcaggaacgcaggttcatcagccacatcaagtgcagagaagccctgaagctgcagaaagggaagcattacctcatttggggcctgtcctccgacctctggggagaaaagcccaacaccagctacatcatcgggaaggacacatgggtggagctctggcccgaggctgaagaatgccaggatgcagagaaccagaaacagtgcgagaacctcggggcgttcacagagaccatggtggtctttggcccgccccaactcgaaacacacgcccacgccctccaataaagcttcagctgtattcactctacaaaaaaaaaaa

SEQ ID NO: 5645 - DNA, 1179 bp, Cricetulus griseus
aaaggtgctggtcacaggcggagctggctacattggcagccacacggtactggagctgctggaggcaggctacgcccctgtggtcatcgacaacttccataatgccattcgtggaggggattccatgcctgagagcctgcggcgggtccaggaactgacaggccgctctgtggagtttgaggagatggacatcttggaccaggcagcgctacagcacctctttaagaagcacagctttaaggctgtcatccactttgctgggctcaaggctgtgggcgagtcggtgcagaagcctctggattattatagagttaacctaacagggaccatccagcttctggagatcatgagggcccacggggtgaagaatctcgtgttcagcagctcagccaccgtgtatgggaatccccagtacctgcctctggatgaggcccaccccaccgggggttgtaccaacccctatggaaagtccaagttcttcatcgaggagatggtccgggacctgtgccgggcagattcggcctggaacgcagtgctgctacgctacttcaatcccacgggtgcccacgcctctggccgcatcggcgaggatccccagggcgtccccaacaacctcatgccctatgtctcccaggtggcaattgggcgacgagaggccctgaatgtctttggtggtgactatgatacagaggatggcacaggtgtaagggattacattcatgtggtggatctggcgaagggccacatcgcagccttgaagaagctgaaggagcaatgtggttgccggatctacaacctgggcacaggcacaggctactctgtcctgcagatggtccaagcaatggagaaggcttcagggaagaagatcccatacaaggtggtggcacggcgggaaggtgacgtggcagcctgttatgccaaccccagcctggcccatgaggagctgggctggacagcagccttggggctggacaggatgtgtgaagatctatggcgctggcagaagcagaacccttcaggctttggagcacaggcctaaagacctccttacgaaggaccaaaaaggaagaggagcagttgcctgctttccagcatccacagaaccctgtaccctcatgctctggggccaagctgacggccaccctacctcaacagctcagtcctccaggcaggagacct

SEQ ID NO: 5646 - DNA, 1179 bp, Cricetulus griseus
cttttttttttttttttttttttttttagttattcacacatatatatatataatagatacatggaataaataactgagaatttagccattttagggcaacaaggttgaagattaaacccttgtgccaactcttgtaacaaacactagcagctgtctgcagcattatcacgggctaagtacctttaccttgtttacagatgtgttggcaccatagcttctggccatggagcattggttctccctttttactatttatagggttcctttttaatcacagtccttttcataaagacaaactgtagaaataaaatgtgtccagctgtcttctaagccctcttgattgctcacgtggcaatagaattctaatacctgtaataaatgggcctggaactaggctagtaataaaaattattatgaaggcctttattgcaaaaaaaaggagggggaatgttaaagatgttataagcaatttggaagggaaaaacctaaggtgcttttcaaaagaataactaaaattgttctgggctaaaacagcaatactgtgttcttcatccgttcaataagaacagtggaactattgtttcactaataaattgagtaaacttatggtgaaaacagtgtaatatgttttaatgagccactatggaagagatatgctcattactaagacaaaatgcagaaaaatcctttcacttctatgcataaactattagctgtaactgctgccgttgtgttttcctataggtctacactatagatcagtctagaagctgggttaaaagttatcctctcctttccttcgggaagaccaatgagcacaatggtattagtcacttaacttttctgatgaataataaatgcaataactgcagctcatggatgagaaactgtctgtctaaatactctgaagcttttaaattctgtagttatatcaatgaccagttacattgatgtaagatttttcgtaccttcctactactttgagaattgatggttttaataccaaatgctgctgattaaatgaaaaaacattggtccgttgcactgaggtttctgctgtcaaagaaagataatttgttaatgataaccaagctttaaatgcaggggtggttacatttctgagtaaaatttgtgtacttatgggaaaataaaggcatgcttaaaattaaaaaaaaaaaa

SEQ ID NO: 5647 - DNA, 1178 bp, Cricetulus griseus
ggaattcccgggaggcggaagcgctggagctcaccgcagagcccagcgtcgggcgggcgaccacagggggttccaccgaggtggctaagggccatggccggggtcgcgtgcttggggaaaagcgcggacgtcgacgaatggtgcgacagcggcctaggctccctgggtcccgacgcggcggctcccggaggaccagggctgggcgcagagctgggcccggagttgtcgtgggcgcccctggtctttggctacgtcactgaggatggggacacggccctgcacttggccgtgatacatcagcatgagcccttcctggatttcctcttgggcttctccgccggcactgagtacctggacctgcagaatgacctaggccaaacagccttgcacctagcagccatcctgggggaggcatccacggtagagaagttgtatgcagctggcgccggagtgttggtggctgagcgagggggccacaccgctctgcacttggcctgccgggtgagggcacacacgtgcgcatgcgcgctgctccagccccgccccagacgcccaagggatgtctcagatacctacctcactcagagccaggacaataccacagacaccggccccacccctgttgctgtgaaccctcaacccaacccagagatcgaagaggatccgagtgatgaagactggaagctgcagctagaagctgaaaactatgagggccacaccccactccatgtagctgtcatccacaaagatgcagagatggtccggctgctcagggatgctggagctgacctcaataaaccggagcccacgtgtggccggacccctctgcacctggcggtagaagcccaggcagccaacgtactggagcttcttctgaaggctggtgctgaccctaccgcccgcatgtatgggggccgcaccccacttggcagtgctctgctccggcccaatcccatccttgcccgcctcctccgtgcacatggagcccctgaacctgaggatgaggatgataagctcggcccttgcagcagcagcagcagcgatagtgacagtgacggcagagatgagggcgatgaatatgacgacattgtggtccacagtggcaggagccaaaactggctacctccctccccggcacccaaacctcttcctgatgactccaaccccgcctgacttaa

SEQ ID NO: 5648 - DNA, 1178 bp, Cricetulus griseus
catgaccaaggtggagttcgagaccagcgaggaggtggacgtgacccccacgttcgacaccatgggcctgcgggaggacctgctgcgcggcatctacgcctacggttttgagaaaccttcagcgatccagcagcgtgctatcaagcagataattaaggggagagatgtcattgcacagtctcagtctggcacaggcaagacggccaccttcagcatttcagtcctccagtgcttggatatccaggttcgagaaacccaagctttgatcttggctccaacaagagagttagctgtacagattcagaagggtctgcttgctctgggggactacatgaatgtccagtgccatgcctgcatcgggggcaccaatgttggagaggacattcggaagctggactatgggcagcatgttgtggcaggcacaccagggcgtgtctttgatatgattcgccgtagaagtttaaggacccgggctatcaagatgttggttttggatgaggctgatgaaatgttgaacaaaggtttcaaggagcagatctacgatgtgtacaggtacctgccacctgccacccaggtggttctcatcagtgccacattgcctcatgagatcctggagatgaccaacaaattcatgactgaccccatccgcatcttggtgaagcgtgatgagttgactctggaaggcatcaagcagttctttgtggcagtggagagagaggagtggaagtttgacactctgtgtgatctctacgacacgctgaccatcacccaggctgtcatcttctgcaacaccaagaggaaggttgactggctgacagagaaaatgagagaagcgaacttcaccgtgtcatccatgcacggagacatgccccagaaagagcgagagtccatcatgaaggagttccggtcgggtgccagccgagtgctcatttccacagatgtctgggcccgcggcctggatgtccctcaggtgtccctcatcattaactatgacctgcccaacaacagagaactgtacattcacagaatcgggagatcagggcgatatggccgcaaaggtgtggccatcaattttgtgaagaatgatgacatccgaatcctccgggacatagagcagtactactccacccagatagacgagatgcccatgaatgtggctgacctgatctgaagcgtgg

SEQ ID NO: 5649 - DNA, 1178 bp, Cricetulus griseus
cttcacgaaaggacttattggtccaatgtctgaccattcggatgtgagcctcccaccccaagaccgggtgaggattctgtcccaacttgggagcgcagttgaattaaatgaagacattccgccccgtcgctactttcgttctggtgttgagattatccgaatggcatctgtttactctgaagaaggcaacattgaacatgcctttatcctctacaacaagtacatcacgctgttcattgaaaaacttccaaaaacaccgagactacaaatcagccatcattcctgagaagaaagatgcggtcaagaaattaaagaatgttgctttaccctaaagcagaagaacttaagacctcacccatgcagactgcagaccgtaacagaaccgtgaggccagctaagccacctgtggtagacagatccttgaaacctggagcactaagcatcatagaaaatgttcccaccattgaaggcttacgccacattgtagtgccccgcaatttgtgctcggaatttctccagcttgccagtgccaatactgccaaaggcatcgaaacttgtggagtcctctgtgggaaactgatgagaaatgaattcacaatcacgcatgttctcatccccagacaaaatggggggcctgattattgtcatacagagaatgaagaagaaattttctttatgcaggatgatcttggactactcactcttggctggatccatactcacccaactcaaacggcctttctgtccagtgtggatctgcacactcactgctcctatcaaatgatgttaccagagtccatagcaattgtctgctcccccaagttccaggaaactggattctttaagttaactgactatggccttcaagagatttcaacctgccgacagaaaggctttcaccctcacggcagagacccccctctgttctgcgactgcagtcatgtaactgtcaaggacaggattgtgaccatcacagaccttcggtaaatctcaatcacaatccaaggagatggcgcattgggtaaaggcacttgcctccaagcccaacgcccaagttcaattcctgggacccacatgatggaaggagagcatcaactgaccccaagttgtcctctgacctccacttgtgcactgtggtatgtgcgctcacacgtgcgcgcgcgcgcacacacacacac

SEQ ID NO: 5650 - DNA, 1178 bp, Cricetulus griseus
aagctcaagaaagtgctggaaaaattgaggttgaaacgcaaggagatctcggtggcggccgaggtggtgaatggagtcgtggggcaactgctgtcaagaatgcagaaccgtgagtcggagttcaaaggcgtccagcggctgaacagtggcagctactatgagcgtgtgaagatttctgctcctaatgaatttgatgtcatgtttaaactgaaagtccccagaattcagctacaagaatgttaccacaatggagttttttatcttgtgaagctcagaaacattccaagaggaaatccactgggtcattttttggaggtatgaaatattatcagcttccaagatgttgtcaaagtttagggaaatcattaaagaagaagttgaaaaaatcaaagatcgagatgtcagtgtggaggaagaaaaacaggaagccctgctgtaacacttcttatcagaaaccctgaagaaatatctgtggatataattctggctttggagtcaaagggcagctggcctgttagtaccaaagaaggactacccatcaaaaactggcttggcacaaaagttacaaacaagcgaagacgaaagccattttatcttgtacccaagaatgcaaaagttgaaaatggttttcaaggccagacatggcgcctctctttctctcacactgaaaaatacattttaaaaaatcatggaaaagagaaaacatgttgtgaatctactggagtcaaatgttgcaggaaagataactttaaaattaatgaaatacctcttcgagcagttgaaaaaagagcatgaagaactagatgtattctcttcttaccacgtgaagactgcaatcctccacatgtgggctgagaacccacaggacagtcagtgggaccccaagcacctaagcacctgctttgatgagtttttgacattctttgttgagtgcctcaggacagagaaactgatgcattactttattccaaagttcaatctattctctcaagagctaattgaccaaaacagtaaagaatttctgtggaagagaattgaatatgaaagaaacaatggatttccaatttttaacaagttttgaaattatgtatgtttgtatgtgttataatgtgttcttgtgggcacgacacacacacacacacactgataaaataagtcaaaaaaaaaaaaaaaaaaaa

SEQ ID NO: 5651 - DNA, 1178 bp, Cricetulus griseus
  modified_base (1147)..(1147): a, c, t, g, unknown or other
ctggccctgaggatgctaaaaaggacccattgggcctgaggcgagtagagcctgcccccagggtgcctgttacccctcggagaatgagtgaccctcctctaggcaatgtacccaccatgcccagcctccggaaaccttgcttccgagacaatgtgaaccccagcccagagccctggacccctagccatgggactagctgtgcctccagctctgccaccatggccattgccacctctaggaactgtgacaaactcaagtccttccacctgtcttcccgagggccgcccacatctgagcccccacccgtgcctgctaataagcccaaattcctgaagatactgaagaagcctccccaagggaggcagccaagcctggactctttgtaccccctgtggctcccaggcctcctgtgcagaagttacctattcctgaggctacagctcggcctgcagtgttacctagaccagaaaagactcctcttcctcacctccagcgatcaccccccgatggacagagtttcaggagcttctcctttgaaaagtcccgacagccctcacaggctggcactggcgaggaggactcagatgaggactatgagaaggtgccgctgcctaactcagtgtttgtcaacaccacagaatcctgtgaggtagaaaggttgttcaaagctacaaaaccccgtggagagcctcaggatgggctgtattgcattcggaactcctccaccaagtcagggaaggttaaatcagagataacctttgtctcaattggtccagggtttgattgacactgaggggacaacaggctctactgagcatcaccagtgtccaggtagagagctactgacagcagccctactgggtggtctttagtcttctagggcccaggctgctaagtgaactgacttggggacatagctaaataatagatcaggatccatctggatcagtcagtcttggctggagcccgaactccaaagccataattagcagttttgagttcctactgtgtgactggcgtggtactagagttggttgttgcctgtgagcagcctctagtcgggtgtggctgagcctagtctagagcaggtcagtgagtatgaggtgctggtgctggtgcagtgttctgggaagctgtgcatgaaggngctagggaggttggaatccgaggtgggtggg

SEQ ID NO: 5652 - DNA, 1178 bp, Cricetulus griseus
tcgccatgtctgggtcccctgtaaaacgccagaggatggagtccgctctggaccagctcaagcagttcaccaccgtggtggccgacacgggtgacttcaatgccattgatgagtacaagccccaggatgccaccaccaacccatccttgatcctggctgcagcccagatgcctgcctaccaagagctggtggaagaggccattgcctatggcaagaagctgggtgggccacaagaggaacagattaaaaatgctattgataaactttttgtgctgtttggagcagaaatactaaagaagattccaggccgtgtgtccacagaagtggatgcaaggctttcctttgataaggatgcaatggtagcccgagccaaacgcctcattgagctttacaaagaagctgggatcagcaaggacagaattctcatcaagttgtcctcaacctgggaaggaattcaagctggaaaggagctggaggagcagcatggcatccattgcaacatgacgctgcttttctccttcgcccaggctgtggcctgtgctgaggcgggtgtgacgctcatctctccctttgtggggcgcatccttgactggcatgtggcaaacacagacaagaagtcctatgaaccccaggaggaccctggggtaaagagtgtcaccaaaatctacaactactacaagaagtttggctataaaaccattgtcatgggcgcctccttccgtaacactggtgagatcaaagcactggcaggctgcgatttcctcaccatctcacccaagctcctgggggagctgctcaaggataacaccaagttggcacctgtgctttccatcaaagcggcccagaccagtgacttggagaagatacatctggacgagaaggccttccgttggctgcacaatgaggaccaaatggctgtggagaagctctccgatgggatccgaaagtttgctgctgatgccataaagttagaacggatgctcacggaacgaatgttcagcgctgagaatggaaagtaggaggctggaccccagacctgcactgcctttgagctggctcctaattgcacatggcttgtgatgaatcttgcattttttagtgattggagagggatgaatcataggtttctgattttatgtgaaattttgtctaattcattaaagcagtcgcttttccta

SEQ ID NO: 5653 - DNA, 1178 bp, Cricetulus griseus
  modified_base (1142)..(1142): a, c, t, g, unknown or other
  modified_base (1165)..(1165): a, c, t, g, unknown or other
agatatggaggaaaatttaaaaggtgagagtgaagaagacagggaaggagacagaaacagtgaagatgacggtgtggtgatgaccttctccagtgtcaaagtctctgaggaagtggagaaaggaagagctgtgaagaatcagatagcgttgtgggaccagctcttggaaggaaggatcaaactacagaaagctctgttgactaccaatcagttgcctcaaccagatgtttttccagtcttcaaggacaaaggtggcccagagtttaccagtgctctaaaaaatagtcacaaagcacttaaagcattgttaaggtcattggtggatcttcaggatgagttgcttttccagtacccagacactagatacctagtaaatgggatgaaacccaaaacggagagtgaggagatttctagtgaagatgatgagccagtagcagagaagaagaagcaaagaaaagccccaccaaagaggaagctagagatggagaactatcccagcttcatggcaaagcgctttgctgattttactgtctacaggaaccgtacactgcagaagtggcatgataaaaccaagcttgcttctggaaaactgggcaagggtttcagtgcctttgaacgctctatattgactcagattgatcacattctgatggacaaagaaagattgcttcgaaggacacaaaccaagcgctccatctaccaaattcttggcaaacctgagccagcccctgtgcctgtagcagagagtttgccaggagaaccggagatcgttcctgaagttcctgccaatgctcacctgaaggacttggatgaagaaatatttgatgatgatgacttctaccaccagctccttcgagaactcatagagcggaagaccagctccttggatccaaatgatcaggttgccatgggaaggcagtggcttgcaatccagaaattacgaagcaagatccgaaagaaggtagatagaaaagccagcaaaggaaggaagcttcggtttcatgtcctcagcaagcttctgagtttcatggcacctattgaccacactgcaatgaatgatgatgccaggaccgagttgtatcgatctcttttcggccagctcaaccctcccgatacagaccatgggaattaacttttttttnttttaattctgttaaaaaaaaanaaaaaaaaaaaaa

SEQ ID NO: 5654 - DNA, 1177 bp, Cricetulus griseus
cgccataatagaaatgtttgaatttattagagtggaagatataaaatcattaactgcccatgtaattgaaaattattggaaagcactagaagatgtagattatgtgcagacttttaaaggattaaaattgagattttgaacaacaaagagaaaggcaagacaaccccaaacttgacagcatgcggtccatcttgaggaatcatcgatatcgacgggatgccagaactcttgaagatgaggaagagatgtggttcaacacagatgaagatgacatggaagatggagaagctgtggtgtctccatctgacaaaactaagaatgatgatgatatcatggatccaataagtaaattcatggaaaggaagaaattgaaagaaagtgaagaaaaggaggtgcttctgaaaactaacctttctggacgacagagcccaagtttcaaactctccctgtccagtgggacaaagactaacctcagcagccagtcgtcggcagcaagcctgcctggctctccagggtcacctgggtcccccgggctctccaggctctcctggatccgtccctaagagtacatctcagacggcagctattaccacaaagggaggactcgtgggtctggtagattatcccgatgatgatgaagatgatgatgaggatgaagacaaggaagactcgctaccactgtcaaagaaagcaaaatttgagtcctaataatagcaactacgtgtgatcagtacctgttgacaaaactggttcttgacccctcccccctacaaaatccacatcaaagcgcagtggtctcttgtgagtgactgacaaaaatcagcagcacaccggacttctgctcatcaagtgccaattcaatggagcaggcggaggggatgctgtgcagttagggggaagacatagcctgtgagctctccagcttggaccacacattgcccttttctcagggaaggaaatggaaataaaagccaacagggcaggggttttgtcagtggaactctggattgactggtcagttgctacaatcagaacttgctttcttggaccacgtttgagacttagaagaatgggtctttctgccatagttcctcactagtagagaatgccagcagtttcttgtataaagagacctgacctttaaaatcgtacattctagaactattttagtcaagct

SEQ ID NO: 5655 - DNA, 1177 bp, Cricetulus griseus
tcctgaatctctttctgtcttcacagccaccgacggaggagaccgagatggatgctgagcttgagaggaaatttggtgtggtagtggttggtgttggcagagctggcaccgtgaggataagggacttgagggacccacactcgtcagcattcctgaacctgattggttttgtgtccagacgagagctggggagccttgatggtgtacagcagatttctttggaagatgctctctgcagccaagagattggggttgcctacatctgcagtgagagttccagccatgaagactatataaggcagtttcttcaggctgggaagcatgtccttgtggaataccccatgacactgtcttttacagcggcccaggacctgtgggagctagctgcacagaaagggaaagtcctgcatgaggagcatgtggaactcttgatggaagaatttgcattcctgaaacaagaagtgatggggaaagagctgctgaaaggatctcttcacttcacagctagcccactggaagaagagaagtttggcttccctgcattcagtggcatttctcgcctgacctggctggtctgcctctttggggagctttctcttatttctgccaccttggaagaccgaaaagaagatcagtatctgaaaatgactgtgcagctcgagacccagaacaagggtctgttatgctggattgaagagaaagggcccggtttaaaaagaaacagatatttaagtttccaattcaaatctggatccctggagaatgtgccaaatgtaggagtcaataagaacatttttctgaaagatcaggatatatttattcagaagctcttgggccaggtctctgcagaggacctggctgctgagaagaagcgcatcttgcactgcctgggcctggctgaagacatccagaagctctgccgccctaagaagtgaggagggagctaaacagaaaaaaaaaaaaaaaaaaaaaaaaaaaaaaaaaaaaaaaaaaaaaaaaaaaaaaaaaaaaaaaaaaaaaaaaaaaaaaaaaaaaaaaaaaaaaaaaaaaaaaaaaaaaaaaaaaaaaaaaaaaaaaaaaaaaaaaaaaaaaaaaaaaaaaaaaaaaaaaaaaaaaaaaaaaaaaaaaaaaaaaaaaaaaaaaaaaaaaaaaaaaaaaaaaaaaaaaaaaaaaaaaa

SEQ ID NO: 5656 - DNA, 1176 bp, Cricetulus griseus
cgcgcgccatggggacctggcggcgtcttttgctctctggaggggtgtcactctggggtagcggcggggccgctgtcccgcccctggggcgccgagccttgggttgtgggcgtcagttattaggcgctgagggtgagtccttgaaacaaagaagaacacaaatcatgtcccgaggacttcctaaacagaaacccatagaaggtgttagagaagttattgttgtggcctctggaaagggtggagttggaaagtctacaacagcagtgaaccttgctcttgcactggcagcgaacgattcgtccaaggcggttggcttgttagatgtagatgtgtatggtccttccattccaaagatgatgaacctgaaaggaaatccagaattatcaccaaacaacctaatgaggcctcttttgaattatggtattgcttgtatgtctatgggatttttggttgaagagactgctccagttgtttggagaggccttatggtaatgtcagccattgagaaactattgagacaggttgattggggtcaactggactatttagttgttgacatgccaccaggaacaggagacgtgcagttatcagtttcacagaatatccctatttcaggtgctgtgattgtctctacacctcaggacattgcgctgatggatgcacacaagggtgctgagatgtttcgaaaggtccacgtgccggttcttggacttgtccaaaacatgagtgtcttccagtgtccaaaatgtaaacacaaaacccatatttttggtgctgatggtgcaagaaaattagcacagacccttgatcttgatgttctaggagatgtccccttacacctcagtataagggaagcttcagataagggtcagcctgtggtgttttcacagcctgaaagtgaggaggccaaagcttacctgcacattgcttcagaagtggtaagaagattgcaaccacctccagaatgatgcccaagtgccctggaaattgtcctggtatttgataatcacagactgtcaaaagtgagcattgtggtagtgtgtggaacccacgaaaatgatgacagtcatgattattttctttcatttttaaagaaatgtctcattttcagatttgatttgacagcccatgacacacaaataaagtttgtatgtatctaaaaaaaaaaaaaaaaaa

SEQ ID NO: 5657 - DNA, 1176 bp, Cricetulus griseus
  modified_base (869)..(869): a, c, t, g, unknown or other
  modified_base (1162)..(1162): a, c, t, g, unknown or other
gggatgaatgattccatgcaagcatgtcttttgctatgactgtgctattttacatgaaaaaaagggagataagatgtgcccaggctgtagtgatcctgtgcagcggattgagcagtgtacacgaggttctctcttcatgtgtagcattgttcaaggttgcaagagaacatacctgtctcagagagacttacaagctcacatcaaccatcgccatatgagagctggaaagcctgttacccgtgcttcacttgagaatgttcatcctactattgccccaccaccaactgacatccccgatcggttcatcatgccaccagacaagcatcacatgagccatattcctccaaagcagcacatcctgatgccaccacctcctttgcagcacgtgccccatgagcactataatcagccacatgaggatattcgtgctcctccagcagaattgtctatggctccacctccacctcgttcggtcagtcaggaaacctttcgtatttcaacaagaaagcacagcaatttaataactgtccctattcaggatgactcaagttcaggtgctagagaaccgccacctcctgccccagcacctgctcaccatcaccctgactatcagggccagccagtggtgtcccaccctcaccatattatgcctccacagcagcactacgcaacgcccccacctcctccaccaccaataagccatccaatgccacaccctccccaggctgcagggactcctcacttggtgtatagccaagctccacctcaaccaatgacctctgctccaccaccaactaacccctccccctggaccatatgattgcccagatgccaccttatatgaatcatcctcctccacggaccccccncctcaacatggacggtccacctgtaacctcgccaccccccctcaccaaacacaaagtcttgtccccttaaaatagttttaaatcttgaccttaggattgctttcaaatactatagtgcagatacgtggctcggttgagcacaaatgtatcttagcaactgttactttggtgtggcaaattgacccagaaatgaccatttgtaaaaaatttgaaattttttcactgttccattttcaaaaaatactgcttttattaaacccaatgtttagttttaaaatagttgtaaaaaaaanaaaaaaaaaaaaaa

SEQ ID NO: 5658 - DNA, 1176 bp, Cricetulus griseus
  modified_base (1126)..(1126): a, c, t, g, unknown or other
catgtcctcgcccggggatccgcatcccgcggctggggagccgccgggagctgggccgcgcttgcgggctgcgggaggggcgctgctgctttgcgggctggcggtgctgctgggctgggtctggctgcggcggcagcgcgcatgcggcatccctccgggggcccgcaccccggcccctcgtggggaacatcgggcacttgctggtgccgcgcttcctgcggcggcagttctggctgggcgcggacggccagaaggacacggacgccgtggccacgcacgtgcgcctggccaggctggccggggtctacggcaatgtcttcagcttattcatcggccaccgcctggtggtggtcctcagcgacttccacagcgtgcgcgaggcgctcgtgcagcaggccgaagtgttcagtgaccgtccgcgcatgccgctcatcctccatcatgaccaaggagaaggatagacatgtaccttctgctatgtggaggcggagaggagagccagctagtctagtctaccagcttcagtgaggactacctgttctacatcattggggacctcttcattgctggcactgacaccacaaccaactctttgctttggtgcctgctgtatatgtcactgaaccctgacgtgcaaaaaaaagttcatgaagaaattgaaagggtcattggttgtgaccgggttccttccctcacggacaaggcccagatgccatacacagaagccaccatcatggaggtgcagaggctatccatggcagtgccacttgccattcctcatatgacttcggagaaaacagtcctccaaggatacactattcctaaaggcacagtggtcatccccaacttgtggtcggtacacagagacccagccatttgggagaagccagatgacttctgtcctgatcggtttctggatgaccagggacaactcttgaaaaagaaacttttattccttttgggatagggaagcgggtgtgtatgggagagcagctggcaaagatggaattattcctgatgtttgtgagcctgatgcagagtttcaccttcgctttacccaaaggttctgagaagcccatcatgactgggagatttgggtctcacactagccccgcatccatttaangtaactgtctcaaagagatgaagatgccactgaggagagaggagggggca

SEQ ID NO: 5659 - DNA, 1176 bp, Cricetulus griseus
  modified_base (910)..(910): a, c, t, g, unknown or other
gactgccctttcccaagatgtcttcgaagattggttcgagacgctggatgctgcagctcatcatgcagctgggttcggtgctgctcacgcgctgccccttttggggttgcttcagccagctcatgttgtacgctgaaagggccgaggcgcgtcggaagcccgacatcccagtgccttacctgtatttcgacatggcagcagctgtgttgtgtgctagcttcatgtccttcggagtgaaacggcgctggtttgcgttgggcgccgcgctccagctagccattagcacctacgccgcttacatcggaggctacgtccattacggggactggctaaaggtccgaatgtactcgcgcacagttgccatcattggtggctttctggtgctggccagtggggccggggagctataccgtcggaaaccccgaagccgttctctgcagtccactggccaggtgttcctgggcatctacctcatttgtgtggcctactcgctgcagcacagcaaggaagaccggctggcatacctgaaccatcttccaggaggggagctgatggtccagatgttcttcgtgctttacggggtcctggccctggccttcctctcaggttactacgtgaccctggctgcccagatcctggctgtgttgttgcccccggtcatgctgctcattgatggcaatgtctcctattggcacaacactcgacgtgtcgagttctggaaccagatgaagttacttggcgagagtgtgggcatctttggagctgctgtcatcttggctactgatggctgagttctgcagggagaggctgatttgggcacagggggccactgagggccaccttaccttcctccttgctggcccagttgctgtttatttatgcttcttgatttgtttgtttaccttttttnttttgggaagatggaagccctcgtgctgtaaccctcgtagggttgttgttgtcttcttactgttttaggggagggctgaggccagctgcctctcccccatgtgtccagggagggcggagtccctgcgaaaggagtaaggcagaggtggggtgcaggtattaggagtgggggacagaggaagatctggaaatagcaaatgtgaaaattccttttggaacctggcagatgcagctaaacagtgcttttcagactaggtgtgtgtatgt

SEQ ID NO: 5660 - DNA, 1176 bp, Cricetulus griseus
gactgcctgaggggcctaaggataactttcagaattgtggtgattctcacagaggaccttgagattctgcattcaatgtcaaatgtcactggatttgttttgagactcttgccctagaggatgaccaaagggctcctggtgacctatgccctttgggctttggggggtcctgttggactccaccacctgtatctgggaagggacagccatgccctgctctggatgcttaccctaggaggtggtgggttgggctggctgtgggagttctggaagctcccaggctttgtcgctcaagccaacagggcccaggctcagaaacagaggccaggagaggggataccacctctgagtctccttcgctttgctgcccagaccacagtgggtatctattttggtcttgtggctctgatcagcctctcttccatggccaacttctacattgtgggcctcccactggcagttggcttaggggtcttgctggtagctactgttggcaaccagacctcagactttaagaacacattaggagcagcctttctcatgtcccctgtgttctatggccgccccatagccatcctgcccatcagtttggctgccagcattacagcccagaagcatcggagatacaaagcttcagcagagtctgagacgattagcctgaggctctaccggctaggtttggcttacctcgccttcacaggcccgctggcatatagtgtcctgtgcaacacagctgccaccctgagctacgtggcggaaacccttggctccttcttgagttggttcagctttttccctcttcttggccgcctcttggagtctgtcttccttctgccttgccggatcttgtggctactggttggggatcctggcttcaccagtagacagttccaggagtgggaaaagctctatgaatttgttgagagttttcaggatgagaaacgccagctggcttaccaggttttgggccttccagaaggggcaaccaatgaagaaatacatcggacttaccgagacctggtgaaggtctggcacccagaccacaatcggcaccaaagagaagaggcccagaggcgcttcctggagatccaggctgcatatgaattcttgagtcagcccaagaaacccagagcatcttggaggtgagaagtaacacctcgaggatggactcaatct

SEQ ID NO: 5661 - DNA, 1175 bp, Cricetulus griseus
ggtgggactgtagcagccatgagcctctgggtggacaaataccggccgtgctccctcgcccggctggactatcacaaggaacaggcggcgcagctgcgcaacctggtgcagtgtggtgacttttcctcacctcctagtatatggaccatcaggtgctggaaaaaagcaagaattatgtgtatcctacgagaactttatggtgtcggggtggaaaagttgaggattgaacatcagactattacaactccatctaaaaaaaaattgaaatcagcaccattgccagtaactaccaccttgaagttaatcccagtgatgccggaaacagtgaccgggtcataattcaggagatgctgaagacagtggcacagtcacagcagctggaaaccagttcacaaagagacttcaaagtggtattattgacagaggtggacaaactcacaaaggatgctcagcatgccttgcgcagaaccatggagaagtacatgtccacctgcaggctgatcttgtgctgtaattccacttctaaggtgatacccccgatccgcagccggtgcctggcagttcgagtgcctgctcccagcattgaagatatttgcaatgtattatccactgtctgcaagaaggagggtctggctcttccttcgaagctggctcacaggctggcagagaagtcctgcagaaacctcaggaaagccttactcatgtgtgaagcttgcagagtgcagcaatacccttttactgaagaccaagaaatccccgaaacagactgggaggtgtatctgagggagactgcaaatgctattgtcagtcagcagacgccacagaggcttcttgaagttcgagggaggctctatgagctcctaactcactgtattcctcctgagataataatgaagggcctgctctccgagctcctacataactgtgatgggcagctggaaaggggaggtggcacagatggcagcctattatgaacatcgactgcagctgggcagcaaagccatttatcacttggaggcatttgtggcttaagtttatggctactttataagaaattcatggagatggactggaaggcatgattttctgactcagttagcggctcctccaagtacctcagaagttgtgttcatgcagatttacactggggctgtgggtataataaactagcttta

SEQ ID NO: 5662 - DNA, 1175 bp, Cricetulus griseus
aggacacagacttgagccggctgtacaccgcaacatccctgatgcagattgatgacaatgtgatgagaaagttccatggctataactccctgaaggaatattatgaggaagaaagctgcatgagatacctgcacaggatatatgtgcctcttatgctggtgaatgcagctgacgaccccttggtgcacgaaagccttctaaacattccaaagtctctctcagagaaacgggagaatgtcatgtttgtgctgcctctgcacgggggccacctgggcttcttcgagggctccgtgctgttccctgagccactgacatggatggataagctcgtggtggaatatgccaatgccatttgccaatgggaaaggaataagtcccagtgctcagacacggagcaggtggaggctgagttagaatgaggcctctggactctggcgtgttcccgtagccctcctctggaacccacggctgtttcaggtctctcctatccctcacgtgacctggatctgacctcataccatcagtgggggccacccatcatgcaacctgtctcaagtaggcagctctccctgggagctccaggctatttttgttgtcttagttatgggttttcttccattacattgttagccatggtgacaagctacaagattcttacctttctgtccagtttcagtatctgattgctttcatgccagttaaatctagttttcctactaaggaacacatctgaacttcagtttcgctttgccaatcaaaaggcctttccctgataaccatgaaggatgtatgtcactttgtgacagttgtatgtgcccttgtagagtccccaacaagaagtcagcatctctgaccaatgctgaagaaatgactcagctttgagagcctgggagcctggggcctcctgggcctgagttttgcctccaaaacaaaggagattccctgagtctaaagccaattccttctcaccatctcccaaagaccaccttcctccccaccttgctgctgctgagagttgcatgggacacttgtctaaaaattcagcctcccagactcccctcccctgggacgatgctgacttggtgggtttgggaaggggtctggggattttaatttttaacaagtgccccagggaattctcatcacccagcaaactgaaggaagcaccatactac

SEQ ID NO: 5663 - DNA, 1175 bp, Cricetulus griseus
ttctggaggtctccggcgaggacaggcgagattctgggccactgttgagtaggatgagccggcgaccgcccggcagcgcctctactgcaagaactctgaaagaaatgaagaaagccttccaaaatgaagttgacatctcttggtatgcagagccctgctgagtggatggaagctggatgagagcctggctgttgacttctggaacatggcgatgtgccctgtgtctgccgaggtcatccaccaggtggaggagtcccttgatgaggatgagaaggagatgatgcttttcttatgtagagatgtggctgagaacctggccccatctaatgtgagggagctcctgggcagcttaagtgaaagaggccagctctctgttgctaccttggctgaactgctctacagagtgaggcgcttcgacctgctcaggagggttttgaagacagacaaagcagctgtggaggctcaccttcgcagaaaccctcaccttgtttctgattatagagtgctgatgatggagattggtgagaatctggataaatccgatgtttcctcgttaattttccttacaagagattacacaggtcgaggcaaggtaaccaaggacaagagtttcttggatctggtgattgaactggagaaactgaatctgattgcttcagatcaattgaatttattagaaaaatgcctgaagaatatccacagaatagacttgaagacaaaaattcagaagtatacgcagtctggccaaggagtaggatcaaattatatgaactctttccaggcttctcttccaaacttgagtattaagtcaagggtgagtctggagccagtgtcttccttttgctctcactcttatgtgcattagtaaatgtgtctatttatatattggactttttttcattttttgtttctttgaagattcacttttaaaaataaaagtagatagtatgtacctatagagagaaaaacttaaatgtccccaaagagattttaaaattgtgttttcttcctaccccacaaatactcatgtccggctcatggcttccattttccacacacaccaaaatgtatttagttcttttttgatgatttatagagtgcctctgttattttgttaactagaaacaatgctgtaaaataaacgctgcagattacttaaaaaaaaaaaaaaaaaa

SEQ ID NO: 5664 - DNA, 1175 bp, Cricetulus griseus
tgctggacatcccctcacgagccctgcagcctcaccatccacaccattcagctgatccagcacaaccgacgtctccgcaaccttattgccacagctcagacccagagtcagcaacagagagaaggtgtgaaggctgaagagagtgagcctcttccctcctgccccgggtcacctcctctccctgatgacctccagcctttagattgtaaaaatcccaatgcaccattccaggtccggcacagtgacccagagagtgacttttaccgtggaaaaggagaaccagtgactgaactcagttggcactcctgtcggcagctcctctaccaagcagtggccacaatcctggcccatgcaggcttcgagtgtgctaatgaaagtgtcctggagaccctaactgacgtagctcatgagtactgccttaagttcaccaagttgctgcgctttgccgtagaccgggaggccatgctgggacagactcctttccctgatgtcatggagcaggtgttccatgaagtgggcattggcagcatgctctccctccagaaattctggcagcaccgcatcaaggactatcacacttacatgctgcagattagtaagcagctctctgaggagtacgaaaggattgtcaatcctgagaaggccacagaagacactaaacctgtgaagatcaaggaggaacctgtgagtgacatcacgtttcctatcagtgaggagctggaagctgaccttgcttctggagaccaatccttaccaattggagtcctcggggctcagagtgagcgcttcccatccaacctggaggtggaggcttcgccacaggcttcgagtgcagaggtaaatgcttctcctctttggaacctggctcatgtgaaaatggagcctcaagaaagtgaagaaggcaatgtgtctgggcatggggtattaggcagcgatgtctttgaggaaccaatgtcaggcattagtgaagctggaatccctcagagccctgaggactcggacagcagctatggctcccactccactgatagcctcatggggtcctcccctgttttcaaccagcgctgcaagaagaagatgaggaagatttaactgcattgtagaccaggctggtcttgaactcagagatcttcctgcctctgcctcccgagtgctgggactgaaggcatgtacca

SEQ ID NO: 5665 - DNA, 1174 bp, Cricetulus griseus
gaggcagagctgaacgcagaggcggcggaggatcaggaggagtccgaggaagcggcctgcgacagcagcaagaagaagaagaaggtagtgccgggtattgtgtacctgggacacgtcccgccgcgattccgtcccctgcacgtacgcaatctgctcagcgcctacggtgaggtcggacgcgttttcttccaggccgaggaccgctttgtgagacgcaaaaagaaggcagctgcagccgcaggaggaaagaaggcagctaaatacagcaaggactatacagaaggctgggtggaattccgtgacaagcgcatagccaagcgagtggcagccagtctacataacacgcccatcggtgcccgaaggcgcagtcccttccgttatgacctgtggaaccttaagtatttacatcgttttacttggtcccacctcagcgaacaccttgcctttgagcgccaggtacgcaggcaacgcctaagggcagaggttgcccaagcaaagcgagagactgacttctatcttcaaagtgtagaacggggacaacgcttccttgccgctgagggggatgctactcgcccgaatagttcctggacatttgcacaacgtcccacagagcaggagctgagggcccggaaggccgcacggccaggagggcgggaacgagctcgcctggctaatgcccaggaccaggccagatccaacagagggctccttgccaggatatttggagcccctccacctgcagagagcaagaaagaaccatagccagcaagggactcctggtatctgaggtcagtgttggtttctgctgctggcagatctggcacccaacagcagctatagccaggtcagccttgatgagtggaagtctatgttatctcatctacacataacctccatctgtgccacatggccactttgctcatgagcccattgggcaatggcagggatggctggggaaagaggctgactgtccacagaacagttcatcccatctacttgattcctgaactactctgctgatgtcaccttttgatgagcatttacatggaacacaacccaccatgatgataatggactaaacctttgaaactgtaagccagacccaattaaatgttttcctttataagttgttgtggtcatgatgcctcttcacagcagtaaaacccctaagaca

SEQ ID NO: 5666 - DNA, 1174 bp, Cricetulus griseus
tgcagggatcatgtaccggaagtcgtgtgcatcctcagcagcctgtctcatcgcctcggctgggtaccagtccttctgttctcctgggaaactgaactccgtgtgtatcagctgctgcaacactcctctttgcaacgggccgaggcccaagaaaagaggcagctctgcctcggccatcaggccagggcttctcaccacagccctgctcttcaacttagccctctgcttggcgcactgctgaagcttaaggagatgccaacccctgctgcgtcatctgtctggccctttctctctcacctccttgagcctcttctgggtgtccttttattctgggtagactttcaagtaatgcaagattgccatgcacaaatactttgtaagttctgaaaattcattctgaatttctgtgtgtagttgaagcaaaagtatggagcagaaagcccaggtcttcccatcccgatccgtgtagccaccaccaaggccagcctggaagaatcagcccttagacatcattgagataggcatctgcccttcccaaagcctccagcttccattctgtccctgatggagtcacagtctatttggggactgctgcgtgaaggtaactttgcttctgcgggacggaagagccagtttctgctcaaggcttctgaacatggcattcacacttcctgctcctgtaaaccattttctgtgatggaatcagctggtttggtctctgagtcagtctgtggtgactcgggactcaaggactgggccttagcctctcccggcctggcctcagcctgaaaagtgcttaggaaaaccttattagttctcctagaggaagagttccgcctggcgcctaggaagatgagggggcttcggacagagcgggtgctgtccttggtggagctgaactgggcacgcaggcgtttctcatggttgacgtgctgcagagtcagccggcagcataggacctgccagaacaccttccggaactgctgagaggacacattgtagaggagagggttgaccacagagctgaggtagaagaaggtgtcagagaaggggagaaggatcatgtatgccttgaagtacgacttggtccagtcatgcttgggtgttgccgcagccatgatccgccgaacctgatttggcatccaacacacggccagcgtcaccacaatcagtc

SEQ ID NO: 5667 - DNA, 1173 bp, Cricetulus griseus
ggtccccacccctcccgactcctcgccttcctggctcccgcttgctcccgtgatgaattcagtgctgggcaaccagaccgacgtggccggtctcttcctggccaacagcagcgaggctctggagcgcgccgtgcgctgctgcacccaggcgtcggtggtgaccgacgatggcttcgccgagggtggccccgacgagcgtagcctgtatatcatgcgcgtggtgcagatcgcagttatgtgcgtgctttcgctcaccgtggtcttcggcatcttcttccttggctgcaacctgctcatcaaatccgaaggcatgatcaacttcctggtgaaggaccggaggccgtctaaagaggttgaggcagtggtcgtgggaccctactgagaggccctctggtcccccacggctggtgctcctggcctctccagtactccaccagccgtgatgcacctctcaccatcagagaccgagtaaagcaaacctgtcggagtcagaaattttttctctcgcctcctgcctttggggaaaaagtgacccatttctgatcgctctcctaaaggccccaagcaagccttcagacggagcatccagactttgggactcagcagcaggtcctgcaggtgggcccagcattggggacatctggagaggccgagaaaggcgggagttggggtggggaggatatccagaggcactagtagccgggtgacacgaaattgacctgtttctacagcacactgcagacctaatgggaacatagatgtgtgtgggttttgcgacctgcggggagagtggaactttgatcaatagtaacctgtggtttatagagatctgtgttagtttgcttgaatacaaatatttgataagtcttttaagccctagtggcctgtttgcctgcctgcgggttagagtttttgtcatcttgggagaaggggtgggggagggtagcctgagactgtgaatggggttaagtgctttcttttagtgcatttccagctgggtctctttgggaggctggcgctccagctaagcccgggacaaagatccagagtagaatttgtagctcgtgtatgcacggtttactccacaaaagtgctcttgatatccgtgacaacgtttgtactttttttttcttatttaactatttccttaataaatgaaacatttaaagtgtt

SEQ ID NO: 5668 - DNA, 1173 bp, Cricetulus griseus
aacgagcggagcaggttaggcgttcttggcgatgaagaggctgccaggctaggagctggcgcggagacatttgaattagctttagcagaagagaaatggaggagccatagaatattaaggatgaattcaggaaggcctgagaccatggaaaacttgcctgcactctatactatttttcaaggagaggttgctatggtgacagactatggagcctttatcaaaatcccaggctgtcggaagcaaggattggtccatcgaactcacatgtcatcctgccgtgtggacaagccttctgagatagtagatgttggagacaaagtgtgggtgaagcttattggccgagagatgaaaaatgatagaataaaagtgtccctctccatgaaagttgtcaaccaaggaactgggaaagacctcgatcccaacaacgttatcattgagcaagaagagaggcggaggcgctccttccaggattacactgggcagaagatcacccttgaggctgtcctgaacactacctgcaagaagtgtggctgcaaaggccactttgcaaaagactgtttcatgcagccaggtggaaccaagtattctctgatccccgaggaggaggaagaaaaagaagaggcaaaggaagaaggaattgagaagcctgaccccacaaagaattcttccaggaaaagaaagaaggaaaagaagaaaaagaaacacagagacaagaagtcatctgactgtgacagctctgactctgagagtgatatgggcaagaaggcaaggcatgcatcaaaggacagcaaggctacaaagaagaaaaagaaaaagaagaagcacaagaagcataaggaatgagggtgggatgggccgtggcagccctggctcctggaaagactcagtgtgagaatatggcctcctgccccactgactatgtccctctgctctcagatggcttctccattcagcaagcagctagaggagctagagggcagctcccaaaatgtttttttccttattgcttctcatccctttgcaagtgacccccgcagccagtgactgctgaaccagagatctgaagccagggtcattattctgctttctgtctatcatcatgtgagtgactggttccatttcaggtctttgcttaaattcctggcataaatggaaaatgtgtttggttttaaa

SEQ ID NO: 5669 - DNA, 1173 bp, Cricetulus griseus
gttcccaaccatctgtgggcaaagtccttagagctgggccctctcaagccagcagcctctacaagtgttagaaatcacagctagagtgtgtacttaattacactaaattattgccgggactcataagcactaattacacctgattataggttaaaatatttattttgtcaaaatattttcttgaggatgtgtttaaccttttcttgttcattgtgtgctgaagtgtgaagactgctttcttccttaccttttttgccatagagtgacccctgcccaggtaccaagaaggcaggctggagttgggccaagactgaccaactcatttgtctgtatttgggacatggggtttccagagccaaagggcttcttggtagctgtggccagagctggcttccatttttcctgtcagcccctctgtgtgagtgactgtgccttggatcactgcccttgtcctcctcacctggcccatgctgtcacccatagcactggagttcctttgctccaacccaagactttcctacctgcaaccctctggctgatggtctcagatggctcagggtagaccacaggcactcttggggcgaggtcagccctaggtggctggaagagcagcatgagagccattgttcctgcctggtcaatccacagcctccctgtggtctgctgttgtgatgactggggtctccctgtgtgctcagccacacaggaggccagtaagggaatatgtctctacttggaggtcctccctttgtggccctgtggtacccacttagccaagtgcccatctccagcccttcttgttcatggaggtctaggctaggctttccctagtccccaagaacaactgtcaaccctgtgttctgattgatcctgccatactcacactccaggctctctgggagagcaggggtagtatttcttcctaaagtttgcacttcatttgtggggatccgaggatccttggggctgctggaaagacggtattgagtttgttatcctgttgtcttacaagtcagactcttgtcactgtccgtgtttctgtgggaagagctggttctggagggtggctcagcgtgacaactaatgtgtcccccacccactggttctgcttccaaatactgtctaatttgtgttcttgcatgtaaagtacgccacaataaatagttgaaccag

SEQ ID NO: 5670 - DNA, 1173 bp, Cricetulus griseus
ggggagccgcgctggttcttctcgccctggttgtttgtagagtgctacatgtatcggaggattcatgaagccgtcatccagagtccaccaatccacgacttcgatgtatttaaagaaagcaaagatgagaacttttttgagtctcaggagtccatcgatgctctgtgtatgtacttgcagcagctgaagccagccagaaaccttggcgaggaccagctgaaggatgagctttttaaactcctgcagatctccctctgggggaataagtgtgacttgtctctatcaggtggagaaagcagttcccagaagtccgatgtcatcaactctttggaaggcctaaagccattcattctgataaatgacacagaatctctttggactttgctcagtaaatacaagaaagcagcaaaaccgcccgtagttagagtagacatcgttctggataattctggctttgaactcatcacagatctagtactcgctgacttcttgttatcctctgagttagctactgagattcattttcatggaaaaactatcccatggtttgtgtctgacgtaactgttcgtgactttaattggatagttgaacatgtaaggagtagcaatcagaagtccatggccacctgtggtgctgactgggaaagccatgttaagatgggtagaatggatttaccatgatcatatattttggactctgcctcacccatattgcacaatgccccaggtcgcccctgacttgtatgctgaactacaaaaggcatgcctcattttattcaagggggatttgaattataggaagttgatgagtgacagaaaatgggagtttaccattccgttccatcaggccctgtgtggcttccacccagcacctctgtgtagcataagaacattaaagtgtgagcttcaggttggtctacagccggggcaggctgagcagctcatggcttctgatccccactggctgaccaccggcaagtatggaatacttcagtttgatggtccactttgactctgctcaggaattcctggttaacctcctctcagcctcaaaaaaacagtgcatggatctagtcctggcttctcagcagcctggggatccccatttctcagctcctgtgttaataaaatagattctacagagaaaaaaaaaaaaaaaaaaaaaaaaaaaaa

SEQ ID NO: 5671 - DNA, 1173 bp, Cricetulus griseus
ggtgtcggtcggctacgcagcctgggccagtccctgcgcgaggccgagaccgacggagcggcctgggcctcgctacacgctcaggcggagccactgcgagcagagctagccgagcggctgcagccgctggcccaggccgcctatgtgggcgaggcgcgacggaggctgaagagggtccggcgccgccggttgcggcttcgtgagagggcccgggaacgcgaggctgagcgggaggcggaggccgcgcaggccacggaaagggagcaggagattgaccgctggagggtgaagtgtgtgcaggaagtggaggaaaagaagcgggaacaggaactcaaagcggctgctgatggggtcttatctgaagtaaggaaaaaacagtcagacactaaaagaatggtggacattctgcgtgctcttgagaaactgaggaaactgaggaaagaagctgctgcaaggaaaggggtctgtcctcctgcctcagcagatgaaacttttgagcaccatcttcagcggctgagaaaactcattaaaaagcgactctgaactgtatgaagctagaagagagagccctccgagttatgctggaaggagagcaggaagaagagaggatacttcagaaacgagaaattgagtccaagttatttggagatcccgaggagttcccacttgctcacctccctgcagccattccgccagtattacctccaggctgagcactccctgcctgcgctcattcagataaggcatgattgggatcagtacctggtgccgtctgatcatcctaaaggcaactccgttccccaaggatgggtccttcccccgatccccagcaacgacatctgggcaacagccgttaagcttcattaagaccctccaggagtgtggtccagcaggccagcactgcagctctagatgtcagtgatgctgccgtctcacgctgtagtcttctgcacaacttaaacttcatgcggcattgctgtagctggaagtcctgcttctctctattctctgccctggccagagttacctcttgaatcaggaggttgataaggttcttctggaaagggcctagatgaactgaagttattagcatgggcagtggccttcactcactaactgcctctgttttgagaggcttggcctagtgtgcctacttatctgttctaggtcttg

SEQ ID NO: 5672 - DNA, 1173 bp, Cricetulus griseus
gtggcctcgacatgatgcccgcaggctatgatgcaggcgccggtgctcccggccatgcgcatccacaccacctccaccaccaccacgtcccccacatgtcgccccaacccgggctccacttatatggccagctgtccggtgcccgcaggtgctgcgggcgtcggtgcgggagcgggtagcagcggtggcggtggtgactatgggccggacagcagcagcagcccagtgccctcatccccggccatggcgagcgcaatcgaatgtcactcgccctatactagccctgcggcacattggagttcgcctggcgcctcaccttacctcaagcagcagcctgccctgacgccaagcagtaaccctgcagcctctgctggcctgcaccccagcatgtcgtcctactcgctggagcagagctacttgcaccagaatgcccgcgaggatctctcagtgggactgcctcgttatcagcatcactccactccagtgtgtgacagaaaagatttcgtcctcaatttcaatggcatttcttctttccaccctccgctagcggctcttattatcaccatcaccaccagagcatgtgccaggatattaagccctgtgttatgtgaatgaacagaggccttgaaggcctgctccccctcttctgccctttcctcctctcccctccgagaggggcagctagggactgcgacaggactcacatactgtgcacagttctaggtggtcattgcattcactgatcagggtctggaaaggtgtgtggtgtgtgtgtgtgtgtgtgttgtatgtgcatgtgtgcgcttttcaaataggcagtgctaaaagcacagtatttcaagaaagccttgcttagttgcctggtccagtaggagattctgcccacccccacccccaacactaccttcgaatacaggtgccaaagaacattgtgaagaaatgaagaaccgatgagcctagtttaaggaaaatggctctcagtattgtgacaatacaacatttttacaaggttgtttttctaccaccatatttttaaagtatttttatgatcttcgtatactcacacttcgcttgtattttaaaaggagggtatatttgcacttatgtatacttttaaagtttgccaaaatattttgatgtaagatttttttttcaataaaatgtgtataacaa

SEQ ID NO: 5673 - DNA, 1173 bp, Cricetulus griseus
aaagcaacgtgaaaatgcaaaggcaggaaggagccaaaagtctgtctgatatctcctgagcagctacagaacaagtttccttggataaacatagaaggagtggctctggcgtcttatgggatggaggatgaaggttggtttgatgcctggtctctgttccagggtcttcgtcgaaaggtccaatcaatgggagtcttactctaccagggagaggtgacacgtttcatcacttcatctagacaaatggagaccacaagtggggaacaggtagtcttgagaaggatccacgaagtccaggtaaaaatgaacaatagcctggagtatcagccagtggagtgtgctgtagtgatcaatgccgcaggagcctggtctgggcaagttgcagagctggctggtattgggaagggactgcctggcaccctgcagggcaccaagctacctgtggagccaaggaaaaggtatgtgcacttatggcactgcccccagggaccaggtctggagacaccactggttgcagacatcaatggtgtctattttcgacgggaaggattaggcagtaactacctaggtggctgcagccccactgaggaggaagaaccagacccaacaaatctggaagtggaccatgatttcttccagaacaaagtgtggccccatttggtccagagagtgccatcttttaagactctaggtacagagcaactgggctggctattatgactacaacacttttgaccagaatggcgtggtgggcccccacccactagttgtcaacatgtactttgctacgggcttcagtggtcatggacttcagcatgcacctggcattggtcgagctgtggcagaaatggtactagagggccagttcaagaccattgacatgagccccttcctcttcaaccgcttttacttaggagagaagttacaagagtacaatatcctgtgagtgtgaaaactctctccaggactatgtcggggctgcatccctttcttcaccatcctctaagccaggccacttttccccagtggctctggacatgggatgaacaataggcacagagatccaggccaatggaaagtgataaaatgggaccctgggactgattgtagcccatcatccaaaacagttctgctggcgtcctaggcatggggcccaggactggcctccttcct

SEQ ID NO: 5674 - DNA, 1172 bp, Cricetulus griseus
tggaggcttgcacaccgcgctctcccgaccctgggtcacactcgtccgaaccacaggagtgtgcaggtgactggcatatcatctcttcgactctccatgagctcatgaacctgggagcaggtgtccggcgatggcgcggcctctgagcgacaggaccccgggccccctgctgttgggaggcccggccgggaccccccctggtgggggagcgctgcttgggctgcggggccttctacaggggaccggcaagcccaaagagccagccagctgtctcctaaaggaaaaggagcggaaggcgactctgccctcagctcccatcccgggaccgggcctggaaacggctggcccagccgatgccccgactggggcgcttggtggcggtgggtccccgcgggggcgcttctccagctcgcacgcccgcgccctcccgggccggctcttgcggctcctcttcccccgctcctcgccggggcacgccccgcgcgggctactctgggagccggcggcggccaccgcgcaggcttgacctctagggacacacccagtcctgtggacccagacaccgtggaggtgctaatgacctttgaacctgatccagctgatcttgcgctgtcaagcattccaggccatgagacttttgatcctcggagacaccgcttctcagaggaggaactgaagcctcagccaatcatgaaaaaagcaaggaaagtccaagtgcccgaggaacagaaggatgagaagtattggagccggaggtacaagaacaatgaagcagccaagaggtctcgagatgcaagaagactcaaggagaatcagatatcggtgcgggcagcctttctggagaaggagaacgccctattgcggcaggaggtggtggctgtgcggcaagagctgtcccattaccgtgctgtgctttcacgataccaggcccagcacgggacactgtgagggcacgccatccttcctgatcagagtcctgttccttactcagacttgcacctgacactcttctccttcctcggtctggccagctaggtgccccagggacgtgatgatgatacaaatacatttatatttttaagaaaaagctagccttctcccacctccctcgtgggtgtggggagggtcctgtgtgtgctcttagcacttcggggaacctatccacccaaccg

SEQ ID NO: 5675 - DNA, 1171 bp, Cricetulus griseus
tccagaagtcatgaaacactctctgtggattctgtgagcaacagccttacagcagacactgtaggacatggtggtgtgatccccattcatgggaatggtttggagcttcctgtggtcatggagacagaccacattgcaaatcgggtcaatgggatgtctgacagtgctctcagtgactccatccacacggtggccatgagcaccaactctgtaagcgtggcactctctacctcacacaatcttgcctccctagaatctgtctcccttcatgaagttggcctaagcctagagcctgtggctgtctcttccatcacgcaggaggttgccatgggggcaggtcatgtagatgtctcctcagacagcttggcttttgtaccaccttcaccttgcaaatggaagacctccaattcaaacaatgtggaaaagagtgcaattcctattcagagttcaaagctcatctaaccagccacatccatagccatctccctggccagggccacagcagcaaccatgggccaagccacagcaaggaaaggaagtggaagtgttccatgtgcccccaggcttttatctctccttccaagctccatgttcactttatgggtcatatgggcatgaagccccacaagtgtgacttttgtagcaaggcttttagtgatccaagcaacctacggacacaccttaaaatacatacaggtcagaagaattataggtgtactttgtgtgacaagtctttcacccagaaggctcacctggagtcacacatggtcatccatacgggcgagaagaatctcaaatgtgattactgtgacaagctgttcatgcggagacaggacctcaaacaacatgtgcttatccacacacaagaacgccagatcaagtgtccgaagtgtgataaactgttcttgagaacaaaccacttgaagaagcatcttaattctcatgaaggaaaacgagattatgtctgtgagaaatgtacaaaggcttatctaaccaagtaccatctcactcgccacctgaagacctgcaaagggcccacctccagttcctcagcacaggaggaggaggacgacgactctgatgatgatctcacagactccatgaggacagacgactgtaggatgagcagtgctgtttactcagcggatgagtctctctccacacacaaata

SEQ ID NO: 5676 - DNA, 1171 bp, Cricetulus griseus
gggctggggcggtctgagcccaggagaccctgatggccgcagtgttcctggtaacgctctacgaatactcgccgctcttctacatcgcggtggttttcacctgcttcatcgtcaccaccggcctggtactaggatggtttggttgggatgttccagtaattctgagaaattcagaagagatccagttcagcacaagagcgttcaagaaacaaatgagacaagtcaagaaccctttcggtttagagatcactaactcctcttcagcttcactagcagctggcgtgaccttgacaacagattgccttgaagacagccgtcttacatgcttctgggggtgcagtgtccaaaggctctatgaagctcttcagaagcacaggtactgcttcaggataagcaccccacaagcgttagaagaggccctgtacagcgactatctccaccgggaacagtattttattaaaaagcacagcaaagaagaaatatattgccaattaccgagagatactgaaattgaagactttggtccagttcccagatctcgctatccgttggtagctctgttgaccctggctgatgaggatgatcgggaaatttatgatattatctccatggtgtcagtaattcatattcctgataagacttacaaactgccctgtagaatattgtatcaatatttactcctggctcaaggccaattttatgatcttaagcaacttttcatgtctgcaaacagtagtcccagtccctccagcaagccctctccagcagacagaaatgccgagcagagcttactggagaaggcaggcctggctgggagtgaagtggagccagtggaggagagcagcaaggactgcgtggtgtgccagaacgggggcgtgaactgggtgctcctgccttgccggcatgcctgcctgtgtgacagctgtgtgtgctacttcaaacagtgtcccatgtgccggcagtttgtgcaggaatcttttgcactttgcggtcagaaagagccagacaaggacatgctggaaacctcctgaagacatcacagtccgagatagttctacacaaggcgtggaacctgtgcccttaggatcagttgtaacaccgaacttacagtcgtgactctcagagagaattctattttcacttcatacttaaacaacgtggatgatgaaaa

SEQ ID NO: 5677 - DNA, 1171 bp, Cricetulus griseus
ccggaagcggaagtccggatcgaaaagccagaggcttgtggagaagctgccggcgcgggttcgtcttcagggcacgtggagtggctgtcgcgccccgcggggcgggagatcgcgagatggacacccctccgctctcagactcggacgcggagtcggaagagtccctggtctcagaccgggagttgcaggatgcattttcccgaggactcctgaagccaggcctcaacgttgtgctagagaggccgaagaaggcggtgaatgacgtgaatggcctgaaacagtgtttggctgaattcagacgggatctggagtgggttgaaaggctcgatgtgaccctgggtccagtgccagaagtcagtgaaactcagccaacccccagaacaaggaccagaagaaaggtgttaatccagaagacgacttccagagggaaatgagtttctaccgccaggcccaggctgcagtgcttgcagtattaccccggctccatcagctccaagtccccaccaagcgacccacagattattttgcagaaatggccaagtctgaccagcagatgcaaaagattcgacagaagctgcagactaaacaggctgccatggagaaatctgaaaaggccaagcaacttcgagcgcttaggaagtatggaaagaaggtgcagactgaggtccttcagaagaggcaacgggagaaagcacatatgatgaatgccatcaagaaataccagaaaggcttctctgataaactggatttccttgagggggaccagaggcctaacgaacgaggtgcaaaggcaaaagctaagggccagcagatgagtaaagggcccaatgccaaacgacggtacaaaaaccagaagtttggttttggtggaaagaagaaaggctccaaatggaacactcgtgagagctatgatgacgtctccagcttccgagccaaggtggcccacggcaagggccccaggaagcctgggaagaaaggggcaaataagcgaccaggaaaaagaacaagacagaaaatgaagagcaaaacccgctaaacagcatggtctttctataaagaaccaaggaaaagggcgaatgtacagactacagagcactcagagctttttctttttgtagaaaattcttttaataaattaaatttatgaaagaaagacactcttggatcaaaa

SEQ ID NO: 5678 - DNA, 1171 bp, Cricetulus griseus
atttgcagattttgatggtgtcctttaccatatttcaaatcctaatggagacaaaacaaaagtgatggtcagtatttctttgaaattctacaaggaacttcaggcacatggtgctgatgagttattaaagagagtatacgggagtttcctggtaaacccagaatcaggatacaatgtttctttgctatatgaccttgaaaatctgcctgcatccaaggattctattgtgcatcaggctggcatgttgaagcgaaattgctttgcctctgtctttgagaaatactttcagttccaagaagagggcaaggaaggagagaacagagcggtcatccattaccgggacgatgagaccatgtatgttgaatctaaaaaagacagagtcacagtagtcttcagcacggtgtttaaggatgacgacgatgtggtcatcggaaaggtcttcatgcaggaattcaaagaaggacgaagagccagccacacagccccccaggtcctttttagtcacagggaacctcctctagagctgaaagacacagatgctgccgtgggtgacaacattggctacatcacctttgtgctcttccctcgccataccaatgccactgctcgagacaacaccatcaacctgatccacacgttccgggactatctgcactaccacattaagtgctctaaggcctatattcatacacgaatgcgagcaaaaacatctgacttccttaaggtgctcaaccgtgcacgcccagatgccgagaaaaaagaaatgaaaacaatcacggggaagacattttcatcccgctaacgcttgggaactgaggaggaagcgctgttgatggaaggctggaccgcttgctactggataatcgtagcccttcatgttgcacctctccaggttcttaagggattctccgtttgggttccattttgtacgagtttggcaaataacctgcagaaacgagctgtgcttgcaaggacttcatagttcccaagaattaaaaaaaaaaaaaaaattccactcgatcaacttaattcccttctttattttcccctcctcacttcccttccttttccaagctgtttgctttgcaatatgttactggtaatgagttagcagataatgcagtcttaactttttcttctaagtatttgtagttcaaaactacctgtatct

SEQ ID NO: 5679 - DNA, 1171 bp, Cricetulus griseus
gtgcccaccgattccagctagttatttccaagacacccagtggagatcttttggaaaagcactctgacctcttttctaacaagcagttgccattcactccacgcactttaaagacagaggcaaagtccttcctatcacagtatcgatactacacacctgccaaaagaaggaaggatttcccagggcagcggatggaagccgaaacccagactgaattgagcagcttttaattctgagtttgggacagctgagacaaggaactcaaacggactcagaagtgaacacaaagcaggcacctaattatatgataaatggtgctgaagacaaaatatctcctttacccttagaaggacaaaccttaggatgggacaagattaaagatggggctctacagcagtcctccaaaaggacactctgtgagctctccacacaactttctcagacagtaaaatctatcctgatgaagaagagctgctctaacctgaatttcatggaaaatgtgactgatgaaatattgaaacttcatatctgaggaacagccagaaaagcaaaacagtttcagaatgttgaatcaacttgattttcaaaaggctctgatttcaaaacatactgaacttgtaagtaatgatgatacattaattcagcaagagcgccagcagttccaggaggccctggacatgttgtcatctatgccgaaggatgaagacaagatgttctctttacctggtgaatttttaatacctgttcacagattcaagtattcaggtgttacagttcaacaggtcaatgatgagacagatcttgaagcctcaacctggaatgaaaataatccaagaatttctgacagtttaattgaccaggaaacttctgtggatgtcattgaaggtgacagtgactatgaaaaggttgagacttccagagaattatgttgtcttaacacatcactgtccccatctgttcagttccccagtgtcaaaaatggcagtaatcatgacaaggaattaactctaaaaatcatggaaatgagcattgaagactgacctctggatcttcattaataaatactccatgtggccagtaactcaatactacttttctccttttctttttttttagttgtcttaaaaaaaaaaaaaaaaaaaaaaaaaaaaaaaaaaaaaaaaaaaaaaaa

SEQ ID NO: 5680 - DNA, 1170 bp, Cricetulus griseus
agggcatcatgaagcaactaccagtcttggaacctggagacaagcccaggaaagctacatggtacactttgactcgccctggagacaaaccctgccctcgagttggccacagctgctcatatttacccccagctggtgatgccaagagagggaaggtcttcattgtagggggagcaaaatccaaaccagagcttctcagatgtgcacatcatggatttgggaacacagcagtgggacacagtcaccacagaaggcctcttgccacggtatgagcatgccagcttcattccctcctgcactcctcacagcatctgggtgtttgggggtgcggaccagtcaggaaatcgaaattgtctacaagtcttggatcctgaaaccaggacttggaccacaccagaagtgagcagccccccaccatccccgagaacattccacacgtcagcagctgctattggaaaccagctatatgtctttggaggaggagagagaggtgaccagcctgtgcaggatgtgaagttgcacgtatttgacgcaaacactttgatgtggtctcagccagagacacatggaagtcctccatctgctcggcatggccatgtgatggtggcaactgggacaaaactcttcgtccatggaggcttgtcaggggacaagttctttgatgatcttcattgcattgatataagtaacatgaaatggcagaagcttagtcccacaggggctgttccagcaggctgtgctgcccatgctgctgtggctgtgggaaaacatgtgtatatgtttggaggaatgactcccagtggagcactgaacacgatgtacaagtatcacacagaaaagcagcattggacctcacttcagtttgatactttcctaccccctggacgactagaccactccatgtgtgtcatcccatggccagtgatgtccacctctgagaatgaagactcagattctgtcattctaaaatgtgaagctgagaaaggggatgctgctgacatacaagtggctcagggtggtgggttacctgaggaaagccagactaacatgttgctctgttttgtgttcggtgggatgaatacagaaggggagatctatgacgattgctttgtgactgtagttgactaataaaaaccccacatttttattatttgttactttttaacaaaa

SEQ ID NO: 5681 - DNA, 1170 bp, Cricetulus griseus
ttccccagccaggtggtgtacaacagagttggcaagtgtgggagtcgcaccgtggtcttgcttctgagaatcttgtcagagaagcacgggttcaatttggtcacgtcagacattcacaacaaaaccaggcttactaaaaatgagcaaatggaactgattaagaataatcagcaccgccagcatctacaaggacccagagcataggaaacttggcaacatgactgtgaccgtgaagaaaactgtcccctctccggaggctgtgcagattctctaccagcgaatgagatacgagtacgagttctaccactacgtcaaagagcagttccacctactgaagcgcaagctcggactgaagtctcgaaccagcagacctcctctgcgaccacagttcttcattccccacccctctggagaccgacgagcctatagacgatgaggaacaagatgatgaaaagtggctagaagacatttataagaggtgataccggacagccggtcactcataaagctccccgtctttctaaaagtttacacagcacttgctgtgtgctcaacagcatggtcactgtcacttcacaggagagggggctaatattacttgcaggaccctggtggtatcttgtcccagcacatagcccctagatcccaaaagtcaaggtacttaacttcatcagctcacacgggccctggcccaacatagtttgtacttcatgaaatatattgtacattttacatagtttaatttaaaaagaaaatacattttaagctagttggtctttgccttatttattataacctttcagcacattccaaggttttagttactcaggaaggagttaattaaaatgattttattttggtcagattgatgttttttaaaaggaaaattattcttatgaaccctcagctgacttccttgaatgctgtaaaaagtgcttgtgaatctgaatctttttttctaagaattaaaaaatggtgttagacattgatgggaattcaaaaatatatatgggactaaaaccttagcttagataaaataatgaaagtgatctgtgtttgaggtgaagtgttccttaacttattcattacccatagaaataaatgaatataaataagctgacttttttctgttattttgacagctggaaattaaagacttcctcttcccaa

SEQ ID NO: 5682 - DNA, 1170 bp, Cricetulus griseus
agagagagagagaggtgatggtgtaagactagagaaatttttcttcagtttattgttttataacatgaagttgtcattgtggaggacctagatatttctacgctacctgtgtttaaaaacaatgcgctttgcctaaccttcagcagaatgtaattgttaagtatattctatgtataaagaaagatgtttaaagatgtcttcaaagaagacgagagtctttaaatcacttatagctatattttactacaaaaagtctgtataaagatatatttaaatgttttagagaaatttaagttaccccacgtgaaatgtttttttcagttactgtgaattcttctaatcagttactttaaaaaaaaaaacaaaaacaaaaccttttccatcttgttagaaaattagctatgggaaggtattaaaaagattcatttcttagatggacagagttaaagatttttgtaatatatttaaatgtatatttttgagagaaatagtacattgccaatgattttatgatcttaaattaacttacaaatttataagctgcaaactaaaagattttttttttcaaaggctggagattttcttctgcctgagctggtcatgtatcagttttttcctaaacacaaaatggtgtcttgctcgtctggtaatgagattgtaaatcctgtttcctgtgtgtgttctcggcaggtgtgcctgagtgtgtggggtgcacaggcgtgcgcccttctttttgtactgtaactacctcatggtttgaatgataagtgtactgctggttgtattaacagagcacattttgtcgggtgagttgtgtatgctaaacttttttttaaccgtttgttttatctgggggttcattcataaaactgacagatatttttctaggaaggactgttatcagtttccaaatacaatactcctctattctggttttttctgaatgagcctgatttcattactatttttcatctatgagggtcagagcgtaccctgaaaaaatccctgtggccagtttgaacacccctgctgtaacctgtcctgtttgtgagtcagcaactttgtgaacctgcttagatttatagttttgataaccacaattttaattcttttatctgtgcataataaaagatatatatcaattatcaaaaaaaaaaaaaaaaaaaaaaa

SEQ ID NO: 5683 - DNA, 1170 bp, Cricetulus griseus
gccggggagccccgtgagcgcgcaggccaggccgcagcccagtgtctgtgcagctcgggccactgtccgtcaccatgggggcgtcggggcggctgctgcgcgccgtgatcatgggggccccgggctccggcaagggcaccgtgtcgtcacgcatcaccaaacacttcgagctgaagcacctctccagcggggacctgctccgccagaacatgctgcagggcacagaaattggtgtgctggccaagactttcattgaccaagggaagctcatcccagatgatgtcatgacgcggctggcccttcatgagctgaaaaacctcacccagtgtagctggctgttggatggttttccaaggacacttccacaggcagaagccctggataaaacttaccagatagacacagtgataaacctcaacgtgccctttgaggtcattaaacaacgccttacagctcgctggattcatcctgccagtggccgggtatacaacattgagttcaatcctcccaaaactgtgggcattgatgacctgacaggagaacctctgattcagcgagaggacgacaaaccagagacggtgatcaagagactaaaggcgtatgaagcccagacagagccagttctacagtattaccagaaaaaaggagtgttggaaacattctctggaacggaaaccaacaagatctggccccatgtatattctttcctactgacgaaagttccagaaactacccagaaagcctctgttactccttgaggagggcagtatttagcaggatgaagcagggcctccttgcctcgccttgcctctgttttttgaagctcttttcctaagacgtctctgaaaattatgtcttattcataatggctatatagtccacgctggcctaattttcatgaccctcttgtttaaacctccaagtgcttaaattacaggtgtgtaccactaagccaggcctgggaaaccaatctaaacttcggtcactttagattccttagtggggcaaggacacatccttatatattgtggccccaagtgagaaaatacaagaagtgaagaaaaaacaactctaccttcaaggaaaatgtactctttatattacttggtgctaaatcaaagaatcaagcccttgcacaggctttgaaattttggcctgttttatttcaga

SEQ ID NO: 5684 - DNA, 1170 bp, Cricetulus griseus
accttaactccaacatcatgtctggttctaatggtgccaaagagaattcccacaacaaggctcggacatctccttacccaggttcaaaagttgaacgaagtgaggttcctaatgagaaggtgggctggcttgttgagtggcaagactataaccctgtggaatacactgcagtctccgtcctggctggcccccaatgggcggatcctcagatcagtgaaagcaacttttctcccaaattcaatgaaaaggacgggcatgtggagagaaagagccagaatggactgtacgagattgaaaatggaaggcccagaaatcctgcagggaggacaggactggttggccggggtcttttggggagatggggcccaaaccatgctgcagatcccattataaccaggtggaaaagggatgacagcgggaataaaatcacacaccctgtttccgggaaatgcatcttacagtttgttgcaataaaaaggaaagactgtggagagtgggcaatcccaggggggatggtggaccctggggagaagatcagtgccactctcaagagggagtttggtgaggaagccctgaactccttacagaagtccagtgctgagaagagggagatcgagaagaagctgcatgcactcttcagccaagagcatcttgtgatatataaggggtatgttgatgatcctcggaacactgacaatgcatggatggagacagaagctgtgaactaccacgatgaaacaggggaaacaatggacagtctcaccctggaggcgggagatgatgccgggaaggtgaagtgggttgacatcagtgaccagctcaagctgtatgccagccactctcagttcatcagactcgtggcggagaagcgagatgcacactggagtgaggaccctgctgctgacagccgtggtccatagcttgtccccacaagccaggggccatctgggagcgctgcagatgcagggacacagaacttatgctccgcaaaggacatgtggaaatgtttgcaaaaaggtcaaatgagccagtacgatggagtggatcgttgaattctcttcccgaaggattggagcttgccagattttgtatgtacgaacaaaagcatgtctgaacaaatttaaataacaaatgttctttgaagatctgtagttacaataaaataaaacc

SEQ ID NO: 5685 - DNA, 1169 bp, Cricetulus griseus
cgggagaaggttcgggaataccaggttggcatcaaggccatgaacctggaccaggtctccaaggacaaagcactccaaagcatggcgtccatgtcatctgcacagattgtctctgccagcgtcctgcagaacaagttcagcccgccctcccctttaccccggctgtcttctccacctcctcaaggttctggagtggccccctcttctaggacaacagcctggcccgtctcaggacatcaagcccttcgcccagcctgcctaccccatccagccgtcccctgccaccaacgctcaacatcatggaggtgcaacgggaccccgacacgtacagcaaacacctgtttgtacacatcggccagacaaaccctgctttctcagacccaccgctggaggcagtggacgttcggcagatctatgacaagttccctgagaagaaggggggctgaaggaactctacgagaaggggcccccaaatgccttcttcctcgtcaagttctgggctgacctcaacagcacagttcaggagggccctggagccttctacggggtcagctcacagtacagctcggccgacagcatgaccatcagcgtctccaccaaggtgtgctccttcggcaagcaggtggtggagaaagtggagacggagtatgcccgcctggagaacggtcgcttcgtgtaccgcatccatcgctcccccatgtgcgagtacatggtcaacttcatccacaagctgaagcacctgcctgagaaatacatgatgaacagcgtgctggagaacttcaccatcctgcaggtggtcacgagtcgggactcacaggaaaccctgctcgtcattgcttttgtcttcgaagtctccgccagcgagcacggggcacagcaccatgtctacaagcttgtcaaagactagcgcacctttgaggtccacaagggtgcaaggcggacttcttccacacacctgcctgcctggtctccccgggtgtgcgttgggggactcacccacccgtgggtttcaggctgggacccaggctgcctccctggccccagcacacatgctccctgccactgttctgcgctttactggagagaagagggcgggctccgtggtgatgtggccttcctgggcattgacccacagatgaccggctccaccaggcctcaagtgacatcag

SEQ ID NO: 5686 - DNA, 1169 bp, Cricetulus griseus
atacagaggaagacctacgggagaatttaaggtgtatggtgacatcgagtattgcagcattattaaaaataaagtcactggagaaagtaaaggtctgggctacgtgcgatatttaaaaccatcacaagccgcccaagcaatagaaaactgtgatagaagtttcagagcactcttggctgaacctaaaaataaagtacctgagtccccagaacaagattattacagtagcatgaggcaagaggctttggggcatgaaccgagagtaaatctgtttcccttcgttggggaacaacaatctgaattttcaagttttgacaagagtgacagcagaagtcaggaagctatctctaaacgcctgtcagttgtctcaagagtccccttcacggaagaacagctcttcagcatttttgacatagtcccaggactggagtattgtgaggttcagcgagatccttattcgaattatggtcatggtgtggttcagtattttaatgtagcatctgctgtttatgcaaaatacaaattgcatggattccagtaccccctcgggaatcggataggtgtttccttcctggatgacggaagtaattcggcagatctcatcagaaaaatggccacacagatggtggcgtcccagctcgcatcaatggtgtggagtaacccaagtcagcagcagcagtttctgcaatttggaggaagttctgggtcacagttgcctcaaatccagacagatgttgtacttccatcctgcaaaaagaaagcccctcccgaaacgcctgtgaaagaaagactttttatcgtgtttaaccctcatccattaccattagacgtgttggaggatatattctgtcgttttggtaacctgatagaagtttaccttgtgtcaggaaaaaatgtgggctacgtcaagtatgcagatagaatgagcgccaacgatgcaatctcaaccctgcatgggaaaattctgaatggagtccgactgaaagtcatgctggcagactcgccacgagaagaacccaaaaagaggcagagaacttactgagtctcgaacaaagactaactaatgacataatcctgagctgactgactgaaaaatgtgactggacgaactccctgtggacagttgacagtcttttttttttttttttttttttttttttttctatttt

SEQ ID NO: 5687 - DNA, 1169 bp, Cricetulus griseus
  modified_base (865)..(865): a, c, t, g, unknown or other
gccaccgcgccccgcccgccgtcctggtgcggctgcggccgggggctgcccgcgctcggggtccccggggggccccggctcctgggcacccaccccaagaaggagcccatggaggcgctgaacacggcgcagggcgcgcgcgacttcatctacagcctgcactccacagagaggagctgcttgctcaaaggccatcgcccaggaaaagttggaagctctaccgcccactccaggacagctgagatatgtattcttccacaatgcgatacctttcatagggtttggctttttggataatgcaattatgattgttgcaggaacccaaattgaattatctattggaattattttgggaatttcaacaatggcagctgctgctttgggaaatcttgtgtcagatttagctggacttggccttgcaggttatgttgaggccttggcttccaggttaggtctatcaattcccgatcttacaccaaagcaagttgacatgtggcaaacgcgtgttagcacacatctgggcaaggctgttggcgtgactattggctgcattctaggaatgttccctttgtttttcttttggaggaggtgaagaagatgagaaactggaaacgaacaaatgaatcatcttagaatgacagctgtgtgtgtgtgtgtgtgtgtgtgtgtgtgtgtgtgacacagaataattgaacatgtggaagagagaaactgaagttagaagttattctttggggaattaaaattatccatgttggctaactagatggaaaaccctgacttagcatgactatgcctttcaaatcgtattttggtagttttgtttactacaatatttacttacaatgggatttctgaagatggntccccttaacgttaattgactccataagacccttgtttagtgttttccaccacagagaatctgacatcagctgaaactggactgccctgccctgcctcatggcagctgttctctgtcagcaccagagctccagagagctgtaccgtgagctgcgggaggactgtttgctcagtttgtgccgttcttgtgttattatttactgacctgttcatgcatgtaaactgggtacattttgttgcctctgtatgttaaatagtgaccaatgttttacgaaagaattgaacaaaaaataatcttttaagac

SEQ ID NO: 5688 - DNA, 1169 bp, Cricetulus griseus
cacattctgcctgtcatgattgccgtcatcctggctaatgctgttgcccaaagcctgcagccctccctcctatgacagcatcatccgcatcaagaagctgccctacctgcctgagctgggctggggccgccaccagcagtaccgggtgcgtgtagaggacatcatggtacgggagtgtgccccactgtagccctcaactgcaccttccgggacctgcggttggcactgcacaggaccaagggccgtatgttggctctagtagagtcccctgagtccatgatcctgctgggctccatcgaacgctcacaggtagtagcgttactgggggcccagctgagcccagcacgacggcggcagcacatgcaaaagactaagaaaagtccagatgtctccaccatcagatcaggagagcccccccagttctgagacatccattcgcttccaggtgaacacagaggactcagctttctctggatcccacgggcagactcacaagcccctgaagcctgctctaaagagagggtccagcaacaccacaagcctccaggaaagtaccacaggcaacatggagtcagcaggcattgccctcagaagcctcttctgtggcagtccacctttggaggctacctcagaactggaaaagtcagaatcctgtgacaagcgcaagctgaagcgggtccgaatctcccttgcgagtgactccgacctggaaggggagatgagtcctgaggagatcttagagtgggaagaacagcaactagacgagagcggacttctttgcataagacacacaccatcttctcactgctgggagtggaccacgcttacgtcaccagcatcggcaggctcattgggattgtgaccctaaaggagctccggaaggcaattgagggctctgtcacagcacagggtgtaaaagtcaggccaccccttgccagtttccgggatagtgccaccagcagtagtgacacagagaccactgaagtgcatgcgctctgggggcctcggtcccgtcatggcctcccacgagagggtagtccttccgacagtgatgacaagtgccagtgaacctcaccggatggcctatattccttctgcaagcggcagcaacctgaagctggaacccaagtccactctatatagaaaaaaaaaaaaaaaaaaaaaaaaaa

SEQ ID NO: 5689 - DNA, 1169 bp, Cricetulus griseus
gtgaaatgcttccatgagattatcaccattggatacagagtctatcactcctatgacctcccatggtttagaacactaagctggtacttttctactgtgtgtgaactacttcttctatggagagacggtggcggactactttgctacgtttgttcagagggaggagcagctgcagttcctcattcgctaccacaggtttatatccttcgccctctacctggcaggtttctgcatgtttgtactgagcttggtgaagaaacactaccgcctgcagttttatatgttcgcatggacccatgtcactttactgataaccgttactcagtcacatcttgtcatccaaaatctgtttgaaggcatgatatggttccttgttccaatatcaagtgtcatctgcaatgacatcactgcttaccttttcggattcttttttggaagaactcccttaattaagctgtctcctaagaagacctgggaaggattcattggcggttttttctccacagtcatatttggattcattgccgcccatgtgttgtccaaataccagtactttgtgtgcccagtggaatacagaagcgatgtcaactcttttgtgacagaatgtgagccctcagaactgttccagctccagagttactccctccctccattcctaaaggcggtgctgagacgggaaacaggtgagcatgtatcccttccagatacatagcattgcactttcaacatttgcatcgctgattggcccattccgaggcttcttcgccagtggattcaaaagagctttttaaaatctaaggatttttgcaaacaccatttcctggacatggtgggataatggacaggttttgattgtcagtatttgatggcaacgtttgtgcatgtgtacatcacaagttttataaggggtccgaatcccagcaaagtcctccaacagctgttggtgcttcaaccagaacagcagttaaacatctacaaaaccctgaagactcatctcattgagaaaggaatcctgcagcccaccttgaaggtgtagctgcactgaaaggatggactgccaaggaggagctcacagaactgctccgaagtcttccactgagctggcatagggctaaaagcatgatagatggaggttttgcagatatgaatgtttctttctctgaaattac

SEQ ID NO: 5690 - DNA, 1168 bp, Cricetulus griseus
ggcctttgggcgaacaaaatggcagcccccatacctcggggcttgtcctgcttagccagggctctgggatggtggtctcggcagcccattctggtgactcaattcccagctgtagttccagtaaaaaacaaaagccgtttcagaccccttcctcgtgaacccaagtacaaaacagagaaggagtttttggaacatgccaggaaagcaggattggttattcccccggaaaagctggagcgtcctatacatctggcctgtacagctggtatatttgatccctatgttccacctgaaggtgatgctcgaatgtcatccctctcaaaggaaggactgacacagagaactgaccgattcaaaaagaatgtggcatcacagttggcagttcgaaagataaaagaatttgatcctaattttaaaacaaaagacttcgctgaagaagctaaggatattttcattgaagctcatctttgtctaaacaactcagaccatgaccggcttcataccttggtaactgaacattgttttccggacatggtctgggacctcaaatacaagactgtccgctggagctttgtggaatctttagagccagcccaagtggttcatgttcgttcttcaggcctggtgaaccagagcaacttgtatggccaggtcaccgtacgcctgcacactcggcagactttggccatctatgatcggtttggccggctgatgtatgggcaggaagacgtgcccaaggatgtcctggagtatgtggtgtttgaaagacacttggtgaacccatatgggagctggagaatgcatgccaagattgtgcccccatgggcacctcctaagcagcccatcctcaagacgttgatgattcctggtcctcagctgaacccatgggaggagtacgaagagataaaaggagaggcccataagcctcagcttgcctaagggattgagtgactcctaaggagcctggtggcggtggagcacgccattaatcccagcactggggagacagaggcaggtgatctctgtgaattatagtccagcctgttctacagagttcccgaatagccaaagctacacggagaaaccctgtctggaaaaccaaaacaaaaaaaaaaaagacaaaaagactactgaggagtacccagatgatggggctccaaaatcacct

SEQ ID NO: 5691 - DNA, 1168 bp, Cricetulus griseus
aagatgtacaagttagacctcacaccagaccccaaggagatagcagccattgaggctagaagaattcgagaaaaggaacgacaatgccgattcttcaacgtgcggaaccgagtcatgggggtggatgtggatgccctgaactaccaggtggaagaacggaagctgcgggaagcaatagagcgaagcaaagaaatggcttatggtaacaagcatgtgcactatgatctggtagcccagatgctagagaaggaagaggcagaacgggcatgtcgcttgtccaagaaagtacaggattttcgggagcaaaggcagcaattcaagaatggacacgaatttgacttctgggatccaaaccacctccaggagtttccagtctcttattttgacagaaacccatgctttggtccatccagcatgcagtgcttccttggagaggacctggagagggcctcatgcctgcgaatgcagcaggagcaactcagatacaacctgtcaaaacagctgcaggagcaacaggcagccagagaagaggaggcgcgtacggctttgcttagtgaccagctgcgcctagctgtggacacacgagctgctgaactggccagactggaggagtcctagtcgagccgccatgaggactgctatggccaatgctaacagggcccaggcaaataagcaggccttgaagcatcgccatgaacaaaagcagcaacaggagaccaacctcatggaggtcaagaagcaaatcaccagtgatctactgacagagaatcctcaggcttcccagcgctctcaagctcctcaccgggtcctgccctattgctggaagggcatgactgcagagcagcgagccgccatcaggaaaactcaagaaacacaacgacaagagaaaaaggaacagcgcagagcagaaaagtccttggaagctgagtggggatgccaaaccaggcgcttggctgaagcagcactggagctggaggaacaggagaaacaactgtgtgcagaatttcgaagagggctgggctccttcaaccgggagttagctaaggagcaacaagcgcagcaaaattatctgaattcagtcatctacaccaaccagcctactgcccagtattacctacagttcaacaccagcagccgttgaactcagggtggtcatctcccttgtcac

SEQ ID NO: 5692 - DNA, 1168 bp, Cricetulus griseus
atcttcatctctcccttcagcatttcatctgccttagccatggtctttctgggcaccagaggcaacactgcagcccagctctctaagacctttcatttcgatgccgtggaggatgtccattcaaggtttcaaagcctgaacgccgaagtgggcaaacgtggagccctcccacattctgaaacttgctaacagactgtatggagagaagacctacaatttccttcctgaattcttggattcaactcagaaaatgtatggggctgacttggctcaggtggattttcagcatgcctctgaagatgcaaggaaggccataaaccagtgggtcaaaggtcaaaccgaagggaaaattccagaactgttggctgagggtgtggttgacagcatgaccaaacttgtgctggtgaatgccatctacttcaagggaatgtggagggagaaattcaggaaaaaggacacaactgatgctccctttcgactgaataagaaagacacaaaaacagtgaagatgatgtatcaaaaggaaaaatttccattcggttacatccgggatctgaagtgcaaggtgctagagatgccttaccagggcgaagaacttagcatggtcatcctgctgccagaagacatcgaggatgagtccacgggtcttaagaagattgaagagcaattaactttggaaaaacttcgtgaatggaccaaacatgagaacttggaaaacattgatgtccatgtcaaattgcccagattcaagctggaagagagctacaccctcaactccaaccttggcagcctgggagtgcaggatctctttagcagtagcaaggctgatctgtctggcatgtcaggatccagggatcttttcatatcaaaaattatccacaagtcctttgtggaagtgaatgaggagggaacagaggcagccgccgccacaggaggcattgctacattcgccatgttgatgcctgaggaagaattcacagtggaccacccgttcattttcttcattcggcacaatcccacggctaatgtgctcttccttggcagagtttgttccccatagaagagactttcgtggtacaagccagagcttaagagttttatcccctgagattttaatgatgatacttttcttttgtccttgccaataaagcctctacccagaaaccaa

SEQ ID NO: 5693 - DNA, 1168 bp, Cricetulus griseus
tttccggccggtccccatggaggcgctggggaagctgaagcagttcgatgcctatcccaagactctggaggacttccgggttaagacctgcgggggcgccaccgtgaccatagtcagtggccttctcatgctcctgctgttcctgtccgagttgcagtattatctcaccaccgaggtgcatcctgagctctacgtggacaagtctcggggagataaactgaagatcaacatcgatgttattttcccgcacatgccttgtgcctatttaagcatcgatgccatggatgtggccggggaacagcagctggatgtggagcacaacctgttcaagaaacggcttgacaaggatggcatccccgtgagctcagaggctgagcggcacgagcttgggaaagtcgaggtggccgtgtttgacccaaactccctggatcccaatcgctgtgagagctgctacggtgcagaatcagatgatatcaagtgctgtaacagctgtgaagatgtgcgggaggcataccgccgtcgaggctgggccttcaagaacccggacactatcgagcagtgtcgacgagagggcttcagccagaagatgcaggagcagaagaatgaaggctgccaggtgtatggcttcttggaagtcaacaaggtggctggaaacttccactttgcccctgggaagagcttccaacagtcccatgtgcatgttcatgacttgcagagcttcggccttgacaatatcaacatgactcactacatcaagcacctgtcatttggggaggactatccaggcattgtgaaccccctggaccacaccaatgtcactgcaccccaagcctccatgatgtttcagtactttgtgaaggtggtccccactgtgtacatgaaagtggatggggaggtgctgaggacaaaccagttctctgtgaccagacacgagaaggttgccaatgggctgctgggtgaccagggcctgccaggagtctttgtactctatgaactctcacccatgatggtgaagctaacagaaaaacacaggtccttcacccacttcctgacaggtgtgtgcgccatcattggaggcatgtttactgtggctggactcatcgactcgctcatctaccactctgctcgggccatccagaagaaaattgatctagggaagacaacgtag

SEQ ID NO: 5694 - DNA, 1168 bp, Cricetulus griseus
gcgctgcctgcgcccagggctcgggagggggccgcggaggagccgccccccacgccgggcccgggtccccgcgcccgggcccgcgccatggggctctggctgccgccgcccccgcgccgccgggctagagctatgcgtggccccacggcgcgcggcccccgcgggcaccatgagccccctgctccgccgcctgctgctcgctgtgctgctgcaactggcccgcacccaggctcctgtgtcccaatttgatggccccagccaccagaagaaagtggtgccatggatggatgtttatgcccgtgccacatgccagcccaggggaggtggtggtgcctctgagcatggagctcatgggtaatgtggtcaaacaactagtgcccagctgtgtgactgtgcagcgctgtggtggctgctgccctgacgacggcctggaatgtgtgcccattgggcaacaccaagtccgaatgcagatcctcatgatccagtacccgagcagtcagctgggggagatgtccctggaagaacacagccaatgtgaatgcagaccaaaaaaaagggacagtgctgtgaaaccagatagggctgccataccccaccaccgcccccagccccgctctgttacgggctgggactctgccccgggagcaccctccccagctgacatcatccatcccactccagccccaggaccctctgcccacgttgcacccagcgccgtcagcgccctgacccccggacctgccgctgccgctgcagacgccgcagcttcctccgttgccaagggcggggcttagagttcaacccagacacctgcaggtgccggaagcctcgaaagtgacaagctgcttttcagacagactgcagggccatttgcctcacaggccccatcttagtgggagaagacaggagcatagaaccaactcagactgggaggaagctgtcccaggacctggaccttttagagaactctcctgtgatcctttgtctcctagcactgccatctaacagttggcaaggagcctcatatctctccttagggggaacagggtacttactagcttagctaaccacccaggctagtgagcatcttctggctgctctgcttcccctcactatgaagaccccaaacctctgcaaatgggatttgggctgttatgataaatgtgac

SEQ ID NO: 5695 - DNA, 1167 bp, Cricetulus griseus
cgacgggaggtgaaatccggttctaaccggtccggggctcccagcgctataaaactttataaacccccgccgccgccgccgccgccgccatgcccaaaagaaaggctgaaggggatactaaaggagataaagccaaggtgaaggacgagccacagagaagatctgcaaggttgtctgctaaacctgctcctccaaagccagagcccaagcctaaaaaggcccctgcaaagaagggagagaaggtacccaaggggaagaaggggaaagcagatgctggcaaggatgcaaataaccctgcagaaaatggagacgccaaaacagaccaggcacaaaaagctgaaggtgctggagatgccaagtgaaatgtgtgcatttttgataactgtgtacttctggtgactgtacagtttgaaatactattttttatcaagttttataaaaatgcagaattttgttttactttttttttttaagtctatgttgttagcacacagaacacttcattgttttggggtggggaaggaacatgtgtcactaacaaaatgtctcctaagctggattgattgatggttgatggaaaacatctttccttgacaatttagaaagttttctcttggctcaggagagacgtcctggtgttgacatatgtggccgccatggcacagaatgccttgtgtggaaaaactctaaaatccatttttatatcctcttccccctgtaccatcaacatagacttaactcccttaaaaccagagacctgttggaacctgaccccctaaaattggttttgctggtctattgggcaatctgaactttgcagtgaaaataatatcctcaaaagagcagcggttccttttatatacaagattgtggatcttcagattgataattctgcctgaaagtcagggtcggcttgtgaaaagttgttaaacaacatccttaatgtgaaatgtcaaccctcactctaagctcttccccttttcaaagcattgaatgaagacttcaccgggttttatagtggctttctgattttggtagtccatacaagaagggagtttggaagttcttgtaaactgttactgattgtctgcccatgtcctgcctgaaataccatgattgtttatggaaagtatctttaataaagctggataaggtttggcttaggaa

SEQ ID NO: 5696 - DNA, 1167 bp, Cricetulus griseus
tctggtaggacagccctgcagatcggggacagcctgaacactgagaaagccacgctaatagttgtacacacagatgggtagcattgtggagaccactgggctgaagggcccaacagcacctctcaccccaggtcctcagtctcctcctaccccactggcacctggccaggagaaaggtggcaccaagtacaactgggacccttcagtgtatgacagtgagttgccagtgcgctgtcggaacatcagtggcacgctctacaagagcaggcttggctcaggtgggcggggtcggtgtatcaagcagggagaaaattggtacagcccaactgagtttgaagctatggcaggaagagccagcagtaaggactggaagagaagcatccgctatgcaggcagacccctgcagtgcctcatccaggatggtattttgaacccccatgctgcctcctgtacctgtgctgcctgttgtgatgacatgactctacctttgaccgagcatccactgtagaggccactgctgtcatctctgagagcccagctcaaggtgatgtctttgcaggagccacagtgcaagaggcaggtgtgcagcccccctgcagggttggccaccctgaaccccactaccctggttatcaggacagctgccagattgccccgtttccagaagctgcattgccaacatcacatcccaaaattgttctgacatcccttcctgccttggctgtgccaccctcgacccccaccaaagctgtttctcctaccgtggtcagtgggctggagatgtcagaacagcggagctggctgtacctggaagagatggtcaactccttgctcagcacagcccagcagctgaagacactgtttgaacaagccaagcaggcaagctcttgcagggaagctgctgtgacacaggccagaatgcaggttgatgcagagcggaaagagcagtcatgtgtcaactgtggccgggaggccatgagtgagtgtaccggatgccacaaggttaactactgctccacattctgccagcgcaaggactggaaagaccatcagcatgtctgtggccagtcaacatctgtcactgtccaggctgatgaagttcatgtgaagaaagtgtaatagaaaaagttgctgtttgagccaggccactcctgctctactgtgaag

SEQ ID NO: 5697 - DNA, 1166 bp, Cricetulus griseus
aggtgtcttagttgtcccccaagaccgcctgtagcaagctcagcatgggtgggggctgatggagaggtatgtggccgccatggtgctgagtgcggctggagatgccttggggtacttcaatgggaagtgggagttccttcgggatggggagaagatacaccaacagttggccaagatgggagacttggaagccgtagacgtggcacagtggcgagtcagtgatgacacggtgatgcacctggctacagcagaggcactcgtggaagctgacaaattccagaacttgactcaactgtattccctattagctaaacattaccagaactgcatgggagacatggatggccgggcgccaggtggtgcttgtatgcagaatgccatgaggctggagcccaataaggccgacggctggaagattcctttcaacagccgcgagggtggctgcggggccgctatgcgagccatgtgcatcgggttgaggttccctcaccccagccagctggacacgctgatccaagtgagcattgagagtggccggatgacccaccaccaccccacaggctaccttggaagccttgcgtcagctctttttacagcgtatgctgtgaatggcaaaccgccacggcagtggggaaaaggactgatggaggtgctaccagaagccaagaagtacattgtccagtcagactactttgtgaaggaaaatcttcagcactggtccttcttcgagaaagaatgggaaaagtacctggaacttcgaggaatttcggatggcaagtcagctcctgtcttcccggagtccttcggtgtgaaggaacgtgatcagctctatatctccctgagctactctggctggggtggcagtagtggacacgatgcccccatgattgcctatgatgccctccttggtgcaggggattcctggaaggaacttgcacacagagcctttttccacggtggagacagcgattccacagcggccattgctggctgctggtggggagttctgcacggttttaaaggagtgaatccttctaactatgagaagctggagtacagacagcggctggaagaggcagcacgggctctgtattctcttgggtcaaaagaagacactgtatttggcccctagggagagagtggggtttttttttgtttgtttcttt

SEQ ID NO: 5698 - DNA, 1166 bp, Cricetulus griseus
ctcccaccgtgtcccttcacaagcacagaaagctgtctcaggtcagaagccagtgccaaagcagttgccagctgtcagcgttcctcggccagtatcccagcttagtgacccccagaagagtgagcaggcatcacctgcggactctggaaataattctgaaaacgatcgggcatcaaagcagaaaacagaagactcaaaaaagaggcagtggactctggaagactttgacattggccgcccactgggtaaaggaaagtttggaaatgtctatttggcaagggagaagcaaagcaagttcattctggccctgaaggtgctgtttaaaacgcagctggagaaggctggggtagaacaccagcttcgacgggaggtggagatacagtcccaccttcggcaccccaacatcctcaggctgtatggctatttccatgacgccaccagagtttatctgattctagaatacgcgcctctcgggactgtctatagagagctccagaaactctccaagtttgacgagcagaggacagctacatacatcacggagttggcaaacgctctatcgtactgtcattcaaagagagtcattcacagagacattaagccagagaacctgcttcttgggccaaatggggagttgaagatcgcagactttgggtggtctgtgcatgctccatcttccaggagaaccacactgtgtggcaccctggactacctgccgcccgagatgattgaaggccggatgcatgatgagaaggtggacctctggagcctgggtgtcctgtgctatgagttcctggttgggatgcctcctttcgaggcacacacccaccaggagacctacagaaggatatcacgggttgagttcacattccctgactttgtgactgagggagccagggacctcatttcaagactgttaaagcacaactcaagtcagaggctaacactagcagaagtccttgagcatccctgggtcaaagctaattcctcaaaaccttcggctggccaaaaaagcaaagagctaactagtacatcatcttagggaatctggaaccctggcctctgtgcagctgtgagaaacgccccatcaagagagacctggggaccatcatcgttgccctcagaacaccctgcggagcagccagtccctggccgtgcatccagga

SEQ ID NO: 5699 - DNA, 1166 bp, Cricetulus griseus
ctgctggccgccgccggcctcgtggccttcgtgctgcttctttatatggtgtcgccgctcatcagccccaagcccctggcgctgcccggcgcgcacgtagtggtcacaggagggtccagtggcatcggaaagtgcgttgctatcgagtgctttaaacaaggagcatttataactctggttgcacgaaatgaggacaagctgctgcaggcgaagaaagaaattgaaaaacattctattaatgataaacaggtggtgctttgtatctcagtcgatgtgtctcaagactataaccaagtggagaatgtcataaagcaggcacaagagaagctgggtcctgtggacatgctggttaactgtgcggggacgtctctgtcaggaaagtttgaagaacttgaagttagtgcttttgagtaaattaatgagcataaattacctgggcagcgtgtacccagcaggcagtgatcaccaccatggccaaacaaattgtcaaagatgccatacaaggaaattttaatagttccattggctcagatgggtacatgctgtcctccctgacctgtgggatggccccagtgacttccatcactgaaggactccagcaggtggtcaccatgggccttttccgaatcattgctttgttttaccttggaagttttgataatatagttcgccgctgcatggtaaagaaagcaaaacccgaaactgtagacaaaactgcctaattcttgccccttggacaaaagactatatccagtgatttgaacagcttgctgctaatggaactcgattttcggccttggactttgtgtcttgttttttgaacgtgtgagattggacccaatactcttcagaaatctggctgcaagtgaagggacagagttcattcgtctctacaatattactgttaacactatgcaaatatggaccaggacaccatttggttttctgggagccgggcgttggtggcacacgtctttaatcccagcactcaggaggcagaggcaggcggatctctgtgagttcgaggcaagcctggtctccagagcgagtgccaggataggctccaaagctacacagagaacctgtctacgaaaaaccaaaacccaaaaaaaaaaaaaaaaaaaaaaacttttttttttttatttttttttaaagatgagttattt

SEQ ID NO: 5700 - DNA, 1166 bp, Cricetulus griseus
  modified_base (1158)..(1158): a, c, t, g, unknown or other
ggcggcagcgctccaactcgctcctccacgctcctccgggctccgccgtcgagccgggagagcgccttcgcccagcagccaagcaccgggccggacgacgccagccaccccgggccccttggaggcaccgcgctcaccccagggccggcacaggcacccgaagccgaactccaagatgggaggcaagctgagcaagaagaagaagggctacaatgtgaacgacgagaaagccaaggacaaagacaagaaggctgaaggcgcgggcaccgaggaggaggggaccccgaaggagagcgaaccccaggcagccaccgcgagagcacgggcgcggccgaaggcgcggccaaggaggagggcgaggccaaaaagactgaggctcccgccggccccgaggcgaaaagcgacccagcggccccggcttcagactctaaacctagcagcgcggaggccgcgccctcgtccaaggagaccccccgcggcctcggaggcacccagttccgcggccaaggcgcccgcgcccgccgcgccccccgccgcaagaaaataaaataataaaataagaggatgtgtcccatcaggggaggggagggggtggggagaatccaaatagtatttttgtggggaaatatctaatataccttcagtcaacttgaccagtcagtcctggagtttagagatcactgtctgaaagtacatcgtttgtacctgaaccgctgtcccctggcgctccaccccaaaaatcccaacatctttcctgccatgcagctggggagggtagcgtttgattttgcccacagggccagtgccaaggcaatcagatctttatgaaagcagtattttctgtgtttcctttttaatttacagcctttcttaattttgttgattttttttttaacgttgtggatgaatgccaactttcagacggagcccacttagcttgtccacatgtatctcgacaccaaccctccattcttcctctccagatatttttgggagtaacaaacattctctcatcatacttagcctacctagatttctcatgacgagttaatgcatgtccgtggttgggtgcacctgtagttctgtttattggtcagtggaaatgaaaaaaaaaaaaaataaaaaaaaaaaaaaaaagaagtaaataaataaaaaaanaaaaaaaa

SEQ ID NO: 5701 - DNA, 1166 bp, Cricetulus griseus
gccctgatggctggacagagtcggctattattcatggactacccagtcttacagcttatcaattgagaactgtatatatttgtcagtttttgacaagaattgcagcaggaaaatctcttgatgcacagtttgaaagtgatgaacgtattacccctttggaatcagccctgatgatttgggattcaattgaaaaggaacatgacaaacttaataaagaaatacgggatttaattaaaattcaggctgtggctgtttgtatggaaagtggcagctttaaggaagcagaagaagtgtttgaaagaatattttgtgatccggaatctcacacgtctttaggaaggaagttactcaggataatctctcaaaaagatccataccactccttttttcaacacttcagctataacttcatgatggagaaaataaagagttatgtggattgtgtgctaaatgaaaaatcatcaacttttctgatgaaggcagcaacaaaagtagtggaaaatgagaaagcaggaacacttgcttctaagaataagcaaaatgctactaatactgaaacagaaactgaagttaatttgaataaaggaagaagtattaatgaccaacagtcagaaactgaatccttagtggatgcagaatccataataaggtgtcacaagaatgccttatctaagttgaaacaaggaagctgtcaaccagattttaatcagaaagaaaaaggaatgggaattcttcaaagtgaaatatcaacaaaaggaaacagaaaaaccactgcaaggaatggattatatatttcaaagaatcagccagacactgatgagaaacacaggcgtaagaaaaaacagacatggctttgggaagaggacagaattttgaagtgtggtgtaaggaaatatggagagggaaattgggctaaaatactatcacattataagttcaacaaccgaacaagtgtcatgttaaaagacaggtggagaacaatgaagaaactaaaactgattaactcagaaactgaaggctgaatgggtttgttttaggttaatacaaggatagttaaatacttggatccctacagtttgttcagaactttctggtcagtgatgtaaataatatatgactaaaaaaaaaaaaaaaaaaaaaaaaaaaaaaaaaaaaaaaaaaaaaaa

SEQ ID NO: 5702 - DNA, 1165 bp, Cricetulus griseus
tgttttgttctgacagaaagctacgacttcatatgcttggagaatggcgctccccatcattgtgaaatggggtgggcaggagtactcagtgaccacgctttcagaagatgatactgtgctggatctcaagcagttcctcaagacccttacaggagtgctcccagagcgccagaaattactggtctcaaagttaaaggcaaaacctgcagaaaatgatgttaagcttggagctctcaaactgaaaccaaatactaaaatcatgatgatgggaactcgtgaggagagcttggaagatgtcttgtgtcctcccctgacaatgatgatgtcatcaacgattttgacattgaagatgaaatagttgaagtagaaaatagggaagaaaacttaactgtaagatctctcgcagagtcaaggagtaacaaagtggaagtgctgaaccctcccagggaagggaaaaagcttctggtgctggatgttgattatacattatttgatcataggtcttgtgcagagactggggtagagttaatgagaccatatcttcatgaaatttctaacatctgcatatgaagattatgacattgttatttggtctgcaacaaatatgaagtggattgaagctaaaatgaaagaactgggggtgagcacaaatgccaattataagattaccttcatgctggacagtgctgctatgataaccgtgcacactccaaggagagggctcattgatgtgaagcctcttggtgtcatttggggaaagtttttctgaatttctacagacaaaaaagtagaagcacttctgcctaaaaccatagtaatgaagcacagcttatgcagtagtgaaaaggctcattcaccaactctactctccaaagcatggatagcatttctgcctactccagctgtgtgtcattgctaactactaacaccattgcagcaaacatagctagccataagatttaaaatacctgttacttgcaatgcttaagcctgcagatatgtaatgtgaccactgttttgtgttgacagtattgctttatacagttcttgtatttgaagggaattgctcctcttaaatgaacatggtgtacattgttcttacaggactatttcagtggtgtaaataaataaatatctttttaattaaaaaaaaaaaaaaaaaaaa

SEQ ID NO: 5703 - DNA, 1165 bp, Cricetulus griseus
  modified_base (962)..(962): a, c, t, g, unknown or other
gtgaagtacttcctggataacttagaccggattggccagctgaactacttccctagtaagcaagacatcctgcttgccagaaaggaccactaagggaatcgtggaacatgacttcgttataaagaaaatcccatttaagatggtagatgtgggtggccagaggtcacagcgccagaagtggttccaatgcttcgacgggatcacatcaatcctgttcatggtgtcctcgagtgagtatgaccaggtccttatggaggacaggcgcaccaaccggctggtggagtctatgaacatattcgagaccatcgtcaacaacaagctcttcttcaatgtctccatcatcctcttcctcaacaagatggacctcctggtggagaaggtgaagtcggtgagcattaagaagcacttcccggatttcaaaggtgacccgcaccgactggaggacgtccagcgctacctggtacagtgctttgacaggaagcgccggaaccgcagcaaacccctgttccaccacttcaccactgccatagacaccgagaacatccgctttgtgtttcatgctgtgaaggacacaatcctacaggagaacctgaaagatatcatgctgcagtgagagacagcccctctgccgtcctctcatggcctccatggcccatggtcacatgtctctggtgtgtcgtcgcctgcatagacctgcagtgggcatctcaaatccacaacgtctaatacctggctcaagaatgctggactgccaaccacaccagcgagctccagacaagaggacgtaggagtgtcagtgatagctactgaatccggggactgtgaaactactgaatctacaccattgttctggtgttgatctgtaaacctggtaacacagctttctccctccttacagaaactgttccttgctgacacaacttaaccaagattcacacacacgtgctctcattgatgaaacncaaacccagctggccttgcaggtggctcttccctctgacatgtagatctcactaagatacactaattcaaaagcttagcctcacgttaggctgtagaggggcatgcgatgctgctaagctcagagtgtccaagctcaggccacagtgccacctcccaaagtgagcacactgcctttaaaattgtgccaacatcctcaagagtc

SEQ ID NO: 5704 - DNA, 1165 bp, Cricetulus griseus
agtgaagacagtgacaagtgccttgaaacagtatttgaggagtcttccagaacctcttatgacctatgagttacatagagacttcattgttccagccaaaagtggcagcccagagtcccgtgttaatgccatccatttcttggtacacaaactgccagagaaaaataaggagatgttggatatcttggtgaaacacctaaccaatgtgtcaaatcactcgaagcagaatctaatgaccgtggcaaatttaggagtggtgtttggaccaactctgatgcgaccacaggaagaaactgttgccgccatcatggatttgaagtttcagaatattgttgtagaaatattaatcgaaaaccatgagaagatatttcggacctcgccagatactgcattccctgagcccacctgcctgtcagcgtcacctccaaatgctcctccaaggcagtcaaagagacaggggcagcggacgaagaggccggtggccgtgtataatctttgtcttgagctggaagatggtgatagtcccagccctgtcaaggaggacacccccaccagcagtcaggattcattgtccactccatctcccacaacttcagctgcccatggaccttctggaccagacggaaaccaccttgcagcagatggagggcactgtggagactggacagctactacgccaagccagcctcggccacctatggtgcagtggctaaatctacagcctccaaccacagcaagctccaacccagccggtacacctccttcacccaggatggcccatttccccctctctcttgctgcctccattgtagacaagctgcctgaatgtgttatcaatcgcaaggcccgtgcagtgtacccatgtgaggcagaacacagctcggaattgtcctttgaaataggagccatttttgaggatgttcagacctcaagggaacctggctggcttgaaggaaccctgaacggcaagagagggctgattccacagaattatgtcaagctgctgtagcttctggcctggggggctcccgctgatcctggcacccatgcaccagcctggaaatagcacccaaatgctaccatcacgtcacgctcaggaactgcagatctccacgggcactccagagctggggagggaatgaaacttgccaccttggactgtgca

SEQ ID NO: 5705 - DNA, 1165 bp, Cricetulus griseus
gtgatctactgggagcagctactgctaggtcccagcagcagtgaggcaactgtgagcctgcggttgacctcccctgcggggcttcctgaagatggttcatccagagtaaaggccttctctgacatcctggccccgggaaagcagccacgcacggcagcggagccccaaaagccagagatgcagctaacccctgggagagtcttcccaagcatcccagacctccatggggtggaggagggacacggaatgagcggggcttggcacgaacctcagagagaccccagtgttctggagcccccaatatgggatgagctaggcggtgctctccagactggcccaggtcttctctctggggacaaaccttttgaatgcagggcatgcaacaagtgttcgtgaagagctccgacctcctcaagcacctgcgcacccatacaggagaacggccgtacgacgtgcgcccagtgcggcaaggccttcatggtgcgcatcaatgccctcgacaccacacggccgagaagcccttccactgcagcgagtgtggcaaggccttcagccacggctccaacctcagccagcaccgcaagatccacgcgggcgggcggccctacgtctgcgctcagtgtggccgccgcttctgccgcaactcgcatctcatccagcacgagcgcacgcacaccggggagaagccctatgcctgctccctctgcggggcagccttcagtcaaggctcttcgctcttcaagcaccaacgcgtgcacacgggagagaagcctttctcctgcccgcagtgtggccgtgccttcagtccacagctcctaacctcacgcagcatcagctgctgcacacgggcgaacgacccttccgctgcggggactgtggcaaggcctttgccaagggctcagtgctgctcagccaccggcgcatccacaccggtgagaagcccttcgtgtgcacacagtgtggccgcgccttccgcgagcgccctgccctcatacatcaccagaggctccacacgggggagaaggccctgcagaggccccggggtggcatgcactcccaagccaggtctctgggggcatccttggaaggcacacttcccgaaggccaccttaggcccggcagcagtcccaaagctagctgagacctgaggtcaaagctatgccct

SEQ ID NO: 5706 - DNA, 1165 bp, Cricetulus griseus
ctcttcgggcctgcgttcgcgcggaaggtcgttcctctgaccggcaaggagtttggagccgctgccgccatgttatcggtcgctgcccgctcgggcccgttcgcgcccgtcctgtcggccacgtcccgcggggtggcgggcgcgctgcggcccctggtgcaagccgcggtgcccgccaccccggagccgcctgttgtgaacgtgaagcgacccttcctgtcgcgagagtcgctgagtggccaggctgcgacccggcctttggtcgccacggtgggcctcaatgttcctgcttctgttcgttattcccatacagatgtcaaggtgcccgacttctccgactaccgccgcgctgatgttctagatagtacaaagtcttctaaagagagcagtgaggctagaaaaggcttctcttacctgataactgcaactactactgtgggtgttgcatatgctgccaagaatgtggtcacccagtttgtttccagcatgagcgcgtctgctgatgtactggccatgtcgaagattgagatcaagttgtctgatattccagaaggaaagaacatggctttcaaatggagaggcaaacctctgtttgtgcgccacagaacccagaaggagattgcccaggaagctgcagttgaagtgtcccagctgagggatccacagcatgatttagagcgagttaagaaacctgaatgggttattctgataggtgtctgcactcatcttggttgtgtacccattgcaaacgcaggagattttggtggctattattgcccatgccatgggtcacactatgatgcctctggcaggatcaggaggggccctgcgcctctcaacctggaagtgcctacctatgagttcaccagtgatgatgtagttgttgtgggttagacactggactcaggcctaggcttctttccgtcttgtccatcagaagagttgagagtaagccctgtgtacttctagattggttgatttaaaatatttaagaattgtgaataatgtgttggcaaacattaatgtgaagtaatttaattcactcttaaatattgtcaagcattatcgtaataaagccactgttgagcatcattaaatttagtcacagacttgaaaggtgcaatgtcttttatagctaattctaataaaacattacagattgttg

SEQ ID NO: 5707 - DNA, 1165 bp, Cricetulus griseus
acgcagcgaggcaagatggtggcgaccaagaggaagcggcgtgggggcttggaggttcaggcaaagaagccaaaaaagagccggaaagattccgggcagccagttaagcaggcctctgtagaaaaagaggtgaaagaagaagatagagatcgcattccaggtcccgtttgcaagggcaaatggaaaaacaaggagcgaatcctcatcttttcctccagaggaataaatttcagaacaagacacttaatgcaagacttgagaatgttgatgccccattctaaagcagatactaaaatggaccgtaaagataaattatttgtgataaatgaggtctgtgaaatgaaaaactgcaataaatgcatctactttgaagctaagaaaaaacaggatctctatatgtggctttcaaattcacctcatgggccgtctgccaaattcttagttcaaaatattcataccctggctgaactgaagatgactggaaactgcttgaaaggttctcgtccccttttgtcttttgaccctgcttttgatgaattgccacattatgctttgttaaaagaactcttaattcagatctttagtacaccacggtatcatccaaagagtcaaccattcgtggaccatgtgtttacattcaccattctggataacaggatatggtttcggaacttccagattatagaagaagatgctgctctagtggaaataggacctcgatttgtcttaaatcttataaagatttttcagggaagctttggaggaccaactttatatgaaaatcctcattaccagtctccaaacatgcatcggcgtattgtaaggtccatcacagctgcaaaatacagagagaaacagcaagtcaaagatgttcagaaaatgaggaagaaagaaccaaagactattcttccacatgaccccactgcagatgtctttgatataccagcagaggaaaaaccagtagaaatacagtgggtgaaaccagagcctaaagtagatctcacagcaagaaagaggaggatttacaaaaggcatcggaaactgcagcagaagatgaacagagggagtgcaaaatgaaccagtggataactctttttagatgatatatatatatatatatatatatatatatatatatatattatcacacacacacacccatata

SEQ ID NO: 5708 - DNA, 1164 bp, Cricetulus griseus
tgaaggcttttattgatcagctcttcactggggtttatgattttgagtttgaagatttgcaggtagcttggagggagagcctgttgaaaccagccactgaaataaacgaacccacaactcatcaactagaagaaatccagaatgaaatagaaacatacttgagaagcctacccgctctgaaaggggccttaactattatcagatctcctttgatcccagatctcttcatacatggatttactacacgaacaggtggcatatcttacataccaactcttagctcactcaatcttttcagtagttccaaacggagagatcccaaagtagttgtccaagaaaatcttcgaaggttggcaaacgctgcaggattcaatgcagagaaattttaccgaataaagactgatcacgccaatgacgtgtgggtgatggggaagaaggagcctgaatcttacgatggaatagtcacaaaccagagaggagtcaccatcacagctctcggtgctgactgtatacctatagtctttgcagatcccgtgaaaacagcatgtggggttgcccactctggctggaaaggtactttgttgggtgtagctatggctactgtgaatgctatgatagcagaatatggctgtaatttggaagacatcattgttgttctgggaccttccgtggggccttgctgttttactcttcccagagaatcggcaacctcatttcataatcttcatccttcatgtgtgcggcagttggactcactgaatccctatgttgacatccggaaagccactaggattcttctagaacgaggaggaattcttccacagaatattcaagaccagaagggagatcttgacctctgcacatcctgccatcctgataagtttttctcccatgttcgagatggccttaacttcggtacacagattggcttcatatccattagagaatgaggttcttgactggaagtttgcatcgctgttttgtgcatccttccacactgcttgcaaaagaaagttttagctttttgattcgtataaaaccaagaagattacaaaaagaaaattcatctttagggtatactttcactactacccacagccaaatgatcttggtttaattcttagggcaactgacaaaagaatcaatatgatgctattcctcaag

SEQ ID NO: 5709 - DNA, 1164 bp, Cricetulus griseus
ggcggcgtcggcggcgctgctctcgcgcttgcggagcgggctccgggtcggcgcgcggggactgtgcacgcggctagcgccgccgcctcctccccgcgccccagagcaggttgctgagatcgccagtcgtggaggctccaaggcccaggggccgcagcatcagccaggctcagaaggtcccagctatgccaaaaaagttgcactctggcttgctggtttgcttggggccagtgggactgtcagcatcgtctatatctttggaaacaactcggtggatgaaaatggcaccaagatccctgatgaattcgacaatgatccaattttggttcagcagttacggcggacgtacaaatatttcaaagattacaggcagatgatcatcgagcccaccagcccctgccttctcccagaccctcttcgggagccctactatcagccaccctatacgctggtcctggagctaaccggggtcctcctacatccggagtggtcgctggccaccggctggaggtttaagaagcgtccaggcatcgagaccttgttccagcagctcgcccctctgtatgaaattgtaatcttcacatcagagactggcatgactgcatttccactcattgatagcgtggatccccatggcttcatctcttaccgtctgttccgggacgccaccagatacatggagggacaccatgtgaaggacatttcatgtctgaatcgggacccagcccgagtagtggtcgtggactgcaagaaggaagctttccggctacagccctacaacggtgtcgccctgcggccctgggacggcaactccgatgaccgggtcttgctggacctgtctgccttcctcaagaccattgcagtgaaccaagtggaggacgtccggactgtgctggagcactatgccctagaggatgacccattggaagcattcaaacaacggcagagtcggcttgagcaggaggagcagcagcgcctggccgagctctccaagtgcaacaagcagagcctcttctttggctcgctcaccagccgcctgtggcctcgctccaagcagccctgactgctaggcttcctctgacgtggtgtctgggccccaggccccagtcctcacagagcaaggcttggaccgccacgtgtccaataaagcgcatcccagatgcc

SEQ ID NO: 5710 - DNA, 1164 bp, Cricetulus griseus
  modified_base (378)..(378): a, c, t, g, unknown or other
ctctagtaaaattggaaaggctttatctgtctaagaagcaactgaaggaactgcctgaaaaaatgcccaaaaacccttcaggagctccgtgcccatgagaatgagatcagcaaagtgcggaaaaccgtgttcaatggactgaaccagatgattgtcatagaactgggcaccaacccactgaagagttctggcattgaaagcggagccttccagggaatgaagagactttcatacatccgaattgcagacaccaacatcactgctattcctcaaggtctccctccttctctcactgaattgcatctggatggaaacaaaatcaccaaagttgatgcatccagcctgaaaggactgactaatttggctaagttggggttnagtttcaacagtatctctgccatagacaatggtactctggccaacactcctcatctgaggaactcacttggacaacacaaactcatcagagtgcctggtgggctggcggagcataagtacatccaggttgtctaccttcacaacaacaacatctccgcagttgggtcaaatgacttctgcccacctggctacaacaccaaaaaggcttcttattctggagtgagccttttcagcaaccctgtccagtactgggagatccagccatccaccttcagatgtgtctatgtgcgttctgccattcaactaggaaactacaagtaactcccagacagcctcattcttataatctggaagaaaacaacccaaaattccagtctctcaatgtcattactaaaagggggtggaggggagaaagcaagattctggaaattcaagagtattgtggattccttttccacatgacctattatgcatcgagccaaatattcagattgattaactgcctacaataaaaatattttgcctgcaatattcagaatcatttttaaaggttctgtagatgtgaactaagctatcaaaatctgatgtaaccatagaggccagacttttagtaaagctttaaaaggaaccaaatacaaagtattttgtaattcatagagctaaattaactcttttgacctaaggtcaaatgccaaactttagcaatgtattaatctcctttattattggcaatgcctcatttgaatgtgtaaattcaatacaggcttgtaaaattttcactgtcat

SEQ ID NO: 5711 - DNA, 1164 bp, Cricetulus griseus
cctggtctccctgggacctcatgacttcctgcttagtggtgtcctagagctgcagcccatggggtggctttccagcaggatgtgagcttatggctgctctttgtccccccacgagtccgtcgctgccgtgaggtagttgtgaggacacggagtgacaacagttggaatgacctagagacccacctggaggaagaggcacccaagaggctctgggcgcgatgtcaggtgccccacttctcctggttccttgtcgttttacgccccgtatccaacacttgcctgttgccgccagagggagcacttctctgctcctcgggtcatcctgaggtcaaagtcacctttccctctggggccacagaagagccccggcaagtctccatgcaggtagtgcatatggccggtctagagctgagagcgctcttggaagaagcagaggcatcagtgagccccttgctgtagcctctcacagagaccgtccagactgtgtggatggcaggatctgcttgtttctattcacatctgaagaatgtaaaggaggtgtacattaccacaaccttggaccgggaagctcaggctgttcgaggccaggtatccttttataggggctcacttcccatggaggtgcctcaagaagctgaggctgcccgccagaggaagggcacagatgcactgtggatggccaccttgcccatcaagttaccgagacttcgggggccccagggaagtgggcaggggactgacttctccctgatgcctctgaacctgggtgatgcagaaactggtttcctgactcaaagcaacctgctgagtgtggcctcgagactaggtcctgactggccagccgtggccctgaacctaggcatgccctaccgtgtgctacagcgtatccggcatgaattcagggatgacctggatgggcagatccgccacatgctcttctcctgggctgagcgccaggctggacagcctggggctgtgggacacttggtacaggccctggaacagagtgacaggcaggatgtggctgaagaagtgcgagccatcttggagcttggccgccacaagtatcaggacagcatccggcgcacagggctggcccctgaggactctactgtgcctggcacctcggcttcacagaccccagagtctgcccaggcctaagct

SEQ ID NO: 5712 - DNA, 1164 bp, Cricetulus griseus
gatgatattgaaacagatattaacaaattaagaccccagcaagtaccaggacgaacaatagaagaactaaaaatgtatgaacacctctttcctgagcttgttgatgattttcaggactatgaattaatctctaaagaaccaaaaccttttgtgtttgaggggaaagttcgaggccctattgttgtccccacagctggagaggaagcgtctgggaattcaggtagtggaaagaaaggagctgtgactaaggagaaggcatctcctaaaggagaggatgccatggaggatgtcaagggcagtgacaggatgctgccacagcagccaggtggtcagaacagaaccgcgtctttagttcacagcttcaacagcgacattgtgaaggccttagaccgaatcacactgcagaacattccttcacaagtagccccaggcttgggtgcaggaatgaggaaggactatggtctgcctctcactgtcgtctcatgcacgaaagcatgcccacatgtggctacgtgtggaagtactctttttgaagggcggacagtacagcttgggaagctgtgttgtactggagcggaaaccgaagacgatgacgatagtgagtccaactcctccgtagagcaggcctcctctgtggaagcccccgatggaccaacactccacgaccctgatctctacattgagattgtgaaaaaccacaaaagtctgtcccagagtactcggaggtggcttatcctgattattttggtcacgttccacctccattcaaagagcccattctagaaaggccttatggtgtgcaaaaggacaaagattgcccaagatatcgagaggctgatacaccagaatgaacatcatagaccgggtaatgtatgacctagataaccccaactatgtcactccagaagacggagatattttgaagtttaactcaaaatttgaatctgggaatctgcgtaaagtgattcaaattagaagaagcgagtatgacctcattctgaactcggatataaacagtaaccattatcaccagtggttctatttcgaagtcagcgggatgcggcctggcattgcatacaggttcaacatcatcaactgtgagaagtccaacagccagtttaaattaaaaaggttttactaagaaaaaaaaaaaaaaaaaaaaaa

SEQ ID NO: 5713 - DNA, 1164 bp, Cricetulus griseus
ctgtaatggcggctgcgagcgaagccgaggtgcccgcgggcggcgcggaagaccggccttcggcggccgaggagctggcggcgcagaagcgcgagcagagactgcgcaagttccgggagctgcatctgaagcggactgaagctcgtaagttaaatcaccaggaagttgtggaagaagacaaaagacttaagttgcctgcaaactgggaagccaagaaagcgcgtttggagtgggaactgcaggaggaagaaaagaaaaaggagtgtgcagcgagaggggaagactacgagaaagtgaagcttctggagatcagcgcagaggacgctgagagatgggagaggaggaagaagaggaagaaccctgacttggggttttcagattatgctgctgcccagttacgccagtatcaccggctgaccaagcagatcaaacctgacatggaaagttatgaacgacagagagaaaagcatggagaagattttttcccgacatccaacagtcttctccatgggacacatgtgccttcctcacaggaaattgacaggatggttttagatctggaaaagcaaattgaaaagcgagacaaatacagccggagacgaccctacaatgacgatgctgacattgactacatcaatgagaggaatgccaagttcaacaagaaagcagagaggttctacgggaagtacacagcagaaattaaacagaacctggagagaggaacagctgtgtgagccctccctccccacccggtattctgaaataaaagtcttttctcagcttcactcccacatacatatgttcacattttcgtgcttgaatgtaaatgtatttcttgtagtgatgttgttttgtaaaaatctaatttgtataaatcctaattattattttctatgtattgtaaatgtgcataaccgtgtaaccttttaatcacttggggcttagatggttcgtgtgtgcaggtgcagtcgctcctgctttgggtgtcatcaggaagtggacagaagctacagttgggctcggactggccaggtgaggacagagaaacagaggcctcaagacagacgctcctggggttctggcactgtgctggggctggggtcagaggtcatgactgttagccatgcacattccgttttaaagaacaataaaatgctttggaat

SEQ ID NO: 5714 - DNA, 1164 bp, Cricetulus griseus
  modified_base (384)..(384): a, c, t, g, unknown or other
cggcttctcacctcaggctctgttgttgtcctctgacaattgctttctccatgggaattaagacttacaggacttcctccttgtggaatagtttccagtctgccaactccaataggcaagagaacagttctttgcaaagcactctgctcccttcagtgagtgaaaagccggagataatacccagtcttgaatctgagctgcctcttgaagagctggacgacttacctccattgtctcccatgcaaccaatttcagaggaggaggctattcagattgttgcacaccctcttttgcctctatcctccttcacacttggagactacatagatcattccgagactttgcagcgactagtgcagcttggagtggatttgtctaagatanaaagacatgtagatgcagccaacctccttctaagactggattttgaaaaagacattaagcaaatactcctatttcttaaagacttgggtttagaagataaccaactgggaccattcctgacaaaaaattatagtatcttttctgaagaccttgaaaatcttaagacaagagtagcctatctacaatcaaaaaatttcactaaggcagatatcgcacggatggtgagaaatgcaccatttctgttgagcttctctgtggaaaggctggataacagactgggattttttcagaaagaacttgaactgagtgtgaagaagactagagatctggttgttcgccttccaaggctactaacgggaagtctggagcctgtgaaagaaaatatgaaggtttatcgccttgaacttggttttaaacaaaatgaaattcaacatatggtcaccagaattccaaagatgctaactgcaaacaaaaggaaacttacggagacttttgattatatacacaacgtgatgaatatcccccaccacatcattgtcaaattcccacaggtatttaatacaagagtatttaaaattaaagaaagacactcatttcttgcctacttgggaaaagcgcagtatgatccagcaaaaactaactatgtctctttggacaagttcgtatctattcctgatgaagtgttctgcaaagaaattgccaaaacttcaagtagatgattttgagtaaattcttaaaagacgctttagtttttgatgaaagtttaatatattctttaaa

SEQ ID NO: 5715 - DNA, 1164 bp, Cricetulus griseus
ttcagagatgggcagtgagaaggagcagagtccagaagcacacctgcctgaggaaggggaagcagggaagccttggagagtggatggctcagagggttctcagattgcatatggggaggaacatgggcagacaagcctgtcgaaggggcttcaaggaacacaccccaaaacgccatgtcagaaagtcactgcccgagctgggggccctgggaagcccattgccttttcaagcccagaggcggatgagaagccttttatatgtgtgcagtgtggcaaaaccttcaacaatacctccaacctcagaacacaccagcggatccacactggtgagaagccatacaagtgttcagagtgtggcaagagcttttctcgaagctccaaccgcatccggcacgagaggatccacctggaagagaaacactaccaatgtgccaagtgtcaggagagtttccggcggcgctcagacctcactacacaccagcaagatcacctgggacagcggccataccgctgtgacatttgtggcaagagcttcagccagagtgccacgctggctgtccatcatcgaacccacctggaaccagcgccttacatctgctgtgagtgtgggaagagcttcagcaatagctccagctttggggtgcaccaccgtacccacacgggtgagaggccttatgagtgcaccgagtgtgggcggactttcagtgatatctccaattttggtgcacaccagagaacacacagaggggagaagccatatcggtgcactctgtgtgggaaacacttctcccgaagttcgaacctcatccgacaccagaaaacacacttgggtgagcaggatgagaaagattctagctaaaggggaaccctgcttagagagtgagggagagcatatagtccaccttgacagaaggaggcatttagcacctgctgcagccaccttgactgcaaacccttcactttgtagaatggtcccttgttgcctttgaaatcaggaaatcctgcacacacacacacacacacacacacacacacacacacacaggaagcctcagggatccataatccagggaccctcacattccccatgtttgttacctgtcttcctaccccaacttgcatctgtctcctcaatgatcaccagtaaaacacttcaatgagaaa

SEQ ID NO: 5716 - DNA, 1164 bp, Cricetulus griseus
gcggctcctacttaaacggaaggggccgggagaggccgcgttcagtcggatcccggcagcagctgcggcggctcagctcttctgtcgctctccctgtctccctttcgcttccggaaacatggcctctggtgtggctgtctctgatggtgtcatcaaagtgttcaatgatatgaaggtgcgcaagtcttcaacgccagaagaagtgaagaagcgcaagaaggcagtgctcttctgcctgagtgaggacaagaagaacatcatcctggaggagggcaaggagatcctggtgggagatgtggggcagactgtggacgacccctacaccacttttgtcaagatgctgcccgacaaggactgccgctatgctctctacgacgcaacctatgagaccaaggagagcaagaaggaggacctggtgttcatcttctgggcccctgagagtgcaccccttaagagcaaaatgatctatgccagctccaaggatgccatcaagaagaagctgacaggaatcaagcacgaattacaagcaaactgctacgaggaggtcaaggaccgctgcaccctggcagaaaaactaggtggcagcgccgtcatctctctggagggcaagcctttgtgagccgcctccagccccctgcctggagcatctagcagccccagacctgctcatgggtgttgcaggctgccccttttcctgccagaccggaggggctggggggatcccagcagggggagggtaatcccttcaccccagttgccaaatgtcctccccaccccctggaccgtcctcttccctccaccctgacggttctggccatcccaaactgcttctgatcctctgattcctcttgggttgaagcggaccaagtcccttcccaggcacccagtttggggggagcctgttttttttttttttttaacacccctactcctcatccccgccccatcccatgctgccaacttctaaccacaatagtgactgtgcttgtctgtttagttctgtgtgtaaatgaaatgtggaaatgaccctccctgcgccagctggttgccctcccctttcccttgtttttggccactcatggaagcaggaccagtaagggaccttcaatttaaaaaaaacaaaacaaaaccaataaaaaggctaattaacaaaaaaaaaaaaaa

SEQ ID NO: 5717 - DNA, 1164 bp, Cricetulus griseus
tttgacactgtccaagtgtacatccaatcacccaagcctgagttacagacaagcttatcactgtcacagccatggagaagaagctgattggcctgcccccgtgtgcattgaacacaagaagtacagccgcaatgccctcctcttcaacttgggctttgtgtgtgatgctcaggccaagacttgtgcccttgaacccatcgttaaaaagctggccggctacttgaccacactagagcttgaaagcagctttgtgtccacagaggagagcaagcagaagttggtgcccatcatgaccatcttactggaagagctaaatgcctctggacggtgcactcttcccatcgatgaatccaacaccatccacttgaaggtgattgagcagcggcctgaccctcctgtggctcaggaatatgacgtgcctgtctttaccaaggacaaggaggatttcttcaactctcagtgggaccttaccacacagcagatcctcccctatattgatggaatccgccatgtccagaagatctctgctgaggcagacgtggagctcaacctggtgcgcattgccattcagaacctgctgtactacggtgttgtgacactggtatccatcctccagtactccaatgtgtactgcccaacgccaaaagtccaggacctggtagatgacaagtccctgcaggaggcatgtctgtcctacgtcaccaagcaaggacacaaaagggccagtctccgagatgtcttccagctgtattgcagcctgagccctggcaccactgtgcgggacctcatcggacgccacccccagcagttacaacatgttgatgaaaggaagctaatccagtttgggctgatgaagaacctcatccggagactacagaagtatccagtccgagtgtctcgggaggaacggagccaccctgcccggctttacacgggctgccacagctatgatgagatctgctgcaagacaggcatgagctaccatgaactggatgagcgactagaaaatgaccccaacatcatcatttgctggaagtgagtctggctggctggaacatatcactatggttacttacccctactaagccctcattagcccatggggtctagacaagtaggctagtacatatggcctggagtgatccttggttttgtaaataaagt

SEQ ID NO: 5718 - DNA, 1163 bp, Cricetulus griseus
  modified_base (1133)..(1133): a, c, t, g, unknown or other
  modified_base (1153)..(1153): a, c, t, g, unknown or other
tcaacacagagtcgcagggctgcaaccacgaggaagatgctggtgtgagatgcaacattcccatcatgggctcccagaaaaagctgcgtctgaatggaggccgcaacccctatgaggggccgagtagaggtactaacagagagaaatgggtcccttgtgtggggcactgtatgtggccagccccaccacaggctaccggcgccttctccgcttctcctcccagattcacaacaatggccagtctgacttccgccccaagaatggccgccatgcatggatctggcatgactgccacaggcactaccacagcatggaagtattcacttactatgacctgctgagcctcaacggcaccaaggtggctgaaggccacaaggccagcttctgcttggaggacacagagtgtgagggagacattcagaagagttatgagtgtgccaactttggagaacaaggcatcaccatgggctgctgggacatgtaccgtcatgacattgactgccagtggatagacatcaccgatgtgccccctggagactacctgttccaggttgtcattaaccccaactacgaggtgccagaatcagatttctctaacaacatcatgaagtgcaggagccgctatgatggctaccggcagctggtcacattgtatccacagtcaggaagccaattggtgaatgctggtgctccatttgctttcctctttgtattccgcctacagcccggccccaggaatggtgctactagtgttagggtgggctgtccctcttctaattaaacctcttctggaagcaccctcagagacccacccagaggtgtgttttcaggatgtttctaaatcccatcaaggtgacaatcaaggttacctatcacaacctcttccagctacactaacttctatattctatgcaattatagccacaatttaaagtacaatagcaagacatacattccaagactccaaggggatgactgaagatttggatgattctagagacagaataggaagagaaaatcatggggaacatgggaagggcccttcacctcagagtctggttgaagctcttgccagctgggaatgctgacacagagcacactgtgaatggtgctaatatagagacagttataanaaataaattaaacttaaaanaaaaaaaaag

SEQ ID NO: 5719 - DNA, 1163 bp, Cricetulus griseus
aaggatctggcagaatttcgactctgcgagatggtgtggggtgagagacagcgcccacgagaagctctacagcctcctctctgaccccatccctgaggtccgatgtgcagctgtgtttgcccttggcaccttttgtgggaaactctgctgagagaacagaccactctaccaccatcgaccacaatgtggccatgatgctggcccagctgatcaatgatgggagccccatggtccggaaggagttggtggtggccctgagtcacctcgtagtacaatatgagagcaatttctgcactgtggccctgcagttcatggaagaggaaaagaactaccccttgccttctcccgcagccacagagggagggagcctaacccctgtgcgagacagcccatgcacccccagactccgctcagtgagctcctatgggaacatccgagctgtcaccacagctaggaacctctgatcgcctgtggctccatgaaccagttcacagccgtctacagtggcagcggggagctgatcagcagcatcaaatactacgacggcttcatgggccagagggtcgggggccatcagctgcctggctttccacccgcactggcctcacctggcagtcggaagcaatgactactacatctctgtgtattctgtggagaagcgcgtcagatagcggcacccaggactccctgccgggctgcagccaccctctgctgtacatagtgaaccaaattgcactgcttgggttgcggtgcccacctacctacccaccctgcaaccctcggctcctgacgtggccatggccaactaaggaggggcttgcacgtccttctgtctgtcttcactgtaatgtacaagtccagagcaggggagggtttgacgctgcatccacatcaagaaccagcacccaggcaccaaggacctccagctctatccctgtctaactggtggttctgttttggcagcacagggccgtctgaagggttggggccgcctcccttccctagtggaacttcagagcttgcatcttgctcacgggctgggccttcacaaatctgatgcgaaaattcaatcatgaaagtaaccaaggctcaagagagcgctggcctcgagttcattgtctctatttattttaccacaatgagaattgaaaaggacaagacag

SEQ ID NO: 5720 - DNA, 1163 bp, Cricetulus griseus
gaatatgccctgctggattttactttacaagcttcaacaaacccagaagtcatcaagataaattcagttctggatatagttgccaaagtggaagagtattatctcaagggctatgttgttggggccattcacccagttatacaacctgtgcgacatcgaaaacacctcccagcaagtcacctatatagagtggtgctgtctcggttaaaagtaagccccaagcattcagcagtaccagttggacaaaggcatgcaagacttgtgatggaggagtgtcctctaacttacgagacacaaacaaacgacgcagcaaaagaacagacagaaggaaacagcagccccagctactctaaaccagatcggggaggtaggatcacaagctgtacatggtcttcaatgcttttggtgaagattcagcctgctggacctatcaggaaggtatcctgtccatgaaagtgacaaggaaaggagctgtcatcaacacacttgacgccaactggctagaattaactacattttattataagcaaggcttgtctttagttgactcttttgtatgctgggagacacctaaaggagaccatttgcctaaatctctggaaggattttttatttatgaagaagaaggatctggagttccaggttctagcaggaaaggtaatgacgccattgtggtggagcagtggactgtcattgagggctgtgaaatcaaaacagactacggccctctgctgcacactctggctgaatttggatggcttctcacaagcgtgctgcccacacccattttgagacacgacagtgaaggcaatttggctacaaagcaggtcgtatttctccaaaggccaattgtgtggagttcagctgcccagacgccagaaaggaaaccagccggctgctgaagggtgaggacagaaacaaggtcggcagcaggagcatcggcctggacaccagcgcatcccaacctgcacaaggccgagggcctcttgaggagggccccctctgtccctccagagaatgttggaccaaggaggagcggccagcacagagtgacagcttctggggtcagcagcagccacagtgccctccgggaactggatgacggacagtttgaccaggaagagggtgtgacacaggtcacttgcatgtgagctgccaagtga

SEQ ID NO: 5721 - DNA, 1163 bp, Cricetulus griseus
ggatgttgctgctgcggtcgctgcgcttcttcccggtcttgtgcaccggccgctcggccgggtctgccctgctgcagccgtcccagccatggcacacgcttcacgcgggccccacgctatcatcgtctgcctccagcaaggagctccttatgaagctgcggcggaaaacgggctactcctttgtcaactgcaagaaagctctggaggcttgtgacggtgatctcaaacaggcagaggcctggctgcacaagcaggcccagaaggaaggctggagcaaagcggctaagcttcaagggaggaagactaaagaaggcttgattgggctgctgcaggagggaaacacaacagtattagtagaagtaaactgtgagacagattttgtctctagaaatttaaaatttcagcagttggtccagcaagttgccctgggaaccatgtcccactgtcagagcctaaacgatcaactctccacatatactaaaggcttcctgaactcctctgagctttccgaacttgcagctgggcccaacagagaaggctctctcaaggatcagctggccttagcgattgggaagctgggagagaacatgattcttaggcgggctgcctgggtgatggtgccatctgggttctatgtcggctcttacgtgcacggagtgacgcagagcccctcgctgcacaacctggttctggggaagtacggggccctggtcgtctgccagacctgtgagcagagtgcaaacctgaaggacgtgggccgccgcttggggcagcatgtggtgggcatggccccgctctctgttggctccctggatgatgagcctggaggagagactgaaaccagaatgctgtcacagccgtacctgctggacccttccatcaccctgggacagtatgtgcagccccagggtgtgtctgtagtcgatttcgtgcgctttgagtgtggggaagtcgaagaggaagaggcagtggaagccaaataggtttttggcccaggtgggactatttaatttttagatctggatttccttataaaaagttgttttctaaacctcttcaacccttgaatcttgtttttcttttctttttagtttataatgaagtcatatactggtgggtaaagttgttaaatagttatgtaataaagtagagtttttctcatt

SEQ ID NO: 5722 - DNA, 1163 bp, Cricetulus griseus
tccgtggtagctcgccatggcgatgggcagcggcggtgcggtctcggaacaggaggattcggtgctgttccggcgtggcacaggccagagtgatgattctgacatctgggatgatacagcattgatcaaagcttacgataaagccgtggcttcctttaagcatgctctaaagaatggtgacatttgtgaaacttcagataagccaaaaggcacagctagaagaaaacctgctaagaagaataaaaaccaaaagaagaatgccacaactcccttgaaacagtggaaagttggtgacaaatgttctgccgtttggtcagaagacggctgcatttacccagctaccattacttccattgattttaaaaaagaaacctgtgttgtggtttataccggatatggaaacagagaggagcaaaacctatctgatctgctttccccaacctgtgaagtagctaataatatagaacagaacactcaggagaatgaaagtcaggcttcaacagacgacagtgagaactcctccagatctctcagaagtaaaccacacggcaagtccaaagctgctccatggaactcatttcttcctcccccacccccaatgccagggtcaggattgggaccaggaaagccaggtctcagattcaatggcccaccaccaccaccacctccacctccccccttcttgccatgttggatgcctccgttcccttcaggaccaccaataattcctccacctcctcccatatccccagattgtctggatgacactgatgccctcggaagtatgttgatctcttggtacatgagtggctatcatacaggctattacatgggtttcagacaaaataaaaaagaaggaaagtgctcacatacaaattaagcaggtcagatttctcccaaggagatggtgtgttggtgtccctggtcaatatgaacagaagtctcaccgtcaacttatggactcttggctgagtggggtcatcatcagtgtttcccgtgctggggtccatgcctaactcaccagtggggtgtgtttagagcatgatcactgtgagggaccaaacggtgaaaatgtgtgtgcatggaaatcattctgccaaaactgtggctgagcacagctgtagaattgtaactttctaagtatgttgagatttttattaatg

SEQ ID NO: 5723 - DNA, 1163 bp, Cricetulus griseus
  modified_base (182)..(182): a, c, t, g, unknown or other
aaacacctcagcgaggggtgaaggaatttggcctgctggtggatgacttgctggtgtacaatggcattcttgccatggtgagccacctggttgggggcatcctacccacatgtgagcctaccgtgccccaccacaccatcctctttgccggggacactgacttctgtcaccaggagaaacancaccatcagtaagccagaggaagaccaggacatacagatgatgaatgaaaaccaggtcatcaccacctcaaggaaaaagccaggcactgctgacccagcctttacgtcccaaaacctgcatacgcgaaaaggagacctcaaggcgttggcgatgctgactggaacaagagggagagccttttccaggctggccaggctctattaccagacctgaatagtactgcgttcctcatacttcagggttggccagctgggaccccaagggctggaagagtgtggagggacaagggatttttaatcacagccttgggagctatagaggtcagatgaaagggtcagaacagggtagttgcccctgccatactgggctgctgttgggagccagggatacttggttcttctctgtgcctctcctatgaggtccataagcgcagggcctgtggcaccccagtccccacggccacgcccctgacccagtcctggaactcagtacatgatcctggggcccatgcccctcactgcacagccctgctcactaagggcaacagagatgctggaaggccactgcttctccctgcagcccaaagccccatgcctagtgtgtacatctatagaacaagctcagatcagggacctaatcattctcccagtagtgggtaatttctggttccaaatattaatctgttgttttcctggctcggggcccagcggggccggtgccttggtaccaaactcagtacattctgatgctcccaagaatcacaaaggcttcaagcggcaacacccagcagctgtacagatgctttaattcaaaaccagctgatgtgcagataggattgcctctctgatgagaatccatcatctctgtagcctccaggggcccccccagctcctccactcactcccagatgagcctcacaccctcccaggagggccatcaaaccagctgttaggaggaagccaagactactgctttaacag

SEQ ID NO: 5724 - DNA, 1162 bp, Cricetulus griseus
aatcatgtgccattaaaacaacaaggaagctttcagtgttgtaggaagtgtcctgtattttactaatttttgccttgataaattggggcaaccgctactaaatgaaaaccctcagcttacggaaggatgggaaatacccaagtaccagcaagtcttcagccacattgtttctctagaagggcaagaaatgcaagtaaaggcaaaaaggccaaagcctcactgtttcaattgtgggtctgaagagcatcagatgaaggagtgcccaatgccacggaatgctgctcgaataagtgaaaagagaaaagatgtgacggacaagagtctccccccgttcatctaccgaatgcgccagctgggctaccctccaggctggctcaaggccagttacctcacttctaatatccagtcgccaagcatgaagtgtggcagcaagcggtcttcgtctcagtccagccctaatagtccaaagaagcagaggaaggaaggcggctcagcagctcccctgctgacatggagcttgactcagatgtggagcttccacctggttctcagagcagcaagcttttcagtttcaaccaccattcgcctcctggcacacctcctccgctgccacagggaacacctccacctgtcttcactcctccactccctaagggcaccccaccgctgactcccagtgactcaccccagccccgacccacagctgcagccatggatgaggatgccctgacactggaggaacttgaagagcagcagagacagatctgggcagctctccagcaggccgagggaggcaacagtgactctgatgttcctgtagacacacctttaactgggaattcagtcgcctcctccccttatccaaatgaatttgacctctctgtcccagaaggaaagcccctggaaaagccagtactgtctgagccccaggggccaaccacttctgcagagacagctgcacctgagcctccctccagcctagcagcaggggcagcaatgctctgtcagaaagaggaggaagacactgcagcgggggaccctgaagatgctcttcttgacaatgatagtgtgtctgactgtgacatgaggaatggaggcagccagaagctccttcatctggacacccggccttcaacagcctcaaaaatccacagcccggtac

SEQ ID NO: 5725 - DNA, 1162 bp, Cricetulus griseus
ccgcggagccgggtctgcaggccagcgggcggctcgcgccatagaggaggttgcttctcactagggatggtggagttggatggagactccttcaatcctcctccaggatgaaccaccagccagaagacatggaaaatactctgactgggagccagagttcacatgcttctctacgtgacatccatcccatcaaccctgcacagctcatggccaggattgaatcctatgaaggaagggaaaagaaaggcatatcggatgtcaggaggactttctgtctgtttgttacctttgacctcttatttgtaacattactatggataatagagttaaatgtgaatggaggcatcgagaacacactgaagagggaagtgattcattatgactactactcctcttactttgatatatttcttttggcagtgtttcgatttaaagtgctgatacttggatatgctgtatgcagactgcgccattggtgggcaatagcgttgacgacagcagtaaccagtgccttttattagcaaaagtgatcctctcaaagcttttctctcaaggggcatttggctatgtgttgcccatcatttccttcatcctcgcctggatcgagacgtggttcctggatttcaaagtgttgcctcaagaggcagaagaagaaaacagactcctgctagttcaggatgcttcagagagggcggttctcatccctgcaggactttctgatggtcagttttactcccctcctgagtctgaagcaggatctgaagaagaagctgaggaaaaacaggacagcgagaaaccgcttttagaactatgagttctactctatgaatgtgaagaaccctcactgcaagtaatccaaggaagacagtgaaatggtggatctgctcatcgctggtcactgacgagctaatgggatttatttatggtgatacctcatggacattgctccacctccactcacatccaccctgcctgtggccatcgggtcatgctgtgctccttcctctgttcctgtgagtctcagtctggcctgataacgataactcagtcttagtgctgcatccgaatcaaaagttacatttcacttgtgttttaaactcatgcacatgtgctctttatacaattttaaaataataaatccagcacatacaaaaaaaaaaaa

SEQ ID NO: 5726 - DNA, 1162 bp, Cricetulus griseus
  modified_base (1157)..(1157): a, c, t, g, unknown or other
ccgcccgccgcccgcctgttcttcgcggtcgcaaacgttgtgcgccctgcgcgatgggtgccaacgaggaccaggagatggaactagaagctttacgttctatttatgaaggagatgaaagcttccgggaattaagtccagtttcatttcaatacaggataggtgaagatggtgatcccaaagccttcctaatagagatttcctggacagagacatatccccagacgcctcctgtcatatctatgaacgctttttttaacaacaccatctcctcagctgtgaaacagagtatcttagccaaactacaggaagcagtagaagtgaaccttggcaccgccatgacctacacattgttcgagtatgctaaggacaacaaagagcagttcatggagaaccaccatcccgggaattctacgccaacgccggtagccaacatcatctctgttgaaactcccagcacagccccctcaagtaagaaaaaagacaagaaagagcaactttccaaagctcagaaacgcaagctggcagataaaacagatcacaaaggagaactccctcgaggctggaactgggttgatgtcgtgaagcatttaagcaaaactggctctaaagatgatgaatagctctgcagatgaagtgagagtatctttgaaaagcagcccagatcaacatgtcttcttactttttctggttactgggtggtctttttacaagtacataattcttttgtcttttattttcaaggttctgtttgtgtaggttttattgtcatcttgatttgttttgtttcttttaaagaaatgtcttataatgggaaaaaaagtgttttgttgtgttttaaagacaataactttgaccagtgtcaaagttattgtggttcttagattgcaaagactaatgctagttaaatgccaatgaactctttttattctttttctatgaattgtacaaatctcgggggcagatggtggcagctgtgcctctgttaccctctgtgaacacttgaacactttcatcaagattgccaacgtctgataatgctcccagtatattttctcagagtctatttacttaaaattatatggaatgacatgactgataagcaataaagtctgaatcatagtggtttctttacttaactaaaaaaaaaaaaaaanaaaaa

SEQ ID NO: 5727 - DNA, 1162 bp, Cricetulus griseus
ggagggaaccctatgggttgtttcctgcgtgatatcctaacagtgttgctgccgctgcggtcacttctccaaacccagcgtcgcatgctcggttcagagtcccgtttcgccccctaaaaggcctcgcagcaacctcatggcaccgccgcgaatcgggacgcacaacggcaccttccactgcgatgaggctctggcctgcgcgttgctccgcctcctgccagagtacaaggatgcagagattgtgcggactcgggaccccgaaaaactggcttcttgtgacatcgtggtggatgtgggtggcgagtacaaccctctgagacaccgttacgatcatcaccagaggacttttacagaaactatgagttccctgtgccctgggaagccatggcagaccaagttgagcagtgcgggacttgtctatctgcattttgggcataagctactggcccagttgctgggcactagtgaagaggacagcattgtggataccctctatgacaagatgtacgagaactttgtggaagaggtagatgccgtggacaatgggatttctcagtgggaagaaggggagcctcgatatgcactgaccactacactgagtgcccgggtttctcgacttaatcccacctggaaccaacccaaccaagatactgaggcagggttcaggcgtgcgatggacttggtgcaagaagagtttttacagagactaaatttctaccagcacagctggctgccagcccgcgccttggtagaagaggctctggcccagcgattccaggtggactcaagtggaaagatagtggaacttgcaaaaggtgggtgtccttggaaggagcatctttaccacctagaatctgagctgtcccccccagtggccatcacctttgttatctacactgaccaggctggacagtggcgagtccaatgtgtacccaaggagcctcactcattccaaagtcggctgcccctgccagagccatggcggggacttcgggatgaggccctggaccaagtcagtgggatacctggctgcatctttgtccatgccagtggcttcattggtgggcaccgcactcgagaaggtgccctgaacatggcccgtgccactcttgcccagcacccagcacccacaccccttgcaaatgctgtagtcaaataaaac

SEQ ID NO: 5728 - DNA, 1161 bp, Cricetulus griseus
tcctgcgcttcgaactctgacttggatgacgagggagtgcgcggcacctgcgaagatgcttctctttgcaagaggtttgcggtaagcattggctactggcatgatccgtacattgagcatcttgtgaggcagtctaaagagagaaaggctcctgaaattaacagaggatattttgctcgagttcatggtgtcagtcagcttattaaagcttttctccagaagacagaatgtcattgtcaaattctcaaccttggagctgggatggacaccaccttctggaagttaaaggatgaaggtcttctcccaagtaaatattttgaagtcgacttcccaatgatagtcacgagaaagctgcacaccatcaaaaacaagccgcttctgttcagacccatcatggagttacacccagaggacaccctgcagatagatggacagatgctggattcaaagagatatgccatcattggagcagatctccgagacctttctgaactggaagagaaactaaagaaatgtaacatgaatacacaattgccaacactcctgataactgaatgtgtgctggtttacatgactccagagcagtcagccagcctcctaaagtgggcagccagcagttttgagacagccatgtttataaactacgagcaggtgaacatggatgaccggtttgggcagatcatgattgaaaacctccggaggcgacagtgtgacctcgcaggagtggaaacctgcaagtcactagagtctcagaaggaacggctgctattgaatgggtgggagacggcatccgcggtgaacatgatggagctgtacagtgggcttcctcgggcagaggtgaacagaatagaatccctcgagttcctggatgaactggagcttctagagcagctcatgcgccattactgcctgtgctgggccacccgtggaggccaggagctcggtttgaaggagataacctattaatctgttgaaggttcgtgctgaggtggaagctgagtttagccgagggagtgccctgggccccctgagggatgggtagcctcatctctactgttggccttattgcacatccagaagaactcttggttacaaaggtggtcacaccaggtcctgttcctgtcacttatcattgtttaaataaatctcacttgccatttg
